United States Patent Application Publication US 2026/0103690 A1 - sequence listing, part 3

SEQ ID NO: 3379 - DNA, 1169 bp, unidentified
  source 1..1169: mol_type = unassigned DNA; note = element_4f195a6
  misc_feature 1..2: note = core
  misc_feature 3..203: note = LE
  misc_feature 204..1166: note = CDS
  misc_feature 1167..1169: note = RE
  misc_feature 3..179: note = bridgeRNA
cttgtatgtttagacttgaaggggtgggcgggactaaaagctcgattccgactctagccagtacggaccgtgggagacttctcgtcccgccctttctacccaaagcgccaataaggaattcatcggtaaaccgacgatagagacaagccagcgcaaaggtagacccccgacaagcacctaaaccctagctccgaggattcgtcatgacaatccttacctcgcagacggttgttggtatcgatatagccaaggccgaaattgttgtttatcgctctgatctgcaagccatcgacactatcaagaatgatcgaacagcgctcaagcgctggctaaaaacgttgcccacccaaagcgctcttgccgttgaagccaccaatatctatcacctggataccgtcgagctggctcacgcgatgggtcatcaggtctatgtcgtggatgcttaccgggtgagcaactatcgtcgcggcatcggccaaagagctaagaacgatccttgtgatgcccgtcttctggcgcggtatttgaccaatgaacagcacgagctgcggctctggaacccgccaccgaaggcttacacgacattaaaaagcctgcttcatcggcgcgcgacgctggtcaagaatcacgccggtcttatgttgagctgggccgacgaacccttgttaaaaaaagcgctgattgctcagcaaaaagcgttcaaagaggcgattcaggccatccagaagttgctacaaaaagttagcaaagagtcgggaattgaggcgaatatcgaccgctgcaaagccatcgaaggcgttggtgaactggtcgcaactgggttggcgacgagttttatgcgaggtgattttgcggacagtgatgcatttatcgcgtttttagggaaggacctgcgggtcgatgattctggaaaaaagaacggtccccgatacctgagcaaaaagggggatccagaaatacgccgattagctcatatcgctgcaatgacggcatgtcgctcgcctagatggaaaccgttttatgagtcgtacctggtcagaggcttctcaaaaacccaggcattggtggtgcttgctcgcaagctctgccgggtggcatttgccttgatgaaaaatcagagcgaataccagccgaagcctatgttgcagggttgccctgcaacatagaat

SEQ ID NO: 3380 - DNA, 1397 bp, unidentified
  source 1..1397: mol_type = unassigned DNA; note = element_4f1f7b9
  misc_feature 1: note = core
  misc_feature 2..87: note = LE
  misc_feature 88..1113: note = CDS
  misc_feature 1114..1397: note = RE
  misc_feature 1163..1389: note = bridgeRNA
caatgggatggacccctcccacctatcggcatcaatgtgccaaactgatatgatattgccatcagataaacagaagaggagtccgagatgaatattaaacgagtaggtatagatttggcaaaagatgtttttcaaatccatggcgtagatagtcaagaaaaggtcatcgtacgtaaacagttacgaagatcgcaaatgctcgcctattttggaaaaatacagccttgcttaattggcatggaagcctgtggcggtgcacattactgggcaagagagttacaaaagcagggtcatacggtcaagcttatggcgcctcagtttgtaaagccttacgttaaaagcaacaaaaacgatgctaatgatgccgaagctatctgcgaagcggttgcacgacccaccatgcgttttgttgccattaaaacattagctcaacaagacatccaagcaattcatcgtatacgaagtgaattgatccgtcatcgtactgcgaaggtcaatcaaatcagaggtctgttggccgaatatggtcttactgttggtcgacgagtcgacgtactgcgtaacgctttgccattattgcttgaagatgccatcaatggcttaacgctggattttagaatgcttcttgaagacctaaggcaagacctcgtccaattagatcagcgcgttgacgatatggatgcaaaaataaagctgctggccagtagccacagtgaagccaaacgcttattagcaatacctggaattggacctattactgcgacagctttaatctgtgcgataggtgatggcagccaatttaaacgggggcgtgattttgctgcttggttaggtcttacacccaaacaacacagtagcggtggtaaagagcgcttattgggaattagtaagcggggtgatagttatttacgaaccttgctgatacatggcgcacgatccgtactaagagtagctggcaacaaagatgatccgcgcagtcgctggctacaaagtttatgtgccaggcgcaataagaatattgcagcagtggcattggctaataaaaatgcacgaattgtctgggcgctaatcgcccgacaaacagatttcctgccggaggcgaaacctgcttaagctcgaaggcaaagccttcaagcttaagcaggtttatagaaaggaatcgttcattcacgattgtttagcataaatgactaatggaaaacaggtcgaaccggcgtttgcaaaaccagatcattccgatgtgctttgagcacgacatgccgattaggagcgaacgcgcgaatagcccattatggccagagtataaaaactcaattaacaggccgaatatacgtgtgcagtcgtaccccacaatccagaagtgatgaaatgcttgcaaaacgggaggtgtccatata

SEQ ID NO: 3381 - DNA, 1153 bp, unidentified
  source 1..1153: mol_type = unassigned DNA; note = element_4f24618
  misc_feature 1..2: note = core
  misc_feature 3..206: note = LE
  misc_feature 207..1145: note = CDS
  misc_feature 1146..1153: note = RE
  misc_feature 13..212: note = bridgeRNA
cttgtcttatgatttcacacggcttccgtgtaaaatggagccgctggccggccctgtgattatgccagtcagcgacggcggtaggatcgaaaggagcttggtcaataaggaccgttgaatagtcagatcaccgccgtcttttccatgagacctgaacggatacgcgaagctctgacttcgcatgacaagcataggacacggataagatgacagatgataccatcggaatcgacatttcaaaagcaacattggatgcatatcgcctgggtgatggcgctttggctcagttcaacaacaatagggccggttttacgtccttgcaacgctggttgaagaaccagaacatcgcacggcttgtctatgagcccactggcccataccaccgtgcctttgaagtagctatggcagagcgttttccattagttaaagtcaatcctctgcaagcgcgccgttttgcgcaagcgcaaggagttcgcgccaaaacagacaaagtcgatgctcgaatgctggccgttatggggcagacattctcattaaagccacagatagctacgccagatattcagcgtgatctcaaggagttgcacatggctcgacaggctttgattaaggatcgaacccgcgcccttaatcgtcagaaaacactgacattgccaatcttgaagcgccaggcaaaagcacgcattacccagttgaatacccaactttcccaagtaagtgatacgataaaccaaatgttgcaaagtacgcagaaaacggcccgtgctctcgacatcatttgctcaattcctggcttatcaaaggttagcgcagcagcgcttcttattgaaatgcccgagcttgggacattaaaagaaaaacaggttgcaagcctagctggccttgcaccaatgacccgtcagtccggtcgatggagcggcaaagctttcattcaaggtggccgtaaacacctgcgagatgcgctttatatgccagcggttgttgccgcgcggcacaacccagacatgaagcgattttatgacagactcatcaatgctggaaaaccatcgaaagttgcatttacggctatcatgcgcaaactcattctattggcaaacacactgataaagcaggatcgaatgtgggctaaatcaacccttgactaagacggata

SEQ ID NO: 3382 - DNA, 1440 bp, unidentified
  source 1..1440: mol_type = unassigned DNA; note = element_4f24ae3
  misc_feature 1..2: note = core
  misc_feature 3..119: note = LE
  misc_feature 120..1157: note = CDS
  misc_feature 1158..1440: note = RE
  misc_feature 1194..1390: note = bridgeRNA
agatggggtattcggcttcgccccacgtcttgaatgggtgtttgaggtgctgcgcttcgagctgatgataaaacgtggtctgtgtgaacagccacaagcaccaggaaaggaagcccagcatgaagcattatgccggactggacgtctccgtaaaagagacggccgtttgcatcgtggatgaaggaggccgcatttgccgagagatgaaggctgcgagccatccggacgatcttgttgaggcgttgaagaaccccgcctggaatttggcccggatcgggcttgaagctggtcccttatcacaatggttgttcagtggtctggcgggagccggactacctgcaatctgcatcgaaacccgtcatgcgaaggcctttctcaaggcgcaggtcaacaagaccgaccgcaacgatgcgcgtggcatcgcgcagatgatgcgggttaatttgttccggccggtgcacgtcaagacgctgatgagccaggaacgtcgggcgctgttgacagcccgcaagttgctgcaggaaaaggccatcgcaattgagaacgacattcgaggcctgttgcgtaacttcggtctcaaggtgggcattgtcggcgctgccaaatttgcggatcgcatccaggacctttccagcgacctcccggagctacgtgacatcatggaggtgttgctcgccgcccggcagaaacttcgcgagcagttcacggtattgcatgaaaggctgttgtcgatcgtgaagggtgacacggtttgcaggcggttgatgaccgtccctggtgtcggacctgtcgttgcgctggctttcaaggctacaggcgacattcctgcccgcttcaagaattcgaaggccgtagggccggctcttgggttaacgccgcgcttgcatcaatcaggcgaggaccatcgcgtcggacgtgtttccctgtgcggtgacgccatgaagcgaacgctactttatgacgccgcgcaagtcttgctgacggtggtgaaaaagtggtcatggctgaaagcttgggcgatgaacgtcgctaagcgccggggccgacaaagagcgaccgttgcccttgctcgcagattggctgtcatcatgcacagaatatggtccgatggcagtgagttccgctgggcgcgagaggaagcgacggcggtgatatagccgggtccaccaaactaaagggagaagatccgataacgagatccgccaggggcggatgaatgtccttcgcgggacggaggatgaagagaggacgtgccgggactcgtttccaccgggcaacatggtgagaacgctgtttagattgtccccttcactccaactgatcccatgctgggagggccaacgcgccgatcccgaagagaagcaaggcctcgcgaaagacatcaaatgcccgtggtagaggaagcttgaaagcgattgacttcaacacgccgaatagaga

SEQ ID NO: 3383 - DNA, 1376 bp, unidentified
  source 1..1376: mol_type = unassigned DNA; note = element_4f28bc2
  misc_feature 1..3: note = core
  misc_feature 4..86: note = LE
  misc_feature 87..1109: note = CDS
  misc_feature 1110..1376: note = RE
  misc_feature 1113..1363: note = bridgeRNA
tgatgttgtggacggctccacccgacggcatcacaatgtgccatattggtgctgtttaagaccaacagttggaaggagccatccacatgcatattaaaacacttgggattgatttagcaaagtctgtttttcaacttcacggcgttgatgacattggcgagatcgtcttgcaaaagaaacttcgacgcggaaccgtacttagtttcctgtcaaagctggaaccatgcctggttggcatggaagcttgtgcaagcagtcacttctgggcacgcgagatcaccgctcttggccatgaagtacgcttgatctcgccagcttacgtaaagccttatgtcaaacgccataagaatgatgctgcagacgcagaagcaatttgcgaggcggtcacccgtcccaacatgcactttgtatcgatcaagagcgtcgagcagcagagtgttctggttctgcatcgctcgcgcgaccttctggttcgccaacgcacaatgatcatgaatgcaatccgcgctcatattgccgagtttggtgtcattactgcacagggtccacgcaaggtggctgatcttatcaactgccttcgcgacggggatcatcttggtttacctgagcttgcctgtgctgccattgaaggattagcaatccaactagacagtcttgccggacagatccaaggcatcgaacgtcaattgttgttgtggcatcgccaaaaccctgccagccagcgccttgagactattccgggggtcggtattatcaccgcaaccgcgctagctgccagcgttccggatgcttcagtctttaagtccgggagacagtttgcggcctatctgggccttgtgccgagacagaactcgtctggtgggaaagataggcttgggcgcattaccaaaatgggtaatggctatctacggcgattacttgtcgtcggggccacctccgtggtcagacgggcggaaacaacaaacagcaagacgggtgcttgggtgagatcactgcttgaacgcaaacccacccggctggtcaccgtagctatcgccaacaagaccgcccgaaccgcctgggctttattggcaaaagaagaaacttatcatgctgcacctgcagcttaacgtaaaccaggccgcagctgtcaccggctgcagctgaagaatgcaagggcaaaagtgagtgatgatgatcaaacaggaccgcaaccaggacaccccgaggcattgtccgggcttgaaagctcgttaatctgattgggacctggtaggcggacttcatcagggccagcggtgatataaaccgtgcaaataggccggacacatgaccgcaacctgctaagatcgtcgtaagctcaaattaactcttgcaaaactggggccgtccacaca

SEQ ID NO: 3384 - DNA, 1400 bp, unidentified
  source 1..1400: mol_type = unassigned DNA; note = element_4f35dba
  misc_feature 1: note = core
  misc_feature 2..85: note = LE
  misc_feature 86..1123: note = CDS
  misc_feature 1124..1400: note = RE
  misc_feature 1169..1395: note = bridgeRNA
taatggaatggacgccccctgtcctaacggcatcgatgtgccaaagtgaaagtgttaatagcacttaacggaagggagcgtcctcatgaagcttacgactgttggtatcgatttggcaaaaaacgtgtttcaagtacacggagttgacgagcgagggaaaccagtactgaagaagcagctcaaacgtgaccagcttgcccctttctttgcagtattggcgccgtgcttgatcggtatggaggcttgcggaagtgcccatcactgggcaagaaagctgcaagcatttggacatacggtcaagttgatggctccacaatttgttaagccctatgtgaaaacgaacaagaacgacgtagccgatgcagaggccatttgtgaagcggtcgctcgacccaatatgcgcttcgtaccgatcaagacgacagagcaacaagggatattggccatgcatcgggcgcggcagggttttgtgaaggctcgtactgcgcaagctaacgcaattcgtgggctgctcggtgagttcggcattgtcatcgcgcaagggatcgggcatatcgccgagcgtttgccaggcatcctggaagatggcgaaaacggtctgcccggttcattccggcagttgatgcagcgcctgggcgatcatctgaaggagttggaccggcaggtgggtcaacttgaacgggaaattcaacaatggcatcgagggaatgaggccagttgcaagcttgcagaaataccgggtattggaccgatcaccgcaagcgctctggtcgcttcggtaggtgatgcgaagagttttgccaacggtcggcagatggcggcatggttgggattagtaccgcgacagcattcgagcggaggcaagtccacgctgttaggtatcagcaagcgaggcgatagctatttgcgcacattgctggttcatggtgcgcgagcggtggttcgttacgccgaaggtaaaaccgacccctcatcggattggctgaagggtttgttggcgcgtcgcaacacgaatgtggcagtcatcgcgcaggccaacaagaatgcccggattgcctgggcgctgctggcccacgaccgcagattccggtctggttacacccctgctgtcgcaggcgcgtaaccagaccggtggagtcaagcgatgaagcgttagaaaggagtactaccaaggttgcccaggcaatcatgacgtgatggcaagacaggtcggaccgggatcgggtaactctgccctctcacaggcgcttcgagcgcgtggtggtgataagagcccgatcagcgaattccatcagggacagaggcagagcctcacataaagtccggatgtatggctgcaatctcaaccccgtctgtgttgtcacgaattgaaagctcggcaaactgggggcgtccatgta

SEQ ID NO: 3385 - DNA, 1370 bp, unidentified
  source 1..1370: mol_type = unassigned DNA; note = element_4f38058
  misc_feature 1..3: note = core
  misc_feature 4..84: note = LE
  misc_feature 85..1107: note = CDS
  misc_feature 1108..1370: note = RE
  misc_feature 1081..1357: note = bridgeRNA
tgatgggttggatgcccctcccaccggcatcgcactgtgccatgatggtgatgctttacgtcacctacaaaggaggaggcatccatggatgaagttagcattgttggcgttgatctcgcaaagcaggttttccaagttcacggtgcggcacaggacggtcgggtattgtttcgtaagaaactctcgcgtcttcagtttccaaaattcatggcggcactgccaccttgcgtaattgcgatggaggcttgcggcacggcccattattgggggcgcgagttgtcagggttcggccatgacgttcgccttatcccgccggtccatgtaaaggctttcgtcaaacgccagaagaatgatgctgcagatgctgaggctgtcgcagaagctgcgatgcgaccaacgatgaggaccgttgctgtaaaaacatctgaacagcaggcgcgtgccatgcttttccggacacgggatctgctcgttggccagcgaacgcagatggtgaacgctctgcgtggacacttagctgaacatggtatcatagtcggcaaaggtctcgacaaagttgatcgcctcgcggccctgatcacgtcggataacctcccggagctggtgcagagcatgagccgactttatttgagcaagatcgagcagttgcacggcgaaatcgatcagatcgaccgtcatattgctgctgaagcgcggaaaagcgatgtcgttcgcaggctgcaaaaaatgcctggtatcggcccgatctgcgcaatggcaatcacgggcttcgcaccctcgatgcaggaattccgatgtggtcgcgactttgctgcttggctcggtctcgttccgaggcagcactcgagcggaggcaaacagaagctcggtcgcacctcgaagatggggcagcgagacatccggcgactattgatcatcggtgcgatgtccgtcgtgcattggaaagggcgcggtggcggcaaaccgggatcgtggctttcgaacatgctcgcgcgaaagccgcgcatgctggtggctattgcaatggcgaacaaaatggcgcgaacggtctgggccatgctcgcacgcaacgaggattatagagatccgactggatcagtttgctgactgcaactgttcttattcggagtgccggctatgtgaggaggacatgatccgcatgggcaaatgatcgaacagatcgggattgggcaaaccagtagttctcagggagcttttagctcgttccactgatttggagtccagtccgcgtatcaccataccggcccgcggcatgtcatggccgcaatatgaggtctgaaacatgtgcgcacccgatcactcgctccagcggtcaaaaaagtccttgcatcgaaaggggcatccaaaca

SEQ ID NO: 3386 - DNA, 1328 bp, unidentified
  source 1..1328: mol_type = unassigned DNA; note = element_4f4a5c7
  misc_feature 1..2: note = core
  misc_feature 3..252: note = LE
  misc_feature 253..1287: note = CDS
  misc_feature 1288..1328: note = RE
  misc_feature 22..197: note = bridgeRNA
cttgtatgatcaaaattaatattttactaaaagatcaagtaagctttaaccgtttattgggaggccgtcccgaccttaggactggttattaatataatcagagcctgttgcgtagattggcccccgccctattcacccataccgtggagtatccgaggcttagagcctgtatacgcaaggaaggtaggtgcatgtgcagggtcgggaaccagtaaatagtctactttctttatcctttattaacaaaataatatgatgaatatccaacttaaaacaaatgacgtacaagttaattctatccatcaagccggtattgatgttggtgcagaggagctggttatggttattcgtaaaaatggcaaactattcaatccccaaacattcaccaatacacgagctgatcgcgctcgtttagtgatgaaactggttaagctaccaggcgtcatcgtctgtatggaggccacgggcgtttatcatttcgatttagctgtcgctctgcatgatgccggcgtattggttatggtcattaatccaaagtcgtctcataactttgccaaagtattaatgaagaacagcaaaacagatgcagtcgatgctaacacgctggctgaatacgcggcccgcatggacttcgctgcttggactcggcccagcgatgagactattgctgtacgctgtttttctcgccgaattacggccttaaccactcagaaagcggctgcaaagaatcatctgcatgcgctaacagcgactcaagaaacacccaaagcggtcttgcgtgatgcgaaattagcgattactcaattacaaaaacgtatcgatcgcctaacaacagaggcgctacttttgatcggcaaacaccctaagctcgaacgggcactgacgttattaatcagcatcaaaggtattgccgaaaccagtgctatttcgcttatgggtgagttgttattattgccacctgaccttactcatcgagaatgggttaagtttgcaggactagatcccaaagcgtttgattctggaaaaagcgttcataagaagtcacgcatatcgaaagctggcaatcgaaacattcgtgcagccctttatatgccagctttaagcgctaaacaacacgatccacatgtaagggcttatttccaacatctcgtggctaatggaaagaaacccttacaggctgtctgtgccattatgcgaaaattaattcacgcaattcacgggatgttgaaaaatgacgaacctttcgataatacgcgtttctataaaattccggtctcggccgtatagtgaaaaatgaacgtaaatacctttgactttgaacagagtat

SEQ ID NO: 3387 - DNA, 1571 bp, unidentified
  source 1..1571: mol_type = unassigned DNA; note = element_4f4c3ef
  misc_feature 1..3: note = core
  misc_feature 4..245: note = LE
  misc_feature 246..1439: note = CDS
  misc_feature 1440..1571: note = RE
  misc_feature 7..265: note = bridgeRNA
attcgtaatatataagtagaggttttataacctttacttgtttatttataatgaaggtgattggctaacgtaattttcaattgggacaccacgcccgtccacaaatttgttagccaaccttcattgtccagcgttcgattaagcaagttgggatgatcttatcactcccgtttaactcacgaatatgaatggatcttgaagagttggaactaatcaaaactattcaatattaaggaggtactattttgattgctgttggaattgatatttctaaaaacaaaagtacagttgcaatacttaacagtgattgcagcattcgtgctaaaccctttgatatgagtcataatcaaacagagatgaatgcatttgtaaaatatctgaaaaatttaagtgaaccacttatcatcctgatggagtatacaggacattaccactaccccgttctgaaaaaacttcaagacgaaggatttcaagtttgcctcgtcaacccataccaaatgaaaaagttcggagatgttgaaattcataaaaccaaaactgataaaaaggatgctattcgcattgcaactttcgctctagaaaaatcatatatgctaaagccctacagctctctagatcagaaatacgaagacttaaaattcctttccaggcaatacaaccaaagaatatcatatcttacaaaggcaaaagtacagttactaaatctcctagacgaaactatgcctgggattacctcattactaaagctttcaagtcgacatccagagcgatgtgcattacttctcttcattaaacgatatggttcatatgataccattataaaaatgggcaaaagaagctttttatctacttatgcgacacttatgaaaaagaccaaagatcgctatgcacctaaaaaaggcttatccatatttgagcttgctcatgacagtataaccacacgtggtgataatatttataccttatctgctcaggaacaattagtcgatttagtatcagcttctcagaatgctgcggacgaagtaatcactcaaatgcagaatatagctgaaactataccggaatacaaaatcttacgagcaatgtatggtgttggtgatcgtcttggtccggtaatcttggctgaaatcggcgatataagaagattccatagcggtaaagccttgaattcatttgcaggcaatgacgctcctccataccaatctggacagtttgtaagcacaaatcgtcacatatcgaaacgtggtagtccaattttaagaaaagcttgctacgaggttatgcaaactcttaaagcatccaaacctcaaactgatcctatctatctttttatggtcaaaaaggaacaagaaggtaaaccctttaaagtcgccaaaatggcaggtgttaacaagttccttagaatttattatgcccgtgcaatggagctttatcagtagattcattgtaattctatattagattcaaaatctacaaaacagtaggtcttttaaggtcgtccatttttctacaaaatcatatcaacaattcttcagaaactgctactttaggggttgacaaacattagcaag

SEQ ID NO: 3388 - DNA, 1413 bp, unidentified
  source 1..1413: mol_type = unassigned DNA; note = element_4f51f44
  misc_feature 1: note = core
  misc_feature 2..163: note = LE
  misc_feature 164..1102: note = CDS
  misc_feature 1103..1413: note = RE
  misc_feature 1184..1404: note = bridgeRNA
taatgagatggtccgccgcttgattcacctgggttagtaggtggatcgtggtggcagttcctgtgaaggaggatcatcgacatgcagatacattcagttggcatcgaccttggcaagacaacctttcaccttgtagcgctccggcgcagccggcaaggtgcttgtgcggaagaagttcacgcagaagcagttgctggcttacaccgcgaacatgcagacctctctgatcggcctggaggcgtgctccggcgcccctttcctcggccgggcgctgcacaagcaggggcacgatgtccggctgattccagcccagtttgtgaagcccttcgtgaagtcgaacaagaacgacttcatcgacgcggaggcgatcgccgaggccgttgaacgcaagaacatgcgctttgttccgatcaagacggacgatcagctggatttgcaggcgatcgatcgagtgcgggaccggctcatcgcgcggcgtacagcagtgatcaaccagttaagggcgtttctgctcgaacgtggcctggtgtttgcgcagacgccagccaagctcaaggccgccatggcggacatcctcgagaacgcagagtccgacctgacgccgcggatgcgcaacctgatcgatgggttgtggagtgagtggaggcttgttgagcagcagattgaagagctgaacgatgaactggaacggatctctgccgcggatgcgggctgcacgcgcattcgcaagataccaggcataggcccagtcgtggccacggccatcgtcgctgccatcggcaacggtgctgcgttcaacaaggggcgagagttcgcagcctggctcggcatcgtgccccgtcagtactcgaccggtggtaaggcgaagctgtttggcatcagtaaacggggcaacgcgtacctgcgcaagatcctgattcatggcgcgcgagcggcggtactgcatatcaagcgcgaccgagcaccgattggagcgtggctcgatgcactcgacgccagagcgcacaagaacgtcgtcgtagtcgccatggccaacaagctggcccgcatcgcctgggctgtgctctccagcggcaacgagtacagacccgtcgcaacctaacggtgtggaaaaggcgccttcggcttggaagcgctgcgcgctcccactttcccacaccaccaccacgacggcttgaagcttctccaccgaagtctgcacagggtaagtaacgacgaaagaacagtcacaacggcgtgtccgcaacctggtgttacgaatggtcttcaacgaccgacgagttttaaaaggacagacacgcgcgcaactcatcctggccaggagaactactctccgcccaaaggccgaatacatttgcgcagacttgtcttctcgaccaaactttaccttgcagtcgcgcggcggaccataca

SEQ ID NO: 3389 - DNA, 1802 bp, unidentified
  source 1..1802: mol_type = unassigned DNA; note = element_4f5a43d
  misc_feature 1: note = core
  misc_feature 2..357: note = LE
  misc_feature 358..1539: note = CDS
  misc_feature 1540..1802: note = RE
  misc_feature 112..288: note = bridgeRNA
tagtataataatggtgtagtcaatcaagactacttggttaataagtttctgtaaatcagataacaaaaaaagggattcttccttcatcagatgttatccataataattatcatgtctgacggttcctgatagacaccagataaaacataaggtattatctcttaggataggacaaagaatgttcacctccttgggaagtcacttctgtgactgatacctgtaaaaaagtcaattagtccattcgacagggttttatgttttagctggttgggagctgaaggcaatacccgaataacgcgctaggttgtgtacctgccaaattggaaatggattcctatcagaaaggagctattgctcatgtcaaacaaagttatttttaatcttgatgaactattcatctctgttggtattgatgtcggtgctgacttctcatggatgtctatagcacttccaaaccaacaattcgtaggaaaaccttacaaaatcctacatatcagtattgattcccttacaaccgctgtttctaaaataaaagaagcagaagagttgtattctttggaaagtcgcattttcctcgaatccacgggaatttatcattacccactcttctgctatcttcgtgataagggttttaactgctcggttattaatcctatcatcactaagaatagcacaaatattaacatacgaaaagtacataatgatcgttttgattctaaaaaagctgctttggttggtttgaaacctgatttaaaggtttcacttatgccttcagatcttgctctaaactgccgtaatctgtgccgtgaatactacgatttaatggataatcgcagtgcctatgtgaataagcttcaaggtgaattacgcatggcgtttcctcagtatcttggcatcttttccaaggttactatcaacacttctcttacattattggagacttatacctctccatcagcttttcttgaagcagacaagcaagagattattgatatcatcaaatcaacagctcactttggacttacatatgctcaaaataagtataatgccataattcaggcggcaactgatgcaaatcagtttggttacatcatagacagcaacatcaagcgtattcgcctttatatcagcttcatacgtaaatatgatgaagaaatcaacaacattcttgaatcgctccatgagcttgttgatgctaatgacgatgccgactttgtcaagcagattcatttgattgaaacatttaaaggtgctggcttcttgtctgctgtatccatcatgggtgagatcggtgacttttcagcattttcaaagccaaaacaacttttcgcttatttcggtcttgatccagccgtaaagcaatccggtaaatttgaaggcaccaaggttcaaatgtctaagcgtgattccgccatcgccagacgtgtgattcacacgttaactctacaaagcatcagtatctcccataatggagaagccaaaattcagtccttcgtgaatactatatcaagaagtgtgattcaaaaccaaaactcgtagcaatggggctgtttcacataaagtatgcaacatgatatttgcaatactcagagacaacaaaccatttaaaatcattgctcctcaggagcatatcaaacaatacaatgctgtcaaatgcgacatagctgcataaaatactgtaaattcaaagaatcaatatctttcaaaaacgatattttcaccaaggggaaaatctgcccttttttagtcaaaaaacaaaataaatttttctcatttaattattgacatttattagctggact

SEQ ID NO: 3390 - DNA, 1394 bp, unidentified
  source 1..1394: mol_type = unassigned DNA; note = element_4f604b0
  misc_feature 1..2: note = core
  misc_feature 3..88: note = LE
  misc_feature 89..1117: note = CDS
  misc_feature 1118..1394: note = RE
  misc_feature 1088..1381: note = bridgeRNA
agatgggatggttgccgccctccccagacggcatcgcaatatgccaagcaagtggtgttaacagcctcaaaacggaaagggcggcgagatgaaagatacaatgattggggtggatctggcaaaatcagtctaccagcttcatggcgcgacgatgacgggagagatcaagtttcgcaagaaactgtcgaggcttcagttttgccggttcatggcggaccaatctcccgccattgtggttttggaagccagcggtagtgcccattactgggcacgcgaactgggcaagctcggccatgaggtcaagctgattgcgccgcaatatgtacgcccgttcgtgaaacgccagaagaatgatgctgccgatgcggaggcaatcgtaatcgcagcgcagcgcccggagatgcgttttgtcgttcccaagacagaagaccaacaggccagagcggtgttatttcgttttcgagagcgccttgtgcaccaacgtacggaacagatgaacgctctgcgagcaattctctatgaacaaggccacagtttcccgataggaatagtgcaactcaagcgtatcaaggatttacttgatgatcctgccagcaatctccctgatctcgttcgcgaagaatgccaggatttggttgcagtgattgccgaacaaacggctcggatcgatgcaaagaccagtaaaatcaaaactctctcgtcgaagacagatgtcgcacggcggttgcagacgataccgggtgtagggccactgacggccctggcggttgaggctttcgcgcctgcaatggagaatttcaaacgcggacgcgatttcgcggcttggctcgggatcgtgccgcggcaacattcttcgggaggcaaagcacggcttggaagggtttctaaagcaggtcaggccgatattcgccggcttctgatcataggtgcgatgacccggctcaattggcttggacagaagacgattcaacctggttcttggttggcgcgcatgctggaaagaaaaccaaagatgctggtggctattgcactggccaacaaaatggcccggacaatttgggctatgctgacaagggaagaggattatcggaatccggaacagagtgcagcggcatgagcgtcatgcagagctacgcaatctgaaaccggatcagcgggaggtgtgagaagccgatgacctgaatgggcaaaatgatcgaaaagatctggatcgggaaaaccaggctgcccctttgagcgcaatagctcgtccggtagatttggaaccgctccgcagatcaccataccggccagcggcctcctcagtgccgcaaacaaaggcctgatagaagactgcactcgatcactgtctaagaaggtcagaaacctcttgcaccaagggcggcaaccataga

SEQ ID NO: 3391 - DNA, 1623 bp, unidentified
  source 1..1623: mol_type = unassigned DNA; note = element_4f61775
  misc_feature 1: note = core
  misc_feature 2..91: note = LE
  misc_feature 92..1132: note = CDS
  misc_feature 1133..1623: note = RE
  misc_feature 1383..1621: note = bridgeRNA
taatggaatggtccgcctcacttcccaaacggctttaaataagccatgatgtaattttacagaaaacatcaaaacagaagtgagacaaaccatgaagaataataccgcaaaaggaccgattacagtgttaggaattgatttagcgaaacaaagtttccaactccacggagttaatgcagaaggtgaggtagtactcaagaagaaactcaaccgcaagcaattaagtgctttcatggctaacttgccagtttgcttaataggacttgaagcctgtggaggctcccatcactgggtgagaatctttaccgaaatggggcatgcagtacgcatgatggcaccccagtttgtcaaaccctatgtcaaatccaataaaaatgatgctgttgatgcagaggcgatttgtgaagccgttcaaagacctaatatgcgctttgtacctgcgaaaagcatagaacaacaggatatccagagtatacaccgcattcgtagccagctggttgcaagacgaactgcccaggcaaaccagatacgtggattattaatggaatatggaatcataattcctcagggaatcaagtgcatcaggaaaaacctgcctgatatattagaggatggtgaaaacctgttgacagccatttttcgagaacaactaagtgcgctttatgatgaaatggttcatcttgatgaaagggtagactcattagagctgagtttgaagagggtttgtaaccaaaatgaagattgtaaacgcttgttgacgattcccggcataggattaatgacagcaactgcgttaatagcagcgatcggtgacataggtgcatttaagagtgccagggagcttgcagcctggctggggctggtaccacgacaacactccacaggcggtaagccgacgttgctcggtatcagtaaacgaggggacagttacttaagaaccttattgattcatggaggacggtctgttgttaggtgtgcccacaaacatcaggataaacgtagtcaatggattggagaagttgagcaacgacgcggaaaaaacatcactgctgttgcagtcgccaataaaaatgcacggataacctgggcgttactgactaaaaaagaagactatcaagctcaagcggcgtaaaaaaagcatgaatctaagagctcaaaaggggctttgccccttcgccgcacggcttactccaccctcgccgggaggcaggggccggaaaataccggcccctgccaatagggtaagatcggggttgggcatgtcaaggactactcgacgcaagcgtctgcgttcctccttgacatgcccaaatccgacaaagaataaaaaaacaggaaatagaaaataacgacagtaaaacaaacacaatagctaagaaagcgttagcaacgagttgcgtagataaaattttaagtgatggcataaaaggtaacacctgcattcctaagaacctgctagggtctagggcccattaaggccgtgagtctgattaggtgaggaatgcgcggattccatcagggctagaggtattagacaacctcttacaaaagccggatatatggatgcaatatttctttatgttacgatcaaaattttacttgcaatacggggcggaccatata

SEQ ID NO: 3392 - DNA, 1422 bp, unidentified
  source 1..1422: mol_type = unassigned DNA; note = element_4f6a81e
  misc_feature 1: note = core
  misc_feature 2..90: note = LE
  misc_feature 91..1131: note = CDS
  misc_feature 1132..1422: note = RE
  misc_feature 1187..1414: note = bridgeRNA
taatggaatggacgcccccacttttaacggcatcatttgtgccaaagtggaagtgtcgagctaccacttaaataagcaggagcgtccacgatgaacattacgcgggttggggtcgatttggcaaagttgctcttccaggttcacggcgtcgatgagaaaggcaacgcgaaattgcgtaagcaattgaagcgctcgaaggtagcggagttctttgcccaactgccgccgtgcctgattgggatggaggcatgcggcggtgcgcattattgggcgcgtaagctgacggactttggccacaccgtgaagctcatcgcgccgcagttcgtcaagccatacgtaaagacaaataagaatgatgcggcagatgccgaggcgatctgcgaggcggtaggccggccgagcatgcggtttgtgccgatcaaaagcaccgagcagcaatcggtactcggcttgcatcgtgctcgtcaaggatttgtcgccgcgcggaccgcgcaagccaatcagatccgcggattgctggccgagtttgggctggtgataccggtgggcatcggtgccatagcgcgtaaactgcccgagttcctcgaggatgcggagaacgggctgtcgggtgtcagtcgcacgctgttcgctcgattgttggatcattttcgtctactcgatcgccaggtcgaggagctcgaacaagaaatcaacacctggcaccgtgaagacgcggcgagcaagcgcctgcaggcgattccggggattggcccactgacggcaagcgcgctggtcgcgactgtcggggacgcgaaggcgttccacaatggccggcaactcgcagcgtggctcggactcgtaccagggcagtcctccaccggcggaaagactacgctactcggcatcagcaagcgtggcgacacctatttgcggacgatgctgattcacggcgcacgctcggtcttgttcagcctaaagcgtaacccggcgcgggcggacgaatggttggcgcgagtagcaaatcgacgtaatccgaatatcgctgctgttgcgctggccaataagaatgcacgcatcgtgtgggcgctgctcgcgcacggccgcgactacacaagagattaccgttcagtaaaacccatggcagcataagcacgaaccgtacaagccgaaatcgacgaacagtttcaatcacgatttacccaccaccgattgcacaggcgattttctaaagtgatggcaccacaggtaagaccagggtcgactaagcctgcattacacagaggaccgataaggtccgcagatctgatgaggcgtcgaccagcgtattccatcagggtccgcgatttcacgtcgcacacaaaggccggatgtatggcagcaatctattcctgcggaccagaaccaaaagaaagtgcttggcaactggggggcgtccatgta

SEQ ID NO: 3393 - DNA, 1420 bp, unidentified
  source 1..1420: mol_type = unassigned DNA; note = element_4f6ab98
  misc_feature 1: note = core
  misc_feature 2..78: note = LE
  misc_feature 79..1140: note = CDS
  misc_feature 1141..1420: note = RE
  misc_feature 1185..1411: note = bridgeRNA
taatggaatggtccggccgtgctcctgccccgccagcgatcgaagctggccacgggcgccaaagacaaggagcacgccatgtctcagatactcaacgccgcgatcgtcgtaataggcatcgatattggtaagaactcgttccatgttgttggccttgatcagcgcggggcgatcgtgctgcggcagaagtggtcgcgtggccaggtgaacgcgcgatttgccaacatgccaccttgcctgatcggcatggaggcctgcgttggtgcgcatcatctcagccgggagctcaaggcatttggtcacgacgcccggctaatgccggcgaggtacgtgcggccctactcgaagggacagaagaacgacttccgtgatgcggagacgatcgccgaagcggtgcagcggccaacgatgaagttcgtcgcgacgaagaccgccgatcagctcgacctgcaagcgctgcatcgtgtgcgcgagcgattggtcagtcagcgtaccggcatcatcaatcagattcgtgccttcctgttggagcgcggcgtcgcggtgcggcaggggttacgttttttgcgtgccgagttgccgcgcatattagcttcaccgcccgatgttctgtcgccccgcatggtgcgggtcatcgaggacctggctggcgactggcgccggctcgacgagctggtcgagagtctatcaagtgagatcgagactattgcgcgccaggatgccggttgcgggcggttgatgagcgtgcctggcattggcccgatcatctccagcgccatggtggccgcgatcggcactggcgatgcgttctccaaaggccgcgattttgccgcttggctggggctcgtccccaaacagatctcaactggggaccgcaccatcctcggcaagatatcgaagcgcggtaatcgctatctgcgcgttctgttcgtgcaagcggcatgggtggtgctgatcaagccaaagagctgggagcgccacgggctcaaagcctggctcgaggcagccaagaagcggctgcaccacaatgttcttgcgatcgcgctcgccaataaactggcccgcatcgcctggagcgtgttggcgcgcggtcgcgttttcgaggttaagtccacaaaagcggcaacgcagtctgcctaaacaaacgggataggagcgacgcgacgacgtatcccataaccgttacccgccgaggtctgcgagaagatgagatgagatggaggttcggtcttcccggcgcatgcgagcagcggtgacccacatggcccggtcgaggcctgtccgtcaatgagatcgcacgcgcgctgatatccatgatggtctagagctcagcgctctaatcaaagaccggatacattgatgcaagaccgctcaccaccaactcgtcaaaacttcttgcaacgcacggccggaccataca

SEQ ID NO: 3394 - DNA, 1382 bp, unidentified
  source 1..1382: mol_type = unassigned DNA; note = element_4f753c9
  misc_feature 1..2: note = core
  misc_feature 3..81: note = LE
  misc_feature 82..1107: note = CDS
  misc_feature 1108..1382: note = RE
  misc_feature 1158..1370: note = bridgeRNA
tgatggtgtggacggccccacctcgacggcatcagagtgccaaagcgtggtcgccggagcgccacaagagggagaccgtccatgaaacagtttatcagaatcggcgttgatcttggcaagcggtattttcaggttcatgcgctcatgagcgaggatgggcgcgccgtgactcgcaagctgccgcgttcggggtttcttgcgtttttcgccgatatcgagccttgcctgatcggtatggaggcgtgcggctcggcgcattattgggcgcgcgagctgcaagcgaaaggtcacgaggttcgcctgatcccgccgagttacgtcaagccctatgtcaagcgcggcaagaacgacgccgtcgacgcggcggcggtgtgcgaggccgtgtcgcggcccgacatgcgcttcgtgccgatcaagagcgccggcaatcaggcggcgctgatgctgcacaagacacgcgagttgctcatcaagcagcgaaccatgagcgtcaacgccttgcgcggacatctgtcggagttcggcctcgtcgccgccaaggggattggacacgccgacgagctggtcgaaatggccaaggaggacgcgacgcttccggcggcggccaaggcggtcgtgaaggttttcgccgcgcaactggaggcgatcaacgcctcgatcgccacgctcgagcgggagatcgccggcgcccatgcgcaaagcgaggtgagcaaattgctggcgagcgttccgggcgtcggcaagatcatcgccacggcgatcgtcgccagcgtcccggacccgggcgtgttcaaatcgggccgcgacttcgccgcctggctcgggctcacgcccaggcaggactccaccggcggcaaggtgaagctcggtcccatcaccaagcagggcaaccgctacatcaggaagctgctgacgctgggctccacatcgctgctgcgcgtgctcgccaagcgcaagggggttctgcacgattggctcgtcgcgcttctggcgaagaagcccgcgcggctggtcacggtcgctctcgccaacaagctcgcgcgaatcctgtgggccatgatgaccaccggcgaggcgttccgcatggagatgttcgagcgggcgtaaggagccggagatgcaagcgtgagcgtcgggaacaaggagtttggcgagggcgaaacctcaacgtgatgaacgacatggctggaaaagacgacgaaggacaccccggcaatacgtcacgagcgtcaagcgcgtcgcaatgatagggatcttcgcagtcgaacttcatcagggccagcggacatgtccgcgcaaacaggccggacatatgaccgcaagccgccaacccgttcacaacgtcgagaaaaaaccgcttgccaatcggggccgtccacata

SEQ ID NO: 3395 - DNA, 1462 bp, unidentified
  source 1..1462: mol_type = unassigned DNA; note = element_4f7f223
  misc_feature 1: note = core
  misc_feature 2..219: note = LE
  misc_feature 220..1446: note = CDS
  misc_feature 1447..1462: note = RE
  misc_feature 1..209: note = bridgeRNA
ccgttaccttcttgatcaagcccggtgagggcttgcaggccaccggccacggcatgactcgttgcccctgtcgttgatgatctggggggtgttgtcaccgtggtcggcgggcgccaacgaccgctgatagagacctgacccgcttgcgtggtctgctcgtaacgtggctgccggcgcgggcgtcccggtcggcctgcggcgacgagcgaggagaccttcttgtcggaacccgacaacaccggcttcgaggtgttctgcggcctggacgtgggcaagtcggtacaccacgcctgcgcactggaccggacggggaagcggctgcatgacaaaccgttgcccaacgacgaggccgcgctgaccgaggtcttcatccgcctcgccgcccacggccggatgctggtcgtggtcgatcagcccgcctcgatcggtgcgctggccgtcgccgtggcccgctcgctgggcatcgaggtggcctacctgcctgggctggcgatgcgccgcatcgctgacctgcatcctggccagagcaagaccgacgcccgcgacgcccacgtcatcgccgacgccgcccgcaccatgccccacaccctgcgccgggtcggcaccgatgacgagaccctcgccgagctcaccgtgctggccggctacgacgacgacctcgccgcccagtcgacacggctgaccaaccggctgcgcgatgccctgctccacgtccacccggccctggaacgcctgctcgggcctcggatggaccgcggcggggtgctcgatctgctcgttgccgccccgaccccgcaggcccttcgcgacctcggcgaggccgggatcgccgcggccatgcgcccgcgttccccacgtctggccacgacactccctgccgcgatcctggccgcgctcgacgctcagaccgtcgtcgtcccgggcaccgccgcgttcggccgagtgatcgccggggtcgccgcccagctgcgcgaggtccgtgtcgagcgagacacccttgccgccgagctcgaggccctcctggaggcccaccctcttgccggggtcctgacctcgatgcccggtctcgggttcaggaccgccctgaagatcctcaccatcgtcggagatggcgccgcgttccccaccgcagcccatctcgccgcctacgcgggcctggccccggtgacccgccgctccggcagctcgatcaagggcgagacgcgttcccagcgcgggaaccacgccctgaagtcggcgctgttcttgtcggctttcgccagtctcgccgatccggtcagccgcgcctactacgaccgcaaacgcgccggcggcaagcggcacaacgccgccctgatctgcctcgcccgtcgccgcaccgacgtcatctacgccatgctccgcgaccgccgcccctacgcgccaccgagcgtcccgacgctgccgccagtggccgcagccgcttgacaaccccatagagaca

SEQ ID NO: 3396 - DNA, 1591 bp, unidentified
  source 1..1591: mol_type = unassigned DNA; note = element_4f88d95
  misc_feature 1..4: note = core
  misc_feature 5..500: note = LE
  misc_feature 501..1469: note = CDS
  misc_feature 1470..1591: note = RE
  misc_feature 16..284: note = bridgeRNA
ttttagtaccatataagtgtaagagataaagcatatcatttgtgctttaccctctgcacttatttttttatgataagggagtaattggtctggcgatgttctttttggattagccacatccgtcacgaaaactgtcagccaccccttattataaacagtcgtttaagcaggttgaaacccgtaaggtgctttcgtgtaacgaactaaaatgagttgtaataagtgtggatgggaacaattacaaatctattttggaggttacagatgatcagcgtaggaattgatgtatcaaaagagaaaagtacagtatgtattttaaagccttatggcgaaatcgtgagtaagccctttgaagtataccatgtggaacaggaactgtctgagttggcaactatgctgcttcgcttgaatgatgaggtgcgaatcatcatggaagctaccgggatttatcatcttcctgtactaagctattttaaaaggagaggggattttttgtagcagtgatcaatccatttgaaatgaaagaataccgttgtcagggacttcgccgcgtaaaaacagataaacaggatgcgattgcgatctctcattatggaatagaccattggtatcgcttgaaagagtatgaggcgcaagaaaatatctacacagagctaaaacttttaggacgacaatactgtcattatatgcgaatgcgtgtggaaagtgttttggaactgacccatcttctggactatacgatgccggggattaaaacattactgcaaggttggaatgagaagaatggaaaggataaactgggggattttgcagaggaatactggcattatgataatataacaaagaaatcagaaaagcagtttatagacagctatctgaaatgggcaaaaaagaaaggataccatcagaaccaagataaagcgatcaagatttatgcactggcaaaagaaggtatccccacagtttcctccaataccccatcaacaaaaatgctggtacaggaggcagtacgggtattacgagaagtcgatcataccctgatgacgattttaacacaaatgcggtcgttagccaagagtctgccggaatatccaatcgtgcgagcgatgggaggtgttggagatgttcttgctccgaaactcatagcggagataggagatgtaagaaggtttcatagtggtaaagctctgattgcttatgctggaattgatgccccaccatatcaatcaggtcgacttgtcggaacggaaagaaaaatatccaaacgaggttcttccaacctaaggaagataggatacgaagttatgagaagtttgaaaacgcataaagcacctgaggatgcagctgtctatgagtttatattgaagaaagaacgtgaggggaaatcaaaacgcgccgcaaagatagcaggattaaataagtttttgagaatctactatgcgagagtgatggaagtataccgaaaataaaagaaaataaacccaagaaaacaacagaccggattttgagccggtctaattgtcgtggagatttttatttagttgagaacatttaaaaaacctgcgaaaaggtcttgacttttgttagcagg

SEQ ID NO: 3397 - DNA, 1157 bp, unidentified
  source 1..1157: mol_type = unassigned DNA; note = element_4f9b312
  misc_feature 1..2: note = core
  misc_feature 3..121: note = LE
  misc_feature 122..955: note = CDS
  misc_feature 956..1157: note = RE
  misc_feature 906..1101: note = bridgeRNA
agatggggtattggggctggcctatgcgacgggctggcaggacgggtggctgcgcttcaggctgatggtgagaacgaggtccgcacgaagcggcctcaagcatcagaggagaaacgcagccatggaacactatgcaggattggacgtgtcggtgaaagagaccagtgtttgcgtcgtcgacggcgcgggccaggtggtgcgcgaggtcaaggtggcaagcgagccgggggcaatccttggggttctggcagatgaggccttcaccctcaagcgtatcggcctcgaggcggggccgttgtcgcaatggctctacggggcgcttgccgaagcggacttgccggtgatctgtgtcgagacgcggcacatgaaggcggcgctgtcggctcagatcaacaagagcgaccgcaatgatgcgcgcgggattacgcagatgatgcgggtcggcctgtaccggcgggtgcacgttaagaccctcgccagccagaaacggcggatgctgcttacgagccgccaactgctgcaagccaaggcgcacgacatcgagagcgacctgcggggcacgctgcgcaactttggcctcaaggtcgacccggtcagccgggggaagttcgaggcccggatccgcgagctggtcgtcgattgtccgggcctggccgcgatcaccgggccgttattgatcgcctggcggaccttgcgcgagcagttcgcggtgctacatcgccagctgctcgctgtcgtgcgcgacgacgcggtctgccatcgactgatgacggtgcccggtgtcggaccggtggtcgcgctgaccttccgcgcaacggtcgacgtgcccagccgcttcgcaaactccaaggcggtcggtgctgtcttcggcctgacgccgcgtcagcaccagtcgggcgaggtagagagttccgccggctggtggagcgatgtcgtccgcagggacgatgggtgaggcgagtccgccctgtcccttgtcctgccgtcgatcctacggcaaggacgttcggtagattgttccgccccatcctcctgatcccatcatgggagggcctgcgtgccgatcccgaagagaagcgaggatcctgcgagcgacatcaacgccagatcgacggaagagccggaaagcgcttgacactaacccgccccaatagaga

SEQ ID NO: 3398 - DNA, 1319 bp, unidentified
  source 1..1319: mol_type = unassigned DNA; note = element_4f9ce99
  misc_feature 1: note = core
  misc_feature 2..90: note = LE
  misc_feature 91..1098: note = CDS
  misc_feature 1099..1319: note = RE
  misc_feature 1098..1313: note = bridgeRNA
gaatgaaagggacttccccgtgccggcgacggcatcgaggtgccaagattgagttgtcgaatttcaatctaaatggccggaggggaagtcatggaacagattactactgtgggcattgacctggcaaagagcgtgttctctcttcacggtgtggatgcggccggcaaggcggtgctgcggcgcacggtgcgacgcgaccggttggtggagacggtggcctctttatcgccgtgtctgatcggcatggaggcctgctcgggggcgcacgagtggggcaggagatttcagcagcatgggcacacggtgaggctgatggcgcccaagttcgtggcgccctacaggaagagcgagaagaacgacggcaacgacgccgaggcggtgtgcgaggcggtgacgcggccgagcatgcgcttcgtgccggtcaagagcgccgagcagcaggcgttgctggcggtgcaccgggtgcgccaggggttcgtggtggagagaaccgcaaccatcaaccggctacgcggcctgctctcggagtttggcgtggtgctgccgctacgctcggtgacggtacggcgccaggcggccgcggccgccgaggtgctgcccgagctcgcgcggcgcgcgatcgatgaccttctggcacagctgcgattgctcgatgagcgcatcgacgcctacgacacgcagattcacgcccaggcacggctctcggagcccgccaggcgcctgatgcagatccgcggcatcggcgcgaccaccgccttggccatcgtcgccactgtgggcaacgcccgagagttcaagaatggccggcaattcgccgcctggatcggtcttgtgccgggccagtattccaccggcggcagatcgcgcctcgggcacatcagcaaacgcggcgacgcctaccttcgcaacctgctggtccaaggcgcgcgctcggtgctgcagaccgcgcccatgcaccaggaccgcatgtcgcgctgggcacttgagttgcaggcgcgccgcggctactaccgcaccctggtcgccatcgccaacaagaacgcgcgcatcgcctgggcgctgctggcgaaggagggctcgatgcaattgaagaattgagtaccccacgcgactgcaatcgacgatgacgaaacggtcagaccgacgcccggagaacctgaaaagtgcgaacggcagattccgataccgactaacgatcgaggaccgggcgtgcggctttcatcagggccagagcactcgaatgctcacaaacaggccggttatagtgacgcagtcagaccttcttacgtcaccgttgcagaaatggggaagtccttata

SEQ ID NO: 3399 - DNA, 1372 bp, unidentified
  source 1..1372: mol_type = unassigned DNA; note = element_4f9e4a2
  misc_feature 1..3: note = core
  misc_feature 4..360: note = LE
  misc_feature 361..1125: note = CDS
  misc_feature 1126..1372: note = RE
  misc_feature 1145..1370: note = bridgeRNA
agatggaatggtcgcctcccgccttaacgggccaaccgacgccgcagcaaccccggcgacgatgtcgagcccgagtatcgtctccgttgggatatcccgttaaggagaaagctgatggaacccacgactattgccatcgacctggccaagcgcgttttccagattcactacgtcgagcctgtgaccggcgcgattcgcagcaaggtgctcaaacgcgcccagctcgtgccgttcttcgccaaccggcctgcgacttgtgtcgttatggaggcctgcggcagcgcccatcactgggcccgtgtcctggcgcggcttggccacgacgtgcggctcatcgcagcccagttcgtctgaccgttcgtgaagtcgaacaagaacgatgccgcggatgccgcggcgatctgggaagcggcccaacgtcccggcatgcgtttcgtagctgtcaagacggaagaccagcaggccatgcttgcgatgcaccgcatacgccagcaactcgtcaggatccgtgtcatgcaggtcaaccagcttcgcggattgctctacgaatttggcgtgatactgccggcaggtcgccgtgcatcgatagaggcagccaaagtcgcgctggcgtcgatggctgagcagttgcccactatgctggcagacagcctgcaggaccagatctcgcggctacgtggactcgacgagcagattgcccggatcgaacagcgcattctcgagtggcgacgcaacaacgatgcatgcagacgcatttccgaaatccccggcgtgggagtactcacggccactgctgcagtatcggtaattggacaggcgaagacctttcgctccggccgggagttcgctgcctatttgggcctcgtgccgcgacagaacggctctgggggcaaggtaaagcttggcgggatcagcaaacgcggggacgtgtacttgcgaacgctactgatccacggcgcgcgatcggtcatctcaagttcaaggtatttgccggagcgcttgcgccagatgctgacccggcgtccaacgaatgtcgttgccgttgcgctcgccaacaagatggcgcgaacaatctgggcgctgctcgcgtatggtcgaacgtatcaggcagcaccagcgcagtaagcacgaaccgtagcctttaacccatccacggttgcacaggtgtattgaacgatggcaagacaggttggaccgcgtgaaggcaagcctgagacatttctcggacttcgagtccgttatttagattaggacctttgcggcgaaatccatcggggccggcgggtacgttccgcaatcgagtccggatataagtccgcaaccacccttctcgctacgaacaattaccttgcaaatgggaggcgaccatata

SEQ ID NO: 3400 - DNA, 1537 bp, unidentified
  source 1..1537: mol_type = unassigned DNA; note = element_4f9fae4
  misc_feature 1: note = core
  misc_feature 2..242: note = LE
  misc_feature 243..1421: note = CDS
  misc_feature 1422..1537: note = RE
  misc_feature 6..221: note = bridgeRNA
tcgtattattaggtcagccagagatttctggttggccttttttcttaggtgtcatatgatggcggtaagccgggagaacgtatactttattggggcaaaccccgtggtgaaaacagttctcccacttccttccaatgaccatgtttgagctggtagagacaaggatctcgcatcacaagcgaagctatgggtttggaaccatcatgggaagtgccggcaatttatgaaatggggagcgtattatggaaccagtcgtagggttggatgtgtcaaaaggaatcagcgttgtacaggcttttgttaggcggaatgagccttatgcaaaactggagtgtatcaaacatgaggaaagcggctttaaacggttaggagaattacttgatgaactggaagagctctcggggatggagcccgtcatcgttatggaagccaccggtcattaccatagagggttggtcgcctatcttgtacgaggaacttacaagcattatgtgattaaccctctgcaatctaaacgcgctagaagcacacaactacgaaaagtcaaaaccgatgctgcggatgcatggcacttagctgacatgtactatcggggcgatgtaaagccacatcgtacatgggatgagcagtatacggatctgcagcatgtaacaaggcagcatgagtttataacctcgatgtacgtacaggcgaagctaaatacgagagccttactagatcaagtatttcccgcctatgagttggtattccgcaatctgttttccgctacggcacttaaggtattgcagtgttgcctgagcaatgagaatgaagatgtggaaaatattatgctgaagcaagttgggaaatcacattcaaagacctggattggagaaaaagcagcgcagttgagacaggtctcactaaatggttccatcgagaaaaggagttcatcgcaaagtatagctctggcaggaatggtatgcctcttaattgaatttcaaaaccaattaagcaggttagaagagcagattgaagatgtttcctccaagttactagaggtggaactagtaaagaccattccaggcatcggcaataaactcgcagcagcgattatagcggaaatcggtgatgcacgtcaatttacaaacgccaaacagctagttgcctttgctgggcttgatcctggtgtctatagttcgggtaagtttacagctaccagtaaccgaataacaaagcaaggttcaaaaagacttcgaagagctctatttttagcggttcaatgtgggctgcgacgcggagctaacaatcgtttgaagctttattacgataagaaaaagaaagagggcaagccctacaaggtggttgtgattgcttgcgccaacaagcttctccatcacgtctacgccatcctcatcaagggtcagccctaccaaaactaaaatccaaatttccccacaccttcacgtcaatgaaggtttatttgtaatgcataaaaagtataacagcattttaattattaaccaagtctcaagtacttgacatctattagctggtt

SEQ ID NO: 3401 - DNA, 1211 bp, unidentified
  source 1..1211: mol_type = unassigned DNA; note = element_4fa16f3
  misc_feature 1..2: note = core
  misc_feature 3..209: note = LE
  misc_feature 210..1196: note = CDS
  misc_feature 1197..1211: note = RE
  misc_feature 12..190: note = bridgeRNA
cttgtatcttgtttcttgtggtaggtagctcctatcacgctgggacagaggaagcttgttttgattcggaaggctttgaccttggagaaaagatcaagccctctgtctctttcatcgccaattcagacactgaacggtagccaagggaataaccctgcatgcacaaggcaagtgggcgaagttggctaaatttaaactactagtcaatcatgttctatctcggaatcgatgtcgccaaagccaaactcgactgctgtctattgctcgaccctgagagtacgaaacgaaagtccaaatccgttgccaataccaaggcgggctttgccaccctcttagaatggttagccggtaaaggggttgctcttccccaactccatgccgtcatggaaggtaccggcgtctatcacgagcaggccgctctggccttggccgatgccggagtgacggtttccatcatcaatcccgcccagatcagggatttcggccggggtctagccgtgcgaaccaaaaccgacggtgtcgacagttttgtcctcgctcgttacggcgctctgcttaaaccagctgcgtggcagcctcccgctctggaggcccgcgtattgagggcgcttctggctcgtcaggaagccattgctcaagacttgcaaagagaactcaatcgcctagaaaaagccaacgcaacggagacccccgcgattatccgacaatcgatcgacgactccatcgcatttttgcgcaagcagcttgccaaactgctggaggatatcgaccaccatattgaccatcaccccaatctacggcgcgacatggaccttttgaccagcatccccgccgtgggccggcagaccggaagtaatctcctggcaatcgtccatgcccatcgtttcgaatcggcggaacaacttgcagcatatctgggcttggttccagttgaacgaaaatccggttcgtcaattttgggaagggctcggctctcaaaagccggtccacctagaatccgggccatactgtatatggcagctatcgttgcgaccaagtacaacccccatgttaaaacggtctatgaacggcttgtagccagaggcaaagccaaaaaagctgctcttggtgccgcgatgcgcaaactcgtccacctatgttttggagttcttaatacccgcatgtgctatcaagccgattatgtcaaaaacggttgaccttcaagacggtat

SEQ ID NO: 3402 - DNA, 1391 bp, unidentified
  source 1..1391: mol_type = unassigned DNA; note = element_4faade5
  misc_feature 1..2: note = core
  misc_feature 3..307: note = LE
  misc_feature 308..1126: note = CDS
  misc_feature 1127..1391: note = RE
  misc_feature 1158..1377: note = bridgeRNA
gatggggtggatggctcccgctcccggcatctaggtgccaaagtgtggtttccatcgaaggaccacgagcaagaggagccatccaccatgaaagttagcaccgttgggctggatctagccacgaacgtttttcaagtgcacgccgttgatgaggcgggagaagtgatcgtccgcaaagcgctgcgccggggccgggtgctgccgttctttgaggggctcgagccctgcctgatcggcatggaggcctgcggcacgagccactactgggggtcgggagctgcgcgcgctaggccacgaggtcaagttgatgccgccggcctatgtcaaagcctacgtcaagcgcggcaaaaccgaccctggcgatgccgaggccatctgcgaggcggtgacgcggccgagtatgcgctttgttgctatcaagtcgcccgaacagcagtcgctattggcggtgcaccgggggcgtgatctgctgatccgccagcgcacgcagctggtcaacatgatccgtggccagctggccgagttcggcatcgtggtggctaagggcattcaccacgtactcaaccttgtggcgcgactgctcgatggagaggcgctgggcattcctgctctggcggctaaggtcgtcaccaccctggcggaacagctgcgcgatctgcaggcgcggatcgggggcctcgagaaggatctggtgagttggtcgcaagaggacccggtcgtgaagtgtctccagactattccgggcattgggatcatcactgcgtcggccttggccgcctctgtcaccgatccgcaacagttcacctcgggccggcagtttgccgcctggctagggctgacgcccagagccaattgcagcggcggcagggagcgcttggggcgcatctccaagatgggcgatcagtatctgcgccgtctgctggtaaatggcatgacatcacggcttcgatgggttcgccgccggccggaggctcatccctgggccgccaagctgttgcaaagaaagccggccaagctggtcgctgtcgcaatggctaacaagaccgcgcgggtcgcctgggccgtcatgacccgtggcgagatctatcgcgcccctcagccttcaactcggcaagtggcagcgtgaggacctgatcgcgcgaaaggattagagactttagcgattgcgaggacgatgagaggtgatggcgaaccggtcagaccggggatcgggacaccccgacgaatgtccaggacacaacagtccgcatagcagactgggacccgatccgcggaaaccatcatggccagcggtcacctgcaccgcgcaaacaggccggacacaagactgcacccgaccaccacgccaacacttcaaatcactccttgcaacgcgggagccatccacacag

SEQ ID NO: 3403 - DNA, 1591 bp, unidentified
  source 1..1591: mol_type = unassigned DNA; note = element_4fab5d1
  misc_feature 1..3: note = core
  misc_feature 4..579: note = LE
  misc_feature 580..1515: note = CDS
  misc_feature 1516..1591: note = RE
  misc_feature 38..274: note = bridgeRNA
cttgtactatagagttaaattaacaagctccaagccaacagactcgatctttgacaatcacataggaatcctggggcagcttggataaatattctcgtagaggcagggggcttcgacaacctccttgggaagctttagctgtcctgaaataaagagtgaagccccacccatacgagaggactcgaatgagcacgttgtgaatgcagctttctgcatgttgcgagttacgcgcaaggttgagtggctcgtaagggttgcgggaaccctgcctaaattctaatgaaggtgaggatgcaaaatgttttacggtggcattgatgtggcaaagtaccgccacgaggtgtgccttcttgatgatgccggtaatgtcgtgctgcagatgcacatagacaacaaccagaagggaatgaacaagttcctgcaggcgctggaaaggctggatattgagcctgacagcgttaagttctgcctggaggctaccgacattactggctccccatttactgccacctaagtgaactgggattccagctccatgtcatcaaccccatccagtcggatgccctgcgcaacctctatgtgcgcaaggccaagaccgaccagaaggatgccctgctccttgccgatttgctgcgattaggtcgcacccctacaaccaagctcccatctgagacggtcctcaagctgcagactctctcccggctgcgctttgagttcgttcgccaagtcggcggactcaaaaacagggtactcggtatcctcgaccggatctttccggaataccccggctgtttctcagatgtctttatccggacctccagggagttgctcaagtcttaccccgaaccagaagaactagctacagtggacctttccgagttggccgctttcttaaaagagcattcccgcggccgcttcggtgaggaaagggccaaaaagatccagtctctggccaaaggtacttttggcattaccctggccctggacgcttttgctctccagctgcgtttactgctcgaacaaatcgaattcattgaagagcaggtaaaggttatcgaggaggcaattaacgaggtcatggaggaactccgtcctgacagggatactccctaccgccacgttattgaaaccatccccggtattggtcccgtcctggctgccgcaattatcggtgagataggcgatgtttctcgcttcccaaacgcccgggccctggtggcctatgccgggttggatgcttctgtcagggtctctgggctgtttgagggtacccgcaaccggatgtccaaacgcggctcccctatgctgaggaacagcttgtggctgtctgccgttttagcccggcgcttcaaccaggaattgaaggaatactacgagctaaaatgcagccagggaaagcattcaagcgttgctaccggggctgttgccagaagacttgtgcatttgatctacgctctttggaaagaaaaccggccatacgatcccaattaccagtggtccccacctagaaagtaattttttgccaggattcacaggattcttatgtgattgtcaaagatctcttttagcctattgacttttcatagcacgt

SEQ ID NO: 3404 - DNA, 1625 bp, unidentified
  source 1..1625: mol_type = unassigned DNA; note = element_4fab7b4
  misc_feature 1: note = core
  misc_feature 2..273: note = LE
  misc_feature 274..1518: note = CDS
  misc_feature 1519..1625: note = RE
  misc_feature 12..293: note = bridgeRNA
cctgttactatatatttggttgaggacatggcacccagccgtgcccttttccatcttgttgcctaagctgttagaatgagaggacaatgggtctgacggaaatctccaaggactatgcgtccgaaaattagtcagtcagccatcctcttattcgcagcgttcgatttgtgcaggttgagccaccgcccggtgcgttcgtgtcatcaaacagatggaatcggcagtgagaaaaggatggttcgccaattgtaatctgtgataggagcgtgtgttatgaacgcagtgggaattgatatctccaaggggaaaagtatggtttcagtaattcgtcccttcggagaattggtggtgaagccctacgaggtgcgccacacctccagcgaactcggtgagctggcaaagcagctgaaaagtctggagggtgagacgcgcgttgttttggaacacacagggcgctactatgaacctatcgctcagatgctccacgacgctggtatttttgtcagcgcagtgaatccactgctgattaaagaatacggaaataactctctgcgcaaggtcaagacggacagggcggattctctcaagattgcccgatatggtcttgacaattgggtcgagctgcgagaacatacttctatggatacgattcgataccaactaaaaaccgcaaaccgccaatatagtctatacgtcaagaacaaaaccgccttcaagaacagcttgattgcgctgcttgaccagacctaccccagtgtaaacgctctctttgacagccctgtccgtgcggatgggagccaaaagtgggtggattttgctgcgtccttttggcacgtggactgcgtgcgaagtatgagtcagactgcttttgtagagcgttaccacaagtggtgcaaacggcatggatacaactttaatgccgccaaagctgccattattcatgccgaggcaaaagaactgattgccatgctgccgaaaaacacactgtctaaggtgatggtgcaggaagcgattacccagcttaagacggtttctaaaaccgtggaggtgttccgtacagaaatgaatgagcttgccaagcagctgccagaatacgaggttgtcatgggattgtacggaaccggcaagtcgctgggcccgcagcttatggccgagattggggatgtgcgccgattcgcccacaagggttccttgacggcctttgcaggcgttgaccctggtgcaaaccagtccggtacatacgaggccaaaagcacccattcgtctaagcgaggatctcctgagttacgcaaaactctctttgtgctcatgacggtgctactccaaaatgcaccctcagatgaccctgtattccagtttctggacaagaaacgtgcagagggaaagccctattatgtatacatgaccgctggttgcaacaagtttttacgcatttactacggcagggtcaaggagtacttttcttcattggtaaaccttccgcctgtagactacgattccaccggcctctctcggtaaacacaatcacctacctcaggtcagcgctacggcggtggcctttttctgttgctcatttttcccccgtctgtttttcgcaattttgctattgactttttatttgcagg

SEQ ID NO: 3405 - DNA, 1665 bp, unidentified
  source 1..1665: mol_type = unassigned DNA; note = element_4fb2ae5
  misc_feature 1..3: note = core
  misc_feature 4..296: note = LE
  misc_feature 297..1568: note = CDS
  misc_feature 1569..1665: note = RE
taatctccattccgccgcctttcagttggcggcacaaatagtaatgaaagtgtttcaaccctccacgttatgcggtaaaatagtttgtaagaagctatactacaaagcacggtgaggtgagttgtaaaaactttcttcgttttagacagcataataatcagtgtaagtcctgccttttcaagcacaaataagtggcaccacgagtccgtacactaagaattgtttaaactcctttgtttaattgtgtggcagtccagtcaatggcttcttatcttttacgaaaggagcacttgcttatgaaagttacttttctgacctgttgtggtgttgatgtccacaaatcttttctcgttgccacaatcattaaaaccacaggtggtattgatccttcttatctgaagaaacgcttttccaccttcaacaattctattcttgaattcaagcagtggctgttagataatgactgccatgatgtctgtatggaatccactggtaaatactggattcctgtatttaatctcctggaagatgaaatcaatgttactattgctaatccgaaatgggtaaaagccgtcaaaggcaacaaggatgacaccaaggattctaaatggattggagatttgttccgtcttggacttgtaaaaggcagttatgttccctgtaaggctatccgtattcttagagaatacacgagataccgttacaaacttgtttcctgccgttccagcgaaaagaatagataccagaatgcacttactgtttgtaatgttgcattagattctgttgtttctgatatctttgggaagtcatccacatccatcattgactacctgcttgaacaaccaggtacttctgtcaaccacgaagaaatcgcttccaaacttcttaagagcctcaaatcgaaagaagatgcagtgattgaatccattgaaggatatcagatgactgattcccaaaaataccgtatgcgcctcatccgcacacatatggattatatcacagctgaaatcaatgatatagactcttctatagaaaaaatgatttcttccaatcctgattatgaaaatgctgtctggttactttgtaccattccgggtgtcaaacgtgatagcgccatcgctatcatctccgaaattggtacggatatgactcaattctgtaattcaaaacgtttatgttgctgggcaggtcttacacctggatgcaacgaaactggtggcaagaagaaatctgtccggattatgcgtgcaggtgtctacctcaaacctgcattagtacagtgtgcccatgcagccgtaaaatctagcaaatccccttactacaaaaagaaatatgaatcccttgtaaaacgtcgtggcaagaaaagagccattattgctattgcccgtatgattctcactgccatttaccagatgctgtctactggtgaggagtggaatccttgtgatctttacaaagttgatatgcctgctcccttaattgaaaaacaaaaaactaaggctatcaaacaggctaagaaacttttactgcgtgaaggtattatttccgaatcgcaattagtttcttaaattttcaagctaaaacgtatgttcttttttggaaactatcctgggatagtttgtttcagtgcgccatttattggcttccctctactttctttcacac

SEQ ID NO: 3406 - DNA, 1616 bp, unidentified
  source 1..1616: mol_type = unassigned DNA; note = element_4fb78b6
  misc_feature 1..3: note = core
  misc_feature 4..276: note = LE
  misc_feature 277..1464: note = CDS
  misc_feature 1465..1616: note = RE
  misc_feature 25..296: note = bridgeRNA
tttggtacaatattagcatagtcctaactgctgactacagtggtgacaggctatgcttatttttgtataataagaaggtaatggactgacgatcacctccttggaacttcgcgttcgtaaaagaaagcgtcagccgccttcttattatcaaattcgattaagcaggttgttcctgttgtgcaagttcacagcagcgttcgcgtcactaaccaaaatgaattttaataagctcctgagcggaaacattacaaatcttttcagaaagcaggtatcattatgatcagtgtaggtattgatgtttcaaaaggaaagagtacagtttgcattctaaagcccggtggcgaagttgtcaaaccgccttttgaaatgattcataatgctgaagaacttgattcttttgtttctcttatcaattcgtttgacgaggaaacccgtgttgtcttagaagatacgggacactatcatattcctgttgcttcttatttatcatcacacggcatttttgtttgctgtgtcaatgctttgagaatgaagaaattctgtgcacaaagcattcgccgtgccaagaccgataagatcgacgctgtacgcattgcatctttcggtatcacatactggtctgagctgaccagagcttatgatgcaccggatacatacgatgtgctgcgttttcttgccagacagtattatcagatcacctctatccttgtaaaagcaaaggtgaatctcagcaatctgttggaccaggtcatgctcggtatatccaaccttcttcaaaatcagaaggacaatcacaagctaacggaatttatagaccgatacatacactttcagactatcctcgatatgggcgaggaaaagtttactgctgattactgcaagtgggcaaagaaaaagggataccgttgtaatgaacgtaaggctgctgagatctttgcccttgctcaaaacggtatcccatcgctttctaactcccaatccgtcaaaattgccgttagagaagccatcaaagtgattcactcgacagaggaatcacgcaataccattttagcacaaatgcagaaaatttgcaagaccttgcctgaatattctgttgtcagagatatgaactgtatcggagatgttcttgcacctcgcatcattgccgagatcggtgatgtgcgccgtttcaaaaacaagcactcactaatcgcttatgccggcattgatgctccgccttatcagtcgggagcgttcaacgcttcggaacgaaagatatcaaaacgaggcaactcttatctccgcaagaccggctacgagatcatgcagtcgcttatcaaacacaaaccaactgacgattctgtctatgactttatacagaaaaaacgcagcgaaggcaaatgcggcaaggaagccatgattgctggcttgaacaagttccttcgtgtttactacggcaaggtcatggaactttattctgagtaaccattccacatctacaaacacatcaggcgtttgaaactctgctttcatacgtctgctttgctatgccttttttattcccatttcatcaatcactttcaacaaagctgcactttcaactttggctgttttgcctattgatttttcttagcagg

SEQ ID NO: 3407 - DNA, 1138 bp, unidentified
  source 1..1138: mol_type = unassigned DNA; note = element_4fbc51a
  misc_feature 1..2: note = core
  misc_feature 3..205: note = LE
  misc_feature 206..1126: note = CDS
  misc_feature 1127..1138: note = RE
  misc_feature 12..207: note = bridgeRNA
cttgtcttatccagatcacggctgtggtgcgatacaggggctgtcgctcggcgcagcacttgtgcccggcgacggcgagggtcggatcgatttccgcttggtcataatggaccgctgaggagcaaggtcgccctcgtcttttctagtgacctgaacggatacttgggcttcgggcccgtatgacaagacaaggtggaaaagacacatgaacaataccattggcatcgacatttctaaggacacacttgatgtccatcgtttgacagatggtcaacataagcattttctcaatggaaaggctgggcatatacaactgcttaagtgggttaatttgcggccgggacagctgattatctttgaagcgacgggtgcgtatcatcgacagcttgagcggacgcttggtgcgaaagccatcccgttcgtcaaagtaaacccgaagcaagcacgccgatttgctcatgccagtgggaagttggcaaagacagatcgtgtggattgcgagatgttggcaaagatgggcgtggcgttgcaactcacaccaaagccactcaacgcagaaaacctgtatgatctgagggagttattatctgcacgacgggcactcattaaagatcgtacggcagccaaagcccgcaatgcgacagtgacgcagctgctcggaaagcgtctacgcaatattaaaagtgatatagctaagattgatgccgtgatgctggcgttagcccaccaggatcagccgatgagcaaacggctagatattctgtccagcattcctggaattgggatgacaacagcgcttatgatccttgtcgatatgccggagatcggcaccttggataacaaacaggtcgcaagtcttgctggactcgcccctatgtcgcagagttcgggtaaatggcagggaaaagcacggatacaaggcggccgcccaaatctgcgacacgccatcttcatgccggcgctggtcgcgatccgtcacaatgcggatctgaaagccaaatacgaacagcttgtcgccgctgggaaagagaaaaaagtcgctatcacggcagttatgcgcaagctgcttgtcctcgcgaatgctctactgcgcgatcatcggaaatgggctgaaaaagcggcttgaccaagacggata

SEQ ID NO: 3408 - DNA, 1414 bp, unidentified
  source 1..1414: mol_type = unassigned DNA; note = element_4fc88ab
  misc_feature 1: note = core
  misc_feature 2..65: note = LE
  misc_feature 66..1094: note = CDS
  misc_feature 1095..1414: note = RE
  misc_feature 1182..1405: note = bridgeRNA
tattggaatggtccgccgcctgaaccaacccggacggattatcttagctggcaggaggtttcaccatggagatttcgacgattggcattgatctgagcaagaccacctttcacctgattggcctcagccctcgtggtgagattgtgcttcgcaagaagctctcaaggaagcagctcctgacctacaccgcaacccgcacaccgatgctgatcgggatggaagcctgcgcgggagccccttacctcgctcgtgccctgcgagatcaggggcacgatgcaagactcatgccggcgcagtatgtgaagccctacgtcaagacgaacaagaacgactacctggacgcggaagcgattgcggaagccgtgcagcggccaacgatgcgtttcgtgcccatcaagaacgacgagcagctggatctgcaagcgttgcaccgcgtgcgcgatcgctgggtcgcgaggaggacggccgtgatgaatcaaatacgcggattcctcctggaacgtgggattgctattcgaaaagggccttcttacctggtgacgcaactgcaggtcatcttcaccgatggcgattcatcgttttccggaaggctgctgcacctgattcgtgagttgaagcaggaatgggacgagctcgaaaggaagatcgaggaagccagtgccgagctcgcccgcatcgcgaaggaggatgatggctgccatcgcttgatggaggtgcctggcttcgggccaatcgtctcgacagcattggttgcggcgattggcaatggcatcagcttcagaaaagggcgggacctggcagcctggttaggactcgttccgcgacaacactcaacaggtggcaagacaagactgctcggcatcagcaagctgggcaatgagtacctgcgacgcatgatgctccatggtgcccggtccgtggtgatgcagatggaacgaaagccttccgctctcggcgaatggctgaccagcctttcggcgcgacgccatcgcaacgtcacggtcgtcgctttggccaacaagatggcacgaattgcatgggccatcttgagtaaaggcacacactactgcgcacctgctttcgtggcagcctaaaccgaggcttggaaaagacgccctcaatacgggcttggaaatcgcttcgcgattccacacttttcccaaccctccgacgacgaagttttcctctcaagtttgcgagacaaatcgatgtgtgagtgaacggtctcaaccggcgttgctcaagcctgtgtgggaatgagaacccttctgagttcgacccactttgtagaccagcgacgcgcggactccattatggccaggagctcagctccacaaacaggccggatacatttgcgcagacccaaaacactcaccacaaagatttagcttgcaatctgacggcggaccataca

SEQ ID NO: 3409 - DNA, 1409 bp, unidentified
  source 1..1409: mol_type = unassigned DNA; note = element_4fca984
  misc_feature 1: note = core
  misc_feature 2..87: note = LE
  misc_feature 88..1125: note = CDS
  misc_feature 1126..1409: note = RE
  misc_feature 1183..1404: note = bridgeRNA
caatgggatggactcctcccttcttacggcatccaagtgccagactggaagtgtcaaacaacagtcaacagaagaaaggagtccaccatgaacattactcgtatcggcctcgacctggcaaagagcgtttttcaggtacatgccgtcgatcacaaggggcaccgcctgttctcccgtgcgctcaaacgcgagaagatgatggcattcttccagaatctgtccccttgtctgatcggaatggaggcctgcgccagctcccacttctgggccagaaccctgatggccatggggcacgaggttaagctgatcgccccccagttcgttaaaccctacgtcaaaggcaacaagaacgacgccaatgatgccgaagcgatctgcgaggctgtcagccgacccaccatgcgcttcgttccggtgaaaaccgtcgagcagcaggatattcaggccctgcaccggatccgccaggagcaagttcgccagcgcaccgcccttgtgaaccagatccgggggttgctgagtgaatatggcatcgtgatttcccggagggtggagtctttgcgtaacgctctaccggatattctcgaagatgccgaaaacagactaactgccgattttcgcattttactcaaaggattacaggaagacctgctccatctagatgaccggattggctcgcaggaccaagctatcaagaaactgtcccaagaacatgagggcgccaaacgtttacagcaattacgcggcattggccctatcaccgcaaccgccttgatcgcggcgataggcaatggccgtcagtttgcgcgcggacgggatgcagccgcttggtgtggattggttcccggccagcacagtagcgggggaaaatgtaagttattggggatcagcaaacggggcgatacctacttgcgtactctgatgatccatggggcccgagctgtactaaaaaccgctcagagcaaagatgaccggctgagccaatggttgcaaaaattgtgcaatcggaggaacaaaaatattgctgctgtcgcattggcaaacaaaacgatgcgcatggcctgggcgctgctggttcgagggcaagattatgatccaaactttggctacgaaatagaagcggcctgagttaaacccaggccacgtatcctgtcactgacaggttgttaaacgagcaccaatcctgacgattgcgaagcatggaatcgttgatggcaaacaggtcgaaccgacgtctagaaaaccttatccgttcgatgtgccttagagcacgccagggcgatcaggactaggcgagcgaatagcccattatggccagggcatgagcctaaccaaaaggccggatatacgtgagcaatcgaacctatagccaacaaccataacgtgcttgcaagccgggaggagtccatata

SEQ ID NO: 3410 - DNA, 1334 bp, unidentified
  source 1..1334: mol_type = unassigned DNA; note = element_4fe2762
  misc_feature 1: note = core
  misc_feature 2..77: note = LE
  misc_feature 78..1106: note = CDS
  misc_feature 1107..1334: note = RE
  misc_feature 1105..1328: note = bridgeRNA
gaatgatatggactccctcttcccaagccaccacgtgccatacttaaccatgacgcgttgatcatttggaggttgctatgtccaccattcaaactattggcattgaccttgccaagaatgtttttagtattcatggcgttgatacatatggcaagtgtgttcttaaaaaaactgtcaaaagaaacaaactgttagaggtgtttgctaacttaccaccatgcttaattggtatggaggcttgctccggtgcccactactgggctagagaactgattaaacttggtcatgacccgagaataatggcccctaagttcgtcattccataccgccaaaatgaaaagaatgatgcgaatgacgctgaagccatttgcgaagctgttggcaggccaaaaactcgttttgtcagtatcaaaagccctgaacaacaagccgtgctttgtcttcatcgtattcgacaaggcattattaaaagccgtacagctaccattaaccaactacgtggattgctatctgaatttggtattgtaatacctcaaggtcgcttcacattacaaaattccattggctctattttagaagatgccgaaaatggtattcctgatttagctcgcgagttactctttgatttggttcaacgcatacgaaatgcgaacgacgaggttttacgttacgaccgtaaaatttacgccatcgttaaacacatggaaaccgcacagaaactgatgaccattcctggagtcggtgaacacagcgctacagcgattgtcgcaacggttgccgatggtaaacagttcaaatccagccgccaatttgccgcatggataggtttagtgccaagacaattctctactggtggtcattctaagctcggacatatcagtaaacgaggtgataagcatattcgaactttgcttgtccatggtgcacgagccgtgattgctcgatgcaaagataaaaccgacagaaacagcctctggttacaaaaattggttgaacgacgtggctatacacgagccattgtcgctttggctgctaagaacgcccgaattatttgggcattactgacttcgggaaaagaataccaagctgactacataaccagttagctcacaccgagtcaacacaatagctattgatgacaatacggtcagaccgaggtgctaaagcctgttgtgctcagaagtagaaaatactgtctaacgaatgaggcaagcatcaagcgaaaatcatcagggtaatggcaagtaagccagttaaataccgaatgtagatctgctgtccgatcctctgttgtctaagagagctattgttgacaaaaagagggagtccatgta

SEQ ID NO: 3411 - DNA, 1375 bp, unidentified
  source 1..1375: mol_type = unassigned DNA; note = element_4fe3b7b
  misc_feature 1..3: note = core
  misc_feature 4..89: note = LE
  misc_feature 90..1112: note = CDS
  misc_feature 1113..1375: note = RE
  misc_feature 1108..1361: note = bridgeRNA
tgatggggtggacggcccccgacccaacggcatcgcgatgtgccaggatggagctgtcagctgaccatcaacgggaaggagccgtccacatgcagattactacgatcggcctggatatcgcgaagaacgttttccaggttcatggcatcgatggcgaaggccaagtagtcctgcgtcggaaggttcgccgtgaccagcttctggcgctgctcggcgggctggagccgtgcctcattggcatggaggcctgcgcgaccgcgcaccactgggcgcgtgaactggaagcgctgggccatcaagtcaagttgatgccgccggcttatgtgaaggcgtatgtgaagcggaacaagaatgacgcggccgatgccgaagcgatctgcgaggctgtgacacgaccgacgatgcggttcgtggccgtaaagtcggccaatgcgcaaagcatcctcatgctgcatcgggctcggcatctcttggtccggcaacgcaccgcccaggtgagcgcgatgcgcgcgcatctggccgaatacggcatcgttgcgcccaagggccgggcgcatgtgcgcgagctggtcgaggttctcgacaagggcaagaacctgcttcccgagttggcgcggcaaacactactgctgctcgccgcgatgatcgaagggctcagcacacagattcgtaagatcgagatcgaactgatggcctggcatcgaacggacccgacgtgtcgccggctcgagacgatacccggcatcggcttcatcactgccacggcgctggccgccacggtcaatgatgccaaggtgttccgttccggtcggcagttcgccgcttggctcggcctggtgcccaagcagcattcgtccggcggcaaggagcgaatgggcggaatatcgaagatgggagaccgctatctgcggcacctcctcgtcatcggagcaactgccgtcgtgcgttacacccggcgcaaagcgacgaccgtcagcatctgggcgaatcaactgctggagcgcaagcctgcccgtttggtcacggtcgctgttgccaacaagatggcacggatcgcctgggcggtcatggcacgtgaagaaaactaccgcgctggatcggtcggagcctgaggccggccggcgcgcgccagccataacgggattgggcaggagagaacgacacgcgtaatgatgatccggtcaagccggcggtcgggacaacccgagtgattcaacgcgcatcacagcgcggcagtttgatggggacccgatccaccgacaccatcatggccagcggcccaacgccgcaagcaacaggccgtacacatgaatgaacctgaccagatcaacaaagtgctgtcgaaatctcttgcgcaacgggggccgtccacaca

SEQ ID NO: 3412 - DNA, 1758 bp, unidentified
  source 1..1758: mol_type = unassigned DNA; note = element_4fe4fbb
  misc_feature 1..2: note = core
  misc_feature 3..71: note = LE
  misc_feature 72..1097: note = CDS
  misc_feature 1098..1758: note = RE
  misc_feature 1533..1745: note = bridgeRNA
tgttggggtggacggccccacggcatcaggtgccagaattgggctgtgagtaaccaaaaccggagccgcccatgacccaatataagcgcgtaggcatcgacacgtccaaatccgtgttcacgctgcatggcatcgaccatgaggatcggccaatcttgcgcatcaatcttcggcgcgcgcaggtggtgtcgtttttccgcaagctggcgcctacggtcatcgcgcaggaagcatgcggcggctcccattactgggcacgcgaactgaaggagctcggccacaccgtgctcctggtgccgccccagtacgtgaaaccctacgttaaacgcggcaagaatgatcgtaacgacgccgaggcgatctgcgaggcggcgggacgcccggggatgcatttcgtgccggtgaagaccatcgatcagcaggctcagggcatgatcgtgaagatacgcgagactttcgccgggcaacgcaccgctctgatcaacacggcacgtggtcatgccaccgagttcggcatcgtcgccgcgaagggagcgaaaaaggtcgcggatttgttcgtcgcgatcgaacgggagaacgacatgccgccagaggcgaaagagatgttcgcccacctgcgccaccagatcgatgagctcgatgcccgcatcgaacagatcgaagccagattgagcgccgcgcacaaagccaatgaggtcagtcaacgtctggccaccatccctggggtcggcccgatcacggcattgacgttggcggtcgagatcgatccggaggccttccggtcgggccggcatctcgctgcctgggcagggctgacaccaaaggaatgctcgacgggaggcaaacagcgcatggccgggatcagtcgcgccgggcacgagcggttgcggaccttgctcgtgtcgggcgccacctcgatcatcaacgccgccttgaaaccgggcagtcgacacatgacggactggctccgggcactgcttctccgcaagccgcgaaagctcgttgccgtggcgctcgccaacaagatggcgcgtgtcgcctgggcgatcatgaagcgcggtggcgcctggcgccgtccatcggtcgccgccgcgtgaccggcttatcgtcacgtaacgatatggagcgggatcatgcctcgtccagcgatcggtgagacgccgatgaccggtgccgaacgtcaggcacgctggcgcgccgcgcgagccaccggaacgcccgtatttcgcgcgcggcgtccaccggacagacgctcccggattcagcgatggaacgacgccgtcggcgcgatcgagacgctacaggccgaatacgccgcgtggctcgacgccttgccagagaatcaacaggacagcgtactcgccgaaacgttgcgaacgatcaccgagctcgatctctccgagcttctggcgatcgcgccgccgcgcggcttcggacgagactgaacaacggaatggcccgtacggcacggaccacgaggtcgcccgcgacgagggtcggcgtcaccggacccttcgaaacgcgcggcgatgccaggggcgaaagagctgaaggagatgacgatcggtcgaaccgaggatccggagaacccgttcagactcatggccctcgaggccgcaacattgttcgggaccgggtcgcggaccccatctgggccagcggacattgtgccgcgtcaacaggccggacacatgaacgcagtcgatccgccgtcaaaattctcatcaacgctcttgaacccaaggggccgtccacaca

SEQ ID NO: 3413 - DNA, 1421 bp, unidentified
  source 1..1421: mol_type = unassigned DNA; note = element_4fe7ea5
  misc_feature 1..4: note = core
  misc_feature 5..204: note = LE
  misc_feature 205..1407: note = CDS
  misc_feature 1408..1421: note = RE
  misc_feature 13..177: note = bridgeRNA
ctccgtaagttgtttggtggcccgggagggccggatgtggctgatgaggatcttgccttgagcgtggctctctgggagtggccgtccggttctccggggcgccctgactgctgattgagatatgcgtttcggtcgctgattacggagatgacagcggggtgttcctccggccgacagaagtcgtgttgggaacgaggagggcacatgagcaaggggcgggctcgggtgtgggccggtgtcgacgcgggcaagggacatcactgggtggcggtggtcgacgagaccggcgcgacggcgtggtccaggaaggtcgacaacgacgagttggcgatcctcggtgcgctcggcgagatcctggagctggccgacgtggtccactgggccgtggacatctccggcaccgcttcggcgttgctgctggctctgctcgcagctcatggacagcacgctgtctatgtacccggccgcacggtcaaccggatgtccgcagcttaccggggcgaggccaagaccgactcccgcgacgcctacgtcatcgccgagaccgcccggcaccgacgggacttcgccccgatcgacgtgcccgcgcagctggccgctgacctcgcgctgctgaccggccatcgcactgacctcgtggctgaccggatacggatgatcaatcgtctgcgcgatgtgctgaccggtgtcttccccgcgctggagcgggccttcgactactcggcgcacaagggcgcgctggtcctgctgaccggctaccagataccagctgctatccggcgccgcgggcgggcccgtcttacggcgtggctcgcccatcgcggtgtccggggtgccgacgtggtggctgccgctgctctggaggcggctcaggctcagcggaccgcgcttcctggtgaggatgtcgccggccagatcgttgccgagctggccgcgcagatcttggctttggacgaccggctcaagcggatcgaccggcagatccgcgacacgttccgctgccatccgcaggcggagatcatcgagtccctgcccggcatgggcccgatactgggggcggagttcgtggtcgcggccggtgacttgtccgcatacgcggatgcgggccgtctcgcctcggcggccgggctggtgccggtccctcgtgactcgggacgccggagtggcaacatgcaccggcccaagcgttacagccgacgcctgcggcgggtgttctacatgtccgcgcaggtcagcatcacccgcgaggggccgaaccgggacttctacctcaaaaagcgaggtgagggctgcaaacacgtccaggccgtcatcgccctggcccgccgacgagcaagcgtgttgtgggcgctcctacgcgacaaccgcgtcttcacccctgccccgccgatcgcgcaagcggcttgactccggcattgaga

SEQ ID NO: 3414 - DNA, 1393 bp, unidentified
  source 1..1393: mol_type = unassigned DNA; note = element_4fe83c3
  misc_feature 1..2: note = core
  misc_feature 3..87: note = LE
  misc_feature 88..1119: note = CDS
  misc_feature 1120..1393: note = RE
  misc_feature 1090..1380: note = bridgeRNA
agatggggtggttgccgccctcccagacggtatcgcaatgtgccaagaaagtggtgttgaagccactgagcggaaaggacggcaaccatgatgaaagatacgatgattggcgtggatctggcaaagtctgtttttcaactacacgctgcgtcgatgacgggagagctgaagttccgcaagaagctatcgcggcagagcttcctgaagttcatggccgagctgcctccagcggcagtcgtgatggaggcttgtggcagcgcccattactgggcccgcgagatgatcaggctcggtcatgaggtgaagctgatagctccgcattacgtgaagccgtttgtaaagcgacagaagaacgatgctgcagacgcggaggccattgtgatcgcggcgcagcgggcggaaatgcgtttcgtcgacccgaagtctgcggagcaacaaagccgggcggttttatttcgcgctcgagaacgcctcgttcaccagcgcaccgaattggtcaacgcacttagggcatgcctctatgaatacggctacgttgtcccacagggaattcatcagctcaaacgtattgaagaaattctagctgcggcgagcggcgatttgcctgatttggtgcgcgaagagtgcctcgatctgatggagcagattggcgagaagacggcgcacatcaatgttcggaccggtaaaattaaggcactggcggctgaagctgacacagcgcggcgtctgcagacgatccctggggtgggctcattgactgccatggcagtcgaagcctttgccccgtccatggaaagcttccggtgcggtcgcgacttcgctgcgtggctcggcctcgttccgcgccagttctcctcaggcggaaaagagcgccttggtcgtacttcgaaggcggggcagactgatatccgcagactgctgatcatcggcgcgatgtcgcggctgagctggctgggccgtaaatcaatcccggaaggttcgtggctggcgcgcatcgccgcgcgaaagccacggatgcttgtagctattgctttggccaacaagatggcgcggacgatctgggcgctgatcacaaagaatcaggattaccgagttccggcacaggtggcagcagcatgaacaaggtgccgcgaagtcagcctgtcgtcggatgagggaggtgtgagaaggcgatgacccgaatgggcaaaatgatcgaacagatctgggtcagaaaaaccagttcaggactctgagcgatacagctcgccaatgagatttggatctgatccgcggatcaccataccggccagcggcttctgaaatgccgtacttaaaggccttacagaagagcgcactcgatcaccaatccatagggtcagaaacttcttgcatcacgggtggcaaccacaga

SEQ ID NO: 3415 - DNA, 1575 bp, unidentified
  source 1..1575: mol_type = unassigned DNA; note = element_4fefdc0
  misc_feature 1..3: note = core
  misc_feature 4..259: note = LE
  misc_feature 260..1465: note = CDS
  misc_feature 1466..1575: note = RE
  misc_feature 25..232: note = bridgeRNA
tttggtactataaaagtgtaataattaattacagaaatgtgattgaatattacacttctttttattatgattgaagtgattggataacgtagctcttttagagataaagttctcgtcacaaaaagtgttatccaaccttcacataatatattcgtttaagcaagttgagattgaaatagttctcgtgtaaagaaccaaaatgaggatatgttgaggagttggaaccaatcataattaaaagaataggaaggaatagaaaatgaagtatggagttggaattgatgtttcaaaaggtaaaagtacagtagctatattaagcattgaaggagaagtaattgaagaaccatttgaaataaatcatgatattaatggattaaatttattggaagaaaaattaaaagatatttctaaggaagatttaaaaattgttatggaagaaacaggaacatatcatttaccagtgttaggatatttacttgataaaggttattttgtagttgcagaaaatgccttaaaaataaaaaaatatttggatcgagggttaagaaaagcaaagacagataaaaaagattcttataaattagctgagtatacttgtgataattggtataagcttaataaagtaagagaaaatgatgagacttatgataatcttagattcttatcaagacaatatataaataatataaatgttcaaattaaacagaaaaataatttttctaacttatgtgatttattatttcctgggtattatcaaatgctagatgaaaataattttatattgggactagaaatattcaaaaaatattatcatccagaaattgttaccaataaaaaacaatctcagtttgttgatgagattgataaattagcaaaagaattaggacacaagggagcaggaataactctagctaataagatttatttacttgctcaaaaaactatttctccacgtcctaataataaatttgcacaattatcagcaattagttgtgcagatgctttaattttaacaattaaaacaactactacaattataacagaaatggataaacttgcaagagagctaccagaatatgatgtgataagcgaaatgccaggatgtggcaaaaaactaacttcaagggtaatagcagaaattggagatgtcagaagatttaagaatgctggaagcattatagcttatgctggcttagatgctccaccatatcaatcaggccaattcgaggcaacaaacagacatatatccaaacgaggaaataagtatctaagaaaagcgggatatgaagttatgaaatcaattaaaagcagttgtagattagataatgatttaaagtcttatataataaaaaaagaaaatgaaggtaagtcaaagaaggcagctaaaatagcaggattaaataaatttttaagaatgtattatggaatagtaaaaaagaaatataaacaacttgaaatatggtaaatttttatttcttaatacggcaaaaaaagacctagcaataggtctgcgttagcatgtttaaaaatataatttaaaaaaattatcaaaaactattgatttttattagcaag

SEQ ID NO: 3416 - DNA, 1215 bp, unidentified
  source 1..1215: mol_type = unassigned DNA; note = element_4ff4ab3
  misc_feature 1..2: note = core
  misc_feature 3..201: note = LE
  misc_feature 202..1056: note = CDS
  misc_feature 1057..1215: note = RE
  misc_feature 28..201: note = bridgeRNA
cttgtgtccgcaaaatctgccagaatgtgcgaacgggcggttctcaccaaccgcccgtcgctggatctgagcccgttcgtgctcgaaggccaagagcctgccggggagcgtgggacaggtccggtgtcttcctcaacccgaacagttgcatgggcttagagcccggaccgagcaaggaagggagctggatgatggcacaaaatgatctggttgtcgcggggattgatgtcgccacggcagaaggtcggcaaggcggtgatggaggcgagcggcggttacgagcgcgactgggccaaggcgctacgtgacgccaagatcgaggttcggatcgtcgatccgaagcgggttcgcagcttcgctcaatcggccgggcggctcgccaagaatgacacgatcgatgccgagatgattgcctggttcgccgagaccttcgacgaagctcgcggtcaagcctacgatgcgacgcgcgagcagcttcatcagatggtcagtgcgcgccaggcactgaaggatatgcaggccaagctggaaaaccagggcgagcatgcgatgccggccgcgattcagcggatgcacgcccggatcttgaagacgatcagcgtcgaactggtcaagctcgaggccgcgatctcagccatgatccaggccacgccgcattttgccgaactcgccgagatcatcgaaagcgttccgggaatcggccgcacgacctctgctgcgctgattgccgccatgccggaactagggcgggccaacaataagatcgtggcggccttgttgggtgtcgccccttacgatgacgacagcggacgacgtcgaggcgagcggcacatcaagggcggacgccgccggactcgcaacgtgttctatatggcctgccttggggcggcgacacagcacaatccagtcctgaaggccttttacgatcgcctggttgccaaggggaaagaaaagaaggtggcgctgatcgcctgcatgcgcaagctgatcagcattctcaacatcatgatcgagcggcgccaaaagtgggatgccagtcggtatgcagtgagctgatcgagcgcaaactctgcgctcggcctccggccgagcgcctgcaaagccaaaagaccggtgagcggatggggtcaaggccgccagccgccggaggcggtggcgcgcgcagcgccagccttgagcccagccgatcacaggtctacgtcaaaaacacagttg

SEQ ID NO: 3417 - DNA, 1480 bp, unidentified
  source 1..1480: mol_type = unassigned DNA; note = element_5006549
  misc_feature 1..3: note = core
  misc_feature 4..235: note = LE
  misc_feature 236..1462: note = CDS
  misc_feature 1463..1480: note = RE
  misc_feature 10..219: note = bridgeRNA
cccgttaccttgctggtgaccccgttggtcggggttacggtcgctgggcccggcatgacttactgcccctgtcgtacgaatgatccggggggtgttgtcaccgggcctggtggcgccagatgaccgctgatagggacacggcccagcaatgaggtctcgtcgtaacgtgggtgccggcagctgacgcatcaccagcccacgacgaccgtcgctgcgatgcaaggatgtggtcgtcatggagaaacagatcggcttcgacatctggtgcgggctggacgtgggcaaacaagcccatcacgcctgcgcgctggatgctgccggcaacagggtcttcgacaagccgctgcctcaggaccaatccaaactcgaggacctgttcggcaggctgtccgaacacggccgggtgctgatgattgtggaccagcccaacacgatcggggctctgccgatcgctgtcgcccgatcgatgggcatcaccgtcgcctacctgcccgggctggcaatgcgccgcatcgccgacctccaccccgggaacgcgaagaccgacgcccgcgatgctttcatcatcgctgatgccgctcgcaccatgccccacaccctgcgccgggtcgatgtcggcgaggaagccttggccgaactgaaggtcctggtcggcttcgacgacgacctcgccgccgaagccacccgcctgtccaaccgcatccgcggcctactgacccagatccatcccgcattggaacgcgttgtcggaccacgattgaccaccaagcaaggcctcgcagtcatcgagcatctcggcggcccccaaggcatcaccgcagcgacgaagtcacgcctgctgcgcatcgtcaccaaggcgaacccgcgcggcgcccagtccttcgcagacgccatcacgaccgccctcgccgagcagaccgtcgtggtcgccggcactgccgcggcagagaaggtcctgcccaaactcgctgcctccctgcgccagaccctggaacagcgagccgaattggccctccaggtcgagaaggtcgttgatgaccaccctcttgccgaggtcctgacctcgatgccaggcgtcggggtcaggaccgcagcacggatcctgctcgacatcggcgacgccagctcattccccaccgccggacatctggccgcctacgccggcctcgcgccagtcacccgccgctcggggaccagtatccggggcgagttccccgcccggtcaggcaacaagcacctcaaacgagcactcttcctttcctcgttcgccgcgctcagatctgaccccgccagccgcgcctactacgaccgcaaacgagcccagggcaagaagcacaacgccgccctcatctgcctgtcccgtcgccgctgcgatgtcctgttcgccatgctcaggaatcgagagccctacagggctcccgccccaacaccagaaccctcaccccgacctctggccacttgacgaggaacatagggacac

SEQ ID NO: 3418 - DNA, 1725 bp, unidentified
  source 1..1725: mol_type = unassigned DNA; note = element_501a826
  misc_feature 1..2: note = core
  misc_feature 3..257: note = LE
  misc_feature 258..1481: note = CDS
  misc_feature 1482..1725: note = RE
  misc_feature 53..235: note = bridgeRNA
cttatacattaaactaagattgtcccccctcaacggagggacgcggtggaccgtacagccatcggatggtgggcgaggaaggaaaggataccctctcctagcggcgcgaccgtttcagacagattgaccttcctcctcgtcagtcctggggctaatcgaccatagaaggatgcgcctcgagcgccgtgtataaggccacgactacccaggaactctcccctatccctctctctattcctagaaagcgactgtagacgatgactatgtggtatgccggcatcgattgggccgatcagcatcatgacgccgtggtgatcgacgaggcaggcaagcgggtggcgacgacccgtgtgtcccacaccgccgcagggctggacacgctggtgacgttccttaaagaacagggggatgtcgctgaccaccccgaccacctggcctgcattgtcgagacgaaccggggcttgctcatcgcggccttgctggacgcgggcctgcccgtctatccggtcaaccccaagaccgtcgagcggcatcgcaagcccgccggagccaagaccgacgccatcgacgcttacttgttggcgcgcacgggacggagcgacctggccgacctgcgccgcctgaccccggatagccccctgatcgccgaactcaaggcgctcacgcgcgaccaggacaccttgatccagagccagactcgcctggtcaaccaactcacggcctgcctcaaagcgtactatccggtggcgctggagttgttcggcaaactgcagcagccgaccacgctggctttcttgcaggcgttcccgacccccgaccaggcgcgagcggcgacggtggagcagatcgccgccgtgctcaaagcggcggggcatcccaccgttgcggccaaagctgcgcggatccgggggcgcgtggaccagccgcaattgcgggccgacccggtggtgacgcggaccaaaacgcgcctgatgctgacgttggccgcccagctgcaggtgctcctccccgagattgcggcctatgatgaggagatcacccgcctttttaggctgcattccgacagcagggccttcgcgagcctcccgcgggccgggacgcggttggcgccgcgactgctggcggaatggggcgatgatcgggagcgctacaccgacgcggcgagcgtccagtccctggccgggacgtcaccggtgcccttccagagcggcaacttcgccaaagcgcatcgctgctacgcctgcaacaagccgttgcgcaacgccttgcagcagttcgcctggcagagcacgcagaaagaaccctgggccttgacctaccgtcaacggaagcggcgcgacggcaagagccacgccatggccgtgcgcgccctggcgaatcagtgggtgcgcttcatctacgccctgtggaccaaccacgacacctacgacccggcgatcttccacgcggcccagcaggcccacgcgccccgcgccgcatagcgggcgtccctcccgccgccccgtcgtcaccacccgtcgccgcgccgggcgcgccgggcgcgctgtcgtgccctccgccaccccgcttgcgctcctgaggacgcggggtgtgggggcgcgcagcccccacgggcctgcccccgacaagccacggccggagcgtgtctactcccaccggacacctccagcctcttatgtccacacaggagaaggacatttttatttaccccttgacatagaaggt

SEQ ID NO: 3419 - DNA, 1359 bp, unidentified
  source 1..1359: mol_type = unassigned DNA; note = element_501c9fe
  misc_feature 1: note = core
  misc_feature 2..71: note = LE
  misc_feature 72..1097: note = CDS
  misc_feature 1098..1359: note = RE
  misc_feature 1126..1356: note = bridgeRNA
taatgggatggtccaccccgccccgccggatagattaggctggcagtgttcataccgaactggagaccatcatggacgacgtaacgctcgttggtatcgatctgggcaaacacagctttcatctgcatgggcaggacgcaaaaggcaaggccgtggtccgcaaaaaactgagccgcaagcaactgatcgaattcttcgcgacgtttcatgcctgtaccgtcatcatggaggcctgcgccggttcgcatcatatggcccgcaagctggccgcattcgggcacacggtcaagctgatctcgccgcagttcgtcaggccattcgtcaagtcaaacaagaatgattttgtcgatgccgaggcgatctgcgaagcagcgtcgcggccggcgatgagattcgtgacgccgaagacggaatcgcagcagacgctgtccgccctgcaccgggtccgcgattcgctcgtgcgcgatcgcaccaagaccagcgaccagatgcacggtttcctgcttgagtttggcatcagccttccggttggccacgctgtcatcaagcgtctgcctgccgtacttgccgagcacccgctaccgccgcgcctggtcactattctcgagcgtctgcacgcccacttcaagtatctcagcgaacagatcggcgcgatcgacaaggacatagccgtccagctcgcggaagacgatctcggccagcgcctgctgtcaattcctggcgtcggcccgatcacggcgagtgtgttggccgccgaaatgggcgacggcaagcagtacggctgcagtcgggacttcgccgcgtcggtcggactggtaccacgccagtacagcaccggcggcaaggccaatctgctggggatcagcaaaagaggcgacaagaacatccggcgcctgctggtccagtgcgcccgtgcctacatgcagcggctcgaccggcagtgcggccggctcgccgactgggtccgggcaatgctgacaagacgacactcgaacgtggtggcctgcgcactcgcgaacaagctggcacgcactgcgtgggcgctggcgacccgcaacaccagattcgatgcaggagcgcgcgccatgcctgcctgagccctcgatcctgaacgacgctttatcgaagtacacccacctggttttgcgacgattgaaaattgatgacgtaaacggcacaccggcctgacgaagaacctgagtgcaaaagaggctttccgaagccgaccaactgttaaggatcgtcaggcgcgaatctcatcgtggcgcggggagcagtccccacaacgacgccgaatagatttaggcaagccaactcgccatcgaagatcagggttgcaaaaatgtggtggaccataga

SEQ ID NO: 3420 - DNA, 1210 bp, unidentified
  source 1..1210: mol_type = unassigned DNA; note = element_501f83a
  misc_feature 1..2: note = core
  misc_feature 3..402: note = LE
  misc_feature 403..1176: note = CDS
  misc_feature 1177..1210: note = RE
  misc_feature 12..198: note = bridgeRNA
cttgtatctctcagtgattgatgtttagctagcagcaatcacatcgggacgccagtgagtatgtgaacgacctaatcagaaaatgatgggttgtagataatgccctggcttcctaacctccataaaactgaatggtatcctagcgccctatttcaggtgacgctgcatgtacaaggggagtaaatagagatgaaggcctatgcaggtattgatgtcggtaaagataaattagatgttagttggttacgtgacgccaccacaaacaagaagaaaacgaaagtattaaaaaacacaccaaaagggcataaagaactggtgacgtggttgctcaaaaatacaaaatattaaccgcatgaaatcgttattacagttgaaccaacgggtgtttatagtgaacccctcatgtactatttacatgaacaaggattcattttattacaagcaaatccaagtaaagcgtcgcaatatgcaaaagcgttgaatttggttcataagacagataaatcggatgccacgatgctagcccgttatggacatgaccagcaacattctttgtgtagatggcagccagagccggtggaatcaagagcgttaaaggcgatgctacgcaggctagaagcactagagcaggatttgcagcgggaagaaaatcgatttgaagccgctaatttttcaggcgcatcagcacgagtgattcagtcgctggaagacatgatagcggtgttgaaagatgaaatagacaagttaactcaagaaattgacgaccatatagatgggcatccatcactaaaaaagaaccgtaaattactccaaagcataagcggcgttggggttgttgtttcaagagtgatggttagcttgttagcctgtaagaattttaaaaatgcaaagcagttttcagcgtatttgggtttaattccgaagcttaaagaatcggggaaacaggctggaaaaaccacattaagcaaacaaggcccgagttatgttagggtcaaattatatatggcagcagtcgtggcagggcaacataatcctgatataaaagctcaaaaaacacggttattgcagcaaggcaagaataaaatgcaggcattaggagcggcgatgagaaagctggctcaaatatgctttggagttgtaaaaactcaaacagaatatcagcctcaagttaattaaataacgacttgaagctgattgtgagagatggtat

SEQ ID NO: 3421 - DNA, 1406 bp, unidentified
  source 1..1406: mol_type = unassigned DNA; note = element_501ff46
  misc_feature 1: note = core
  misc_feature 2..217: note = LE
  misc_feature 218..1393: note = CDS
  misc_feature 1394..1406: note = RE
  misc_feature 13..244: note = bridgeRNA
ctacctgttgactgctcgtagctcgcggcctggccaaggcttcgggttaggtggtcggcgagtcgctcactaggtgcctgcccgcatccgtgcgtggctctgtaacggggtgcgttcttgccggccatcgtcccggcgggtcgtggctcaagaggggtctgctgcgctcaaggtaggactgcccggcctcgccatctcacacttcgaggaggcggttgtggcggcagtgatgatcggggtcgacccggccaagcgcagtcatgcgatggcggtgctcgacgggcatgaagagcagttggcggcgctcgaggtcggcaatgacagcgccggataccgcgcgatgttggcgttggcgaagcgctggccgaaccggacgtgggccgtcgagggtgccggcggtgtcggggtgcagttggcgcaacgactggtcgccgacggcgagactgtcatcgatgttccaccgaagctgtcgacacgggcgcggatctttgaccgtggacatggccgcaagaacgacccgaccgacgcgcggacggtcgcggttgtcgcgttgcgcaccaaagggctgcgcgaggtcgcgctcgacgacgagctgatcgcgttgcggctgatgagcgagcgacgcacggacctggtccggagccgaaccgcgacgatcaaccacctccaccaacttcttatggagctcattcctgctggggctgaacggaatctgaccgcgaccaaggcgaaggcgctgctcgcgactgtccgcccgcgacacatcgctggccgcacccggcgccagctcgccgctgacctgatcgaggacctgactgctctcgactgccggctcaaagacctcgacaagcggctgcgggaggcggtcgaggcgaccggcaccgacctgatgtcgatcaaaggtgtcggggtcgcgacggcagcgatggtgctcggggaggtcggcgacatccgccgcttcccgagcaagcatcacttcgccacctacaacggcaccgcgccacgcgagtactcctccggcggcgtcgacacccgacggttgtcccgcgccggcaaccgcaagctcaaccacgcgctgcacgtcatcgcgatggcgcacaaacgctacgaccagcgcggcagcgcttactacgaccgcaagctcgccgacggcaaaggcaagaaaggcgcgcttcgctgcctcaaacgacgcctgtccgacgtcatcttccacacactcagcgacgaacgcgcacgacgtgaggtggcgggcccggaagggcactcgggggcgactacaaagtcctgcgcgactgaccgaaccccgatggccagcacttcggaaaagccactagccggacccgccacaccggacgctacgcctcaccagctgccacgaaaagtccccgcttgacacagaggggagc

SEQ ID NO: 3422 - DNA, 1467 bp, unidentified
  source 1..1467: mol_type = unassigned DNA; note = element_501ff69
  misc_feature 1..2: note = core
  misc_feature 3..235: note = LE
  misc_feature 236..1450: note = CDS
  misc_feature 1451..1467: note = RE
  misc_feature 1..230: note = bridgeRNA
ccgttaccttgttggtggcccctttggttggggtcacggtcgccgggcccggcatgactggtctgccctgtcgcatgaatgatccggggggtgttgtcaccgggcctggtggcgccagccgaccgctgatagggacacggcccagcattgaggtctcttcgtaacgtgggtgctggcagctgacgcgtcaccagtgcccgacggccgtcgcttcgatgggaggatggtgaccgtcatggaccagaacaccggttacgacatctggtgcggactggatgtgggtaaacaagcccatcacgcctgcgctctggatgctgctggcagacgagtgttcgacaagcccctgccacaagaccagaagcgcttggaggaactgttcacccgccttgagggccttggccagatgttggtgatcgttgatcagcccaacacgatcggcgcgttaccaatcgcggtcgccaggtcgatgggcatcactgtcgcctatcttccagggctggcgatgcgccgcgcagccgacctctacccaggcaacgtgaagaccgatgcccgtgacgcgttcgtcatcgccgagaccgcccggagcatgccccacacactacgtcgcgtcgatgccggtgaggacactttggcggagttgaaggtactggtcggctttgacgaggacctcgccgccgaagcgactcgcttgtcgaaccgtatccgcggcctgctgacacaaatccatcccgcactagaacgcgtcatcgggcccaggctggccaccaagcaaggcctggccgtcatcgagcaactcggcgggcctcaaggcatgacagccgcgtcgaaaagccgcatgcttcgagtgatcaacaaggccaacccgcgcggcgcggccgacttcgccaacgcgatcaccacagcgctggcagaacagaccgttgtcgtcgccgggacggctgcagccgagcaggtcctacccaagttggcggcatccctgcgccaggtcctggaccagcgggccgagctcgccagccaggtcgagaaggttgttgatgctcaccctcttgccgaggtcctgatctcgatgccaggcgtcggggtcaggaccgcagcgcggatcctgctcgacgtcggtgacgcctcacagttcccgaccgctggacaccttgccgcctacgccggactcgcccccatcacccgtcgttcagggaccagtatccgcggcgagttccccgcccggtcaggcaacaaacacctcaaacgagccctgttcctgtcagccttcgccgcgctgagagcagaccccgtctcacgggcctactacgaccgcaaacgagcccaaggcaaaaaacacaacgcagccctgatctgtctatcccgccgccgctgtgacgtcttgttcgccatgatcaagaaccaagaaacctaccagacacccaaaccagccccaacacccctcgccgcttgacaagaaacatagggaca

SEQ ID NO: 3423 - DNA, 1551 bp, unidentified
  source 1..1551: mol_type = unassigned DNA; note = element_50246d0
  misc_feature 1..3: note = core
  misc_feature 4..8: note = LE
  misc_feature 9..1226: note = CDS
  misc_feature 1227..1551: note = RE
  misc_feature 1258..1474: note = bridgeRNA
aagatgctatggggcggcggcggggatactgcatccatcgtcgctatgaaccgatggagccgtccatgcagaccttgaacgacttaagtcgatcccccttcgccctcgaggcagccagcacattgattgcggtcatcgagatgagcttgtcgagctggctcgttgctggtgtcgtgcccggcattgagcgccagccgttgaagaagctcgcggtcgacgaaagcgctctactgaggctgctgcatcgatggcgggaggaggcggagaaagcaggatgccggatcgaacgcattgtcgttgccttcgaggccggccgtgacggcttctggttagcacgctggctcaaggcgcgtgatattgaggcccacgtcattcatgccgccagtgtggcggtgtcgcgcgagcatcggcgagcgaagaccgaccgtctcgacaccgagctgctcaaacgcgcttttctcggctggctgcgcggcgagcgtgatcactgcaaggttgtcgcgatcccctcattaaaggaggaggatgccaagcgccccaaccgcgagcgcgagagcctcgtctgcgagcaaagtcggattgtcaaccgaatgaaggcggcgctgattcggctgggcatccgtggattcaatcccaaactaaaaagggccgctggacgtctcgacagtttgcgaacgcctgagggcgagccgatcccgccgaacacactggcggagctgcgtcgcgacatggagcgccgacggtttgtcagtaatcagatccgccagatcgaagatgctcggctggagcggctcgagcaagcgcccagtgacgaaccacatgccatggttcgccttttagctcgcgtgatcggggttggcattgagacggccgacatgctggtgcacgaggtgctgtcgcgaaacatgcgcgaccgaagagctatagcccgttatgccggtctcaccggctcacccgacgagagcggtaggaaacgccgggagaaagggctggcccgttccggcaatggtcgagttcggcgaggcatggtccaattggcgtggcgatttttaacgtaccagaaggagagcgccctagcgcagtggtatcgagctcgcacgcagaatgccaacagtgctcgcaagcccctgatcgtggctttggcgcgcaagctactgatcgccctgtggcggttcgtgcggcagggtgttgtaccggacggcgttgttttgcggccggcgcaatgaacggaggcgccgaaggcgcccgacagattcagaccaggccgctggtgacggtcgccgatgacagttcgaggtagcggcatcccggtttgccccttggctttaatgccgattggaagaatggggccgctgcttcggagcttcgctgccgatgcgcatgactgcatcgtggttcgggtctctggacctaccgcatacaaggttgtggtgcgattcaatcgcgcccaaaagcgggctcccctctgattgtcatccggccgcacgatcgaaccgagaaaccgacgatgggaaaaatgcgtcgccctgcttgacacaaaaagccccatac

SEQ ID NO: 3424 - DNA, 1226 bp, unidentified
  source 1..1226: mol_type = unassigned DNA; note = element_50264c4
  misc_feature 1..3: note = core
  misc_feature 4..240: note = LE
  misc_feature 241..1218: note = CDS
  misc_feature 1219..1226: note = RE
  misc_feature 48..219: note = bridgeRNA
catcctatgtttgtaggactttgatgaaagcatagataagaataattttattgcagaagaaaaaggtaaagagaaaagattacgatgtgtcattagcccgtaggaaggctgttcagcatgctaatccctttaccctttgcttaagagcttgaacagttcattaggccaggagcctgaatgtaggattgataagccattaagcagattcttctactttttattatctcttaaaacaaagttatgcaatcacaaacaaattacgcaggtattgacatttcaaaattgttctttgatgtagcttttatgcattcaggccattacacttatcaccagttcagtaatgaccgaactggttttatggctttattaaaggtacttccgccggacagttgggtggtgatggaagcatccgggccttattatcttcagctggcctgtttccttcgtgagcaaagtgtagccgtaagtgttatcaatccgctggtgatccgccggtttagccagatgcggatgtcgcgggcaaaaacagataagaaggatgctaaaatgattgcggaatatggcagcatatcgcagcttgttttatggcaaaagccacagcagcacgtaattaccttacagcagatggaagctttattgtcaaggctgcaaacggaacatactgccctaagcaaccaactggaaagttttgataacagtggtatgctgacaaaggaattgagaaaagagatttgcgcagagttgctgcacaaagaccggctgattaaaaagttgacaggaaaaatggagcaaatagcgcaagagcactattcaggcatgttagctgatctggaaagcataccaggcataggtaaaaagacggcaatgatgttaactgttcttagtggaggttttacccgatttgatgattaccgaaaactgagttcttatatcggtatttgtccaagaatatttgagtcgggaacaagcgttaaaggcaaagccaggatatgcaagatgggaatgtcacgtatcagggcgatattgtatgtgtgttcatggagcgctaagagatgcaataaggcctgccgtgagctttatgaacgactattagcaaaaggaaaggcgaaaaaattggcgctgattgcagtcaccaataaactattaaaacaagcttttgctatcgctaaacaacaaacaaaatacaacgaaaattattcaaatattatttgcttttaaacacagtt

SEQ ID NO: 3425 - DNA, 1373 bp, unidentified
  source 1..1373: mol_type = unassigned DNA; note = element_502d553
  misc_feature 1..3: note = core
  misc_feature 4..82: note = LE
  misc_feature 83..1111: note = CDS
  misc_feature 1112..1373: note = RE
  misc_feature 1085..1360: note = bridgeRNA
tgatgggttggataccccctcccgacggcatcgcaatgtgccaaggtgatgtgggtcacatcactgataggaggaagcatccatggaacaagttaccatcgttgggttagatttggcaaagcgggttttccaggttcacggcgccacggctgatggcggcattgctattcgcaaaaagctgtctcggggccaggtgttggcatttttcgcggacctgccgccctgtgtagtggcgatggaggcctgtgctacagcacattactgggcccgtgaaataggtgctttgggacacaatgtgcggctggtgccacctgcgtacgttaagcctttcgtaaagcgccaaaagaatgatgccgctgatgcagaagccatagccgaagcagccagccggccgactatgcggtttgttgaaccgaagtcgccgcaacaacaagcgcgcgctatggttttcaggacgagagatcttttcgtccgacaaagaacgcaaacgatcaacgctctgcgtgcgcatctggcagaacacgggctgatcgcaccgcaaggcatgtccaatctggcaaatatccggcggtttattgatgaggccgcagctgaagtggagccgttggttgtcgaaacagctcacacctatcttgagcaaattgatgatctatcatctcgcattttgaagttggaggcgacgttgaaacaagaagccgcccgaactgatgcttcatcacggatgatgactatgccgggagttggtcccattaccgcaatggcgatagaggcttttgctccatctctttgtgtctttaggcgcagtcgggatttcgctgcttggttggggcttgtgccacgacaacattctactggcggcaaacaggtcttaggccgaacgtcgaagatggggcaacgggatatccggcgactactcataattggcgcaatgtcagtcattcggtgggcaacccgcaaaggaacaaccccagggacttggctacattccattctcctacgcaagccgcgcaaggtggcggcgatcgcactggccaacaagatggcccgaacgctgtgggcgatggaaacgcggaaggaagattacagagatccacgtctgacagcggcttgattgtatcgagcagtcagtagtggaagtcggcatgtgaggaggtcatagacagtaaggacaaaagatcggtgacgacggttttgaaaacgcatccgggtcaatgggccaagagcccgcagaactgattttgcatcaaggccgcgcagctccataccggccagcggtcatatgattgccgcacaacaggcctgatacatgaccgcatccgatcacacgtcactatgtcgaaaaaccatcttgcgcgaacgggggtatccataca

SEQ ID NO: 3426 - DNA, 1435 bp, unidentified
  source 1..1435: mol_type = unassigned DNA; note = element_502f696
  misc_feature 1..2: note = core
  misc_feature 3..115: note = LE
  misc_feature 116..1171: note = CDS
  misc_feature 1172..1435: note = RE
  misc_feature 1206..1435: note = bridgeRNA
agaatgagatgaacgccccccactcatcaggcccggagcacgatgatgaatgaagggaaaatacttgaaggtgtggagcctctcagattttcggcatcaaagtgcccaatatggaatgcataaagcttcctctgactggagactccacatcatgaaatatacaccggttggcgttgatatcgcaaagcacctgattcagattcacttcattgatgaacactctggtgaagtggttgacaggcagttgcgtagcaaagactttctgatgttcttcagtaacagagagccctgcctggttggcatggaagcctgtggcggctctcagcactgggcacgggaactggaaaagttgggacacaaagtccggctgatgcagggacgtttcgtcaaggcgttcgtcatgggcaacaagaatgatgtcatggatgcacgggctatctggatggcggttcagcagcccggcaaaacaatagcggtaaaaaccgaagagcagcaatccgtgctggtcctgcaccgttcgcgcagacaactggtaaaattccgaactgcgcagattaatgctttacacgggacgttgctggagttcggtgaaactatccataagggccggacagcaatggacagggagttgccggcagctctggataggctgaaaacgaccttgccaccctatctcatcgctgtacttgaggatcagtatcgcaggctcagcgagctggacaagctgattgatggtcttgaaaaacagcttcacagcgtggcgaaacagaatgaagcctgcaggcgactgatggaaataccgggtgttggccctctgatcgctacggcagcggtcgccactatgggagaagcatcggcgtttaaatccggacgggagttcgcagcctatatcggtctggtgccaaagcagacggggtcaggggggaaagtacgtttactgggaataagtaaacgaggtgatacttacctgcgaactctttttattcacggagcacgggccgcatcaatgtgtacaaaagaacccggcccgtggattacagagctaaggaaacgacgtccgacagcggtggccattgttgcgatggcaaacaaactggcgaggacagtatgggcaataacggctcatgaccgaagatacgaaaaaaatcataccagtatcagaccgtattaatcgctgataccagtaaatattaactctcaatgggtgaaggctgaaaggttgctatggtggcccgagtgatgacaaagacggtaagaccgtgacctgataaacctgtatggttacctggacgtaaagtccgcccggagaataaggatcaggtcagcgaatctcatagtggcccgcagctctgactgcaacaaggccggatacagagctgcaactactcgtcaatgtcaaacaacggaagccttgcaaacggggaggcgttcatac

SEQ ID NO: 3427 - DNA, 1405 bp, unidentified
  source 1..1405: mol_type = unassigned DNA; note = element_503a7a5
  misc_feature 1: note = core
  misc_feature 2..90: note = LE
  misc_feature 91..1131: note = CDS
  misc_feature 1132..1405: note = RE
  misc_feature 1172..1397: note = bridgeRNA
taatggcatggacgctcctactttgcaaggcatcagttgtgccagagtggaagtgtcaagcaaccaccaaagaaagcaggagcgtccgggatgaacattacgcaggtcgggatcgatttggcaaagttggtttttcaggtccacggggtcgactctcgagggaaggtcgcggtgcgcaaacaattgaagcgatcgcaggtcgcggagttttttgctcagctggcgccgtgcctcatcggaatggaggcctgcggtggcgcgcatttctgggctcgcaagctcatggagttcggacacaccgttaagctgatcgcgccgcaattcgtcaagccctatgtgaagaccaacaagaacgacgcagcggatgccgaagcgatctgcgaagcagtcgggcgaccaaatatgcgttttgtacccataaagaacaccgagcagcaagcgttgctcggattgcaccgtgtgcgacaaggattcgtcgccgcgcgcaccgcgcaggccaatcaaattcgcgggttgctgaccgagttcggattagtaattccagtcggcattcgttccattgaacgtaaggtgcccgagtttctcgaagatgccgcgaacggattatcgggggcgagtcgcgctctgtttgcacgactgcttgaacattttcgagcactcgatcttcaggtagcggagctggagcgagaaatcaatgcttggcaccgcgaggacgcgagaagccgacgtctgcaggcgattccagggatcggtccgcttaccgcaagtgcgctggtggcgagcgtcggggatgcgaagctttttcacaatggcaggcaatttgcagcatggctcgggctcgtacctcgacagaactcttccggcggaaagacgactctgctcggcatcagcaaacgcggtgacacgtacttacgtacgcttttgattcacggcgcgcgttcggtgttgttcagtttgaagcgcgatcccgaccgagctgaacaatggctggcacgcgtcgcgaaccggcgaaatccgaatattgctgcggttgctctggccaataagaatgcgcggaccgtctgggcgctgctggctcatggccgcgatttccagaccggttaccgctcggcgacgccagctgcggcataggaccgatatcggcagtaattcttgacacaactctcccaccaccgattgcacaggtgtttttcaaagtgatggcttcacaggtaagaccggggttgaccaagcctgcagaacgtacgggacttcaacagtccgataacgtaataaggcgtcaaccagcatattccatcagggcccgcgacccggcgtcgcactcacaggccgaatgtatgcgagcaatctattcccgtgatccaaaaccgaaaagaaacgcttggcataacggagcgtccatgta

SEQ ID NO: 3428 - DNA, 2108 bp, unidentified
  source 1..2108: mol_type = unassigned DNA; note = element_503ea9b
  misc_feature 1..2: note = core
  misc_feature 3..288: note = LE
  misc_feature 289..1500: note = CDS
  misc_feature 1501..2108: note = RE
  misc_feature 12..307: note = bridgeRNA
ctattacaatatattttggttggggcacggcagccagccgtgcctttttccatatcgttgccaaagctgttagaatgggagcgtctgggcctgacgtatgcctccaaggacccattgcgtccgatcagaagtccgtcagccagcctctcattcgcagcgttcgatttatgcaggttgagccgccatccgagttctccggcaagcgcgtccgtgtcatcaaatagattgaatcggcaatgatgaaagggctggtcgccaaagacaaatccaagacagggagcgttgcgtatgaacaatgtggcagggatcgatatttccaaagggaagagtacggtgtcagttctccgtccttttggagaggtggtggcaaaaccgtttgcagtaagtcacaccggcagtgaactcaggcagctggcaaactacctgaaaagcctggacggtgagacccgtgtggtcatggaacacaccgggcggtactatgagccggtagcccagttccttcataacgagggcatctttgtcagcgctgtgaatccgaaactcatcaaagactatggcggcaacacgctgcgcaaagtcaagacagacgcggcagattctcggaagatcgcccggtacggtcttgacaactgggccgagctgcggcaatatgcttccatggacacgattcgttaccaactgaaaacgctgaaccggcagcaggggctgtattccaaaaccaagacgatgatgaagaacaacctcatcgcccttctggaccagacctaccccggcgccaacgccctgttcgacagccctgtccgtgaggacgggactcagaagtgggtggactttgccgcgtccttctggcatgtggactgtgtgcggagcatgagccagagtgctttcacggagcgttaccgcaaatggtgcaaacggcacagctacaacttcagcaacgtcaaagccgatgagatctataccgaagcgcgggatttgattcccatgctgcccaaggacgccatgaccaagctgctggtgcagcaggccgtcgactctctcaacgccgtttccacggcccaggcccggctcaaggccgagatgctgacactggcttcccagcttcctgagttccccgtagtaatggccatgcgcggcgtgggtgagtctctcggccctcaactcatggcggagattggggatgtgacccgcttccctcacaggggttccattacagccttcgccggcgttgatcccggcgccaaccaatccggctctcatgagtcccaaagtgtgaacacttccaagagcggtccgccggaactgcgcaaagccctgttcctcgttatggactgccttctgaaaaccatgccccaggatgacccggtataccgattcatggataagaagcgttccgaaggaaagccctacctggtttacatgacggctggcgccaataagttcctgcgcgtctactatggcaaagtaaaggagtatctctcccagttggagaatttgtgaagcatccttccttgagtcggaagcacattgcccatactctaaaagcatcttatgacagaaagagagaaagtaagatgtttttagacaatttatccacctctgtactccaactttgcgacgcccgcaaactcagctacgaagcagcttccgaacgatgcggcctcagttcccggtatttcggtgatattgccagaggcaagaccgcccccacggtccccacgctggaaaaactctgcggtggctttgagctgacgccaaacgatctgcttattccctcacctgtttggagggagatagcctttcgcacccccatgcctgtgacgcatatccgctgtttccgttattcttatcccgatggtctcaccagctttcctgtttgccctcaatgctggatttccatggaacgggaataccaagcttactgtgaccgctgtggacagcgcctagactggaaagacctttccaaagcggctgtcattcgctctgaaaaatgaatgtgctttcacatccctcacggccagttgcttctgcctgctggccgcttttggtttgctcatctcccttcctccaatctttcttcatttccctattgactttttatttgcaga

SEQ ID NO: 3429 - DNA, 1459 bp, unidentified
  source 1..1459: mol_type = unassigned DNA; note = element_503ed78
  misc_feature 1: note = core
  misc_feature 2..235: note = LE
  misc_feature 236..1444: note = CDS
  misc_feature 1445..1459: note = RE
  misc_feature 43..214: note = bridgeRNA
cccgttaccttgttggtggttgccggtgaatgagtgccggtggctgggccagcggtggtcggcatgatgttttgcccctgtctttgaatggtccggggggtgttgtcaccggccgccgcggggctgctgctcaccgctgatcaggggaacgacccgctcgaggtctttcgtaacgtgggtgcgggatcggcggctcaaggctggcccgatctcctacgagacgagggagcggcacgtgcagacctccagcattgacgtgttcatcggcatcgacgtgggtaagtccgaccactgggccaccgccctggaccgggacggtaatcgcctgttcgacaaggccttgcccaacgacgagaccagactgcgagacctctacgagcggctggcccggcacgggcgggtgctggtggtcgtggaccagcccgccaccatcggagcgctggctgttgccgtggcccaggacatgggcatccccgtgggctacctgcctggcctgtcgatgcggcgcatcgcggacctgaccccgggcaacgctaagaccgatgcccgtgacgccgcggtcatcgcccaggccggccgcaccatgccgcacacgctgcgggccatcaacggctcggaccaggacgcagccgccctgtccatgctcacgggcttcgacctggacctggcccgccaggtcaaccagacctcgaaccggatccggggcctgtacacccagatccaccccgccctggagaaggtcctgggtccacggctggagcacgacgccgtccttgaggtcatcgcctcgtggcccgtccccaccgccctgcgaaaggccgggcgggtacgagtggccgctaagctcaaggcccacggcgcccgccgccacgaggcctgggccggcgagatcatcagcgcgctggaggcccagaacgtcgtggtcatcggcaccgacgccgccggaatcgtcctgccccacctggcccgccaactcatcgccctgcacgcccaacgccgtgacgtcgctgccaaggtcgaggccctggtggaggcccaccctctttaccaggtcctgacctccatgcccggcatcggggtcaggaccgccgccgttttcatcgccgagaccctcggacggtccttcgacaccggagcgcacctggcctcctacgccgggctcacacccgtcacccgacgctccggctcctcgatccgcggcgagtacacctcccacgcgggcaacaagaggctcaaacgggccatgttcctttcagccttcgcctcactacgctcagaccccgtctcccgggcgtactacgaccgcaagatcgcccagggcaagcgccacaaccaggccgtcatcgccctagcccaccgccgcatcctcaccctacacgccatgatccgaaacgccaccctctacaacccccaacccacccaccaactaccaaccgtcgcttgacacaccacatagggg

SEQ ID NO: 3430 - DNA, 1539 bp, unidentified
  source 1..1539: mol_type = unassigned DNA; note = element_5042629
  misc_feature 1..2: note = core
  misc_feature 3..253: note = LE
  misc_feature 254..1417: note = CDS
  misc_feature 1418..1539: note = RE
  misc_feature 3..231: note = bridgeRNA
cttgtatgatacattcagaagccaatatcatacttatcctttcttttatatttgtgatatataatacatccagatgctgtggacttttaataattttctgtagtccaactactttaaggagtgtattgccacagctttatctgaatcattaatagctggatgtgcctcagagcacttatttcaatcaagtttatgatgatattgcttcagtggattatcacagcatcaatccaataagaaaggagcctttacgatgttttatgttggcattgatattgccaaacttcatcactttgcttctgtcctatcttcagacggtgaagtgctctcggagccttttgaattttcaaatgactatgatggcttccaaaagctgctctctgctctcagttcttttgagaaagacagcctcatcataggtcttgaatctacggctcattatggcaacaaccttgtaacctatctgttttctcttgatttcaaggtttgcgtcatcaaccccatccaaaccgccacattacggaaaaacaatattcgtaaaacaaagacggacaaggtggatgcttacttaatagcaaaagaacttatgctttatcctcatcggccagtttccgaggtggacgttcagatcatgaagctcaagcagctatgccgctttcgccacaagctgctgaaagccagaaccagggctaaaatacaactaacctcatatgtggatcaactatttccggaattacagtactttttcaaatccggaatccacagtaagggctgctatgccctattaaaagaagttgctgtcccccaggacattgcttccatgcatttgactcatctgaccaaccttctcagaaaagcctcccacggccactttcagaaggacacggctcagaaattaagagttctggcacagaagtctgtcggtacagggaacaaatctatctccatacagatagcccagtctattgaacaaattgagctatatgacagacaaaatggagaagtgcttgtccagattgagtccatcatgaaggatcttgattccgtcatcatgaccattcctggcatcggatatttaaatggggctatgatactcggcgaaatcggtgaaatcagccgcttttcccatcctagcaaagttcttgcatttgcaggtctagatccttcagtgcatcagtccggtaactttaaggcaaatcatacgagaatgtcgaaacgcggctcaaaacttcttcgctatgcactgatcaatgctgctcataacgtagtacggaacaacaaaacctttaaagcatattatgatttgaaagtagccgaaggtcattctcattacagcgcgttagggcattgtgccggaaaactggtccgtatcatctacaaaatgcttagctgtaatgttagcttcaatttagagtaacattgccctattacccactctttgaaaagcacctgttagatgctttattgaggttgccatttttttggtaaccacaatatttaaatattttctgaatttatggttgacttttcatagctggt

SEQ ID NO: 3431 - DNA, 1382 bp, unidentified
  source 1..1382: mol_type = unassigned DNA; note = element_5042eab
  misc_feature 1..2: note = core
  misc_feature 3..87: note = LE
  misc_feature 88..1119: note = CDS
  misc_feature 1120..1382: note = RE
  misc_feature 1150..1370: note = bridgeRNA
tgatgctgtggacggctcctccaccggcacgagagtgccaaagatgtgggcgctgtttaaggctcccacgattcggaggagctacccatgcaaacgatcacgacaatcggtctcgatattgcaaagtcggtctttcaagttcatggcatcgatgcggagggcaaagtcatcctccgtcgtcaactcaagcgccgctacgtcctggcgttcttcgagaagctgccgccgtgcctggtcggcatcgaggcctgtgcctcgtcgcaccattggtcacgcgagctgcaggcactcggccacaccgtgcggctgatgccgccggcgtacgtgaagccctacgtcaagcgacagaagaacgatatggccgatgctgaggcgatttgtgaagcggtcacaagagccaatatgcggttcgtgccaaccaagacgcccgagcaacaaagcgtactgatgctccatcgcacgcgtcatctgtttatccgccagcagacctctgtgatcaatgcaatccgggctcatcttgctgagtttggtatcgttgcgccggtcgggcgccgtggggtcgaggagctgctcaatgtcgttgccaatcccaacgacaagcgagttcctgagatagcccgtgcgtgtctattggcattcggagttcaactgcgaaggctcaaggagcagattctggagttcgaccgtatgatcatagcttggcaccgatccagtgagacgagcaggcggctggatgattgtccgggaattggtccggcgctggccaccgctctggtcgccactgttgccgacccaaaggccttccgatcggggcgcaatttctcggcctggatcgggatcgtaccgaagcagcactcgagcggcggcaaggaccggctcggcaggatcagcaaacaaggtgaccgctatctgcgcagcctgttcgtggccggcgcgctcgccgtcatccgctatgccaagatccatggcaccaagcatcggccgtggctcgcagcattgctggcacggcggccaacgaaggtcgccgccatcgcgctcgccaacaagatcgcccggatggcctgggcgatgatggccaagggcgagcgctacaaggaaccgatcgcgcttgcggcgtaaacgagatcgcgccggacagccggcgtgatgtgaaggttgggagggacgaacagcacgtaatgcagagccggtcgatccggcgatcaggacaacccacttgcacccacgcattgtcgaatgcgcgcaattgttcgggacctgatccgcggagggcattatggccagcggtcatgtgagccgcgaaaacaggccgaacacatgggcgcaccgaccaatgctgcatacgtgaaggaagttcttgccaactcggagccgtccacaca

SEQ ID NO: 3432 - DNA, 1477 bp, unidentified
  source 1..1477: mol_type = unassigned DNA; note = element_504a1ca
  misc_feature 1..2: note = core
  misc_feature 3..211: note = LE
  misc_feature 212..1456: note = CDS
  misc_feature 1457..1477: note = RE
  misc_feature 7..237: note = bridgeRNA
ctaatgggggtcgaccacctcgctttgtgactcggcgaggctgtcactgagccaccagcaggtcagcactcggcttgagcgccgggcttagagccctagttctagaccgtgcgcctgctggttggtgaggtggacctgacaactggtgggatgacgtgccaaatgagcactgaaccattagcgcgttgatggccgcctcgggctcgtagcagtgttgagcgcgcgaaaggagctgaagttgggccaggtatttgtcggccatgactgggccgaagaccaccacgacgtggagctgattgacggtgcaggaaggcgcctcgctaaggccaggttgcctgaaggggctaagggggtctcccagttccacgaactggttgcccgccacgctgaagagccgtccgaagtagtgatcgccaccgagacagaccgggccctgttcgtcggggcgttgatagcggccggctacagggtctatgccgtgaaccccatgtcggtggcccgttacagggagcgccactcgacatctggggccaagtcagaccccggtgatgcccatgtgctggccgatctcgcccgcaccgactcgcataaccaccgccaagtcgccggcgacagcgagctggccgaggcgataaaggtcctggcccgggcgcaccaaggaatggtctggtcccgtcagcgccagctcaaccagctgcgctcagctctgcgggagttctacccagccgctttggctgcatttgacgacctcgggcacccagacgccttagccgtgctggctatcgcccccacgcccgagctgggccgggggttgtctcgctccaagatcgccgctgcactacgccgtggcggccgccaacgccgggtggacgagcgtgctgtcgaagtccaggcggctttgcgctccgaacaactggccgccccagcgctcatctccaaggccatgggggcctcggccaaggcctgcatcgctgtcatagccgagctcaccacccaggtagctgccctcgaggtggagctatcagagcattttgagctgcacccggacgcaaaggtcgtcctctccttgccagggctcgggacggtccttggcgcccgggtgctcgcagagttcggggacgcccccggacgctacgccgatggcaagtctcgcaggaactatgccggcacgtctccggtcaccaaggcatcaggcaagtccaaagtggtgctggcccgcttcgcacgcaaccggcgcttggccgacgcttgctaccgctgggcattttgtgccatcactgcaagcccaggggccaaagccttttacgaccagcgcagggcggccggcgacacccacaaccgcgccctcagagcgctctccaaccgcctagtcggcatcctgcacggttgtctccgctacggcgagctctatgacgagaagcgggcctggggccatcgcagccagcttgtggcttgacaagttatgggcgtgggatgt

SEQ ID NO: 3433 - DNA, 1647 bp, unidentified
  source 1..1647: mol_type = unassigned DNA; note = element_505be13
  misc_feature 1..3: note = core
  misc_feature 4..126: note = LE
  misc_feature 127..1323: note = CDS
  misc_feature 1324..1647: note = RE
agtaattatgtaagaaaagcatagcgcagcgtatgcggtcatctcctgaagatcaggggagccgaaatttaatttttaggcgataactttaagtttcgcaattattaacaattaaataaccgcgctatgccaacaacaaatttgcaaaattcgcatgactttaatggtcaaaaattttatgtggggcttgatgtccacaaaaaatcgtgggctgtaacgatacgaagcctgggtatggaagtatcgcactttacccaaccgcccggagctgaagcactaagtaactatttgaaacgggagtttcccggcggcacataccattcggcatacgaaactggtttttgtggcacaggtattcacgaacagctttgtaaactggggataaagaacatccttgtacacgcggccgacgtaccatcaacagacaaacaaaagaagaacaaaacggaccttcatgacagccgggcaattgccgggcatcttgaacggggcaatttggaaggtattcatatattaacacaagagcaacaggaattaaggagtttatttcgtttacgggagagcaaggtcaacgatgtaacccgtgtgaataacaggctcaaaagtttcctgatgtattacagcataaaattgcccgaaacggtctccaaaaacgagtttctgtccaacaaagcattagcctggttaaacatggaattgggctgcccgtcaggaacgtttgccttacaacagcatattgaggagttaaaataccagcgccagcaattattttatatcacaaaatcactgcgggtacaggtacaggctttgcatgaaaaaacatataaaagcctactttctgtgcccggcataggagcgattacggccatgggcctgatcgcagaggtggccgactttgcgcgttttgatgatccggatgaatattgcagttatcttggtctgtgcccatgggaagacagctctggagataccatcaagactaaaggtgtacaaccccgctgtaacagccacctgcgtcccctattagttgaagcttcctggcaggcgataagaaagtcccgcaccttatttgcttattacagcaaacataccggcaaaagcggtaaaaaggctattatcaaagtagcgcgtaagctggccctgattgctaaaggtgtggcaacaacagggcaactttatcaggatgattacttaaagaaaaaacaacaggaacaacaaaataaaaaaaacctaagagtggaaaggttttcttcaggtatcacggaacagcatataaacaaacagcctgacgatagtatgcaaatagcaactatgccaggctgatatgctttatccggctgtaatatccctggcaggttgctcctcagcagagcctgtttccgttttttacagcatcgtaatttaattaaacatgcattcagtaacaagcaaactaatctaatcaacagcactaagaggaaaacgcacgtttgaaactgtattaaaatacattgcgaagtattcgtacctctttttatttcacacaattactggcggcatttgaccgcatatagcagtttgagaattgttttttgtttactgaaactaaaataataactttatgtgattaataaatctcatacctgtctgcttgcttttctacatagc

SEQ ID NO: 3434 - DNA, 1367 bp, unidentified
  source 1..1367: mol_type = unassigned DNA; note = element_506a062
  misc_feature 1..2: note = core
  misc_feature 3..84: note = LE
  misc_feature 85..1101: note = CDS
  misc_feature 1102..1367: note = RE
  misc_feature 1119..1353: note = bridgeRNA
tgatggggtggacggcccctgacccagcaagagtgctgtgtgatgatatggctgtcgaggagccacgtctaaaggagccgtcccatgcagggtgtgaccacggtcgggctcgatctggccaagaatgtctttcaggtccacgcgattgattccgcgggaaaggtgctggcgcgccgccaactccgccgcgccgaagtcttgaggtttttctcggccctgccgcagtgtctcgtcggcatggaggcctgtgcatcggcccatcattgggcgcgggagctggtggcattaggccacgaggtccgcctgatgccgcccgcttacgtgaaaccctatgtaaagcgcggcaagaccgatgccgcggacgcggaggcgatctgcgaggcggtaacgcgtccgaccatgaggttcgtcgcggtgaagacggtggaccagcaggcggtgctgatgctgcataagacgcgcgacctcctggtgcggcagagaaccatgctggtcaatgccctgcgggggcacctggcggaatacggggtcgtgcaccggcaaggggccgtcggtgtggccgccgcgatccaggcactgcacgaggccagggatgccttgcccgaactcgcgcgggacgcgctgcacaccctcgcggaccagctgcgcggcctgtcaactgagatcgagcgcatggaggcccggattgttgcttggcaccggggcaacgagaccagcaggcgtctggccacgatcccgggaatcggcccgatcacagcgtccgccattgcggcggcggtgcccgacgcctccctgttccgctccgggcgacagtttgcggcgtggctggggctgacgccgcgcgcccacagttccggtgggaaagagcggcttggcggcattagcaaacagggcgacgggtacctgcgccgcctgctggtcgtcggcgcgacggcgatggtccggctggcgcgcaagaatgccgagcgccaaccctggttggctaggttgctgggacgcaaaccggccaaggtcgcggcggtggcgctcgcgaacaagatggcgcgtgtcgcctgggcggtgacgacgcgcaaggaggtctacgcggctccagccgcgtagccaggggctgttccggcctttcccttccaaggtcggggcggtggtgcggggtggtgagtgttgatgacggaccggtcacggccggggatcgggaaagcccaggggagcacggcgccttcgagcgcgatgacgtgattagggccccgatccgcggatttcatcagggccagcagccatcggcgctgcgcgaacaggccgaacacatggatgcacccgaccggtgctcatcaggcgaaaccccttgcgccacaggggccgtccacaca

SEQ ID NO: 3435 - DNA, 1576 bp, unidentified
  source 1..1576: mol_type = unassigned DNA; note = element_506a498
  misc_feature 1..2: note = core
  misc_feature 3..275: note = LE
  misc_feature 276..1445: note = CDS
  misc_feature 1446..1576: note = RE
  misc_feature 16..244: note = bridgeRNA
ctggtatattgtaattgacttatttaactgtcaattatgtataccttttcctttcgctaatttttgtttagaattgaattgtgaatgtgtacttttatattttatcactgtagcttgactacctaggataggttactgccacatctttgtatcttaattgtaatcagttagataagtctttgaacttgtatctcgcaccaggatctttgatactctgtttgtggtttgatcacatatcactaacttatatactttaaagaaaggatgtgctttttatgttttacattggtatcgatgtcggcaaatttaatcactgtgcctgtgttgtctcttctgaaggtgaagttcttattgaacctttcttctttcctaataatcttgagggctttcagtcgtttatcaaaaccgtcaaaaaatataaatcacccaagcatattgttggtttagaagccactggtcactatggtgataatcttgtcagttttctagtaagtcacgattatgaggttgctttaatcaatccattgactactgatgctaagcgcaaatctaaaatccgtaaaaccaagaatgataaaaaagatacttttcttatctgttccgttctctttgacagagactatactaaagtcactcagcgtaaacttgatatgaaacaggctcgagaattaacccgttatcacgcctcaattactgaaggtatcaaccaaaagaaaaatcaacttcaaaaatgtattgatatcgttatacctgagtttaattcatggtttaaaactaagtattccaaggcttatatggctgttttaaaagaatttggaagttcttataatttagccagtgccaatcttgctcatcttaaaaaagttctcaagcctaaaagcagtggaagccgtgtggatatagatgcatcaactcttcgtgataatgcaaagaaatctattggcgaaaataacgaggttattactcttgaaatcaaaatgcttattgaaaatatagaactgttaaccagtcagcttaaaactgtagacaaaaaaatagaagaattagctgctaaactagattctcctatcttctcaattcccggtattgggatatattcgggaatgtctattttaagcgagattggcaatatcaataacttcagctctgctgtcaaagtaatgggatttgcaggtgtagaccccggtacttatcagtccggtgaatacagcgctcctcaaacagcattgtctaaacgtggttcgcgctacctaagaaaaagtctatatcagtgcattcttacagtatgcaaatacaatctcactttcaataagtattataaactaaaacggtcgcaaggtaaatcccacagatgcgcccagggccattcagtccgaaaacttataagagtaatctataaactgttatctgaaaacatactgtttgatgaaaaactgctcatttaaaaacattgaattgaatatttttaaaatgctgcataaagcagtagttttcagtgtacacaaaattcacttttcaaagatctaaaaaatatttcagctaattatcaaaaataacttgatttatatatagttag

SEQ ID NO: 3436 - DNA, 1170 bp, unidentified
  source 1..1170: mol_type = unassigned DNA; note = element_506ec25
  misc_feature 1..2: note = core
  misc_feature 3..204: note = LE
  misc_feature 205..1155: note = CDS
  misc_feature 1156..1170: note = RE
  misc_feature 3..180: note = bridgeRNA
cttgtatggttagacttgaaggggtggtgggacgaacagttcgcatctgactgctgtaacagtacagaccgtgggagacctcgccccaccccttccaccaaaagcgccgataaagaatgcttcgttcaagcgacgatagaaacaagcctgcgcctctgggtgaaacccctccaagccgtaaaaccttaacgtggagaagtgtccatggcaatgcacgtttcgaagtcaatcgtgggcgtggatgtcgccaaagttgaactcgttatttacgagccagatcaggatttgctcacctcgataaccaacgacaagcccgccataaagcgctggcttaaaacgttgccgaggcccaccgcgattgcagttgaagcaacaaatgtttatcacatcgacctgatcgaactggcttatgaggcgggtctcgacgtttacatcattgatggctatcagctgagtaattaccgtaaaagtgttggcgtgcgcagtaaaacggacgcctccgatgctcgtcttcttgcccgttatctgaaaaacgaaggcgaagatttacgcccctggactccacctcccgccgtctacggcaagctgcaaagccttctgcggcgcagggcttcgctggttcaggccaaagccagcctgacccagagctgggcaaatgacgccagtttgaaagctgtgttcgccacttttctcaagtccgttgaacgcctggacctgctggttcagaagaaactcagagatgtattgcgcgaagccggcttgctggaagaagtcgctcgctgccaagccattgaaggtatcggttttctgactgcaactgctttggtcatggcctataaccgaggcgactttaacagcagcgactctttcatcgcttttttggggatggatctgagggtgagtgactcgggccaaaaaaatggccgaagatccttaaccaagcgagggtgctcggaagttcgccgattactgcacaacgccgctatgtcggcgagccgatcaattgcctggaaagcgttctacaacaaacacctgggcagcggaaaagcgacgacccaggtgcttgtcatgctcggccgtaaactcgctcggatcgcgttctccctgatgaaaaatcagagcgattaccaaccgaaaagggggattttggcttgaagacaaccatagaat

SEQ ID NO: 3437 - DNA, 1372 bp, unidentified
  source 1..1372: mol_type = unassigned DNA; note = element_5074c3e
  misc_feature 1..2: note = core
  misc_feature 3..74: note = LE
  misc_feature 75..1091: note = CDS
  misc_feature 1092..1372: note = RE
  misc_feature 1119..1370: note = bridgeRNA
tgatgatatggactcctctccttactgcgttgtctaatgcaacgtagattgataatggagcaaaggagttcaacatgaaaacgagcgtcattggattagatatagcaaaaaatgtatttcacctttacagcatcggagatgataacaaagcgatcaagaaaaaattaaagcgtgctgaattattggctttttttgctaattaccctgttagtttaattgggatagaagcttgtggcagtgcccatcattgggctagagaactgatcaaattagggcatgaggttattttattgaatgcccgttatgtgaaaagctttgtcattggtaataaaaatgattttaatgatgctgctggtatttttgatgccgttacacgccctaacaaacgaacggtgacaataaaaaccattgagcaacaagatattcaattggttcataccattagaagtggattagtaggtaaacgcacagcgttagtcaatcaaactagaggattgttaagtgaaagagggatagtgatccccaaaagcattaatcaattaagaaagcagcttcccttaatacttgaagatgcagaaaataacttaacacctttaagtcgagaaatgttttcagaacattatgaacggttggtagtgttggatgaagaaatcaccaatcaagatcagcgcattattcgtctatgtcatgccaatgagctgagtcaacgtttcacagaagttcgaggtgttggtccacttatagcgacagccgttttatttgatataggtaatggtaaaggctatacgaaaggatctgattatgccgctaatttaggcgttgttcctaggcagcatagcagtggagacaagcaactgtatttaggcattagtaagcgaggaaatcgttatattcgaaccttattgattcatggcgcccgatcggttattagtcattgtgataagaagcaagacaaactcagcttatggttaaaagctttagttgaacggcgaggatttaatcgagcagctgttgccttagcaaacaagaatgccaggatactttgggcaatgacaacccaaggtacaaaatacgacgagtcaatggtctagaaccataaagagaaaagtaaaactgagttaacaagattgcggaggcaagttagaaattattgatgacgaaacaggtcagaccagtgctttttaaaacccgacggtcaaagagtttataaaaaccgtccagctgatagtgtcagaaagcaccgcgaatagctcatcaggagtcctgaggaagagaaacctctgttagagaccgaatatatggctgcaatcttgatccctgttaaatcaaaaataagaaaaacttggcttgcaataattgaggagtccatata

SEQ ID NO: 3438 - DNA, 1421 bp, unidentified
  source 1..1421: mol_type = unassigned DNA; note = element_5075ccb
  misc_feature 1: note = core
  misc_feature 2..157: note = LE
  misc_feature 158..985: note = CDS
  misc_feature 986..1421: note = RE
  misc_feature 1190..1412: note = bridgeRNA
taatgagatggtccgccgcttgatctccacattgaagtgggtgatcttgttggcaggttcaaggaggatcatcgacagcagattcgttcggttggcatagatcttggcaagacgaccctttcccctcgtagccctcaacgcagctggcaaggttctgttgaggaggaaattcaaccagaagcagctcatcctatttaccgccaacctgcagacctgcctgatcgggatggaggcttgttcgggtgctcacttcctcggtcgggctctgagagagcaaggccatgatgtgaagctgatcccagctcagttcgtgaagccgtttgtgaagtccaaccagaacgactttctcgatgccgaagcgattgctgaagctgtggaccgacagaacatgcgcttcgttccgatcaagacagacgaccagctcgaccttcaggcgatgcatcgtgtgcgtgatcgccttgtcgcccgtcgaacctccgtcatcaaccaactacgggccttcctgctcgagcgtggcatggtgttcgcaaagacgccagcgaagctgaagctggcggtgccagagatcctcgagaacaatgcgaacctgaccctacgcatgcgcaacctcgtcagcctgctctggaacgagtggaaggatctggagcgacagatcgttgcgatgaacgtggaggttgaacagatcgcctcttccgatccagcctgccagcgactcagacagatcccgggtattgggcctctggttgcaaccacgatcgtagcagcgatcggcaacggagcggcctttcataagggccgggagttttcctccttggctgggacttgtgccgcgacagcactcgaccggcggcaaggccagactcttcggcctcagcaagcgcggcaacagctatctgaggaagctgcttgtgcatggtgcccgatccgccgtcctccgcgtcaagcgagaacgatcgccgttcggtccctggctcaacgctcttgagcgccggtcctcggtcaaggtagtgatcacggccgcagccaacaagctggcccgcatcgcatgggcggtgctatcgagcggcgacgagtaccgttccacaacgatctcgatggccatctgagcaggcgcggaaaagacgacttcggcttgtaagcgcagaatcgcgctcccactttaccgcaccacgacgacgacgattagagttcccaccaaggtctgcactggatagctaggacgaccgaacagttccccacggtgctcgaaacctcatcccgcaaatggttctcaatgaccgtcccgtttatcaggaagagcacccagcgcaactcatcatggccaggagattctaatgtccaacaaaaggccgaatacattttgcgcagacctgtctatcgccccctcgcttttcccttgcagtcagacggcggaccataca

SEQ ID NO: 3439 - DNA, 1317 bp, unidentified
  source 1..1317: mol_type = unassigned DNA; note = element_50816a5
  misc_feature 1..2: note = core
  misc_feature 3..68: note = LE
  misc_feature 69..1103: note = CDS
  misc_feature 1104..1317: note = RE
  misc_feature 1107..1300: note = bridgeRNA
agatgtatggactcccacttttttggagtaacgtgataagtaagcctactttcacaaaggagccatacatgatttattctagtgtcatcgccattgatttggcaaagcatgtttttcaagtctgtaaagcaagtcacgatggtaccgttatatacaatcgaacttgctctcgtcagaaacttaaagaacttttagtgaaagaaaaaccagccctagttgcgatggaatcttgtggaggcactcattattgggcgcgctttgctcgtgaccaagggcataaagtaaaagccattgcagcgcgagcggttaaaccttttcgccaaggtcaaaagaccgatgctaatgacgccatcgctatttcagtcgccgctaggcaacctcatattcactccagccgcttactatcagttgctgagcagtgtcagcaatccattgtacgcgcacgcgatttactcattaatcagaaagttaaaaccagcaaccatattcgagccctaatgctagagctaggaatagccgttactaagggagataagactctacaaaaaaccattccagaaatattggaagacggtgaaaatgatcttacgattggctttcgtacgacacttaatattatgtatcagcattttttgatgttgctggatgaaatagaaacggtttcgaaacaactcaataatgaagttgcacaggatgaagtttgccagcgattgaagtccttagaaggtgtgggtccaatctgtgctattcagctaaaaatagctttagctccagagcatttttccaaagggcgagaagctgcagcttgcattgggctgacgccagtccagcatagtagcggcgggaaacagaagctcggggcaatatcaaaacgatcaactcacaacacgctgagaagtgcgctttttcaaggtgcattagcggttgtcgtcaatattgaaaagaaagaagcccgcacgcacaaagacatttggcttaaagcactggttgctcgacgaggaaagaaggtggccgcaatcgcgttggcaaataaaacggtcagaacggcttttgcaatgataaaacacaaccaagaataccagccgcaattacttgtggcttaacgaggcatgtcataaagatcgatgagataaaaggttagaccaaccttcaagagactgttccgtgccaaggtagctaataccgtcacagagaaaagtcatgaaggtgcgaatacatcagaggccagaggtagcccctcaaatagagcccgcatataagcaagcatcttactttttaattcagaatctgtttgactggcacgtgggagtccatata

SEQ ID NO: 3440 - DNA, 1252 bp, unidentified
  source 1..1252: mol_type = unassigned DNA; note = element_5084a4a
  misc_feature 1..2: note = core
  misc_feature 3..244: note = LE
  misc_feature 245..1237: note = CDS
  misc_feature 1238..1252: note = RE
  misc_feature 10..189: note = bridgeRNA
cttgtatgttcaataccgatgaacagttaagctttttcaccagttaccggggaggccgtttgagcctggaggcagtgttggctgacctcgtatgtagagtggctccccgcctcattaccaacctcgaagagtatcaggaagccggattggccggacttcgtatcgcaaggtcgaggcagtatcaagtgcgaggtcggggaaccggtggctattgtggaatagatgtcgaggcgagaggaagggtatgagtgtgtttgtgggcgtagatattgcggcgaaaacctttgatctggtgaaccgcaagggtggcaaggcttccaaggtggagtcgttctcgcaatcgccccaggggcacgccaaagcgatcaagcgcctccagaacctcaagcccacgctcatcactatggaagcgacgggaatctactactttgatttggcggtagccttggtgcaggcggggctgccggtggcggtcatcaatcccaaaagcttccaccacttcgctaagctgaagttggccgggagcaagaccgacggggtcgacgccgccttgctggcggaatacggtgaacgcatcgagccctcgctgtggacacctcccgatgaggtccggctggcgctgcgcgatatcgggcggcagatcaaccgcttgaccggtacccggacccaggccaagaaccggctgcatgccctgcagtccaagagctcgacccggtccctactggtcgaggacgaacaagagggtatcgcctacctggatcggcgcattgaacggctgagccaggcggcgctggcgctgatcgcggagtgtgaaaccctgtcccggtacctgacccatatgtgtgccgccaaaggcgttggtaaggccaccgccctgatcgtactggcggagctgtgtgtgctgcctgccagcctgaaggccccgcaagtcagtcgttttgcgggtctggatgtccgattgacgcagtcgggcagcagcgtcaaccggccagcgcgcttgagcaaggcgggcaatgcttatctccgggcggccttgtacatgccagccatgagcgccatccagcacgacccacgggtgaaggccttttacgacgcccttgtgtcacggggcaaaaagaagatccaggccctgtgcgccgtgatgcggaagtacctcactggtttgtgggcctgcatacagacagagactgcttttgattcagcgatgctcttcagtgaagagcatctgaaagcttgatttttaacagagtat

SEQ ID NO: 3441 - DNA, 1398 bp, unidentified
  source 1..1398: mol_type = unassigned DNA; note = element_508b6a3
  misc_feature 1..3: note = core
  misc_feature 4..71: note = LE
  misc_feature 72..1124: note = CDS
  misc_feature 1125..1398: note = RE
  misc_feature 1089..1385: note = bridgeRNA
agatggggtggttgccgtcctccccagacggcatcgttatatgccaaggttgtggtgttgatagccacgaaatggagaaggacgacgagatgaaagatacaatgattggggtggatctggcgaagagcgttttccagctccatggcgcttcgatgacagggcaggtgaaattccgcaaaaagctgacgcggcaccagttccggcagttcatggcaattcaggcgccagtcattctggtgatggaggcgtgtggtagcgcgaactactgggctcgggaaatgaccgggctcggccacgaggttaagctgatcgccccgcaatatgtccgccctttcgtgaaacggcaaaagaatgacatggccgatgccgaggcgatcgtgattgctgcgcaacgtcccgagatgcgcttcgtcgagccgaagtctgaggaccagcaggctcgcgccgtgctgttccgtgctcgggaacgtcttgtccaccaacggactgaactcgtaaacgcgctgcgcgcggtcctttacgaatacggcaacatcgtcccacaggggatcaggcaactgaggcgcattgatgggatcctcgacaagccgaacagcggtttgcctgtgctggtgcgcgaggaatgccgggacctgatggcacagatttccgagaagacggcccggattgaggccaagacaaagaaggtgaaggatttggcagagcagaccgacatggcacgtcatttacagacgatgccaggcatcggccccatgaccgcgcttgcgatcgaggcttttgcaccggacatgacgagctttcggcgcggacgggactttagcgcttggctggggcttgtgccgcgccagcattcctcgggtggcaaggagaggttggggcgcgtctcaaaggcggggcagaccgacattcggcgactgctgatcataggcgcaatgtctcggctgaactggatggggcgcaggtcgatcccggacggctcttggctcgcgcaaatgctgtcaagaaagccgcgaatgctggtcgcgatcgcattggccaacaagatggctcgcgccgtatgggcgatgctaacgaaaggtgaagactatcgagatccgacctttgcgaaagccgctgtagcgtgaaactcgtgctgcattggaaaacgcagggatcggtaagtgggggtgaaaagccaatgacctgaatgggcacaatgatcgaatagatctggattgggaaaaccaggcgatcttccggagcaaccaagctcggtacacagatatggacccaatccgcggatcaccataccggccagcggcttctgaaacgccgcacgacaaggcctgacagaagaacgcgctcgatcacatgcccaaacagtcagaagcttcttgcatcaaggacggcaaccacaga

SEQ ID NO: 3442 - DNA, 1401 bp, unidentified
  source 1..1401: mol_type = unassigned DNA; note = element_50947e2
  misc_feature 1: note = core
  misc_feature 2..89: note = LE
  misc_feature 90..1124: note = CDS
  misc_feature 1125..1401: note = RE
  misc_feature 1167..1393: note = bridgeRNA
caatgggatggacgcccccacccggtgacggcatcgatgtgccagagtggaagtgtcgctagccactcaaaccggaaggggcatccatcatgcaaattacgacaattgggatcgacctggccaagaatgtgctacaggtccacggcgcaaacgagcgaggcaagatggtgctgcgcaagcagttgcggcgtgagcaagttgcagcgttcttcgccaacctcccgagttgcctgatcgggatggaggcgtgcggcagtgcacaccactgggcccgtaagctgcaggcgctagggcatacggtccggctgatggcgccgcagtttgtgaagccttatgtcaagagcaacaagaacgatgcggccgatgcacaagccatttgcgaggctgtaacgcggcccacgatgcgatttgtaccgatcaagaacatcgaacagcagacagtcctctctctccatcgcgtgcgccagggcttcataaaggctcgcaccgctcaggccaaccagatccgtggcctgctggctgagtacggtctcgttgtgccacaaggcattgcctatatcgccctacgtgtgccggatctgatcgaggatgcgacgaacgatttgcctggcacattccgccagcttatcgaccgtctgctcgagcacctaaaattgctcgatcaacaggtcaaagagatcgaggcacaaattaaggcttggcatcgtgacgacgaaatcagccgacgactcgagcaggtgcctggaatcggaccgatcacagcgagcgcgctggctgcgacggtgggcgatgcaaagaacttcgacaacggaaggcaactcgcggcgtggctgggacttgtgcctcgacaacattccagcggcggcaaggcaaagttgcttggcatgagtaaaagaggtgatgcataccttcgaaccttgctcatccacggagcgcggtcggtaatctatcgagcgacgcagaggaacgaccgtgatagttggctggtcaagctgacaacgcgccgaaacgctaacgtcgcggcggtcgccttggccaacaaaacagctagaatcgtttgggctttgcttgcgcacgaccgtcagttccgacccgactacacgcctgctatcgcagccgcgtagtcaagtcgggccagtcaaaacagacttcagagggatcacaccacagattgcgcaagcgatcacgaagtgatggcgagacaggtaagaccgtggtcggcaaagcccttcccggacgaggcaccaagagtgcgtgtaagcgatcgaggcgccgaccagcaaatcccatcagggacagtgagcatgtccatgctcgcatcaaaagtccggatgtacgggagcaatcttcctcttctcgttgtcatgagtgagagcttggcaaactgggggcgtccatgta

SEQ ID NO: 3443 - DNA, 1591 bp, unidentified
  source 1..1591: mol_type = unassigned DNA; note = element_50a0179
  misc_feature 1..2: note = core
  misc_feature 3..239: note = LE
  misc_feature 240..1463: note = CDS
  misc_feature 1464..1591: note = RE
  misc_feature 11..259: note = bridgeRNA
ttagtaccataaatagtgtaagaaagaaagtgatttctatcttgcactatttttgtataatgaagaagtagtatgacgatcgtcttttagggttaaaacatccgcaataaaaactgtcatctacctcttcattattcatattcggttaagcaggttgggcaaaacgtccgtgtcacgagctaaaatgagtgtaatggtgcaggtaggaactacaaatttaaaagaaagaaggtaagaaaatgatatctataggaatagatatagcaaaagaaaaatttacagcctgtgccttagaacaaggtagcaaaattatttggaagccctttgatgtaaatcttaacaaaccagaagtagaaggattcttaaataaactaaaagatttaaatcaagaaatcaaaatagtcatggaagcaacaggaaaatatcatttgccaattctttatgaattaaaaaaacaaggatactttgtagcagtaattaatccattaaaaatgaaacagttctgccgagtgttaaacttcagaaaagcaaaaaatgataatatagatgccacacaaatagcagaatatgggttgatgtattggaaagaattacaagaacacaaagtagatacagaaaattttagaactctaaaagaattaaacagatcttatcagcattacatggacctaagaatcaatcaaatgaacttcatagaccaaacaatcagtcaaacatttccaggaataaaaaaattaatatctcatggatctaaagacttctcaaaagacaaactattagatttcttagaaacatggtggcacaaagacctagttttagaaaaaacagaagaaaaattcatagaagactttaagaactgggcaaaagaaaagagataccatcctaatgctgataaagctaaatccatttacaagcttgcagaggaaagtatctcaactcaaccttccaatagctcatacataaagatgaacctacaagaagggatagaattgatcaaacatataaatcaaattctatataatattttatcacaaatgatagaaattgccgagcctctagaagaatatcaagaagccaaaaaattctcaggaatatcagacaaattagcagtacaaataacagcagaatttggagacttatcaaaatttaaaaataaaaaatgcctaatatcctttgtaggaatagactcacctccatatgaatcggggaatttcaaagcagatcagagaaaaataaccaaaagaggtaatgcaatacttagaaaaataggataccaatctatgaaatgtatgatgagtgttaaaaatccagaaaatgaaatatatctatatatgctaaaaaaagaaaaagatggaaaagcaaaaaaagtatgtaaatttgcaggcttaaataagttcttaagaatctactatgcaaaagttatggcatcaaaacaagaaaaggaggcgttaaaagtagcttagagctaggaatagaatagttaaaacaagccgatatcaaccggcttatttgctatgcttaaattcaatactaaatattacaagcctactctgaaattaatttcggagtaggcttgacttttgttagcagg

SEQ ID NO: 3444 - DNA, 1197 bp, unidentified
  source 1..1197: mol_type = unassigned DNA; note = element_50ae7d0
  misc_feature 1..2: note = core
  misc_feature 3..219: note = LE
  misc_feature 220..1182: note = CDS
  misc_feature 1183..1197: note = RE
  misc_feature 6..195: note = bridgeRNA
cttatatctcgatcattctcctccgggtgctatgatccccgactgatcatcgggaagttgctggtgagatgggggcgacccttgggcattaagcctgttttgtagattcatccccggcaactttactcccgccttcaagaccggacggtatcctgtgcttcgagcacgcatccataaggatggtcatggcggtttccctgatgttgttaaggagaatctatgcaaacccgtacgcccgttggtattgatattgcctcgaaaaagtttgatgtggccgtctggaaaggcgatacgtcatacaaaaccaaagtcttccctaacacgcctaaaggcttcagcgcccttaagaaatggctggagccgttcggcgactgccatatctgcatggaggcgaccggtgcgtacagcgagccgctggccacgttcctgcacgatgaaggctatgacgtcagcgttgaaaacccagcccgcattaagcgcttcggccaggccgaactgaaccgcaataagacggataaggacgatgcgcgcatgatagcgcgctactgcaaactgcacggcccctcgctgtggcagccggcaccgctgaatgaacgcagactgaaagcgctggtgaagcgcctgacgaacctgcaggaaatgcggcagatggaagagaaccgtctggagatatcggatgcggtggtgcagccctcaatccgcgtggtgatagcggcgctggatgcgcagataaacgaaacaaagcgcgcgataaacgaccacatcgataatgacccggaccttaaaaagaacagagagctgctggagtcgatcccgggcatcgcgggcgtgctaagcagtacgatgctggcatatatgggcgacatgtcgaggttcagcagcagcaaggcgcttgtggcgtgggcaggcctgaatccgatgaggcaggagtcgggcgagtggaaaggcaaaagccggatatcgaagatgggtaacagcgcgatgcgtaaggcgctgtacatgccggcgatagtggcgatgaagtggaatccggcggtgaactcactgaagaaacgtctggatgcgggtaagaaaacgggaaaagtagtggtgtgcgcggcgatgaaaaagctgctgcagctggcttatggcgtgctgaaatcaggccgcccgttcgacgccgaaatatgtcttgccagataactggcaagacggtat

SEQ ID NO: 3445 - DNA, 1328 bp, unidentified
  source 1..1328: mol_type = unassigned DNA; note = element_50bbb0b
  misc_feature 1: note = core
  misc_feature 2..60: note = LE
  misc_feature 61..1086: note = CDS
  misc_feature 1087..1328: note = RE
  misc_feature 1107..1322: note = bridgeRNA
taatgaaatggacgcccctcctatactgctagttggtagcaatcaggtggaggatgaatcatggagcaggtatcagtgatcggcttggatcttgcgaaaaatgtctttcaagtacacggtgctgatgaacgtggacgctgcgtaatcagaaagtcattgcggaggtcacaggtttacgcattttttgcaaagttatccaaatgtacagtggggatggaagcatgcagcagctcgcactactggggtcgagttattactgactgcggacatgaagtgaagctgattccaccccaatacgtaaaactttatgtaaaaaccaacaaaaatgacgctgctgatgcggaagcgatttgtgaggcagtatctcggccacatatgcgttttgtggagctgaagacgcctgatcagcagagtattttgctgatacaccgtgagcgtgatgggttaatgagagaccgtacggctctaatcaaccgcttacgtgcaaccttaggtgaatttggcatagcagtgccatccggccctgcgcgtctaaaacagtggttccgcgacagctatggcataaatgaagatcagctgccggtactgatgcagcgtcatattgagcgcatgagcgctcgatgggtggagttggaacgctgcattgatgaattggatcgtgaaattgaccaacacgtgcaacacaattcggtatgccagcgtttacttgaagtaccaggtattggtcgtttaaccgcttcggctttggtcgcaaccgtggggaatgcattggcgttcaagaacggccgccaactttcagcgtggttgggccttgttccacggcagcactcgagtggcggcaaaacagtactcagagggatcagtaagcgtggggatgcatatttgcgcaggatgttggttcatggtgcgcgagcagtgctaaggcattcagcgaccaagaaaaatgccgttagcaactggttacatgcactatcagtgcgagcaaacaagaatgtggtcattgtagcaatggcaaacaagctggcacgtatagcatgggcattattgaataaagggcagcggtacatcgaaccggctgctgaataaaccaatgacaggaacgcgctgaggtttgcgtgggcagaacttgctgatgacagacaggtagagccgagactggataaagctgcgactaacatcgttcgtacagagaacgttaaaatgattagcatccagtcagcggaattcatcagggatagaggttaatacctcgtaaaaatccggatagatggctgcaatacctttatgtcacgaaatgttttgcttgcacaaaacggggcgtccataga

SEQ ID NO: 3446 - DNA, 1654 bp, unidentified
  source 1..1654: mol_type = unassigned DNA; note = element_50c4116
  misc_feature 1: note = core
  misc_feature 2..121: note = LE
  misc_feature 122..1312: note = CDS
  misc_feature 1313..1654: note = RE
agtaattatgtaataaagcatagcgcagtatgaggcggtcatccaaaactggagccgaaattttaatttagtagcgataactgaaggtttcgcaattattaacaattaaaaaaactgcactatgcttaagacaaatttgcacaattcgattgactttaatggtcagatctttcacatcgggcttgatgttcacaaaaaatcatgggctgtaacgattcgcagcatgggcgttcaagtcgctcatttcacccagccgccaggagcagatgcacttgcaaggtatttgcaaaaaacttttcggggagggagttattattcagcttatgaagccggtttttgtggcacaggtatccacgaacaactttgcaaactgggtataaagaacattgtggtacatgctgcggatattccatctaccgacaagcaaaagaaaaacaaaacggacctgcatgacagccgcgcaattgccgagcacttgcaaaagggcaacctggaaggtatttatgtattgagccgggagcagcaggaattacgcagcctgttccgtttgcgcgaaggcaaagtcaaagacgtaacccgcgccaataaccgtttaaaaagctgcatggcattttttggcctcgtgttgcctgaatctattaataaaaaagaatacctgtcattgagagcattagcatggctggataattaccaaatggtaacctcggcaggcagaatcaccttgcaacagtatgccagagaattgaagtaccagcgcacacagctttatcagctgacttgtttattgcgtaagcaaatacaggataccgatacaaagtcttatgaatatctgctatcagccccgggcatcggggggatcacagcgatgggattaatggcggaaatcggagatttcggccgtttcgatgatcctgatgagtactgtagcatgctgggtttatgcccatgggaagatagctcgggagacaccattaaaactaaaggtatgcagccacggtgtaaccgccacctgcgcccgctgctgattgaagcatcgtggaaagctattcgcaaatcaccgctcttgttcgcctattacagcaagcatgcggccagaaacaataaggcggcaattgttaaagtggcccgcaggttggcgctgatcgcccgcgctcttgtcatcaaacagcagctttatcagcctgattatttaaaagaaaagaaagaggaaccaaaaccggttaaggtcgcttcaaaaaggtttttttcaggcattacggaacagcatgaaaacaaacagccaggcaatatgtttatgtcatggcctggctgatatgctttatccggctgtaatatccctggcaggttgctcctcagcagagccggcttccgtttcttacagcaatataaatgtataaacgaatgttaaactttttggtattacataaaataaaaatctcaaagacttaaagaggaaaacgcaaaaaagcgatggtattaaattaccctgtggaagtattcgtacctcttttttatttcaaacaattactggcggcccccacttaagggatgaccgcatatagcagtcggaggttctttttgtataccgaaataaaaacaataactttatgtgatcttaaaatctcatacctgtcctctttgctttatacatagc

SEQ ID NO: 3447 - DNA, 1358 bp, unidentified
  source 1..1358: mol_type = unassigned DNA; note = element_50d0e83
  misc_feature 1..2: note = core
  misc_feature 3..78: note = LE
  misc_feature 79..1104: note = CDS
  misc_feature 1105..1358: note = RE
  misc_feature 1109..1348: note = bridgeRNA
ttatggatggcccgcccctcccaaatcgagctgctacagctaagcggtgcggcccaattccaatcaaggaggttttctatggatatcgccgttctcgggatcgatctgggtaagaacagctgcagcattgtcgggcttgattcgtccggcaaggtcgttctgcggcgccgtatgcaacgcaagaccctcgtgaccatggccgcgaagctctcaccgtgcattattgcaatggaggcttgctgcggcgcgcatcatctggggcggattcttgccgcacaaggacacacggtgcgcctcatgtcgcctgagtatgtccggccctatgtgaaggcgcagaagaatgacgaccgagacgcggaggcgattgccgaagcggcgaccaggccgacaatgcggtttgtgacgctcaagagcgaggagcaacttgacatgcagagtctccatcgcgctcgtgatcgggtggtggtcgagcgcacatcgttgatgaaccaactgcgcgccctcctactcgagcgtggaatcatcgtgccgcagggccgcgctaaattgaggtatcgggtcaaagaacttctcgtgcagacttgcaacgagttaagcccgcgcatccgcgtcttgatcgaggacatgatggcacgatggcaggccgtcgataatcggattgcggcgttcgacaccgagtttgcagccgaagtgaaacaaaatgaggccgcgcgccggctgataagcattcccggcatcggcgctctcaatgcaactgctctcgtcgctgccgtcggtgatgctcggaccttcgcacgaggccgcgatctggccgcatggctcgggcttgttcctcggcaggcgacgacgggcggtaaacctcgcctgctcgggatcaccaaacgcggcagtaagtacttgcgcaagatgctgatacagggtgcgcgcgcggcgctgccgacattgagccgcgggaatacccggctcggtcagtggctgcgcagtcttctcgcgcgcgctcattccaacactgtcgtcgtcgcgctcgccgccaagatggcgcgcatggtctgggcgctgctgcgacatggcaggacgttcgagcaccgagcgatcaccgtctgatctagagattggccggcttcacccatagccggtccatggtgtctgcgggtggttgagaggaagatggcctgacagtcgatcggtgttccgcaaacctatggcgcaaaatggcacctggatgccgtcccctttatgaggaccggaacgcgcggatctccatcttggccaacggcatagccgaaaggccggatacgtttatgcagactgttcatgccagcatcacaaaaccacttgccgacggggcgggccatacg

SEQ ID NO: 3448 - DNA, 1365 bp, unidentified
  source 1..1365: mol_type = unassigned DNA; note = element_50dd54d
  misc_feature 1: note = core
  misc_feature 2..81: note = LE
  misc_feature 82..1110: note = CDS
  misc_feature 1111..1365: note = RE
  misc_feature 1107..1356: note = bridgeRNA
tgatgatgtggacggcctcacctcagcggcatcatagtgccatgacgtggtcgccggagcgccacagaagggagaccgcccatgcagcagtttatcagaattggtgttgatcttgctaagaactatttccagatccatgcactggcgagtgaggatggatcttccatcgtaaggcgcaagctaacgcgaacgaagatgagagagttcttttcgcggatcgagccttgcctcgtgggcatggaagcctgcggctctgcgcactattgggcgcgcgaactcaaggcaatgggccatgaagcggtcctgatgcccccggcttacaccaagccctatgtgaagcgtggcaagaacgatgctgtcgatgcagaggcaatttgcgaggcattatcgcggccggggatgcgttttgttccagtcaaaagcccgcagcagcaagcgacactggccgtgcacagaacgcgcgatctcttggtcaagcaacggacgatgagcgtcaatgccctgcgaagccacctagcggagtttggcatcatctctgcaaagggcattggcagggtcgacgacttggtggataaagctgaacacgatgtaaccctcccgagcgccgcaagggtggtggtaaaaacgctggcgcagcagatccgagagatcgacatctctgtcgatcggctagagagggaaatagccgaagcccattcgtcaagtgacatgagccaattgctcgcggaaatacccggcgtcggcaagctgaccgctacggtgatcgatgccagcatgcccaatgcagacgtgttcagatcgggacgtgatttcgccgcttggctcggacttacaccgcgccaaaactcaagtgggggaaagcagtccctcggagccattactaaacaaggtaaccggtacatcaggaaactcctggtgctagcggcgacatctctcctgaatgttttaggcagacggaaaggtgctttgcgcgattggattgtgggactccttgccaagaagccggcgaggctcgtgacggtagcgctcgcaaacaagcttgctcggatcatctgggcggtcaagaaaacgggcgaaagtttccgctcggagaaattcgcgaaagcataagccgccgtcgaagcagtgggactttagtttggtaagcgcataagacgtaatgaatgacaacggttgttaccgaagaccaggggaaccccgaccagtcgtctgagctatagagctcgcatctttgatgtggccccaggttgtcggatatcattatggccagcggaaatctattccgcaccagaaggccggacatacgatcgccgtaaccaacgtcattcacacgtctaaaaggcttgccataaacggccgtccaca

SEQ ID NO: 3449 - DNA, 1501 bp, unidentified
  source 1..1501: mol_type = unassigned DNA; note = element_50e1c5a
  misc_feature 1..3: note = core
  misc_feature 4..133: note = LE
  misc_feature 134..1165: note = CDS
  misc_feature 1166..1501: note = RE
  misc_feature 1201..1389: note = bridgeRNA
aacatggggtaatcgcggcgcggtcaccccatgttagtcacgaaatgactactggcgggggtggttgcccccgataagatggaaatacgggctcacgattggaaccgggcccaaacatcaaatggaggcaaccgtggaccaatatataggactggacgtttcattgaaagaaactgcaatctcgatccgacaggaggggaagcggatctggcggggaaagtgcccatccgacccaaaacttttgtcggagatgatccgcaggcacgcccctcacgccaaacgcgttgtattcgagactggcccgttatctacgtggttctatcatgcgctgacggccgaaggagtgccggcgatctgcatcgaagcgcggcacgcccaaaagattttggatgagacgctcaacaagaccgatgccaatgacgcggatggcttggctcatttggccgaagccggcttctacaaagcggtccgggtaaaggcattcgacagcatgctgacacgcacgcttgtggccgctcgcaatcagctgctcattgtctcgacccagctcagcaatcaaattcgcggtctgatgaagacgttcggtctcattgtcccgaaagggaggggtcgaatatttgacgggaacgtgaggcaattcctggatgggaatgacggcttggctaagatcatattgcctctgctcgacgcctggtgcgacatacgcagacgcgctgccgatcttgatcaccagttgctcgtggcagcacgggggagccaggagaccaagcttttgatgactatcccagggatcggcgccgtcaccgccgtctcgtatgtcgccgcaatcgaagacccagacaactttaaaaagtcgcgctccgttggcgcctggcttggattgacaacgcggcgttaccaatcaggagaggtcgattatgacggccatatctcgcgacgaggcgacaaccgtctgcgtgggctgctttacgaagcggcgatggtgcttctcacgagaaccagtgccaggaccgaatgctgtctgaagaattgggggcttaagctacgtgaccggctgggcttcaagcgcgctgcggtggcggttgcccgaaagcttgccgtcatcatgcatagtatgctcaaaacaggagaaatgttcaacgcatcggctggcgctcccgtataaagcgaaagtgcctgccttaaacctcaacgcgtcacatctaatttgaggcgtactgagagtccgtgctacggacgtgggttggatcattccgtaagttgcggctgcagctcgttgagacttgcgttttgaacaaaggaaggtccaccctgcgaagacccattatgcggcgatcctgtgtcgaccgcgaagacaaccttgcccctggcaccggatggctctgaagaaaacaacaacgctgaggcccgatctatcaaattactacgccgttttgcgtgaccgctatacggtacgatactgaatggccaaaccaacttgactaatggattgcgattagac

SEQ ID NO: 3450 - DNA, 1568 bp, unidentified
  source 1..1568: mol_type = unassigned DNA; note = element_50ea656
  misc_feature 1..3: note = core
  misc_feature 4..500: note = LE
  misc_feature 501..1442: note = CDS
  misc_feature 1443..1568: note = RE
  misc_feature 7..266: note = bridgeRNA
attcttaatatatgagtagaggcttttacagtctctgctctttctttatgatgaaggtgattggtctgacgtaatttccgattgggacaccacgcccgaagttaaatgtgtcagcccgccttcattgttctacattcgattcagcaagttgggaaagattgcttctcccgtttaacgaaagaatatgagtgaaccttgaagagctggatccaatcataaatcacttacgaaaggagcgtctttcttatgattgctgttggtatcgatgtttcaaaatccaagagcaccgttgccattctcaatggagatggcagcatccgtgccaaaccttttgatgtccaccatgtcgctgatgagctgcaggcattggtagattacatcaagaggacttcagagcctccaaccatccttatggagcccaccagccactaccactatccactcctgaaagccttcacggaggcggaactcccagtctctgtctgatcaatccataccagatgaagaagtatggcgataccgaactcagaaaggcgaaaacggacaaacgtgattctctgcgaatcgctcagtatgcccttgagaagtcctattcgctgattccttacactcctcaggaccagaagtatgaagatctccgttttctgtccaggcaatacagtcagaggatatcaaccctaactgttgccaaagttcagctgctcagccttctggatgaaacaatgcccggcattacgaccattcttcctcttaaaagcagggatcccgacaactgtgtgcttctgcgtttcattaagcgtttcaagtctttcgatgtaatccgtaagatgggcaagacacgtttcctggacagctatcaagtcctagtcaaaaagaccaaggatcgttttgccggttctaagggactggctatctatgagctggtccttaacagtgttaccacccgtggagaaaatcccttatccgcaatgactcaggatcaatgtgttgatctcgtatccacatctcagaaagctgccgatgagatcaatcttcaaatgcggatcatagcagagaccatgccggagtacaaagtgcttcgttctatggccggcgtgggggaccgactgggaccgatcattcttggagaaatcggtgacattcgccgttttcacaatggcaaagcactcaatacttatgccggcaatgatgctccgccatatcagtccggacaattcgagagccggaatcgtcacatctccaaacgtggcaacccggctctcagaaaagcttgttttgaggtaatgcaggctctcaaactgacaaaacctcaggacgatcctgtttacctttttctgctcaaaaaggaacaggaagggaaaccatacaacgtagccaaaatggctgccgtcaataagtttctgcggatctactacgctcgtgcaatggagttgtacaagtaaatctgtccgctttcattatagctgttaactgccggcctgcaacagcaggtcttattaaggttactctcttttttgttctcaaggttctcgaaatcttcaaaaatctgcttgacaaacattagcaag

SEQ ID NO: 3451 - DNA, 1388 bp, unidentified
  source 1..1388: mol_type = unassigned DNA; note = element_50ebc94
  misc_feature 1..2: note = core
  misc_feature 3..89: note = LE
  misc_feature 90..1118: note = CDS
  misc_feature 1119..1388: note = RE
  misc_feature 1125..1376: note = bridgeRNA
tgatggtgtggacgccccctactcagcggcatcgaggtgccatagcgtggtcgtcataaagagcgccacaaagagagaggacgtccgccatgcagattaccacaatcgggattgatctcgccaagacggtatttcagcttcacgccgtcgatgcggatggcgcgacgtttatccgcaagcgtcttagacgggccgaggtgctttcgttctttgcggatctggatccatgcctgatcgggatggaagcctgcgcgacatcgcatcattgggcgcgtgaactgacaaaattcgggcacaccgtcaagctgatgcctcccgcttacgtgaagccttatgtcaagcgtgggaagaacgacgccacggatgcggaggcgatttgcgaggcggcgagccggccaaacatgcggtttgtccccgtcaagagcgccgaccagcaagcggttctcatgctgcatcgtacgcgggcgcttctgatccggcagcagacgatgctggcaaacgcgttccgggcgcatcttgccgaattcgggatcgtggtcgcgcaaggcatcaggcatgtgcgcgcactgatcgagagagtcttcggcgaggatcccattgatcttcctgccctggcgcgaatagctcttcgacctctcgtcgcgcagctgatggaactcagattgaacatcaagatgatcgagaaagaacttctcgcctggcatcggacaagccaggaaagccggcggttggaaacgatccccggagtggggtttatcacggcgacggccattgccgcgacggtgaccgatccctcgcactttagatcgagccgggagttttcggcttggctgggactgaccccgcgacaaaattcatcgggtggaaaggaccgccttggccgcgtctcaaagatggggaacggctatctgcgttctctcattgtcgtcggagccacggcgatgatccgctatgcgcgtgagaagggcgcggtcagtgcccgatggatcaatgcgctgctcgagaagaaaccagcccgtcttgtctcggttgcggtcgccaacaagacggcaaggatcgcctgggcgctgctcgtcaggaaggaagattatcgggttccggtgcctgttgctgcataagcgatcggctcagatcgccagaggatcgaaaagttcttcagcttgggaagggtgattatggcgtgatgcaaaccggtcgagacctgggattggaaaaacccgaggcattgtcagagctccaagctcgctaatgtgaatgggattcaatccgcggatatcatcaaggccagcggccataggagccgcgcagaaaggccggacatatgactgcacccgaccgtattgcacgaacgctcataaaaatccttgccaaacgggggcgtccacata

SEQ ID NO: 3452 - DNA, 1458 bp, unidentified
  source 1..1458: mol_type = unassigned DNA; note = element_50edb87
  misc_feature 1: note = core
  misc_feature 2..128: note = LE
  misc_feature 129..1175: note = CDS
  misc_feature 1176..1458: note = RE
  misc_feature 1206..1456: note = bridgeRNA
atggtatggacgcctcccgcccaccttcccgggcagcagggcgcgtcggcgggtggggcctcgcttctgacggcatcgagtgccaaagtggggttgcgtttcctgccacttacgaaggaggccccgccatgcatgctatgacttatgccgtcgatctcgcaaagagtgtcttccaggtccactgggtggaccccgagaccggtgaggtccacaaccgcaggctgacccgtgcgaagttcatcaccttcttcgctcagcgccagcctggatgcgtggcgatggaggcgtgcggcagtgcgcaccactggggacggacgttcctcgcccagggccatcaggtcgaactgatccccgcgttcgaagtgaagaagcgcgtcttcggcaacaaggacgatgcggccgacgccacggcgatctggctgagcgcgcaggaccgcaggatccggcgcgtgcccctgaagaccgtcgagcagcagagcgacctgacggcccaccgcatgcgcacgcaactggtcagcgaacgcactgcacgcgtcaacgcactacgggggctgctctacgagtttggtgtggccatgccgaagggccgtgggatcgggctgcgctggctcgccgcgcatcgggccgaggtcgacgcgcagttgcctgtgcggatgcagcggttgttgaacctgcagctgcagacgctggggcagctcgacgaacacatcgaagtgctcgatgccgagatcagggaaatggtcgctgccaacgcattggccaaacgcctgatcaagattccgggcatcggtccgctgggcgccagcgctctggccagcacgttgggcgacggttcgggctggcgcaatgcgcgccagttcgcatgctgcctggggctggtccccagccacacgggcaccggcggcaaggtacgcatgggtggcatcagcaaacgcggcgacgcctacctgcgaacgctgctggtccacggcgcgcgcaatctcgcgcgcctggccacgccatcagtatgggtcgcgggaatgctcgagcgacgtccgttcaacgtcgtggtcactgccgtggcgcacaagctggcgcgcatcgcctgggcgatcgcttcgcaccagcgaacctacgacccggcgtggaagcccgagtcgccacgcggcgcgccagccacgacagcgacggcgtaaccaggcaagcgaacacaaacgaaccactggcaggagactgtcgaacgagtgtgcaggcgagaagacgagacgatggcgtagcggtcagaccgtgggccggcaaagctgagcacgactctgggcgacctcggttcagcccgttagtgagatgagcaccggcctcgcgatcaaccatcatggccagcagcctccagctgcaaccaaaggccggatataagggtgcgatgaacccgccgcgtcagaccctcgaacgcttgcttgccacaagggaggcgtccatata

SEQ ID NO: 3453 - DNA, 1388 bp, unidentified
  source 1..1388: mol_type = unassigned DNA; note = element_50f82dd
  misc_feature 1..2: note = core
  misc_feature 3..84: note = LE
  misc_feature 85..1116: note = CDS
  misc_feature 1117..1388: note = RE
  misc_feature 1087..1372: note = bridgeRNA
agatggggtggatgccgctctccccaacggtgtcataatgcaccagcattacggtgcattagccatcgggataggagaggcaacatgacggacgtagtaattatcggggtcgatctggcgaagaacgtgtttcaactgcacggcgcggccgctgacgggacagtggtttttcgtaaaaagttcacgcggcctatgtttcagcgtttcatggctgaccatccgcgctgcctggtcgcaatggaggcttgcggcggcgctcatcattgcgcccgcgagttggtccggctcggccacgaggtgaagcttattgctccccgctatgtgaagccctttgtaaaacgacagaaaaacgacgccgctgacgccgaagctatcgttgaagcagccatgcgcccgaccatgcgttttgttgaacccaaaaccatggaacagcaggcccgcgccatcgtgttccgtactcgggaaaaattcgtgaaccagcggaccgaagctatcaacgctttacgtgcccacctatatgagttcgggtacattgcgccccaaggtattgggtatttgtcacgcctcgaggcagtggttgatgacccgaactcagacctaccggaactggcgcgagatttatgccgtgccttgctcaatcacattgcacaattaacggcctcgatcgaagatctcaaaaggcggatcgacaagatatcgaaagagcaggaaacatcccgacgcctgcaaaccatgccgggtgttggcccggttggtgcattggcaatcgagactttcgccccaccaatggaccagttcaaacgaggccgcgattttgcggcatggcttggcttggtgccgcgacaaaactccagcggcggcaaacagcgtctcggcaaaacgtcgaaaatgggacagcgcgatatacgccgtctgctggtgacaggcgcaatggctgtcgtgaactgggcatcacgtaagggcgcagcggaaggaacatggctggcgcgcatgttgtcccggaaaccgcgcatgcttgttgccatggctttggctggcaaaatggctcgtgggatttgggccatgcttacgaggcaagaggattacaggaatccggtattggtgggtgtcgcctgatcattcagcggctttgatcggtatcggacagttggggttgtaaggaaggcatgaactgaatgggcaaatgatcgatctgatcggggtcaagaaacctggaaccttctcagagcttcgagctcgccccagagattgggacttgatccgcgcatcaccatcacggccagcgatatccaaaaagtgcgcaacaaaaggccggacaaaagaccgcactcgatcacgcgttcataagttcagaaaatccttgcaaaccgagcggcatccacaaaaga

SEQ ID NO: 3454 - DNA, 1212 bp, unidentified
  source 1..1212: mol_type = unassigned DNA; note = element_50f9cf8
  misc_feature 1..2: note = core
  misc_feature 3..222: note = LE
  misc_feature 223..1197: note = CDS
  misc_feature 1198..1212: note = RE
  misc_feature 6..200: note = bridgeRNA
cttgtatctcgacttgaggctcttcggaggcgagagtccccgactgatcatcgggggaggaagtgtaggtcgtgcccaccctaaagcttcgagcttgtaacgtagattgcgctgcactcctccgcactcatccagtaagtccgaacggtatccagagccacgagctcgcatcgacaaggtaggacggatgcagtgacgatcagccacttacaggaggacatgatgactagggttgtcggcatcgacatagccaagcacaccttcgacattgccaccctgcaggccaatggcaagttccgcaccaaggccaagttggccaacacccaaagcggattcgagctcttgcagcagtggttgaacaagcatgccgagcccaaggcttgggtcgtgatggaggcaacgggtatttaccacgaagccctcgctcagtggctgcacaagcgtggctacaaagtctgcgtgttgaacccggcccagactgcgcgttatgccggtagccagttgcagcgcgtgaagaccgacaaggtcgatgccaagctgattgccgattatggcctcaggcatctggacaagctgcgctcctgggagccggagaagcctgaaattcgccgtctcagagccctcgtgaaacgcctcagggatcttcaggagttggagcagatagaacagaaccgcctggatgtcacccatgatgccaaagctgtcgcgttgatcgaatcgatgctcaagcacatacgtcaacagatccaggacacgctggatgcgatcaaaaaacacttcgatgacaacgatgacctcaaagggcagcgagatttgcttaccagcatcgatggtattgccgacaaaacggcagcactgttgctagccgagctgggcgatatccgacgcttcaaaagcactcgaagcgttacggcatttgcaggcttgaatcccaagctgcaggagtcagggaagctcaagggccatgtctgcatatcgcgaatggggtcagcttcgttgcgggcagggctctacctgccagcggtcgtatccatgacgcacaatgcggctatccgggcgatggccgaccgtatgcgcgccaagggcaaggccggcaaacagatcgtttgcgcggccatgcgcaagttgctgtgcatcgcttacggtgtactcaaatccggcctgccatttgactccaaattggccattgcgaactgagattcaagacggtat

SEQ ID NO: 3455 - DNA, 1551 bp, unidentified
  source 1..1551: mol_type = unassigned DNA; note = element_50facab
  misc_feature 1..3: note = core
  misc_feature 4..244: note = LE
  misc_feature 245..1441: note = CDS
  misc_feature 1442..1551: note = RE
  misc_feature 8..223: note = bridgeRNA
tttcgtattattaggtcagccagatattactggttggcctattctttatggtcattctatgatggcggtagccgggagaacgtgacagcccctgggggacaaccccgtacacaaaactgttctcctactaccaccgaccatcacgattgagctggttgaggcgttgacctcgtatcacaagcgaagctgtggagttggaaccattgtgggaatgaccggctaatttttttgaaaggagaactggatgaaacctgttattggaattgatgtagcaaagggaaagtctgtcgtgcagtgttttttaaaacgtaaccgacccgtgggacgagcagaaaccattttgcatacgcctaaaggatttgagcgactcaagtccttgcttattgaattagagcagcagagcggctttaagccgcaaatcattcttgagcctacgggacattatcatcgtgtgcttgttcagtatttacagcgtgaagcctttgaagtcatcctggtaaatcctttgcaggcgcagcgagctagaagaacgggcttgcgcaaagtaaaaaccgatgaatcggatgcctggcacctcggagatctttattatcaagaggaagattggcttgctcatccactcaaagataaagctttaacagatttacagttcttaacgcgtcagcacgagttcgtgacgagtctatatgtgcaggccaagttaaatacgcgttcactaatcgatcaaatgattccaggttacgaaaatgtctttaaggatcttttctctaagacatccctaaacttactgaaagcatgtctttcgcctgaggggattcaagaacgatgcgataacttgcacgaggtgattaaggaggctgcgagagcctctcgctcggacgtatggatgaacaaaaaagtcgagttgatgcgtgctgtatgcgaggcgaatcccgttacggctattggatttggtttaagacagtcccttcaactcatgcttaagattcttggtgaattccaggagcaactcgcagagctagagcggatgatttatgaggtttcccaaacgatcccgcaggttcagttgctggaatctatcccaggagtaggcaccaagctggctactgttatggtggcagaaattggggatgcatcgcagtttagtcatcctaaacaagtggtggccatggctggacttgaccccagcgtgtttagttcggggaaattcactgccagtgagaacaaaatcacgaaacgcggctctaaacgcttgcgaagagctgcttatctagcggtcatatgtggattaaggaaaggactaaatccacgtttaagggcgtattacgacaagaaaaaaagcgagggtaagccccataaagtagccgtgatcgcttgcgccaacaaggtattacatcacgtctacgctatgctcaaaaaagggcaaccctacgctctttaaagtagtcgttccataaacttccatccgatggaggtttatttgttatgcttcaaaagcagtataacagaaatctacgactttcaaaacggtcttgacaaggtattagctgg

SEQ ID NO: 3456 - DNA, 1488 bp, unidentified
  source 1..1488: mol_type = unassigned DNA; note = element_50fb59a
  misc_feature 1..2: note = core
  misc_feature 3..247: note = LE
  misc_feature 248..1468: note = CDS
  misc_feature 1469..1488: note = RE
  misc_feature 7..243: note = bridgeRNA
ctaatgggggttaccgggccgactgcatgacaggctcggtgcctggtagccgccgatggatgagcactctcctcaccctggacctcgagtcctagtgtcagatcgtgcctccattggtggtcaggaaggcgaaccgctgatgggatgtcgtgtccgccgcgttttggcgcgagcacttgaccattaggtcgcgggttttcctgcaggctgctgaccgaggtagccgagcgaagtggaggaagccagattgttgttcgtcggagatgactgggctgaggaccaccacgatgtggagatccaagacgagactgggcggcgacttgccaaagcccggctaccagaaggcatttcaggaatagcgaggctgcacggcctggtcggcaggttcctgcccgaagacggcgccgccgcccaggtgaagatcggcatcgagaccgaccgtggcccgtgggtcgcagcgctggtcacctctgggtaccaggtgtacgcgatcaacccgcttcagtccgctcgtgcccgggagggccatggcgtctcgggagccaagagcgatgcgggtgacgctcatgtcctggctgacctggtgcgtaaccattcccaccaactgcgcaccgtcgccggggacagcgagcaggccagtgcggtgaaggtcctgacccggatgcatcagacgttgatctgggagcgcacccgtcaggtgttacgcctgcgctccagcctgcgggagttcttcccagccgcgctggaggcctacgaggacctcgcctaccccgacgtcttggagttgctgaccaaggcacccgagccggacagcgcggcccggctgacgcgcgcacagatcatcgtcgccttgacgcgggcccgtcggcgcgaccgagaggccaaaaccaccgtgatcatgggcgcgctgcgcgccgcgcaccttacccagccgccgcttatcgcggccgcctacggcgcgacggtgcgcgccctggccgccctgatcacgaccgccaatgagcagatcacagccctggaaggacaggtcgaggcctattttggtcagcacccggacgctgagatctacctcagccagcccggactggggcccgtcctgggcgcccgggtgctcgcagagttcggcgacgactccagtcgctacgccggcgcccgagcgcgcaagaactactccggcaccagccccatcacccgagcctcgggcaagaagaaagtcgtcctcgcacgatacgtgcgtaacaaccgcctggccgacgccctgcaccagcaggcattcagcgccttgagcggatcaccgggagcccgcgcctactacgacgcactcagagaccgcgacatcagctacaacgcagccctccgccagctaggcaaccgtctcgtcgggattctgcacggctgcctcaaaacgcacaccccctacgacgaagccactgcctggaaccagcacgcccaacaagcagcagcttgatacctaaaccgatgggatgt

SEQ ID NO: 3457 - DNA, 1326 bp, unidentified
  source 1..1326: mol_type = unassigned DNA; note = element_50fe769
  misc_feature 1..2: note = core
  misc_feature 3..199: note = LE
  misc_feature 200..1072: note = CDS
  misc_feature 1073..1326: note = RE
  misc_feature 1094..1324: note = bridgeRNA
ttaatgagatggtcactccctccttcccagtactatgctgaggacaggctttcattcggagaaccatcatggaaaacattgcgcttattggtatcgatctgggtaagaactctttccatattcattgtcaggatcatcgtgggaaggccgtttaccgtaaaaaattcacccgaccaaagctaatcgaatttctggcgacatgcccgcaacaaccatcgcgatggaagcctgtggcggttctcactttatggcacgcaagctggcagagttagggcattttccaaagctgatatcaccgcaatttgtccgcccattcgttaaaagcaacaaaaatgacttcgttgatgctgaagctatctgtgaagcagcatcacgtccatctatgcgtttcgtgcagcccagaaccgaatctcagcaggcaatgcgagctctgcatcgtgtccgtgaatccctggttcaggataaggtgaaaacaactaatcagatgcatgcttttctgctggaatttggtatcagcgttccgcgaggtgctgccgttattagtcgactgagtacccttcttgaggacagtagtttgcctctttatctcagccagttactgctgaaattacaacagcattatcactatcttgttgagcagattaaagatctggaatctcagttgaaacgaaagttggacgaagatgaggttggacagcgcttgctgagtattccctgcgttggaacgctgactgccagtactatttcaactgagattggcgacgggaagcagtacgccagcagccgtgactttgcggcggcaacagggctggtaccccgacagtacagcacgggaggtcggacgacattgttagggattagcaagcggggcaacaaaaagatccgaactttgttggttcagtgtgccagggtattcatacaaaaactggaacaccagtctggcaagttggccgactgggtcagggagttgttgtgtcggaaaagcaactttgtcgtcacctgtgctctggcaaacaagctggccagaatagcctgggcactgacggcgcgacagcaaacttacgaagcataaaggcagaaatacaccagtttaaacaatcattcatctggttttgcgaatactgatattgatgatactaacggcccaccggcctgttgaggaacctgtaaaacggaaaggctcattgaagccgtatattttctggaggttcatcaggcgcggaactcatcgaggcgcgggaataaaatccattcagacgccggatagattcaagcaagccaacttgtcgtcaaaatcggtgttgcaaaaacgggagtgaccataga

SEQ ID NO: 3458 - DNA, 1197 bp, unidentified
  source 1..1197: mol_type = unassigned DNA; note = element_5106c1a
  misc_feature 1: note = core
  misc_feature 2..216: note = LE
  misc_feature 217..1188: note = CDS
  misc_feature 1189..1197: note = RE
  misc_feature 31..198: note = bridgeRNA
ttgtctctcaaatctatgctttactgtaggagaagctgggatcgaaccccgggatggccatcccggggttcgcgcgacaaagcgcccgtacaggaataggtgtcaacgaccgacctcatgaagggactttgccgcaccagcttcgcatcgcttgctgacttgaatgggctatccgaaggacacgcccgcagacaattcgaagcatggagcccaattatgatagcagaacccgccgaaatccagtgcgtcctcggcctggacgtttcctgcaataccgtcaccctgttcgacagctgcaccggccgctgcctgaccattgccaacgaggccgatgcgctgcgcaccgccctgcagccctatcaaggcaccgccacgctcgccgtctgcgaggccactggcggccatgaagataccttgctcggcgtgctgttggaattggccatcccagcccatcgcgccgatcccgccaaggtcaacgcctatattaaatccttcggcaagcacgccaagaacgacccgatcgatactcgctggctccgcagttatggcggcgatcgcgtcgccactctggcgcgatggcagccggccgagccctgccagcagaagctcgagctgctcgttgcccgtcgtcttgacctcgtcgccatgcgggtgcaggagcaaaaccgtctgaaggccccacgcagcagcctgatcgccgacaatatccaggcccatctcgccgagatcaaccgccacatcgacgctctcaaccaacagatcgacgccctgatcgccgaaagccgcagcatggtgctgcgggccgaggctctgcgctcggtgccgggcatcggccaggtcctggtgccgctgctgctcgccgtcatgcccgagctcggcagccttaatcggcgccagatcgcaagcctcgccggcgtcgccccgcatccaaaagacagcggcaaggccagctggcaccgctccacaatcggcggaagacgccagatccggccggcgctcttcatcgccgcccttgccgcctgtcgcggcgcaacgccgcttgccatagcctacaaggcaatgctcaagcgcggaaaacccaaacgtctggccctcaccgccctcatgcgcaagatcatcaccatcgcaaacgcccgcgtcagagacgccttgcgacagaaaaacgaaataatgccaatctctgcataactgacttgg

SEQ ID NO: 3459 - DNA, 1830 bp, unidentified
  source 1..1830: mol_type = unassigned DNA; note = element_510fa1c
  misc_feature 1..2: note = core
  misc_feature 3..280: note = LE
  misc_feature 281..1582: note = CDS
  misc_feature 1583..1830: note = RE
  misc_feature 13..330: note = bridgeRNA
ctactacaatagagttcggttaggagatgtccagctagcagctcttaactaccttgttgttgaagctgtacaatagagatgcaatggatggactggagagatctggaacattactgttcgttcgagagcctgtcttccagcatcctggtacagcgtccgttttaagcaggcggatctggtcatcttatgatcaagttcgtgtaccttagtagataggataagcatcagggaattgctggagtctgtacattgttcttttgtagtaaagaggcgcattgtgatggaattatctgaatgtgatgaaactatggatgtgtctgtaggtatcaatgtttcaaagggacatagcatggtttctttttttcgtgcaggagacaagtctccctcgaaaccatttatgattgatcatgacttaccgggcctgaagtttttggagagaaagatcgatcagcacaaagccaggggtacattgagagtctacatgaaatgtaccggtcgataccacctcggccttgcggatggtctccaagaggacggatatactgtgtacacggtgaatccgaaacttcttgcagacttccatgacgattcccttcgtaagccgaagacagacccgatagatgcgcagaaaattgcgagatatggaattcaatactggaataaggagaggaggccctttagtcagatggattctaaaagggaatgcctcaaagaatgtgagcggcagtacaaactatatactgatgaatgtgtgacatttaccaataatctgctgtcccttaccgatctcacctgcccaggggtgaacaaactgttctcaggtaacaccaatcagaatgggcacttgaaatgggtagattttgttaatacctggtggcatgttgactgcatcaggaaaatatccatgaatgcattttctacccggtattgcaaatggtgtcagaagcatggttatgaattcaataaggataaagctgaagacatcatgagctgggcaaaaaaggcactggttgcaatgcctaagagcacagatataaagaaaactatacagatagccgtcaatgcaatcgatgaacttcttgagactatccaagataccaagaatcatatgaaccagctggcatcacagcttcctgaatatccggtagtcatgaaaatggatggcgtcggtgaaatcacaggtcccatcataatgggagaattgggagatgtcaccagatttaccaagcgcagccagataactgcatttgccggtgttgacccccaaaagcacgaatcaggtgacgacaagccgaaaagctctcgagccactaaaatcggatcaccggagctgcggcgggcattatatctggttatgacatcaaagctggccagaaaaccgcaaggggaccgggtatatgactttatagtgaaaaaacgcggtgaaggcaagaaatacctcgtttatatgacagctggtgcgaataagtttttgagaatatattacggtacagtacgtgattatatgcaaaataaacagaattcatcatttattcaggataaggcaccagcaggccaggtaagtgtatccaaaactgcttaagaaagccatgcagcccggactggatgaatcatgcagaactaaatcaggtcagggcagtatctatgcctttatctgatttagtcacatggtccaatatagcgggagtaaaagcatttaaaaatattaactttaactatcgcaaaaattaatactatctaaattatccccacctgaaacggtgggcttttggcgtgtaacaaatagaatcacagaaatttacaaaaaaggcttgactttatattagcagg

SEQ ID NO: 3460 - DNA, 1556 bp, unidentified
  source 1..1556: mol_type = unassigned DNA; note = element_51165c5
  misc_feature 1..4: note = core
  misc_feature 5..280: note = LE
  misc_feature 281..1546: note = CDS
  misc_feature 1547..1556: note = RE
ctcactggtgcaccatccttaggtcactgatctcggatggatcggtgatgcgcccgaggtgccgccaggtcatcgccctgctcgcttgacacggttgatgtccaggatgagatctgcgagatctggcggaggcccgggacgtgccgaccgtcgacagggctgagcgccaaggctgtttgctgcgagcgccgatcagtgagcgaaccggcagccacgtcccggcaccaccggcaccacaagagggcgcctccccactgggactagcagcgaggaggctgacgtgaagtctgccagcaccaccccgaacacccaactgcccgaaacgccgccgaacgacgtgaccggcggactggactgggcgcgtgatgatcacgcagtctcggtcgtcgatgcccgcggccgcgaactcgtgcggcacagcgtcgagcacagcgccgccgggctgcgtgaactgatcgcggtgctccgcgacgccggctgtggtgaggtggcgatcgaacgaccggacggccccgtcgtcgcggcgttgctgtccgcggacctgaccgtggtggtgatcagcccgaaccaggtcaagaacctgcgcggtcgctacggctcggccggcaacaaggacgaccgcttcgacgcgttcgtgctcgctgacaccctgcgcaccgaccgggccaggctgcgcgcgctcatcccggacactgcccagaccgcgacgctgcgccgcacctgccgggcccgccaggacctcattcggcaccgggtcgccgccgccaaccagctgcgcgcccacctgcacatcgcatttcccggtgccgtcggcctgttcgccgacatcgacagcccgatcagcctgacgttcctgacccgattcaccactcaggaccaggccgactggcttaccccgacccggttgggtaagtggctcgcctcggccgcctactccggcagagtcgacccggcggtgctgcacacccgcatgaccgacgcgccccgcggcctcagcggcgccgacggcgccgccaacgccgccatcaccaaggcgctcatcatcgtcctggtcagcctcaacgaccagctcaagaccctcagcacccagatcgagacccagctggccgcgcacaccgacgcgcacatcgtcacctcgctgcctcgagccggccgcgtccgcgcggcccgactgctcgccgagatcggcgattgccgcgcccgcttccccacccccgcttcgctgacctgcctggccggagttgcgccctccacccgccaatccggcaagacccgcgccgtcgggttccgctgggcctgcgacaaacaactgcgcgacgccgtctgcgacttcgccggcgacacccgccgcgccagcccctgggccgaccacctctaccgccaggcccgcgaccgcggccacgaccacccccacgccgtgcgaatcctcgcccgcgcctggctcaacgtcatctggcactgctggcaaaacggcgtcgcctacgaccccgccaaacacaacgccctccaacacatcatcaacccgccccaaccggaggcggcttgacacagggctt

SEQ ID NO: 3461 - DNA, 1336 bp, unidentified
  source 1..1336: mol_type = unassigned DNA; note = element_512156a
  misc_feature 1: note = core
  misc_feature 2..277: note = LE
  misc_feature 278..1273: note = CDS
  misc_feature 1274..1336: note = RE
  misc_feature 54..249: note = bridgeRNA
cctttagttttgcagcgtcaaaattaacgtactaaaaaaaacctcaaaagtgtatattcgcactcgtgtatttagtgccgaaaagatgaattaaccaaggatggagggtgaactaccgtgcttcccagagggcaaagctctatgtgctgtatcagtccctccattcttttggttgttagatccaactataatgccagacgtgatggtcaagttaaaggtgatagattaacagccattcggttaattcaattgtttaactataatgcgttgcaaaaatatgaaaaatttctacatcggagcggatgtgtccaaaaaaacactcgattgcgtcctttatgacgccgacaaagaaaaaatgagggcttcctacatcaaaatcgccaacgacaagaacggggccgatgaactgatcaaatggatgaaagaacacaaaatcgtcaagaagcaggccattgtctgtatggaatacacgggaaagtattcatttgactttgccgaactgctggagaagaagagggttgattttgtcatggtaccagcactgaaaatcaaaggagcttttgctggagcaagggggaagaacgacaaggtggacgctgaaagaattgccagctatgcctaccgctaccgtgacgaattggcgccaacaagcctgaaggacgacaaaatcattcgcctgagagatctgatgaatgacaggaaactcgccgtcaagcacgctgcagcctacaagactatcataaaggaatacaagacgaaaaaatcatccccgagacgcaaaagggctgaaaaaatcgtcgccgaatacagaaagcaaattgtggcgatagagaaagaaatcatgcagttgataaacaacgacgagaagatgaaaaagaactatgacctgttgaccagtatccccggcatcagcctggtgaacgccgccaattttattgtcttcacgtgcaacttcacattattcgatgatgccaggaaattcgcttcatatgcaggagtggctccttttgaacactcatccggaacaagcattaacagaggcactcacgtttcaaaaatggccaacaaggtgttaaaggcagacctctcgcaagctgcaaaagccgccatcagcttcgacccatccctgagggattactatgaacggaaacgggccgaagggaaatcttatggttgtgtgcttaatgccgtgaaattcaagctgataaccagagcatttgccgttatcaagagagaagctccttacgtgaatttcatgagatacacggcctaatattaccagttgatattattgttgataactttctgtataaactcttgtttttaacctataata

SEQ ID NO: 3462 - DNA, 1149 bp, unidentified
  source 1..1149: mol_type = unassigned DNA; note = element_5121609
  misc_feature 1..2: note = core
  misc_feature 3..192: note = LE
  misc_feature 193..1137: note = CDS
  misc_feature 1138..1149: note = RE
  misc_feature 3..189: note = bridgeRNA
cttgtatggtagcccatgcggtacagagtgattgcggggagagagccggcgagctccgagcagttgagatgcaccagggcaggtagctcctccctgcgatcacctgggtgccgacagcgccgatgaggaattccgccgcgcgacggccgatgagcagcgcaagggagcgcagggcatccgcaaggagggcagatgattgggattgacgtgtcgaaggcgacgttagcggtagcgtgctgggatgtgagccgggaggaagtggtgtgggcgtgtgagctgcccaatactgcggaggggctggccgagttagtggcgcgcactgtgcccggggattgctgggcgctggaacccaccggggcctacagtaagctggcggtggagaccgcctggaggcatgggcggaggccgttgctgacccctcccaaggcggcccgcaagtttctattgagcgtgaacccgcgggccaagaacgacaagctggacgccaaagggattgcccgctatgctgcggtggtagcgctacgaccgtttgtgctgaagcagccgtccatggaagagctctcccagctgctgaccgtgcgcaagagcctgtccgccagcctggccgcctttcgccagcaggcccacgccctgccccggagggaagctgagctctccccggtgatctgtacgctccagcagcagctgagggcgattgaccggcagctggcggagcgggcgcgtcgagaaccggcggtaaagcgattgcaggccataccgggggtggggctggtttccgccagcgccttggtgctcaggctgcagatgactccgtttgtcagctacgacgcctttgtggccttcctggggctcgatctgcgggtgagcgactccgggcagcatcggggccggcgccggctatcccgtcacggcgacgcagagctgcggcgattgctgtactgctgtgcccaggccagcgtgcgcgccaaggacagcccttttcgcagccagtacgagcgggaacgcgccaaagggctccccactaccggcgccctctgtgcggtagccaggaagatggccaaagtagcgtgggcactggtgagatccgggcaggaatacgacccggcgcgggtctatcactctcgcctggttgactagtaaccatagaat

SEQ ID NO: 3463 - DNA, 1472 bp, unidentified
  source 1..1472: mol_type = unassigned DNA; note = element_512d937
  misc_feature 1: note = core
  misc_feature 2..586: note = LE
  misc_feature 587..1456: note = CDS
  misc_feature 1457..1472: note = RE
  misc_feature 1..209: note = bridgeRNA
ccgttactttcttgatcaagcccggtgagggcttgcaggccaccggccgcggcatgacttgtcgcccctgtcgttgatgatctggggggtgttgtcaccgtggtcggcgggcgccaacgaccgctgatagagacctgacccgcatgtgcggtctgctcgtaacgtggctgccggcgcgggtgtccaggtcggtctgccacggcgagcgaggagacgtccttgtcggaacccgacaagattcccgatcacggcttcgcggtgtctgcggcctggacgtggtcaagtccacccatcacgcctgcgccctggacccgtccgggaagcggctgcacgacaagccgctgcccaacgacgaggccgtcctgaccgaggtcttcacccgactctcgacccacggacgggtgctggtcgtcgtcgaccagcccgcctcgatcggcgccctggccgtcgcagtggcccgctctctcggcatcgaggtggcctacctgcccggactcgcaatgcgccggatcgctgacctggcatccaggccagggcaagaccgacgcccgcgacgcccacgtcatcgccgacgccgcccgcatccatgccgcacaccctgcgcagggtcggcaccgacgacgaaaccctggccgagctcaccgtcctggccggctacgacgacgacctcaccgcccagtccacccggctgaccaaccggctccgcgacgccctgctgcacgtccatccggcgctggaacgcctgctcgggccgcggatgggccgtggcggcgtgctcgacctgctcgccgccgcacccacaccgcaggcgctgcgccagctcggtgagcagggcatcgccgcggccatgcgaccgcgttccccacggttggccaagacgctgcccgcgccgatcctggccgcgctcgacgcccagaccgtcaccgttcccgggactgccgcgttcgggcgtgtgatcgccgaggtcgccgcgcggctgcgggaagtccgcatcgaacgcgacaccctggcgtccgagctcgagcctctgctggaggcccaccctcttgccgaggtcctgacctcgataccagggctcggggtcaggaccgccctgaagatcctcaccatcgccggagacgccgccgcgttccctaccgccggacacctcgccgcctacgccggcctgaccccggtgacccgcagatccggctcctcgatcaagggcgagacacgctcgcagcgcggcaaccacgcgctgaagtccgcgctgttcttgtcggctttcgccagtctcgccgacccgaccagccgggcctactacgaccgcaagcgggcccagggcaagcggcacaacgccgccctgatctgcctggcccgccgccgcaccgacgtcatctacgccatgctccgcgaccgtcgcccctacctccgaccgagcatccccacgccgcctccggcggccgcagccgcttgacaaccccatagagaca

SEQ ID NO: 3464 - DNA, 1392 bp, unidentified
  source 1..1392: mol_type = unassigned DNA; note = element_5131cd7
  misc_feature 1..2: note = core
  misc_feature 3..88: note = LE
  misc_feature 89..1126: note = CDS
  misc_feature 1127..1392: note = RE
  misc_feature 1160..1379: note = bridgeRNA
gcggatagggtggatggctcccgctcacggcatctaggtgccaagatggtttgctgtcaggcaaacccgagcaaaggaaccatccgccatggagattaccacgatcggcctggatgtggccaagaatgttttccaggttcacggcatagacgcagcaggcaaggtcgttgtccgcaaagcgttgcgccgagcccagttgctcccgttcttcaggaagttgtcgccatgcttggtcggaatcgaggcctgcggcacctcccatcactgggcgcgcgagttgatcgggttgggtcacgaggtgcgtctgatgccaccggcctacgtcaaaccctatgttaaacgcggtaagaatgacgctgtcgatgccgaggcgatctgcgaggcggtcacgcgcccgacgatgcggtttgtcgctgtgaaatcgcgcgagcagcaatccgcgctgtcactgcatcgcgcccgaagcttgctggtggggcagcgcacgcagctggtgaacataatgcgcagtatgttggcggagttcgggatcgccattccggaaggccttgagaaggcgctttctatggcaaggcagattgttgagggagaagtcgatacaggccttcccgtggaggcaacaatggtggttgccatgctgtcgcagcaagtgatcgacacacatgtccggctccgggaaatcgacaagagccttggcgccttgcaacgtagtgacgacctcgcacgacgcctgtccaccatccccggcattggacctgttggcgcgacggcttttgctgcgtcggtaaccgatccccatcagttccggtcggggcgtcagtttgcagcctggctgggtctgacaccgctgcagaagtcgagcgggggcaaggatcgtctcggtcgtatcaccaagatgggcgacaaatatctgcgcaagttgctcgtcatcggcgcaaccgcattggtccgatatgccaaatacaaacccgacactgccgatccgcgccttctcgcgtggctggcgaagaagccggtcagggtcgcgacggtggccatggccaacaagatggccagggtcatctgggcgctcatgacgcgcggggaaacctatcaggcacgccataacccaatgctggcgggctgacatctaagagctccagctgaggagatcagcttcacgatgttgtaagcgcgatgcgatgtgatggcgataccggtcagaccgggaaccaggacaacccatggactgtcagaggcgttatagcctgttaagccgattgggacttggttcgcggaccccatcagggccagcagtccctcccgactgcaacagtaggccggacagacgactgcaaccgaccgaacgtcaaaacatcaatttgtacttgcaacgcgggagccatccacaga

SEQ ID NO: 3465 - DNA, 1567 bp, unidentified
  source 1..1567: mol_type = unassigned DNA; note = element_513b782
  misc_feature 1..2: note = core
  misc_feature 3..246: note = LE
  misc_feature 247..1425: note = CDS
  misc_feature 1426..1567: note = RE
  misc_feature 3..225: note = bridgeRNA
ctcgtattatataatcatagccattctttatcttttctacagattaggctatactatcttagatactgtggattgtttgctacctcctaccactttgatggtttttgtaaggctacaaccacagtctctttgtatatttgttaatcagttagataccgcatgacggtttatttagaacgaggttacaatcgcaaagagtacctgtggctctaaacagtatcaaatacttttcaaaggagttttcttatgatctacgttggaattgatgttgccaaagacaagcacgactgctttatcgctaactcagatggtgaggtattattgaaagcctttaccatctctaacaatcgcgaaggttttgaaaccttatttcaaagaatctcatccgtatccggtgatttagacaaagtaaaagtaggactggaagctaccggacactacagttacaatcttttgggattccttctcgataaaggtctggccaccttcgttatcaatccgttacataccaatctttacagaaaaagtctaagccttagaaagacgaaaacggataaggtcgattcccgtaccattgccaccatgatgatgtccgatatgaacttaaagtcctactcagatacatcttaccacaatgaggaattaaagtcactcactcgttaccgttttgataaagtaaaggaacgggcgaagttgaaaacctctgtttcgcggcttgtaaacatcctttttccagaactggaaaatcttgttccacaacttcatatggcttctatttatgctctgttgtctgagttcccaggtgcatcccacattgcttcttcacatctaacaaggctggaaaacctgctttcaaagacttctaaaggacactatggcaaagacaccgcaatcctctttaggaatgccgcaagggactccattggctcccacatgcccgccaaatccctggaactgaaacatactatcaaactcattcaggaattgaccatagagatcaatgaggtcgaaaccgaaattaaacgtattatggacgaggaagtcaattcacccatccttacaatccccggtatcagttaccgtatgggggcaatgataattgctgagattggggattttaaccgttttgattcagccgacaagatacttgcctatgccggaatgtctccatctacctatcagtcagggcagctggataactgttatgctcacatggaaaagcggggttccagatacctgcggtatgccctttacaattctacaaaatatgtctgccagtgggatgaatcattcgctgcctatcttgctaaaaagcgagctgaaggaaagcattataacgttgctttatcccatgccgcaaagaaacttgtgcgtctgatttacgcaatggagaaattcgggcaaccatacagtaaggcagcttaattctttccgtaaatatctccttttagagtgccagatatgacactctgtttgtcatgcagttttcaaggtacagctatatctgaaatgccattctgcaattcattcaaaaaatcatttcaggtcttgacttttaatagttagt

SEQ ID NO: 3466 - DNA, 1366 bp, unidentified
  source 1..1366: mol_type = unassigned DNA; note = element_513e9c6
  misc_feature 1: note = core
  misc_feature 2..267: note = LE
  misc_feature 268..1104: note = CDS
  misc_feature 1105..1366: note = RE
  misc_feature 1133..1360: note = bridgeRNA
gaatgatatggactccccctgctccctcggcatcaatgtgccacattgaaggtgtcgacatcttcaatccgaagcaggaggagtcatcatgaatgttacaaccattggcattgatctggcgaaaactgtgttcagtattcatggcatcgaccaacacggcaaggtcgtggttcgcaaacgattgaatcggcccaagcttttgccctatatcgcacaactgccgccggaatggaagcctgctctggtgcccactactgggctcgtgaaatgaccaaactcggccacgatgtccgaatcattgctccccgcttcgtcgctccctatcgcaagagcagcaagaacgacgacaacgatgccgaagccatctgcgaagcggttggccgccccaatatgcgcttcgtgcccatcaaaaccgaagaccagcaagccgtgctgtgcctgcatcgcattcgtcgtgggctgaccaaggaacgcaccgcgcagatcaaccaggttcgcggactcctagctgagttcggactgatcatccctcaagggcgttatgccgcaagacgacgggttccagaaatcctggaggatgccgaaaacggcttgccgatgctcacgcgccgcttactgaacgacatcaatcagcgcattctccagcttgatgaagaaatcctggcttatgaccgggagatcgaagccatggcccgacgcgatgagcaggcgcggcgtctgatggccataccgggtatcggaccacaaaccgccaccgctctgttagccagtgcgcccgatcccaggcagttcaaaagcgggcgacactttgctgcctggttgggcctggtgccccgacaatactcgaccggtggcaaagttcgacttgggcgcatcaccaaacgtggggacaaatacttgcgaatgctgctgatccacggcacccgagcggtgatcgcgaaactacccgacaggaacgatcggctcagtggctgggccagggatctggtggaacgacgcggatacaaacgggcagcggtcgcattggccgccaaaaatgcccggattatctgggcgctgttaatgaaccaaaccgagtttaaaacacagcctgtagaaggctgataacgggcaacaacgacaggcagaacacgcctgccagccgagtcttgcaacggcaagcgatgacggaacggtcagaccgagagtgattgaacctgatgaataatacggctggaaaagccgactaacgaatgaggttatcactcacacgcatcatcatcctggcccgggcaacagtgcccacaaagaggccgaatgtagaactgcagtctaaaaccgcttcggattcaaatggcgttgcttgaccgcagggggagtccatgta

SEQ ID NO: 3467 - DNA, 1237 bp, unidentified
  source 1..1237: mol_type = unassigned DNA; note = element_51445fa
  misc_feature 1..2: note = core
  misc_feature 3..271: note = LE
  misc_feature 272..1234: note = CDS
  misc_feature 1235..1237: note = RE
  misc_feature 35..242: note = bridgeRNA
cttgtatgttcgtcaggcactctaaagtggaagaggtaagccaaaagagtgccgaggcggagggactatccgggctatctgtcgcctacgcgaacagactccagtagctattccctgcttcatcagccgcagtgtcgattagggatgcagcggcgaggtccaaacctttcgcacggcgacgaccccgaccgccgatagctagcaagctcacactcaagctgatgccgccccggcctcgacagtttaatcgtcaactgagaggactgccgggatgaaccaggtatcgaccgatatcggagtggatgtcagcaaggatgagctggtggtggcgacctatggtcaggggccggtcgtctgcctggccaatcggccagcggctatccaacgttggttgaaagaactgcctccagggtgtcgcattggcatggaggcaaccagtacctaccacgtacatttggccgaacgggcctatgccgccggccactgcgtctatgtcttcaatccacgacagattgcccgctacctgggcagcctgcggcaacggggcaagaccgacctgctggatgcgcgaggcattgcccgctttgttcacaacgaaaccgatcaggcccatccgtttgttccacctacggcggagcagaggggcattgccagcctggtacggcggcgccatctgctggtaaagcagcgtgcggcgctgctgcaaagcagccatggtgagccctggttgcaacaggctttgcagccccttctggcggagtaccgcaagctgttgagcacgcttgatgtagaactggaacggctgttggcccagaccccacgcttggcagaacagcgtcgtttactacaaagcatcatgggtatcggtccgctcgtcagcattgccctaagccagcacctgagccaaaccgactatcgtcgcagcgatgccctggtggcagcgtttggtctcgacccacgtccacgtgaatcagggtgctatcaggggagcagaaagctctctaagcaaggccatccagagtaccggcggttgctctacctcgccgcgcaaggcgcctgccgagccggtctctggcaaagcgagcgtgcagcctggctggcgtgtgggctaagcaagacagccgtgaactgcatcattgcccgcaagctcctgcgaattgccttcgccgtctggcgttccggaataccctttgaccgcaataggatcggacaacaggcttgcggccgaacataggat

SEQ ID NO: 3468 - DNA, 1449 bp, unidentified
  source 1..1449: mol_type = unassigned DNA; note = element_5147214
  misc_feature 1..4: note = core
  misc_feature 5..235: note = LE
  misc_feature 236..1432: note = CDS
  misc_feature 1433..1449: note = RE
  misc_feature 1..236: note = bridgeRNA
ccccgttaccttctaggtagccccgatggtcggggttctggtcgccaggcccggcatgacttactgcccctgtcgttgatgatccggggggtgttgtcaccgggtcctggtggcgtgggttgatcgctgatagggacacggcccaccgtgcctcggtgtggtctcttcgtaacgtgggtgccgacgatcttcgcctgacttggtgaccagaatgagtccttgaaggaggactgtcatggaccaagaccggttcgacgtcttcgttggtctcgacgtcggcaaggaacaccaccacgccaccgccctcaacacggcaggcaagcggatgcatgataaagccctaccgcaggacgagtccgcgctgcgggaggtgttcgacaagctcgctgggtacgggtcggtgttggtgatcgtggaccagcccgcgacgatcggcgccctgcccgtgacagtggctcgggcgctgggcatcgaggtcgcctacctgcccgggctagcgatgcggaggatcgccgatctgcatccgggcaatgcgaagactgacgcccgtgatgcctacatcatcgccgaggctggccggtccatgccccatgcgttgcgccgggtcggaggcgatgacgatctgatcgccgacctggcggtgatcgtcgggttcgacgacgacctcgcaggcgaagtcacccgcgtctcaaaccggatccgcggtctcctgacccagatccacccagcactggaacgcgccatcggcggcgacatcggccacccggcggtgttggccctgctgacgaagttcggcggcccaaccggcctcgccgccgccggcaagcgccgacttaccaccaccgccaagcctcttgcgccacgcatgcacgagcgcctcgtccaagccatcgtcaaggccctgacagagcaaaccgtcacggttccaggcacccgggcagccgagttggtcctgccccagctcgctgcccaactccaaggactgctcgcgcagcgcgctgaggccgcaaagcaagttgaggaggccctcgatgcgcaccctctttcccagctcctgatgtcaatgcccggagtcggcatcaggaccgcagccagactcctcctcgacatcggcgacggctcagcgtttgcgaccgccgggcacctcgccgcttacgccggcctggccccggtcacgcgaaggtccggctccagcatccgcggcgaacatccctcccgcggcgggaacaaacacctcaaacgagccctgttcctatctgccttcgctgccctccacgatcctgactcacgcgcctactacgaccggaaacgagccgcgggaaagaagcacaacgcggccctcatctgcctggcccgacgacgcgtcgacgtcctccacgccatgctccgcaacggcacctactaccaagcaaaacctgccgcagcggcttgacaggaaccatagggaca

SEQ ID NO: 3469 - DNA, 1371 bp, unidentified
  source 1..1371: mol_type = unassigned DNA; note = element_51499f5
  misc_feature 1..2: note = core
  misc_feature 3..81: note = LE
  misc_feature 82..1107: note = CDS
  misc_feature 1108..1371: note = RE
  misc_feature 1087..1358: note = bridgeRNA
cgatggggtggacacctcctcacggcatcgctttgtgccaaggtagcgatgtcgaaacgagctacagaggagacgtcaaagatggaagctactataatcgggatcgatattgcgaagaatgtgtttcagtttcacggagctggagccgacgggaccacggtattccggcgcaagctccggcgatccgcggtgctggattttctgaaggctctaccgcactgcctggtcgcgatggaagcctgtgccagttcgcattattggggccgagagattgagcggctagggcatgaggttcgcttgatcccaccgcaatatgttaaacccttcgtgaagcggcagaagaatgatgcggccgatgcccaggcgattgtcgaagccgcaacgcgaccggagatgcattttgttgctgtgaaatcggctgaacagcaaggtcaatccatgctgctgaaaacgcgggagttgtttctgatgcaacgtacccagatgatcaatgcgttacgcggccatctcgcggaatatgggatcgtagccgcccagggggcctcgaatgtgaataagctcgaagccttcgttctggagcgcgacaaagacgacttgccccagactatgcgcaacatgtgcatccggcttttcgaccatttgcgcattcttgattggcagatcgacgatctgacgtccagaattgagactgctgcacgcaatgatgaaaccgcccgccgactgatgactatccccggcatcgggccgatgtgtgcgatggcaatcacaacccttgcgccaccgcgcgagagctttcgaaagggccgtgactttgcggcctgggctggattgaccccaaaacagcattcgactggcggtaagacgcggttggggcgaacgtcgaagatgggccagagagatattcgaagattactcatcttgggggccatgtctgtcattcaatcggttgaacggaaaggtggtgcccccgagggttcttggcttgaccgtatgctgaagcgaaaacccaagttgctggttgcggtcgcacttgcaaacaagcttgcccggatggcctgggcattgatgaagaatgaagatgtgtatcgagttcagctggcggcttaaagccatccagttgttgcctggaatgcggtaggtcttagcggaggattatgggcgaacagtcgagaatgacgggatctggagaaccagagaagctgtatgcggaaccgaccgcggaaatacgatttggaccagatcttcgaactaaccataagggcccgtggcaagagatgctgcaatacagaggccggacacacgtaggaactcgaccgcattcactcaaaatcaccgtgaaaattcacttgcattcccggaggtgtccacaca

SEQ ID NO: 3470 - DNA, 1486 bp, unidentified
  source 1..1486: mol_type = unassigned DNA; note = element_5149f0d
  misc_feature 1..3: note = core
  misc_feature 4..152: note = LE
  misc_feature 153..1451: note = CDS
  misc_feature 1452..1486: note = RE
cttgtataataaattaaagatttgaattaaaaagtattgattatcacatagcctctatgagataatattctcgcagacagaggtttctcgttttcctccttgcggcgcagaccgctaaacaaagagtgagagcctctgtgcggcgggtttacatgaatgagctggatgtcggttcggggttgccgttctcttcgaatatctcacaaggttgtgttccgtcgtttcagcggcactctttctgcaattcttcaccaaagaaggtaaataccatgtttttcgtaggcattgacatcgcaaagaattctcatgaggccgccgtaatcgacgggagcggcaagattgtcgtaaaaccttttaaattccccaactctatcggcgggttcgagaagtttcttgccgcagttaaaggcgtatcggaagatttatctcaatttgaattcggcatggaagcgacggggcattactggctcaatctgtataccaaactcatggacttcaacgttgtcgtgcatgtgatcaatcccgttcagtcggacgctttgcgcgggctgtacataagaaagacaaagaacgacgcgaaagacgcgttcataatcgccgagctcatccgtttcggcagatattccgaaaccactctttccgattccgatctgctctctttgcgcgagctcacccgccaaaggttctacctcgtggattgcgtctccgatgccaagagaaaagccatttcgtttatagataagatatttccggaataccaaactctgttctccgacacattcggcgctacgtccgtggaattgttgcaaacctatacttcccccgacgtcattgcggaactggataccgagcttttcacgcacttcttaaagtcggtttcgcacggaagattcggcagatccaaagccgaagagatacagagcgttgcgaaaaatacgttcggttcgtttctgttcgccgactccgctacgcttgccatacggcaattcattcagcagataaaacttctggaagagcaaatcgcagagatagaggatttcatatccgaaaagttcgcttcctttgattgcaaactcgatacaattgtgggtgtggggacgacgcttgcagcctcgttccttgccgaaataggcgatattacgcggtttgaatcccccgataaacttgcagcctttgccggtatagatccatctgtaaagcaatccggagaatttaacggcacgcgcaacaaaatgtccaagcgcggttcgccgtatctcagacgaacattttggctggctgccatttcgggcattcgctttaatcctgccttaaaatccatttacgacaaaaagtgcgcccagggcaaacaccatgccgttgccgtttctgccgctatgcacaaactatgcaatatcgtgtttgctatgctgaaaaccaacgagccttacaaaatcattcttcctgaataattttccctttatctgcttgacttttcatagctggt

SEQ ID NO: 3471 - DNA, 1578 bp, unidentified
  source 1..1578: mol_type = unassigned DNA; note = element_515c997
  misc_feature 1: note = core
  misc_feature 2..78: note = LE
  misc_feature 79..1143: note = CDS
  misc_feature 1144..1578: note = RE
  misc_feature 1342..1569: note = bridgeRNA
taatgggatggtccggccgtgctccggccctgccagcacgagaagctggcaaggggcgctcaagacaaggagcacgccatgtctcagaaactcaacgcggcgatcgccgtgatcggcatcgacatcggcaaaaactcgttccacatcgtgggtcaggatcaccgcggtgccatcgtgctgcggcagaagtggtcgcgcggccaggtggaaacgcggctcgccaacctgccgccgtgcttgatcggtatggaggcctgcgtaggcgcccatcatctcagccgcaaactccaagtacttggccacgacgcccgcctgatgccagcgaaatacgtgcgcccgtattcgaagggacagaagaatgacttccgagatgcggaagccatcgccgaggctgtccaacgcccgaccatgaagttcgtcgcgaccaagaccgccgatcagctcgaccttcaggcactgcaccgcgtccgcgatcgattggtcggtcagcgtaccggcgcgatcaatcagatccgtgcgttcctgctggaacggggcatcgccgtgcggcaaggcccgcattccctgcggttcgagttgccaggtatcttggcaacacgcactgatgtgctctcgcctcgcatgttgcccatcatcgagggtctggcggaagactggcgccggctggatgagcgtatcgagggtctatctggcgagatcgaaacactagcccgtcaagatagggcctgccagcgactgatgacggtgcctggcattggcccaatcatctcgagcgcaatggtggctgcgatcggcaccggagacgtgttctcgaaaggccgcgacttcggcgcctggcttggacttgttccgaagcagatatcgaccggcgaccgcacgatcctcggcagtatatcaaggcgcggtaatcgctacctgcgcgcgctgttcgtgcaagccgcgtgggttgttctggtaaaggtcaagtgctgggagcgctatggcctcaactcttggatcgaagccgccaagaagcgattgcaccacaacgtgctggcgattgcgctcgccaacaagctcgcccggatcgcctgggcggtcctcaacaagggacgcgccttcgcgtgcgtcaagatggaggagacggtgtcccgacctgcttgatcctcgcgccgtgcgcggggccgtcaaggcgcagcctggcagcaggagagcaagacgtcaggacagcacgacggccggctttgacggccccttgcgcgcggcgcgtctgcgcgcgcaggccgggacgaaggaacggccgccaggcacgaacgaaggaacagcgcgaagtgaggagctatcgatgacgtaacaacccttacccgccgaggtctgcgagaggatgagacgacgatggagaatcggtcttcccggcacatgtgaaccctggtgacccaaatggcccggtcgaggcctgtccgctaaccagatcacatgcgcgctgatatccatgatggcccggagcactgcgctccaaacagaggccggatacattgatgcaagaccgcatctaccggatcgtcgaaatcttcttgcaccccacggccggaccataca

SEQ ID NO: 3472 - DNA, 1590 bp, unidentified
  source 1..1590: mol_type = unassigned DNA; note = element_515d1ff
  misc_feature 1..3: note = core
  misc_feature 4..270: note = LE
  misc_feature 271..1293: note = CDS
  misc_feature 1294..1590: note = RE
  misc_feature 25..290: note = bridgeRNA
tttggtatgatattagcatagtccaaactgctgactacagtggtgacaggctatgcttattttgatataataagaaggtaatggactgacggtcatctccttagaactaagcgttcgtagcagaaagtgtcagccgccttcttgttataaaattcgattaagcaggttgtacctgctgtgtttacagcagcgttcgcatcactaaccaaaatgaattttaataagctcctgagcggaaacattacaaaatatcagaaagaaggatttatcatgattagtgtaggaattgatgtatcaaaaggaaaaagtactgtttgcattatgaaaccttgcggcgaaatacttgaatcaccctttgacattggtcacactgccgatgaactggattctcttatttctctcatcaaatcattcgatgaagaaacccgtgttgttatggaagatacaggtcactatcatcttcctgttgcgacctatttatcttctcacaacatttttgtatgctgtgtaaatgccttgcgtatgaagaagttctgctcgcaaagcataagacgagcaaaaaccgataaaattgattcgattaaaatcgcatctttcggtattacatactggaacgagcttgttaaggcttatccctctaatgttatatacgatgaacttaaatttcttgcacgtcagtattatcaggttacaggtatgcttgttaaatcaaaggtgaacttctccaatcttcttgaccaagttatgcccaaaatcaatgatgttctttcaaatcaaggtgaaaatcacaagctgaccgagtttgtcagtcgatatattcattttcagaatattctcgatatgggagaaatgaaatttacatctgattactgcaaatgggcaaagaaaaagggataccgcttaaacgagcgtaaggcagcggaaatccttgcccttgctcaaaacggtatccctacgcttcctaactcccaatccgtcaaaattgccgttagtgaagccgtcaagctgatccactcaatagaggaatcacgcaataccattttagcacaaatgcaggatctttgcaacaccttgcctgaatattctgttgtcaaggaaatggattgtatcggagatacacttgctccacgtatcattgctgaaattggcgatgtacgcagattcaaaaacaagcactctctcattgcctatgcaggcattgacgctccgccttatcagtcgggtgcattccacgcttctgagcgtcatatatccaagcgtggaaacagttatctgcgaaaaacaggctactagatcatgcagtcctaaatcaaacacaaacctgccgacaatgctgtctatgactttattcagaagaaacgcagcgaagggaaatgcggcaaagaagcaatgattgcggggcttaacaaattccttcgagtttactacggcaaggttatggagttttactccgaacattaattgtagtctcaggtacatactcatcgggcgtttgaatacttccttcaaacgtcagctttgctatatcgttttttcctttgcttcttttctcaactttgttcattttgcctattgatttttcttagcagg

SEQ ID NO: 3473 - DNA, 1441 bp, unidentified
  source 1..1441: mol_type = unassigned DNA; note = element_515f66c
  misc_feature 1: note = core
  misc_feature 2..248: note = LE
  misc_feature 249..1418: note = CDS
  misc_feature 1419..1441: note = RE
  misc_feature 14..197: note = bridgeRNA
ctactagttccattgactgcagatcgggccttggccgaggctcggttcaggtggttcggggcggtcgctccactttgcggctgtccacccagtgggtgtgactttcaattggcgtgcgctaccccggaccaccgacccgggcgggagaggctgaagaggggaatgcgcaacaaccggcaccatcgaggccagtagtagcggtgccctcccggcccatccactcactgtcgagattcgagggatcgggcatggacgaacacgtcattatcgggatggatccacacaaacgcaccgtcacgatcgaggtgatggacgcccacgagcacattcacgggcaccggcagttcaccaccgacaccgcgggcttcgccgagatgctcgtctttgcgcaggagtggccgcagcggacctgggcggtcgagggctgcaacggcatcggccatcacgttgctgaacgactcctgctcgccggcgagcaggtggtcgatgtcccggcgaaactgtcggccaggatgcggatgtttgcgaccggccaggggcgcaagaccgacgacaccgacgcccactcgatcgcgctggtcggggtccgtattgcggggctgcagccggtggtctccgacgagcaggtcgaggtgctgcgtctgttggtcgaccgtcgccgccgactgggccaggaacacaccgcgaaggtctgccagctccaccaggtcctgctcgacctgatacccggcggagcaccgaagtccttgtcagcagcccaagcgcggcggatcctcgccggcattcgccccaaggacgtggtcggcaagacccgcaagcgcgttgctctggaactggtcgaggacctcgaacggatctacgcccgcaagaaggcagcgaacaaggaactcgttggcctggtccgcgagacccgcagcgccctgctggacctgcacggcatcggaccatccggggccgcacggctgttggtcgaggtcggtgacatcacccggtttcccgacaagggacacttcgcgtcctggaccgagaccgcaccggtcgacgtgtcctcgggtgaccatccgcaccaccggctgtcgcggggcgggaatcggcagatcaaccgggtcctgcacatgatgggcgtggtccaactgcggaacccgaccgagggccgggcctactacgaccgcaagagggccgagggaaagagtccgaacgaggcgatgagggcgttgaaacgacgcctgtccgacatcgtctaccggaccttgctcaacgactacgtcgcccgagctggggcgggttcgggaggacaccggggcgcgtctactggctccagcgcggccggctcacagccccatgccagcacttcggagaagtcacttcccgaacccgctgcacccaatcctagaacccggctcccgcttgcttcatgaccctccttgacacagaggggtgc

SEQ ID NO: 3474 - DNA, 1337 bp, unidentified
  source 1..1337: mol_type = unassigned DNA; note = element_516523e
  misc_feature 1..3: note = core
  misc_feature 4..67: note = LE
  misc_feature 68..1096: note = CDS
  misc_feature 1097..1337: note = RE
  misc_feature 1105..1335: note = bridgeRNA
tgatgtgatggtctcctcccaatacggcatctatgtgccatgattgaagttgttatacacaatcaaaatgggagaagaccgaatgaagattacaacaatagggttagatatagcaaaaagattttttcatgttgtttgctgcaataaagaaggaagcttgattaagaagaaaatgttatcacgagcacaagtattaacattttttcaattacagccaacgtgtttggtggcacttgaagcttgtgcaacatcacattattgggcaagagaaataaaaaagtgtgggcatgaggtaaagcttattccaccacaacatgtaaaagcttttttaataggaaataaaaacgattataacgatgcactagcaattactgttgccgctaagcagccgcatattaaaagtgtaggtataaaatcgatagagcaacaagataatcaagctcaacataaagcgagagagttagcggtcagacaacggacagcattatgcaaccaaattagaggattaatagccgaatatggcatagttttaagccaaggtgtaaataatgtccgcaagaatattgtcttaatgttggatgaggaaacaacacaattgtctggtgcatttaaagtaatacttactcagttacagaaacaattaaattcattagatgagtgtattgatgtttttggtaaaacaatcactgaatcagttaaaaataacgctatttgtcaaagactcctaacaataccagggtttggtccaatggtatcaagcggctattttaatgaaattgggaatggtgctaattatcgaaagggtcgagatgtttccgcatcactaggaatagttccacgccaacatagtagtggtggcaaggatactttattaggaataagtaaacgaggtaatagttatctcaggtgcttattaattcaaggggctaaagcggttgtatcaagggcaggaacaaaaactgacaagttgagccagtggattaatcgcatagttcaaacacgggggcataaccgtgcatgtgtagcatatgccaacaaaatggcgagaatggcttgggctattaccgtctctggtgaagaatattcagcagtataagtaaaccgctcttcaaagaattgcgtgggtagaacgaaacgatgacataacaggtaaaacctgcatattgaaaacctggagatttcagaggtagtaaataccgataacctgataaggtcaatatgtgcggaatacatcgaggtcagaagaaataatcttcattaaaagaccgtatatatgacagcaatcctgtccctgttatcgatgagttaagccttgcaatacgggaggaaaccatata

SEQ ID NO: 3475 - DNA, 1394 bp, unidentified
  source 1..1394: mol_type = unassigned DNA; note = element_516dd64
  misc_feature 1: note = core
  misc_feature 2..89: note = LE
  misc_feature 90..1121: note = CDS
  misc_feature 1122..1394: note = RE
  misc_feature 1169..1389: note = bridgeRNA
caatgggatggactcctcctcaccccatcggcatcaatgtgccagactgggagttggtttttccagtcaccagagagaaggagtccgaaatgaagcttactcgcgtaggagtagatttggcaaagaacgtatttcagatccacggtgtcgatgagcacgataagttagtgtggaagcggcgcttaaagcgagcaacatggttgcaggtgttgctggataaagcggagcccagttgtgtgattggcatggaagcttgtggtggtgcccatcactgggcgcgcgagctgcagtcacgaggctacaccgtcaagctgatcccagcgcagttcgtgaagccgtatgtgaagagccagaagaacgatgccagggacgccgaggcgatctgtgaggcgatgagccggccggggatgcgtttcgtgtcggtgaagacggtggaacagcaggacatccagtcgatccaccgggtgcggagcttgctgataagtgagcgcacagccaaggccaatcaaatccgcggcctggtggcggaatatgggctcattaccccccagcacgcgggcccgttgcgccaggccatccccggatggctggaggacgctgagaacgggctcacagaccagttccggtcatggttacatgagctttggaatgagcttttgaggctcgaccaacggtgcaaagcattggacgcagagatcgagcgcatctccaacactcaccctgatgccaagcgtttgaagcagctgcgcggagtgggcccgctggtctccacggcactggtggcccggtttggtgatggccggcacttcaagcgcggccgccaggcggcggcttcagtcggcttgacccccagacaccatggcaccggcggcaagaatcgtctctacggcatcaccaaacaaggtgatcgttacttgcgcagtatccttatccatggcgcccgtgcggtggtctggcgggcaaaaggccgtgacgatcggctgagtctgtggctcactgaactggtggctcgctcgcaccccaatgtagccgcggtggcactggccaacaaaaccgtgcgtatcgcctgggtgatgctcagacacggtacggatttcgatcctgagctcgctgtggcctaaggccaaaacgggctgcgacaaggcgtttatagaaggagtacctcacacacgattgcacagcacactgacagatggcaaacaggtcggaccggcgccggcaaaacccgtgaatactcgcgtgtttaaagcacgatgaagcagttgggagccagcgcgcgaatacccatcatggcccggcatcaacgcatgccaaccttagaggccgaatatacgtgagcagtcgtacctcaggtcatcaaacagcgtgcttgcaaacgaggaggagtccatata

SEQ ID NO: 3476 - DNA, 1381 bp, unidentified
  source 1..1381: mol_type = unassigned DNA; note = element_5177605
  misc_feature 1..2: note = core
  misc_feature 3..77: note = LE
  misc_feature 78..1118: note = CDS
  misc_feature 1119..1381: note = RE
  misc_feature 1118..1368: note = bridgeRNA
tgatggggtggacggccccctacggcatcgctgtgccagaatgaggttgttgcaaatctcagacaagggagccgtccgtggaccagattatccgcattggaatggatacgtcgaagcatttttttcagctgcacggggttgatgccgccgagcggccggtgctgcgcaagaagctgcggcgcaacgaggtgttggcgttttttgccaagctggcgccgaccgttatcggaatggaggcgtgcggcgcagcccattactgggcgcgggagttgcgcaagctcggccacgaggtgaagctgatggcgccccaacacgtgaaggcttacgtcaagcgcaacaagaacgacgggcgggatgccgaggcgctgtgcgaggcgatgagccggccgacgatgcagttcgtgccggtgaagaccgaagagcaccaggcggccctgatgctggcagggatccgcgagcagctgatcgcccggcgcactcagctgagcaatacaatccgcggctatgcggcggagttcggcctgacggcggccaagggtctcgacaagatcgagccgctattggcgcggatcgcgcaagacgcgaccgtgccggcacaggcgcgcgagctgttcgcgatccagggccaggactacgcgcagctgcagagcgaactgaaggggctcaatgccaaactgctggcctggcaccgcgccaacgctgctagccgacggctggcgcagattcccggggtggggccgatcggggcgacgacgctggtgatgaagacgccggacccgcgcgtgtttgcctccggccggcacttcgcggcctggctcgggctgaccccaaaagaccattccactgccggcaagaccaggctcggcaagatcacccgcgccggcgacgaagtcttgcgcagcctattagtggcgggggcgaccgcagttatccagcaggttcggcgcggccgtggccgtccgtcgccctggctgctcgccctgctgaagcgcaagccgcccaaactcgcggccgtggcgctcgccaacaagattgcccgcatcgcttggaagctgatggcgacgggcgaaagttacgatggcgcgcggatgcttggcgcatcggcactcgccgcttgagagatcggccggtcggcgttcgccgcaccggttgagccggagctgcaagaggagagcagatggtaggatcgatcgatccgaggtgcgagacaatccgtggaatccattggccgaagaaaggtcgtgaggttgtttggaactcgcgtcgcggaaaccatcttggccagcggttcaaagcgaccgcatcaacaggccggacatatggatgcaagcgatccgatcagaccagaaaaaactcttgcggcacgggggccgtccacata

SEQ ID NO: 3477 - DNA, 1175 bp, unidentified
  source 1..1175: mol_type = unassigned DNA; note = element_517bc9c
  misc_feature 1..2: note = core
  misc_feature 3..209: note = LE
  misc_feature 210..1169: note = CDS
  misc_feature 1170..1175: note = RE
  misc_feature 41..215: note = bridgeRNA
cttgtattagcgcgatgggttagattggccacgttccgtgaggaacggcccggcccgggcggccgcccgggccgggccgccgatcgtcggatcgtaacccaacccagcactttgggctgtcttcgtagcaagatcgcgatcggcacttcatcgaacccgcatggttgaaggccctttgaggggcgcatcgcaagggagggtcgacgaagatgagccagtctatcatggcctatgccgggatcgacaccggcaagcacaagctcgatgtggccgtccacggtgccaaggcgcggctgcaggtcaccaacgacgaggccggtcacgccaagcttgtcacctggctgcgccgccagcgcgtccgccgggtcggtatcgaagccagcggcggctacgagaaggcggtcgtcgcccggctgcgccaggacggctttgaggtcgtcgtgttccagcccgcccaggtccgggcctatgcccggtaccggctgcagcgggccaagaacgaccgcatcgacgccaccctgatcgccgcctgcaccgccgactgcgaggcggaggacatccacgccccgcccgacccgcgcctcgccgcccgggccgagcagctcaccttcatcgagcagctcaccgaggatgtcgcccggctggagacccgacgcgcctcctgccgcgacgacgccatcctccgccactgggatctcgagatccgccgcctcaagcaggagctcaagcggcagctcgccggcctcgtcgccgatctccgccagcacccagacctcgcccaacgcctcgatctcatcgaaagcgtccgcggcatcggcctgcgcaccgccgtcgccatcctcatccgcatgccagagatcggctccctctcccacgagaaagccgccgctctcgccggcctcgctccctatgacgacgactccggtgaccatcacggccagcgacacatcgccggcggacgacggcgcttgcgaaacagcctcttcgccgccgctctccccgccgccttccagtggaaccctcaactccaagccctctaccggcgcctcgtcgccaagggcaaagcccacaagctcgccctcatcgcatgcgccagaaagcttctcctcttcgccaacgccgtcgtcgcccgtggctctccttgggtccaaaaatccgctgagagctaatggttg

SEQ ID NO: 3478 - DNA, 1976 bp, unidentified
  source 1..1976: mol_type = unassigned DNA; note = element_5186c8e
  misc_feature 1..2: note = core
  misc_feature 3..273: note = LE
  misc_feature 274..1485: note = CDS
  misc_feature 1486..1976: note = RE
  misc_feature 28..248: note = bridgeRNA
ctcgtataatggatttacggtttggatgtggtggggaaccgcataaaacccacttgttgttccacaagccatgtgggataataaggccagcagacagagggcgcagtatcgctccttgaagcttggcttccatagagagaattgcgcctctgtctttgcgggttgacacgaatgagctggatagcgaagctgcgctgtatctctaacgaggttgtgttccgcaaagaagcgtgagggaactctgtctggaattttgaaacaggaggtttcgccatgttctactgcgggattgacattgccaaatacaagcacgaagccgcagtcatagacgaggccggcatggccttgctggacagtatttccttcgccaacagcaaggagggctgcgagaaactgctggcgctgttccagcgactggacatcgccaaagacgccctgattgttggcatggaggccaccggccactactggctgagtgtgtacggatatctgctggaacgtggctttgaggtaaaggttatcaatcccatccagtccgaggcattccggaagatgtatatccggcagacaaagaccgaccggaaggacagcttcatcatcgcccagatcatgcgttttgggcagttttccgccacgaatctgtcagaggaggtcatcgtggcaatgcggcagctaagccggtaccagctggcactggtggatgcctgcggggactgcaaacgtcgggtcatcgcactgctggatcaggtgtttccggagtacgacacgctgttctcggacaccttcggagtcacctccaaagaggttctttctcaataccctaccccagaggatctactgtctgtttccaccagaaagctcgccaatcttttagaaaaggccagccggggacggtttgggaaagagaaagcggagcagctgaaggctgcggcagccagttcctttggggtgagctttgccaaagacgcctttgcctttcagatccggcagctcattgagcagctggagttcctggagggacaaattgcggagctggaggagcaaatttcctctctgttgaagcagaccggcagctacatcactactattcccggaatcggggacatcctgggggccattattctgagcgagattggagacatccaccgatttgatgcacctaacaagctggttgcctttgccgggctggatgtacgggtcacacagtccggggagttcaccggaacaagacagaaaatctccaaacggggctcaccctatctcaggcgggccatctggctggccgcctctagggcggccttttgtgaccccatcctctcagagtattaccagtccctccgcgcccggggcaagcaccacctcaccgctatcggcgctgtctcccgcaagctctgtaataccatctataccatcctcaaagaggaccgtccctggcaacctatcccgcccagagatagaaaagtgtcgaatcataccggacaatagcgacagaaagcggttttcctgttttcccttctatcattctcttgaatcttttgatttgggaggatgcgaccatgactgtcattcaggataccctacgcctttttggcattaccagatgctacaaagggtttctgcacaccgcttatgccattcagctcgctgttgaagacgaggaccgcctggaggctgtcacaaaagaaatctacatggagaccgcgttccacttcaactgtacttggactgcggtggaacgcaatatccgaaccgccgtagcgagggcatggaaaatcaaccgtcctctcttggccgagatagctggctatccgctgacttgtacccctaccgcatctgaatttattgagatcctggcctcttacatactccgttcatctcagtcacagttaccactgtggccttttgccctgctttgattattccacctctttccttttacccttttctcttttaactcttgactttttatagctggt

SEQ ID NO: 3479 - DNA, 1487 bp, unidentified
  source 1..1487: mol_type = unassigned DNA; note = element_51874e0
  misc_feature 1..2: note = core
  misc_feature 3..231: note = LE
  misc_feature 232..1440: note = CDS
  misc_feature 1441..1487: note = RE
  misc_feature 12..197: note = bridgeRNA
tccatacctttctacgtgggttgatcgcggtcattcgtaagatcggggcacccagggatgccgggtgtggctgtcatggtgttgccgcctgcgtggctcagagagattggccgtccggcatcccgcgacgactcgactgctgattgggatgcgcgaaccgaatcgctcgtatggacgtgacagcgaggtcgtctgctgggacagcacagaagaatgacgagggaggggacggtgcccgaactgtgggcggggacggacgcgggcaaggccgaacatcactgcaccgcgatcgacgcggacggcacgaaggtgctctcgcgccgggtgccgaacagcgaggacgagctgctgcaactcctcggtgacgtcctggacctggccgacggcgaccccgtcacctgggcagtcgacctcaacgccggcggtgccgcgctgtggatcgccctgctggtcaaccacggacagcagctgttctacatcccgggccggaccgttcatcacgcctctggctcctaccgcggagacggcaagagcgacgcgaaggacgccttcgtcattgccgaccaggcacgcatgcgccgcgaccttcagccgcttcaggagaccagcgagatcgcggtcgacctgaagatcctcaccgcccgccgcatggacctggctgccgaccgcaccagggcgatcaaccggctccgggcgcagatgctggagtacttccccgccctggagagggccttcgactacagcgcatccaaggccgcgctcatcctgctgaccgggtaccagaccccggccgccctgcgccggatcggccggacccggctcgccacctggctcaagaaccacgacgtccgcaccctgaacaccgcaaagagcgccgccgatgccgcggtcaccgccgccgaagcccagttcaccgtcgtccccggggagaagaccgccgcgaagatggtccacaccctggcgagggaggtgatggccctcgacgaggagatctccgagctcaacgccctcatcgagggccggtttcgcgagcatcccgacgcagaggtgatcaccagcatgcccggcgtcggcgacatgctcggcgccgagttcatcgctgcgaccggtggcgacatggccgccttcggcagcccggaccgactcgccggcgtcgccggactcgccccggtcccccgcgactcgggcaaggtcagcggcaacctgcgcaggcccagacgctacagccgccggctcctgcggatgttctacctctccgcccaggtcgccagcgtgcactgcccccagtccaagaccttctaccagcgcaaacgcgccgagggaaagtcccacaaacaggccgttctcgcgctggccagacgccgcctgaacgtcctctgggccctgatacgcgaccaccggaccttcgaggccgtcacgcctcaacccgcagcgacatgacccggtcacgaggcgtcaccgccccggcttgacatcatgattgggaa

SEQ ID NO: 3480 - DNA, 1408 bp, unidentified
  source 1..1408: mol_type = unassigned DNA; note = element_518b308
  misc_feature 1: note = core
  misc_feature 2..88: note = LE
  misc_feature 89..1132: note = CDS
  misc_feature 1133..1408: note = RE
  misc_feature 1178..1400: note = bridgeRNA
caatgggatgaacacccccacccttaacggcatcaaatgtgccatagtgtagtttggattaacactaaaacagataggagcgttcaccatggatattacaacaattggcatcgatttggcaaaattagtctttcaagttcacgcagtaaatgcgcacggtaaggtagtcctcaaaaaacaactcaagcgcaatcaaatggctgaatattttgtcaatttgaagccttgcttgattggaatggaggcgtgcgggagtgcacatcactgggctcgcaagcttcaaagctatgggcatactgtgaagttaatgcctcctcagtacgtcaagccttatgtcaagaccaataaaaatgatgctgcagatgcggaggcaatctgtgaggccgtggcccgtcccaatatgcactttgtgccaatcaagacccttgagcaacaaggaattttgaccattcaccgaatccgtcaaggctatgtaaaagcgcgtaccgcccaggccaatcaaattcgcggtctgcttgctgaatttgggattgagattcccctgggtattggatatataaccaagcgtgtacctgagttaattgaagatgccagcaacgacttgccaggcattgttcgcattgaaatacaagagttgcttgagcatttcaagaatttacaggttcgagtcaacgattgtgaaaagaagattgtttgctggcatagaaaagacgggacaagtaaaaagctagaggctattccaggtattggtcctatcacagcatctgcacttgtagcctctatcggggattcgaagcactttaagaacgggcggcaagtggccgcttggataggtctggtacccaagcagcactcaagtggtggtaaacagacgttgttgggtattagtaaacgcggggacagctacttgaggactttactcatccatggggccagggcggtgatacatcactcggttggcaagataaagcctactggcacgcaaagctgggtcaatcagttggcagcaagaaaaaacaagaatatagcggcggttgcgcttgcgaataagaatgcgaggatagtttgggctttattgaatcacgaccgtgattatcaggacaatcataaaacgttacgcgttgctgcgtaagagaagtcaggtttaacaagaagaagacagcggagtgtgaactccaaaggttgcacaggcaatcaagacgtgatggcaaaacaggtaagaccttgattggcaaagcccgcaaagggcgaagctcctagagagcatcggatcgattgaggcgctaatcagcaaatcccatcaaggacagtggaacaaaagccacagcaaagtccgaatgtacgggtgcaatctttatctaaatgccaaaaacaattgagagcttggcaaaccgggggtgttcatgta

SEQ ID NO: 3481 - DNA, 1374 bp, unidentified
  source 1..1374: mol_type = unassigned DNA; note = element_518c8dd
  misc_feature 1..2: note = core
  misc_feature 3..81: note = LE
  misc_feature 82..1113: note = CDS
  misc_feature 1114..1374: note = RE
  misc_feature 1084..1361: note = bridgeRNA
tgatggagtggatgcctcctcccgacggcatctacgtgccaagatacgtggtcagagccacaagcagaggagaagacacccatgtcagaagttacagtagtcggggtagatttggcaaagtccgtctttcaagttcatggagcagcggcagacggtacagtccttttcagaaagaaactgacgcgcaagcagtttccccggttcatggctgaacatcccaaatgtgttgtggcgatggaggcgtgtggaagcgcttacttctgggcaagggaaatggaaagtttcggacatgaggcaaagctcattgcgccacagtatgttaaaccctttgtccgccggcaaaagaatgatgcggctgatgcagaggcgattgcggaagccgctgtccgtgccactacccggtttgtgccggtgaaaagccaggggcagcaggcgcgcagtgctttgtttcgtacgagagagctgatcgtcaatcagcgcactcaaaccgtaaacgcctttcgagcgcatctggcggagtttggtgttgtcgtgcccaaaggggtgcaaaacgtcaaacggctggtgagctacatcggcgaagaaggacatggcctgcctgcggagattgtggaaatcgggcagcagctcaccgctcagattgagcaattgacccagagaattaaggggctggaaaagtctatccgggaagcggcagatgccagcgagacgacacggcgcttgcgcaccatccccggtgtcgggccgatcaccgctgttgcgattgactctttcgcaccggagatggccagtttcgccaatgggcggaacttttcggcctggctcggcctggttcccttgcaacgctccactggcggaaagcaaatcctggggcgcacttccaaaatgggccagaaagatatcaggcgcttgctgataattggcgcgatggggcggataggcagcaaacaccgccatccgcgtgaggttgagccatggcttcaggacaagctggaccgcaagccccgcatggttgcagccattgcgttggcaaacaaaatggcccggcaaatctgggcgatgttgaccaagggcgaagattacaggaatccgatagcaggggttgctgcatagcagccctgccctatcggtgttgagagtgtgaggaggttttgaacagtatgggcaaatgatcgatcagatcgggaacaggaaaaccagttcaccacaaagcgcagatagcgcgtttccttgatttggacttgttccgcgaacttaccataccggcccgcggccatgtgaagagccgcacatttgaggccttacacatgaccgcacccgatcacttgacccagaccagacaaaatcacttgcacaagcggaggcatccacaca

SEQ ID NO: 3482 - DNA, 1392 bp, unidentified
  source 1..1392: mol_type = unassigned DNA; note = element_5193fa5
  misc_feature 1..2: note = core
  misc_feature 3..114: note = LE
  misc_feature 115..1143: note = CDS
  misc_feature 1144..1392: note = RE
  misc_feature 1180..1365: note = bridgeRNA
agatggggtaacgggcggcggctgcgctagcggccggggcggtcgtccctcaaactgatggtgtcaatcaacggagtcgggcgagcccgctccaagcatcatcgagggacgaccatggaccactatgccggaatcgacgtgtcattggaatgctcgagcgtgtgtgttgttgacgcgagcggcaagatcgtgcgggaggggaaggtcgctagtgagccggcggcgctgatcgcttggttcggttcgctggggtggagcattgagcggattgggttggaggcgggacctctgtcgcaatggcttcatgcagcgatgcgggaagccgggcttgccgtcgagcttttggagacacgccacgtgcgagacgcgttcaaggccatgccggtgaagagcgatcgcaatgatgcgcgggggatcgcgcagctgatgcggctaggctggttccggccggtgcattgcaagtcgatcggcgcacaggagacgcgggcggtgttgacggcgcgcaagctggtgcagtcgaagctgttcgatgtcgagaacagtctgcgggggattttgcgcggcttcggactgaaggtgggggaaacgacggcgcagcgcttcgctggccgcatccgccagcttgtggcgggctatccgagcctggcgatgatcgccgaggcgctgctttcgatacacgccgctctgctgcgcgagttcaaggcattcgagaagcaagttcgatcgatggcgcgcgccgacgccaaggccaagctgctgatgtcggcaccggcggtcgggccgatcgtggcgctcacctatgcgagcgcgatcgacgatccgaggcggttcaagtcatcaaaacgggtgggtgcgcacttcgggctgactcccaagaagtatcaatccggcgagaccgattacaccggccgcatcagcaagatcggtgatgcagcggtgcgcacggcgctttttgaggcggcccacatcatgctggtcaagccgatcaagggctgctcgcagctcaaaagctgggcgatgcggatcgccaggcgcagtgggatgaagaaagccaaggtcgcgctggcgcgcaagctcgcggtaatcctgcatcggctgctcgccaacggaaccccattcaacgccgccgcagcggcagcctaacagggagaagcgcaacagttttcgagcaggtcacgacaccaagccttctcgaagcggcgtccctcgccgggacgatcgatcaggtcagaccgctgcccacccagtcggcactgcgaccacgcgttcgtagattggtcggcctgttctctcagaccccatcaggtggcggcctcgcgccgaccccgtacagaagcgagaccccggcgatcggatccgcaaagggattgaccaaacgaggcccgttacaga

SEQ ID NO: 3483 - DNA, 1432 bp, unidentified
  source 1..1432: mol_type = unassigned DNA; note = element_5195966
  misc_feature 1: note = core
  misc_feature 2..92: note = LE
  misc_feature 93..1124: note = CDS
  misc_feature 1125..1432: note = RE
  misc_feature 1201..1424: note = bridgeRNA
caatggaatggacgccccgacctgaggctacggcatcagagtgccttaaattatgggtgtcaaaaccattacctgacaggagggcgtccaccatgaagattacgacaattggcattgatctggcaaagaacgttctgcagattcacggcgctgatgagcgcggcaagcccgtggtgcgcaagcaactcaaacgcgacaaggtgatggcgttcttcgccaacatggagccttgcgtgattggcatggaagcctgtggcagtgcacatcactgggcccgtcagttgcaaagcctggggcatgaggtcaagctgatctcgccgcagtttgtcaaaccctttgtgaagaccaacaaacatgatgtggccgatgctgaagccatctgtgaggccgtcagccgacccaccatgcgctttgttcccatcaagaatgtcgagcaacaggcgatgctgtcactgcaccgcgcacgtgaaggattcatcgttgatcgaaccgccacggccaaccgcatccggggcttgatggcggagtacggcctgatcctcccgcaaggtatcggacatgttcgcagcaaggtccctgagctgattgaagatgcgaccaacgaactgccaggcatgttcagaaggctgatcgatcagttgctcaaccatctgcgctggctcgacgagcagatcgagatgatcgaaaaagaaatccatgcctggcatcgaaacaacgttgacagccagcgccttgaacaagtaccgggcattggcgtgatcattgccacagccatgattgccatgatcggggatgcccgcaacttcaggaatggccgagaactttctgcctggatcggtctggtgccacgacagcactccacaggcgggaaacagactttgctgggcatcagtaaacgaggcgatgcgtacctgcgaaaactactgattcatggcgctcgagcactggcctatcacgcgggcaggaaagccaatccggatcactggttaaacaaattgatcaatcgacgaaacatgaatgtggccgtggtggcacaagccaacaagaccgcgcggattgtctgggcgatgctggcccacggacgagatttccgacccgattacgcgtcaaaagcacccgcgtaatcgagccggcccgtatgaaaccgaacaacccaagctagcaaacagcaagcgaacccgttacagagaggtacaccccaccgattgctcaggcaatcatgagattgatggcaagacaggtcagaccgtggttggcaaaacccgtgacagtcgaagcacattaagtgcgagtaagcgatagaggcgtcaaccagcagattccatcagggacagtgggcgttgcccacatagaaagtccgaatgtacggctgcaatctcttccttctcaccatcaacgattgagggcttggcaaacccggggcgtccatgta

SEQ ID NO: 3484 - DNA, 1213 bp, unidentified
  source 1..1213: mol_type = unassigned DNA; note = element_5198a80
  misc_feature 1..2: note = core
  misc_feature 3..252: note = LE
  misc_feature 253..1191: note = CDS
  misc_feature 1192..1213: note = RE
  misc_feature 27..202: note = bridgeRNA
cttatatgttgaaagtgttctccagaagtggctaatttattagggacgcttagtaaaaggataaagagatcttgttaccaggcctagggtaagaccttcgttaccagattaagacctttgtcctcacacactataaactgaacggtatcttaggcaggactcgactcctagcctgtatttataaggttagtaaagccatagtgtgaacctactaaacgatattaaatcctatcacataataggcggtttagcatggcaacatatattggaattgatataagcaaagacacctttgatgcagcaaccagcgagcatacaaaaagcgtcagctttaagaacacagcggcaggatataaaaaattcagaacatggatttctaagtttaatgaaccgagtgtttgcatggaagcaacaggtaaatattatctgggattagccacgttcctgtacgaaaaaactatttttgtatcagtcgtaaatcctttaagaattaaaagatatgctcagtcggcattgaagcgagttaaaacggatagtgaagatgccaaggtcattgcacgtttttgtgaaacagaaagtttagcgccttgggcgcctgataagcccgtaatacaagaacttcaagaatggtatcaacttaaagagcttttaattcgacagaaaacccaactcaaaagtggattaaactcacacgtaaagaaggtgcaagaaaaacagattcaacagattgaaaaaaacattgaaactgttctctccaaaattaaagcatgcattcaatcagataaagcactttgccaaaatgtgaaacttcttgaaagcattaccagtattggagaaaaaacagccatggatttaatgacatttatcaaagatattaagcgttttgacaaagcaaaaaatctagctagttttgcgggactgacaccacagataatgcaatctggaacgagcgtaaatagctcaagattgtctaaaatgggaaatgctaatctgaggaagtgcctgtatatgccagcaattaatgcgatggcctacaatacaccattaaagaaatttgcagatggtttgagagctagaggcgtggcaagcggaaagattaaagcggctgtcatgcgtaaactaattcacattgtgtttgccgttttaaacagcggcaaaccttttgatccagaatataagatgtgtgcttgacttaaaaaatcaaacacggtat

SEQ ID NO: 3485 - DNA, 1425 bp, unidentified
  source 1..1425: mol_type = unassigned DNA; note = element_519c895
  misc_feature 1..4: note = core
  misc_feature 5..205: note = LE
  misc_feature 206..1411: note = CDS
  misc_feature 1412..1425: note = RE
  misc_feature 1..189: note = bridgeRNA
ttccctaagaatgttggcggtccgggaggaccgggtgtggctgatggtgggttgccgttcgtggctcgaaaggaatggccgcccggtcctccgggacgctccgaccactgattgagaactgcggtcatcgctggttagggacctgttggcggagtgttcctcggaccacgaaaggtgctggtcacggtggaacggagcaacgagtttgagcacgtctcacacgcggatatgggtcggcatcgacgccggcaaggggcatcactgggcggtggcggtcgacgccgacggcgagacacttttctcgacgaaggtgatcaacgacgagtcgcagattctcgccctcatcgacaccgcccgtgagcgggccgatgaagtgcggtgggcggtggatatctccggcagggcctccaccctgctgctggccctgctgattgcccacggccagcaggtggtctacgtgcccggccggacggtcaaccgtatgtccggcgcctaccgtggggagggcaagaccgacgccaaggacgcccgtgtcatcgccgaccaggcccgcatgcgcccgaaggacttcgccccgctgaacacacccccggagctggtcaccaccctccaggtgctcaccaactaccgggccgacctgatcgccgaccgggtgagactgatcaaccggctccgcgacctgctggtcgggatctgtcccgcgctggaacgggccttcgactactccgcggccaaggggcccatcgtcatgctgaccgagtaccagaccccggcagccctccgccggatcggcgtcaagcggctgacgacctggctggaacgccgcaaggtccgaagcgccgacaccgtggccaccaaggcggtggaggccgcccagtcccagatgaccgtgctgcccggcgagaaacgggctgccaagctggtctgcgacctcgcccaccagctgctgacgctggacgagcggatcaaggacaacgaccgggagatccgcgaaaccttccgcgacgacgaccgcgccgaggtcatcgagtccatgcccggcatggggcccatcctcggcgccgagttcgtcgccatcgtcggggacctgtcgggctaccgcgatgccggccgacttgcctcccacgccggcctggccccggtcgcgcgggactccggccgccgcagcggcaactatcaccggcccaagcgctacaaccggcgcctgcgacacatcttctacctggccgcgcagaccgcgatgatgcggcccggtccgtccagggactactacctcaagaaacgatccgagggcctgctgcatacccaggccctgctcgcactcgcccgccgccgggtcgacgtgctgtgggcgatgctgcgtgacaaaaggccgttcacccccgccccaccggtcacgcaggcggcttgacacgatcattgaga

SEQ ID NO: 3486 - DNA, 1455 bp, unidentified
  source 1..1455: mol_type = unassigned DNA; note = element_51a562f
  misc_feature 1..5: note = core
  misc_feature 6..233: note = LE
  misc_feature 234..1439: note = CDS
  misc_feature 1440..1455: note = RE
  misc_feature 1..237: note = bridgeRNA
cccccgttaccgttttcgtagttcctgatcaaggagctgtggtcaccaggtccggtatgactgagtcccccagtcgaacgcatgatccggggggtggtgtcgccgggcctggtggcatcgagggaccgctgaatagggacacggccgcccgttgggtaggtctcgtcgtaacgtgggtgctggccgtcgatgcctgactggtgaccactggtgacgaccggacggcatggtgaatgaacagcaatttcggggtgttcctgggcctggatgtcggcaagggcgagcaccatgccgtggccttggacgcgggtgggaagcgattgcatgatgggccgctgcccaacagcgaactgaagctgcggacgctgttcgacaagctcactgtccacgggtcgctgttggtcgtggtcgaccagccagccacgatcggcgcgctgccggttgccgtggcccgcgcggccgggcatcaggtggcctacctacccggcctggccatgcgtcgtatcgccgacctctatccgggtcgagcgaagaccgacgcacgagacgcgttcatcatcgctgacgccgcccgctcgctgccccacacactgcgccaggtcgacgtcggtgactatgccctcgcggaactggacgtactggtcggatttgacgacgatctcgccgccgaggccacccggctgtccaaccgcctccgtggcctgctcaccggcatccatcctgccctggaacgtgccctcggcccgcgaatcgcccacccagcggtgctggagatcttgtcccgctgcggtggaccagccggacttggcaaagccggccaccgcaaactcaccgctatcgcgaccgtgtacgcgccgcgcatggggcacaagctggtcgatgcgatcatggccgccctcgacgagcaaaccgtgaccgtccctggcgccacggcggcagacactgtgctcccacggttggccaacagcctgaaagctgtttcccagcaacggaaacaggttgccaccgaggtcgaggagatactcgatgcgcaccctctcgccggggtcctgacatcgatgcccggtatcggcgtcaggaccagcgcccgcatcctgctcgagatcggcgacgcctcggcgttcaagacctcggcacatctcgcggcctacgccgggatcgccccagtgacccgcagctcgggttcctcgatcaagggcgaacatcctgcccggaccggtaaccgtcgcctcaaacgagccttcttcctcgccgccttcgccgcactgtccgatcccacgagcaggacctactacgaccgcaagagagccgagggcaaaaagcacaacgccgcgctgatctgcctggcccgccgccgctgcgacgtgctccacgcgatgctgcgcaacaagacccactaccgaacaaccgaacccgttcccaccccagccgctgcttgacaaccagatagggaca

SEQ ID NO: 3487 - DNA, 1805 bp, unidentified
  source 1..1805: mol_type = unassigned DNA; note = element_51a6399
  misc_feature 1..4: note = core
  misc_feature 5..278: note = LE
  misc_feature 279..1760: note = CDS
  misc_feature 1761..1805: note = RE
tgttgtatattaggcgcgccgttatgaggatgagaccggcaggacaaggtgggctgggataaggaagggtcctccctgcgggtcaggatggcgcgagttagtgtgaggagcctacgggctgcctcgtgcgaaacattgcgatgtccccggggaggacccggttagggaaattggggcgtggtggtgcccacggccccggatgacaaacacgcaacgatgggcccggggatgcttaccggcagctatcgctggctcgacactgtgttgggagggataacgtgatcggatacagcatcggcatcgatctcagcatcaacggcgctcatgactgcaccgtcctcgacgcaaccggtcagctggtacagcgcttcaccttcgattcctcctcagcaggcttgcagcagcttgagcagcggatccgcgcgatcgatccttcgcacggcgcacccgtcgtagtcatggagcctaccgggctggcgtggtttctcccgtgtctctatctgtatgcgcagctccccgacgtcagagtcgtgcgcatcaagacgagcaaggtggccgccctgcggcggtacctgaagcaagacgcaaagtccgatcgcctcgattcgctcaccttggccaagatgccgctggtggatcctgagaagctctacgcagtcgacttcccgtcggcggccctccaggggttagaccggatgacgcgccagcgcgcgcgcctggtcgagagcctcatcgggcgaaagaaccgcctccaggcactgctgcgcgggtatctgcccgggctgatagccgcggcgggcaagccctgggagccggtgtttcgcgcgctgctgacggtgtcgttgaatcccttcaccctggccggtgccggccggaacataaccgaactgcgggaagccttgcaggacaagtttgcgcgcaaggcgctccctgaaaatctcctcccgcagctgcgcactgcttgtgagcatctcacacggctgtatcgccccatcatcgaggccgggctgttgaccgaggccttcttcgacgacgtctgcgacgaagtggcgcgggagttgcgcctgatggacgcggaggagcaggaagtgaaagatcttgagacagccatcgctcgccggtaccaagaagtcgcgccccaagaccacctggggacgatgccgggcctcggtgcggtcaccgcgcccacgatgctcgccgccgtcggcacaccgcagcgcttccaaaaccaagcggcctttcgcggctggactggtatcgtgccgcatgcgtcggaatccgccgacagccaagcgaagggcctcccgatgaccaaggcgggaccgaaacgcgtgaagctcgcactttatcaagccgcccagttcgctcggctgtgggatccgcagctcgccaagatctactacgatcagatggtgcacaaaggcaaaccgcaccacaaggcgatgggcgctgtgatgagccatctcgcctcgcgcatccacgcagtgctcaccgaacaacgagactacgtcttgcgagacatggacgggcgcgagatcacggcgcgcgaagcgcggatcatcgtccaaacgcagtaccaagtaccggcggagattcgggccgagcggcggaccagcagaaggaggaagcgagacgtctcgacaggtcttcatcgaggcagcgccaagcgctcctcacagagatcgtccccttcctcccagcagcattctacccggtcacaggcgatggatcaaaccggcgcggtggtgatcagccgctgacttggccattctgaccgttgagggggcttgacatgaattaggaaa

SEQ ID NO: 3488 - DNA, 1389 bp, unidentified
  source 1..1389: mol_type = unassigned DNA; note = element_51a8460
  misc_feature 1..2: note = core
  misc_feature 3..89: note = LE
  misc_feature 90..1121: note = CDS
  misc_feature 1122..1389: note = RE
  misc_feature 1099..1372: note = bridgeRNA
agatggggtggatgccgctctctccccaacggcgtcgcaatgcgccaagcttgtgatgctgaagtcacaagggaaacgagagggcatccatgaagagaattagcatcatcggggtcgacctggcaaagaacgtgttccagctgcatggcgcggccgcggacgggacggtcctgttccgcaagaagctgtcgcgacctcagttccagcgatacatggcggagcatgcgcagtgcctcgtcgtgatggaggcctgtggcggcgcgcatcactgggcgcgggaattggagcgggtcggccacgaggtcagactgatcgcaccgcgctacgtcaagccattcatcaaacggcagaaaaacgacgcggcggacgcggaagcgatcgtggaagcggcactgcgcccgaccatgcgctatgtcgagccgaagaccggggaccagcaggcgcggtcgatcctgttccgcacccgcgagcaattcgttaagcagcgcaccgaagcggtcaatgcgcttcggtcgcacctctacgagttcggcttcatcgcgccggaggggattggctatctcccgcgcctcggtgccatccttgaagatcggaactcagatttgccaccgctcgcccgggaaatctgtcgcgagttgctggatcagatcgtgcatctgactgaacggatcaatgcgatgaaaaagaggatcgacgcgatcgccagggagggcgagacatcccgccgcctgcagaccatgccgggggtggggccgatcagcgccctcgccgtcgaaacctttgcacctcccatggagcagttcaaacgtggtcgcgacttcgcggcctggcttggactggtcccgcggcaagcctcgaccggcggcaagcagaagcttgggaaaacctcgaagatgggccagcgcgacattcgccgtctgctgatcaccggcgcgatggccgtgatccgctgggcgctccgccatggcgccccgcgcaatccctggctggcgcgcctgttggaacgcaagccaccgatgttggccgcctcggcgctggccaacaagatggcgcgcggcatttgggcgatgctgacgcgcggagaagactatcgcggcccggagatcggaagcgctgcctgatccggcagcgcggttcgaaccggaccaccaagttgtgaggaagacatgaactgcatgggcaaatgatcggcatgatccgggttgggcgaaccagaaaccttctccgagcctcgagctcgctctcagagatctggccccggtccgcgcatctccatctcggccagcggcatctatcgggccgcatcaacaggcctgacaagagtccgcactcgatcacatgcctaaggttcagaaattccttgcaaatgagagcggcatccacaagaga

SEQ ID NO: 3489 - DNA, 1370 bp, unidentified
  source 1..1370: mol_type = unassigned DNA; note = element_51c14bb
  misc_feature 1..2: note = core
  misc_feature 3..88: note = LE
  misc_feature 89..1120: note = CDS
  misc_feature 1121..1370: note = RE
  misc_feature 1107..1349: note = bridgeRNA
tgatggggtggatggcccccgctccccggcatcgatgtgccaaagtgtggtcgtcggaaaacgccaccaatgagaggagccatccgctatgcagattaccactatcggccttgatctcgccaagcactggtttcaagtccacggcgtcgacgccgccggcaaggtcgtcgtcaaacgccggctgcgccgagccgaagtcgtcgagtttttcaaaaccctggagccctgtcttgtgggcattgaagcctgcgcgacggcccatcactgggcgcgtgagctgatcgccttggggcatgaggtaaagctgatgccgcctgcctatgtgaaggcctacgtcaagcgcaacaagaatgacgcggctgacgccgaggcgatctgcgaggcggtgacgcgcccctccatgcgcttcgtgccagtgaaagacgccgatcagcaatcggtgctcatgatgcatcgcgcgcgcaatctgctggttcgtcaacgcaccatgctggtcaacgcgctgcgtgcacatctggccgagtttggcgtcatcgcgccgcagggactgcgccacgtcgaacagttgatcgcggcgatcgaagcggaaagcacggctctgccggaactcgcgcgctcgatactgcgactgatcgtcagtcaattgaacgatacccaggctaaaatccagcaagtcgaggcgaagctggcgcaatggcatcgcaacagccggctcagcaaactgctcgcgaccattccgggcgtcgggatcatgggcgccagcgcgatcgcggcgacggtgtgcgatccgaacctgttccgctcgggacgcgagttcgcggcctggctcggcatgacgccgcgccaaaactcctcgggcgggaaggagcggctggggcgaaccagcaagcgcggcgacaaatatatccgctgtctgctcgtcgcgggggcggtcgccattcttcgacatgcgcgcacgcgcgcgacgaaggacgccgaatgggtgcgcgggatgctggcgcgaaagccggcgaaggtagtcgcggtggcgctcgccaaccgaacggcccgcatcgtctgggcggtgatgaaacggggagacggttacaaagctaaggagatcgtcgggcaagcggcctgaataggctgccaatcccgcaaaattgcgagggtgagaaggacgtgatggcgaaacggtcgagccgtggagtgggaagacccggataagtcaaggcgcacattagcgcgtagttttgatagggacccgttccgcgaacttcatcagggccagcggccatatgcgccgcgcgaaagggccggacatatgaccgcacccgaccaagtcgccagaacagaattttaccccttcgcaggcgggggccatccacata

SEQ ID NO: 3490 - DNA, 1448 bp, unidentified
  source 1..1448: mol_type = unassigned DNA; note = element_51c656f
  misc_feature 1..2: note = core
  misc_feature 3..235: note = LE
  misc_feature 236..1420: note = CDS
  misc_feature 1421..1448: note = RE
  misc_feature 22..200: note = bridgeRNA
cttgtatgttgtccactcatcggatcactccgagaatggacaccgacggaaccgggagagggtcgccgcggcggcgcttgaagcgaaggcttcggctatgagattggcgccctcgaccggtgctgaaggtccgaacggtatcccgaggccggctgcgccgtgtcctcgcatgcacaagcgtggacagcagcaccggctccgaggctcccgacttcctccgtcgccaggaggtcgtatgcgcttcgctggaatcgacattgcatcggagacgcacgtgctggcgatcgttgacgccgatggcgcggtggaagtgacagcaacgccgtttggcgaagatgcggcgggctatgcgaaagcgcttgcgttgctcggtgaccctcgtgagctgctcatcgccatggaggccaccggtcattactggaagaatctgttcgccacgctcagcgcagccggccacgcgatcgcgctgatcaatccgctgcgcacgcatcgcttcgccggcgaggacttggtccgcaccaagaccgatgccctggatgccctcggcatcgcccgcttcgccgcccagaagcggccgccggcgctgcacctgcccgacgccgtcgccgacgagctgcgcgagctcgtgcggctgcgcgagcgactggtacaagactttggtgatcgtgtgcggcaattgcaccgcctggtcgacctcggcttcccggagttcacgcgctacgtgcgcaccctcgaaagcgagctcgccggtgccatcctgcgcgattacccgaccgccgccgccttccgcggcgtgtcggttcgccgcttggccgcgttgcgctacgacgggcgccatcgggtcggcctcgagctggcccgcaccctcatcgaggcggcgcgacgctcggtcggccaacatcacagcgcgccttaccgcatccaggtgcgctacgcctgtgacgacctcgacgtcctgcgccgccgtttgcgtgacttggaccgcgacctcgagggcaaactgcgcgagcacgaggtcggccgactgctcaccaccatcgacggcatcggcccgaacaccgccgcgcgcatcatcgccgccgtcggcgatccggccagctttcatagcgccgccgccctcgccgcctacgttggcaccatcccgcgcctgcgccagtccggcaaacgccaacccgcccgcgcgccattgaccccgatcggcaatgcggccctgcgcgctgcactgtggatgccaaccctcaccgcggttcgcaacaacccctggctgcgggctcactacgaacgactgcgtacccgcggcaagttgcccaaggtcgccttggtcgcgtgcatgcacaaactgctcttcgccatctacagcgtcgccaagcatcgccgcgctttcatcccgcaactcgctgcgccggggaccgtgcaatgaaaaaaccgcttgacagagatcacggtat

SEQ ID NO: 3491 - DNA, 1365 bp, unidentified
  source 1..1365: mol_type = unassigned DNA; note = element_51c6b68
  misc_feature 1..2: note = core
  misc_feature 3..86: note = LE
  misc_feature 87..1118: note = CDS
  misc_feature 1119..1365: note = RE
  misc_feature 1114..1351: note = bridgeRNA
tgatggggtggacggcccccgctcccggcatcgatgtgccacaacgtggtcgtgtgtgaacgccacaatgagaggagccgtccgccatgacgattagcacgatcggtctcgatctcgccaagcattggttccaggttcacggtgtcgatgccggtggcaccgtcagggtccgccgcaagctacgacgcagcgaggtgctcgctttctttcaatcattgccgccgtgcctggtcggcatggaagcgtgtgcgacggcgcatcattgggcacgcgagctgaccgcgctcgggcatacagtgaagctcatgccgccggcctacgtgaaggcctacgtcaaacgcaacaagaacgatgcggccgatgctgaagcaatctgtgaagcggttgcgcgcccgtcgatgcgcttcgtgccgatgaaggacgcgggtcagcagtcggtgctgatgctgcatcggacgcgtaacttgctggtccgacagcgcaccatgctggtcaatgcgctgcgtgcccatatggcggagtttggcatcattgcgccccagggcctcaggaatgtcgagctgctgaccaaagaagttgctcgcgaacaggagcgacttccggagcttgcgcgatcaatcctgcaactgatcgttgaccagctgaccgacacaattatcagggtccgggcgatcgaggttcgcctgaccaggtggcaccggcagagccgggtcagccagtcgctggcgacggtgccgggtgtcggcatcatgggtgcgagtgcgattgccgcgacggtcgccgatccctcgctgttccgttcgggacgggagttcgctgcctggctggggatgacaccgcggcagaactcgagcggtggaaaggaacggatggggcgcaccagcaagcgcggcgacaaatacatccgcagcctgctcattgccggcgcggtcgccgtgctgcgtcatgcgcgcaatcgaccgacacgcgacggcgcgtgggttcgcgctctgatggagcgcaagccaaccaaagtcgcggctgtcgcgctggccaacaagaccgcccgcatcgtgtgggcggtgatgacgcgtggggatggctaccgcgcgaaacaggttctcgggcagccggcgtagcagccgcacgcccatacagcatgcgagggtgaagaggacgtgatggcgagcggtcgagccgcggatcgggaagacccgggtaattcaaggcgcaacgcagcgcgtagtcttgatagggacccgatcagcgaactccatcagggccagcggtcagatgcaccgcaccgaagggccggacatatgactgcacctgaccagatcgccagaaccgcttcgaaagctcttgcacgcgggggccgtccacata

SEQ ID NO: 3492 - DNA, 1522 bp, unidentified
  source 1..1522: mol_type = unassigned DNA; note = element_51cdf18
  misc_feature 1..3: note = core
  misc_feature 4..246: note = LE
  misc_feature 247..1197: note = CDS
  misc_feature 1198..1522: note = RE
  misc_feature 3..218: note = bridgeRNA
cttatattatatttagcgcagttagctactgccaaagcccaagtggtatacttggaataagcctctgtggattagtttattccctccaatcgcttgacgatttccgaaaggctctaaccacagttttttgtttcaattggtaatgagtttgataacgcatagacgttttatctcgtctaaggtaacaaggcaaaaagttcgtggataaccaagtagacttgaaatactatatctggaggtactcccatgctttatgtgggcattgatatcgctaaaaataaacacgatgttacagccttgaatgttccaggaaaaactgttcttaaaccactcactttttcaaataataaagctggttttgaactcttagatctgtctcttcgacagctcaaccaagactgtctcatcgctcttgaagatactggacattatgcctttaatctactgaacttcctgcatgaacaaggatataaagtttacacctacactcctttgctcatcaaggaatttgccaaatcattatcacttcgcaagactaaaacgaataagaaagacgctcatggcatcgctcttaaacttctttctgaccccaatcgtgaacaatttcaacacgataatcggcaagtagaactaaaaatactggctagacatattcatcgtctcaagaaaaaacagtctgattggaaagtacaatacactcgttgtcttgatatcatctttcctgagttggataaaatcgttgaaaagcattcagaatatacctaccaactcttgacatgctaccctaatcctcagaaaaggcttgaggcaggatttgataagctgatagaaattaagcgattgaccgcttctaaaattcaggatatcctctcagttgcacctcgttctatcggaacaacatctcctgctcgtgaattcgaaatcatcaaacattacaagaggctcattgacaaggcggaaaaggcggaaacatgtgtcaatgacttgatggctgagttcaactcgatcatcacgacggttactgggattgggaatcgtttaggggcggtcattttagccgagattcaaaatattcatgcctttgataatcctgctcaattacaagctttcgctggactggattcttctatttatcagtcaggtcagattgatttagctggaagaatggtcaaacggggttcccctcatctgcggtaggtactcatacaagctgccgaagcatgccctcgcttttcacctgcttttaaggcctatcttaagactaagttagaataaggaaaacattacaatgtagccatcatccaccttgcaaaaaaacttatccgaaccctgttttatatcctaaaaaagagctgccatttgacgaacaaaaagtgatgtaatttctgaaattaacacaggattacctttgaaaaaatggactttttcaagggctttttgccgtgctctaaaatcatcgccaaatcatcaaattgaaataagaaatagtttagataaactattgacttttcttatagtttgt

SEQ ID NO: 3493 - DNA, 1175 bp, unidentified
  source 1..1175: mol_type = unassigned DNA; note = element_51d3945
  misc_feature 1..2: note = core
  misc_feature 3..185: note = LE
  misc_feature 186..1172: note = CDS
  misc_feature 1173..1175: note = RE
  misc_feature 28..187: note = bridgeRNA
tcctttagacttgcaaatgaataattattagttttagaaaaggaaaaggtacactaacagtcactcctggcagaacccatagttcgatttagaccttttcctttattgtaataaactcaaattagaaattcggggctatgaccccattattaaggagttgagtctaaagctaaaaattcaaatttatgaaaaaagaaaaagtatttattggaattgatgtgagtaaattaaccttggatatttgtatagttaaaaacacaacaacaagtcttgttattaaaaacaacaaaacggatattaagaaatttctcaacgaagaaacaaaaggctcaagcgaggtttatttgtgtattgaaaacacaggtaaatatggctggttgataaccgagttagcgcctgattatttaactaatttttatataattaaccccctgcaccttaagagatctatggggttgattagaggtaaaaatgacaaaattgatgctgtgagaattgctcagtttatcaaaagaaattatcaggaagaagtatgttatgttcgtgaaaggagtttaataaccgctctaaaagtcttattatcagagagaggttataaagtaaagagtaaaactcagcaaaaggtcaaaaacaaggatatagaagtaatatcagataaaaaattagctaaaaagctgattaaatcaaacttaaaattaatagttactttagaacagcaaatcaaagaaatagaattagagattaaaaggttaattgaaagcgacaagcaattaaagcagcacagttatttactcaaaagtattcctggtgttggagatattttatcgacaagcttaattattaaaacaaatgagtttaaatcaattacagatccacgaaaacttgcatgctattgcggggttgttccatttgaaaatagatcaggtacatccattttcgggaaaaagaggctctcattattagcagataaaaaaataaagaaggtacttcatttaggggcaatgagagcaatacaaatggaaaatgactttagagtttattatatcaggaaggtgaaggaaggaaagaataaaatgagtgttttaaatgcaatcagaaacaaaataatacatacagcatatgctttaatcaaaaaccaagaattgtttcaaaatcgtttggttttgtcatagaaa

SEQ ID NO: 3494 - DNA, 1401 bp, unidentified
  source 1..1401: mol_type = unassigned DNA; note = element_51e01b2
  misc_feature 1..2: note = core
  misc_feature 3..79: note = LE
  misc_feature 80..1117: note = CDS
  misc_feature 1118..1401: note = RE
  misc_feature 1115..1388: note = bridgeRNA
tgttggtgtggacggcccccggcggcatcgggtgtgccagaatgaggtcggtgttgatctcagacaaaggagaccgtccgtggaccagattagccgaattggaatggatacgtcgaagcatgtttttcagctgcacggggtgaacgccgccgaagagctagtcttgcgcaggaagctgcggcgcaaggagatggtgagcttcttcgagaagcttgcgccgacggtgatcgccatcgaggcctgcggtgccagccatcattgggcacggctgctgcagtcgttcgggcatacggtgaagatgatcccgcctcagctggtcaagccctacgtcaagcgcggcaagaacgatgcggccgacgccgaagcgctgtgcgaggcgatgagccggccgacaatgcgcttcgtgccggtgaagacggctgagcagcaggcggccttgatgctggtcggcgtgcgcgaccagatgatccgtcatcgcacgcagctggccaacgccatccgcggctacgcagccgagttcggcctcaccgccgccaaaggcatggcccacttggttccgctgctcgagcgcattcaaacggacgagagcttgcctgcctcggcacgggagctgtttgccatccaggcgaaggagtatgcgcagttgcaggcgcagatcgccgagatcgatgttcagctcatggtccggcaccgggccgacgagtgcagccggcgccttgccaagatccctggcatcggtccggtcggcgcgacgctgctgagaatgaagaccccaacgcccgagctgttccgatccggccggcagttcgcggcctggatcggcttgacgcccagggatcactcgactgcaggcaaggtgaggctcggcgtcatcacgcgagccggcgacgaggggctgcgcaacgtgctggtcgtcggagcaaccgctgtgatccagcaggcgcgacgtcacggaagggcatcgccttggctggccgggctgctcaagcgcaagtcgccgaagctggccgccgtggcgctggccaacaagatggcgcgcatcgcctggaagctgatgctgacaggggaggcctacaccgcaacgcctgcgcccgccgctttggccggcgcggcctagagatcggccagacacggggagcacctgaactgcaaccgtgctgagctgatgccagaacttgcaagatgatgagcaggtggtgcgatcaatcgatccacgacgcgggacactccgactgacccaatggccctctactgaggtcgcaatgttgtttggaacccgtgtcgcggaaaccatcttggccagcgttcatgtgcgagcgcaccaacaggccggacatatggatgcaagcgatctgatcaaagcactgcaaaacgccttgcgaggagggggccgtccacata

SEQ ID NO: 3495 - DNA, 1355 bp, unidentified
  source 1..1355: mol_type = unassigned DNA; note = element_51eb8a2
  misc_feature 1: note = core
  misc_feature 2..73: note = LE
  misc_feature 74..1099: note = CDS
  misc_feature 1100..1355: note = RE
  misc_feature 1122..1351: note = bridgeRNA
taatgagatggtcacccccacaccctgcgagggctacgctttcgcagggtgttttattctggaggccattatcatgagcgaattggcactggttggcattgatctcggcaaacacaccttccacttgcacggccaggacggatcgggtcgagagatatttcgcaagaagctctcgcgcgtgcagatgatgcgttttttcggcaactgtcccacttgtactgtcgtgatggaagcctgtgctggctcccatttcgttgcccgcgaactgggtaccatggggcatgtaaccaagctgatatccccgcagttcgttcgaccttttgttaaaagtaacaaaaatgatttcgttgacgccgaggccatctgcgaagccgcctcacgcccttcgatgcgatttgtctcgcctaaaaccgaggcccaacagacgctctcagtactgcatcgcatgcgtgagtcgctggtgcgtgaccgcaccaaaacaatcaatcaactccatggcttccttctggagttcggcatcagtctgcctctagggcggacggtcataaagcgtctgcctagcgttctggccgagcatgagttgccgacacggctcagcacattgttacagcggttgcacgcacacttcggctatctggatgagcaaatcacgcagctggataaagagatggctggccaactggctgacgatgatctgggcagtcgtttgctgagtatgcccggcgtcggcccgatcaccgccagcctgctggctgtcgaaatgggagacggcaagcaattcggatgcggtcgtgacttcgccgcatccatagggctggttcccagacagtacagcacgggaggcaggtctaacttgaaggggatcagcaagcgaggagacaagagccttagatgcctgttggtacagtgcgccagggtttatatgcagcggctcgctactcaaaaagggacactggctgattgggtgcgctcgttgcttcagcgacgacactctaatgtcgtggcgtgcgctctggccaacaaactggcgcgaattgcctgggcactatctgctcaccatacagcgtttgaagcagggccagacaccgtggtggcctgaccctgctgttgttgcagtaccacgaggcaccatcaggttttgcgatagctgaaaaatggatgacgtgaacggcacaccggcctggcgaagaacctgacttatgaaacggctttagaagccgctccggttttcaggattgccaggcgcgactctcatcatggcgcggggcatgcctcatacagacgccggatagatttaagcaagccaaccacttcacccgttaatcagcattgcaaaaatgggggtgaccatagat

SEQ ID NO: 3496 - DNA, 1389 bp, unidentified
  source 1..1389: mol_type = unassigned DNA; note = element_51edd55
  misc_feature 1..2: note = core
  misc_feature 3..87: note = LE
  misc_feature 88..1008: note = CDS
  misc_feature 1009..1389: note = RE
  misc_feature 1166..1378: note = bridgeRNA
tgatgctgtggaacggcccctttgagcccggtaaccgcggcgcctaacgtggtcgtgtagaccgccatatgtgagaggagcatttccatggagaagatcatgacagtaggcttggatttggccaagacagtctttcaagtgcatgcgatcgatgccgcaggtgtttcgatcgtgcggcgctcactgcgccgatcgcaagttctcgccttctttgagaaacttccaccgtgcgttgttggcatggaggcatgcggaacgtctcacttctgggctcgagagataacggcactcggccacgacgttcgcatgatgccgccaatttatgtgaaggcgtacgtcaagcgcggcaagacagatgctgcagacgcggaagcgatctgcgaggctgtcacccgcccgacgatgcgtttcgtaccggtcaagacggccaaccagcaaggtgcgggcatgatattgaaaacccgtgaactactgatccgacagaggagccagacagccaatgcgttgcgtgcccacatgtcggagcttggcatcgtgaccacaaccggaatggccagcgtcgccaagctcattggcttgatccgcaatgagagtgaaagccatatgccggaaggtgccaggtttgccctgaaggaattggctgaacaaattgaggccctcaatgtgcgggtagaacgactggatcggcaaatcattgcggccgtgaaagatgatgaagatgcccggcgattgaccagcattccaggcgtcggccctatcatcgcagcgacggttagggcggcggtaccggatccatctgggttccggtctgggcgagacttcgcagcttggatcggactgacgccacgcgccaattccagtggtgggaaagagcgggtcggttcaatatcgaagcggggaaaccggcagttgaggatgttgcttattgtcggcgccacatcgatcctcaaacttggcaaatggggcctcaagatgccgcaatgggtcggggccctgatgcttcggtgaccattcaagattgtcgccgtggctctggcaaacaagatagcgcggaccatctgggctctgctgacgaagggcggtacctatcaacccccgtacgccatgagaaatgcatagccctacaaggagcttcggcgtggaagaaccggagaatacggcaaggtgttcaatgcgtggatgaaccaagaggggcgacaacccaatgcagatcagaccgtctgactcactgcgcattcaagcgcgcgaatttgatttggcgatcctgcattgcggatatcatcgtgaccatcggtcagaagaccgagcacaaaggccggacatatgactgcaccgtccgtcttgggaaaacaccgcaaaaaacgcttgccatcggggccgttccacata

SEQ ID NO: 3497 - DNA, 1390 bp, unidentified
  source 1..1390: mol_type = unassigned DNA; note = element_51f1aaf
  misc_feature 1..2: note = core
  misc_feature 3..294: note = LE
  misc_feature 295..1095: note = CDS
  misc_feature 1096..1390: note = RE
  misc_feature 1153..1389: note = bridgeRNA
ataatggtatgaacccactccacttcctaacggcctcgcaataggccaaaatggaagcgtaaacataccatttaacaaaagcggagtgggtaacatgaagattacaacagttggacttgatatagaaaaatctatttttcatacgtatgcgattaatcacactggacggttgattaaaaaaaaacagcttaagcgcaaacagttattaacttattttgcaaaacttgagccaagtattgtggtggtgcaaagtattgggcaagagaatttattaagcaaggtcaccaaggaaaattgattgcaccacagtatgtaaaaccttttgttaaaggcaataaaaatgattacaacgatgcccaagcgatagcggaagcatcacaacgttcaagtatgagaattgtaccaataaaatcggttgaacagcaagacttgcaaaatgtccacgacccacgagaacgtgtgaaaaaagaaagaacggctttagccaatcaaatacgaggcttactcgctgaatatggcacagtgatcaaaaaaggtatctcagctatacgaaatgaattaccttcaattatagaagatgtagaaaatgacttaacggtgatgtccagagggttgtttaacgagctacttgaggagtttcgagctatggatgttctgcttgaacattgtgatacaaaaataaaagtagcgaataaaaataatgaagtatgtactcggttaggcgatgtgttaggtataggggatatcacatcaaatgtactttatgcagcagcaggcgatggtaagagttttgtgaatggacgacatttttccgcttggattggtttagttccaggtcaacattcgacgggtggaaagccgaggttactgggtataagtaaacgaggtaatagctatctaaggacgttattgatacatggtgctagagcggtgttaaggcattcagaaaagaagaatgatcgtttcagtctttgggctcaagcactacttaagcgtaggggacaaaataaagcctgtgtagcggttgtaaataagcttgctagaatggcatgggtcataatagctaaaggtgaaacgtatcgcccagcaatgtaataataaattaaatggtattagtgaaaagcactaatacttattaagtaagtgtaaaaccctttaattcagttgcaaaagataaaagatcggatggtgagataggtcagaccggctcattcaaaacctgctacctgcatcggctcttaagaagccgtatggatgatgaggaggatgagcgcaaataaccatgggggccaggaagtaaaagtcttccataaacaggccggatatatgagagcaatgattttcctctcgcactatgatcaaatatcttgcaaacggtgtgggttcatat

SEQ ID NO: 3498 - DNA, 1340 bp, unidentified
  source 1..1340: mol_type = unassigned DNA; note = element_51f1c33
  misc_feature 1..2: note = core
  misc_feature 3..291: note = LE
  misc_feature 292..1116: note = CDS
  misc_feature 1117..1340: note = RE
  misc_feature 1138..1335: note = bridgeRNA
tgatgtgatggacgtccccctcttcagttgtaaacagtgtcatcgttaacttgatactgaatacattgcatttcgggagtatttctcatgaacataatcaaagtggtgggtattgatctcgctaaaaatgttttccaggtctgtgtctggttaacggataactctatcgcctagaacaaaaaagtctcacggcaaaaattgctggatacactccgggcgtttccgcccaatacccttattgcgatggaggcttgccagagagctcattattggggaagaacgctccaggctatgggctatgccgtccggcttattccgactcagtatgtcaaggcactctgtaaaaatcagaaaaacgatgccaatgatgcgctggctatctgtgaaacctcctgccgtcccgggattcattttgttccggtcaaaacggttgagcagcaggatatcaaagccctgcgcagtgcccggcaactcgtggtagaacagcgtaccgccctggttaatcaaatccgggcattgcttgtcgaacaggggatcgttatcccagcaggcattcagcaactccggcacgccctgcctgatattctggaagagggaaacaatgccttatcctttgttctgcgccgccttctccattcgttgcaggaagatatgcagcgatttgatgtccgtatttacgacatggataaagaaattcaggccgtttcaagccagcaatcgggttacgcccatttactgaccattcccggtgtggggccactgattgccgccgcttttgtcagtgaagtcaatgcagaacaattccaaaatggtcgtcagctttcagcctggtgtgggctggttccacgccaatacagttccgggggaaaaaaccgtctgtctggcatgaccaaacagggcaaccgtcacttgcgaacgttaatcattcacggtgcccgtgcggtgatgcgctgttgtcaaaaacgtgaggatgttctgggcggatggttaagaaaattaattgcccgatgtggcttcatgaaggcaacggtcgccttggccaacaaactggtgcgtattatctggcgaattttaaaggatgatgttgattttatgatgaagaaagccgtgaattaaccgattaaaaaagacgtttactgagtttgcaaacactgatgagaaaacagctaccgtcctgtaatagcctgtgcttgaccaaggtaatcatatacctatgtagtgataaggaaacagggctcggatgacatcatggcgcgggtgattcagcccacaatgacgccggatatatggtcgcaaaccgtatcaattcaatgcttgcacaaccgagggacgtccatata

SEQ ID NO: 3499 - DNA, 1194 bp, unidentified
  source 1..1194: mol_type = unassigned DNA; note = element_51f269d
  misc_feature 1..2: note = core
  misc_feature 3..240: note = LE
  misc_feature 241..1173: note = CDS
  misc_feature 1174..1194: note = RE
  misc_feature 32..209: note = bridgeRNA
cttgtatgtttgaatgcccctcctgcaacgatgcaggacttgccggggtggagggaccaatgacgcatctgacctaagggtacagacggtaggagacttggccccaccccgcacctattcatacgccgataaagaatccatcggctgagtcgcacctcagaccgacgataccagcaagccagcgttcaggtgcgccccgacaagcatgtgtaacctagctcaaggggcagttcagtggcaatgcaagtagcaagatccatcgtcggcatcgacgtcgccaaggccgagttggtcattcatttccagggcaggacgctcaccattgagaatacaccccaagccatcaaacgctggctaaagagcctgccatgctcctgtgagatcgccattgaggccacggggacttaccacatggcggtcattgagttggcccatgccaaagggcaccacatttacgtcattgatgcttcacggctcagcagctaccgcaagggaacaggcggtcgagccaaaacagacgcctctgatgcccagctgctcgcccgccatctgcagagggagaaggaggatctacgccgttggagtccgccgcccaaggcgtatcgaacattgcagacactgctgcgccgccgcgcggcgctgatcaaggcacgaaccatgatccagcagagcttgagtggcgaaaaggttctcaaggcgaacctgacaaagttgatttcacagatcaacagcctggatacactcattcagaagcatcttcgcaacaccgtcagagaggcagggctctgtgatcaggtgaaacggtgcaaagggctggaaggcgtgggcgatctgacggcttacgccttggtcatggccttcctgcgaggagacttccgcaacagcgatgccttcgtggccttcctgggaatggatgtccatgtcaaagactcgggcacgagaacgggcaagcgcaagctgaccaagaaaggcgactcagagacccgcagactgctgtactgtgcggccatggccgcctgcaaaagcgcccgctggatgggggtctaccaagggtatctcgaccgtggtctggcgaaaacgcaggccctggtcatcctcgcacgcaagctggtccgtattgccttcgcgttgatgaagaaccgttccgactacgtatctagcccagcctcataaaagggatggacaacatagaat

SEQ ID NO: 3500 - DNA, 1407 bp, unidentified
  source 1..1407: mol_type = unassigned DNA; note = element_51f43e8
  misc_feature 1..2: note = core
  misc_feature 3..76: note = LE
  misc_feature 77..1135: note = CDS
  misc_feature 1136..1407: note = RE
  misc_feature 1133..1394: note = bridgeRNA
tgttggagtggacggcccctgacggcatcgatgtgccatattgaggttgttaaccactcaatagaaggagccgtccgtgaacgagattattcggataggtatggatacgtccaaacacttttttcagcttcacggtgtcaatgccgctgaagatgtcgtgttgcggcgcaagttcaggcgcaaggagatggaaaagttcttccagaagctttcgccctgcgagattggcatcgaagcctgtggcgccagtcaccactgggcgcgctggcttcagtccttgggtcatacggtgaggatgatgcccccgcagttggtcaaggcctatgtccagcggaacaagaatgatgcggcggatgcggaagctttgtgcgaggcgatgagccggccgaagattcgggcgcggtttgtgccggtcaagacggctgaacagcaagccgacctgatgctgatgagcgtgcgagaacgcttggttcacgaccgtacccggctgtcgaatgccattcgcggccatgccgccgagcttggctatgcggctgccaagggcatggcgcacctggaacccttgctggaacgtcttcaagcggatgatcgcttaccggagcgggcattaaagctgttcgccgctatggctgaagactattggaggcttacacaacgcctgagcgagatcgataccgagcttaaggcctggcatcaaagcaatgaatgcagccaacggctggaccgtatcgggggcgtcgggattatctgtgcggccttgctggtcatgaaggtgccggaccccgcggccttcgagtccgggcgggacttcgccgcctatctcggcctgacaccgaaggatcattcgaccggaggcaagctcaggctgggcaggattacccgggcaggcgacgaggccctgcgatgtaacctcgtcgctggtgccaccgccgtcatccagcatgtcaggcgaacgggcaagggctcgccctggcttattgagctactcaagcgcaaaccgccgaagcttgtcgccgtcgccttggccaacaaaatagccaggatcgcctggaagctgatgaagactggtgaagcctacaacccaacccatgcgaaagccgcccaagtgcaggccgagggcgctgctatagcttagaaatctgtcgggcacgggtttcctcaatacccgtaaccggccggtgccagaacttgcaggaaagacagcagatggtgtgatcaatcgatccaagacataggaaactccggccctccccatggcttcatcaagccgcttacctgtttggaacctctgtcgcggaaaccatcttggccagcgttaataaacgcacaaacaggccggacatatggactcaagcgatctgatcaaatcactgcataaactcttgtgagaacggggccgtccacata

SEQ ID NO: 3501 - DNA, 1324 bp, unidentified
  source 1..1324: mol_type = unassigned DNA; note = element_51feb80
  misc_feature 1: note = core
  misc_feature 2..263: note = LE
  misc_feature 264..1076: note = CDS
  misc_feature 1077..1324: note = RE
  misc_feature 1078..1314: note = bridgeRNA
tatgggatggcccgccccttttccccggcatgagatatgatgccggttcgaagaggaaggagcgaacaaatggctattgcgattcttggagttgatctgggcaagacctcttgcagcatggttggtgtcgatgagcgaggcacagttgtgatgcgccggtcgctgcgccgccagacgctgatcgactatgtggcgaagcttccggcctgcgtgatcgggatggaagcgtgttgtttgctgctgcgggacacgaggtgcggctcatgtcgccggagtatgttcgcccttatgtgaaggcgcagaagaacgacgaccgcgacgcggaagggattgccgaagctgcctcgcgaccgacgatgcgctttgtcgagctcaagagccaggaccagctggacatccagaccctgcaccgggcgcggtcacgtctggtggctgagcggaccaacctgatcaatcagcttcgcgccatcctgctggaacgcggagtgacctttccggttgggcgacgcaagctggagcaaggcatcgacggcttgctcgccgaaggtgatgacaccctgtcttcccgtatgagccgattggtcgcggagatgcgcgcggagtggaaggagctcgatgcgaagatcgagatgctgaacggtgagttcgttgagatggcgcgcagtgatgctgccatgcgccggctgacgacgatccccggcattggcgttctcaatgccacggcgctggtagccgcggttggggatggaagcagcttcggcaaggccagggatctgggcgcctggctgggtctcgttcctcgccaacacacgacgggcggcaagccgcgcctgcttggcatctcgaaacgcggcaacacctacttacgcacgttgttcattcacggagcgagagctgcattgccgtcattggcacagggcgacacgccgctcggacgctggctgaaggggatgatcgaacgaggcgtgcaccgcaacgccgtcgtggtggcgcttgccaacaagctggcacgggtcgcctgggccgccctgcgcagggaaacgtcatttgagcgcaactaccctgtcgcagggtaatcagatcggccgcgtgcgctcacgtacgtagcccacgaggtttgcaggaaggatcgaagatggcctgaaagtcgatcggcgtttggaaggcccgatgaacgaattggcacttgatgccgtggacattatgaggctccagacgcgcggatgtccatcttggccgtgggctcgcccatgagaccgtatacgttggcgcagactaatcagatcaccgtaaaatccaacttgcaaacggggcgggccatacg

SEQ ID NO: 3502 - DNA, 1404 bp, unidentified
  source 1..1404: mol_type = unassigned DNA; note = element_520d164
  misc_feature 1: note = core
  misc_feature 2..85: note = LE
  misc_feature 86..1126: note = CDS
  misc_feature 1127..1404: note = RE
  misc_feature 1175..1396: note = bridgeRNA
taatgggatggacgccccttcctaaccggcatcaatgtgccagagtggtagtgtcaacagccgctcaacagaaggagcgtccactatgaagattacgacaatcggaatcgatctggcaaaaaatgtgttccaggtccacggggtcaacgaacacggtaaagtggccgtcaaaaagcaactcaaacgcgagcaaatggcggccttctttgccaatctgccgccttgtctgatcggcatggaggcctgtggcggggcgcatcattgggcacgtcagttgcagcgttttggtcacaccacaaaattgatggcaccacaattcgttaaaccttacgtcaaaaccaataagaacgacgcggccgatgcggaggcaatctgcgaggcggtggctcggccaaacatgcgctttgtgccggtcaagacgaccgagcagcaagccattctatcggtgcatcgagcgcggcagaattttgttaaagcccgcactgcgttggcgaatgaaattcgtggcttgctaagtgagttcggtttggtcatgccacaaaaaatccagaccatcggcttgcgcttgcctgaaatcctggaggacggtgacaacggattgcctggcaccttcaagcagttgttgcaacgtcttggcgagcatttaaaggaactagatcggcaagtcgccgaattggagcgtgatatccagatctggcatcgaggcaatgaggccagccgtcggctggagaaaatacccggcatcggcccgattaccgccagcgcgctggtagccacggtaggagatgccaagaattttagcaatgggcgacagctggccgcctggttgggcttggtgccaaggcagaattctagcggcggtaaagccacattgctcggcattagcaaacgtggtgatcgctatctgcgcacactgatgattcatggtgcgcgcgccgttctgcgctttgcccagaacaagaccgacgcgacgtcaatgtggttgaacgaagtccagacgcggcgccatgtaaatgtggtcacggtggcgctggcaaataaaaacgcacgtatcgtgtgggcgctattggcgcatgggagcgaattccgagcgggttacacgtcgtcggagtccgtcgccgtgtaacccactcggttgagtggggcaagaagtggattgggagtgtttacgcataccgattgctcaggcaaacaagcagcgatggcaagataggtcagaccgtggttggcaaaacccgaggggatccacgcacgttaagagtgcaaaaccctgattgaggagccgaccagcgtattccatttgggacagaggcgacggcctcgtagaaagtccggatgtatggctgcaatcttccttcaacccatcgcaatttggttgcttggcaaaacgggggcgtccatgta

SEQ ID NO: 3503 - DNA, 1155 bp, unidentified
  source 1..1155: mol_type = unassigned DNA; note = element_521bfab
  misc_feature 1..2: note = core
  misc_feature 3..207: note = LE
  misc_feature 208..1143: note = CDS
  misc_feature 1144..1155: note = RE
  misc_feature 12..213: note = bridgeRNA
cttgtcttatgattttctctgtctccatgcgaagatggagcctctgccggccaggccatttatggcgggcagaggcggtgtgtggatcgtgaaacgcttggtcttgcaggaccgttctaaagtatgatcacacgccgtcttcgactggggcctgaacgaatacgcagtggctgcaaagctctgcatgacaagcataggacagcgaagatgaaccacgataccatcggaatagatatttccaaagacaaactcgacgtgcatcgactgctcgacgggaggtttgcacaattcccaaacaccaaacccggcttcaaggctttgcaaaagtgggttggcgcgattttgcctgcctgcgtggtttacgaacccaccggggcctatcatggtgcgtttgaggcggcacttgcggatcacttaccgctggtgaaagtgaacccgaagcacgcgcgccgcttcgccgaaagccgtggtgcgggtgcaaagacagaccgtgcggatgcccgttccttggcacagatgggcgcggcacatggtctggccccggatacgcctgcggccaaagatcgccctgttctcagggagttgcaatccgcccgtaccgcattggtgaaggacaaggtgcgactgcgaaaccaattggacaagcaaggccatgccctgacgcgcaagctctcaagccgacgattgaggctggtggaggcgcagattgcagagctggatcaggccatccgcgcccagatcgaaacctgccctgtccgcaagcgagccctcacgctcatggaaagtatcaagggcatcggtgcagtggccgcgaccacgatcctcattgaacttcccgaaataggttcattgcgcaaaaaggccgttgcggcgattgcaggtgtcgcgcccataacgcgacaatcaggtcgctggcgcggccaggccttcatccaaggaggccgcaaacctttgcgcgatgcactctacatgcccgcgctcgtcgcgatccgtttcaatcccgatctcaaagcgcagtacgacaaaatgaaagctgctggaaaaccccctaaggtcgccatcatcgccgtcatgcgaaagctcctgatcctcgcaaacactctggtcagagaggatcgggagtggtctgaaatcaaagcttgatcaagacggata

SEQ ID NO: 3504 - DNA, 1354 bp, unidentified
  source 1..1354: mol_type = unassigned DNA; note = element_522ad91
  misc_feature 1..2: note = core
  misc_feature 3..83: note = LE
  misc_feature 84..1103: note = CDS
  misc_feature 1104..1354: note = RE
  misc_feature 1118..1340: note = bridgeRNA
gatgaggtgggtggctcctgctccaccggcatcgaatgtgccaaagtgcagttactttaaactgctaggaaaggagccacccaatgacagttaaaactatcggcctagatttggccaaggacgtatttcaagtgcatggaatatccgagaacggacgtgtcattttcaacaaagcgataaaacgggcaaagttactggctttctttgaagcgctgccgccctgtagggttggaatggaagcctgtggatcatcacatcattggggtcgtatgttgcgacagctcggtcacgatgtacgtttgatgccagcgaactatgtgaagccatatgtcaaacgcggcaaaacagatgcggcagatgccgaggcaatctgcgaagccgttcgtcgtccgacaatgaggtttgttgagattaagactgaagatcaacaggctgtcttgtcaatttaccgcacccgcgacctggctgttcgacagcgaacccagatggctaatgtgatccgcagccttctgcgggagttcggacatattctgccgattgggatcgaggcggtcactgcgttcgcaaagcgccatctcgatggtgatcaacatgacatgccggatatcgcaaatggaatgcttggcatgcagtgttatcagttcattggcttgaatgaacgtatcgacggctattccaaaatgatcgaacgacatgcccatctgagtgcagacgcacggagactaatgcgcatgccgggcattggcccaattacagcatctgcaatcattgcgacgatcggtgatgcgaagcaatttagaacagggcgcgattttgcagcttggctcggtcttacaccgctcaacaaatccagtggcggaaaggaacggctgggcaagatcacaaataaaggtgaccgctatattcgcaaactattggtcgttggcatgacgtttcgcgccgtgatggcaaaacgttcaccagaaaaagtggatctgtggacggcaaagatcattgctaacaagccattcagattggctacaacagcaatggccaacaaagcagcaaggatcatttgggcaatacttacaaaaagaagggaatatcggcagccagcgttctaacggcgcaaaactgctacgagatgcaagaggttgaagtgatgatgcggaattaagtcaaccataagcaaggaaactccgggaatgtctgcggcccaccgaggtcgcttagccgtatggaacctcgcttgcggaattcatcagggccagtggaggcaatgccgaaacataaacaggccggacacacgactgtactgacgaaatatgcgcaaacacctcaaaaaacgcttgcaatgcaggagccacccacacag

SEQ ID NO: 3505 - DNA, 1307 bp, unidentified
  source 1..1307: mol_type = unassigned DNA; note = element_52372d2
  misc_feature 1..2: note = core
  misc_feature 3..80: note = LE
  misc_feature 81..1040: note = CDS
  misc_feature 1041..1307: note = RE
  misc_feature 1076..1293: note = bridgeRNA
gatggggtggatggctcccgctcccggcgttgcagcgccacagtggtgctgtcacgcagcacgagcttggagcgaccacgatggagatcacgactgtcggcatcgacctggccaagaatgtcttccaggtgcacgccatcagcggaacaggggaggtcctcgcccgacgggcgctgaggcgggctcaagtcatgcccttcttccgcaagcttgccccctgcctgatcggcatggaggcctgcggcacgagccatcactgggcccgcgagctggccgctctgggtcatactgtgcggctgatgccgccagcctacgtcaagccatatgtgaagcggggcaagaccgacgctgctgatgcggaggcgatctgcgaagcggtcacgcgcccgaccatgcgcttcgttccggtcaagtcggtcgagcagcaggccgcgctgtcccttcatcggacccgcgacctcctcgttcgtcagcgtacgcaactcatcagcatgatccgtgggctcctggccgagttcggcatcgatatcccgaaggggatcacccacgccttggccgagcaagcgatcgaggctcaggaccgcatccgccagctcgaacgagacttgctggcctggtaccgatcgaacgatctcgcgcggcgcattgccaccgtgccgggcgtgggcctgctcgaagcgagcgcgttggcagccactgtcaccgatccgacccagttccgctccgggcgccagttcgctgcctggttgggcctgacgccgctcaacaactccagcggcggcaaggaacgcctcggccgcatctccaaaatgggcgatcaatacctgcggcgccttctggtcacgggcatgacgtcgctcgtcagacgcaacaggcatcaccccgatgcagcggatcctcgcgtgaccgcgctactcggccgcaagccgatccggctcgtcacagtcgccctggcgaaccgggcagcgcgggcgatctgggtcatcatggttcggggcgagatttatcgcatgccggcgccccgcctggcagcaacctgaggatcactagcccaatcagcgcgctacccgcgcgaaggaggttgcgaaggaccctgtgagatgatggcgcaccggtcagaccggggatgaggacaacccgccgaatgtcgagggcgtcgaagcccgctaagcagaatgggacctcatccgcggaaagcatcagggccagcggtcgatgaccgcgcgaacaggccggacacaagactgcacccgaccagcacgccaaaccgtcacagcccccttgcaacgcgggagccatccacacaa

SEQ ID NO: 3506 - DNA, 1430 bp, unidentified
  source 1..1430: mol_type = unassigned DNA; note = element_5237e25
  misc_feature 1: note = core
  misc_feature 2..91: note = LE
  misc_feature 92..1132: note = CDS
  misc_feature 1133..1430: note = RE
  misc_feature 1194..1425: note = bridgeRNA
taatggaatggacgcccactacccaaaacggcatcgaagtgccaaagtagtggagcagtaaagcccactaaaccagagaggagcgtccgacatgaagattacaacgatcggtattgatttggcaaaagaagtttttcagattcacggtgtgaatgtgcatggtaaggtgttgctgcgcaagcagttacgccggagcgagatggcgaagttttttgccaatctggaaccttgcctgattgggatggaagcatgcggtagttcacatcattgggcgagaaagctgtgtgaatttggacatagcgtcaagctcatgtcgccccagttcgtaaaaccctatgtgaagaccaacaagcatgatatggcagatgcggaagcaatctgtgaagcagtgaatcgacccaacatgcgttttgtaccgatcaaaaacgttgagcaacaagcgatcctgtcggtgcatcgcgccagacagggttttgtcaaagccagaactgcgcaagcaaatcagatgcgtggtttactctctgagtttggtatcgtgatgcctcagggaattcgatcaatcagcaaccgcatgccagatatcctggaagatgccgaaaacagtttaccgggaaccatgcgctggttgctggaaagactgaataatcatctcaaggaactggatcgtcaggtaaaagaactggagtttcaaatcaagctgtggcacaaggaaaacgaagccagccaaagattggaaggcattcctggtattggtccgatcacggcgagcgccattgtggcaaccgtggggaatgctgcggagtttaagaacggcagacaattggcagcatggctgggattggttccaaaacaacattccagcggtggcaagcaaacattacttggcattagtaagcgtggcgacacttacctgcgtacattgttgattcatggggcacgagcagtcattcgctttgctgagaacaaggccgagccagaaagctggttatgcaagctgataacccggcgcaacaagaatatctctgctgttgctctggcgaacaagaatgcacgtatcatctgggcgctactcgccaaaaacactacattccaccttgatcacactacggcagcgtccaagcccgcagcctgatcaaggcggctgaataaaagcgtattggtaatgttgtattacaaacgttttgaaggagaaaagctaccaccgattgcacaggcaattatgaaatgatggcgagactggtcagaccgtgagtggctaaacctgcgcaacacacagtgcatagagcacgttgaggtgataaggcgctactcagcgaattccatcagggacagaggcaatgcgcctcacacaaagtccggatgtatggccgcaatctttaccttctcaaaatcatcgactgaaagcttggcataacgtgggcgtccatgta

SEQ ID NO: 3507 - DNA, 1526 bp, unidentified
  source 1..1526: mol_type = unassigned DNA; note = element_52391e8
  misc_feature 1..3: note = core
  misc_feature 4..141: note = LE
  misc_feature 142..1419: note = CDS
  misc_feature 1420..1526: note = RE
tttcgtattattaggtcagccagtattcctggttggcctatttttataggcgttatatgatggtggtagccgggagaacgaggctctattagggaattttatcccgtcaataaaactgttttcccactacctccaatgactatgtttgagctggttgaggcaatgacctcgtatcacaagcgaagctataggtttggaaccattgtgggagtaccggcaatttgctttgggaggagagttatggagccagttgttgggttggatgtagcaaaaggcaagagtgtatttcaagcatttttaagaaaaaatgaatcttacggaagggcggaaagtatctcacatagtgaagatgggtttaaacgatttggcaatttgattgcggaattaaagaatctaactggatcagatccgattgtcatattagaggcaactgggcattatcatcgtgaagtagtaaatttctttacaggagtaaagattaaccacattataattaacccattgcaatctaagcgagcaaaaggagctaaacttcgcaaagtcaagacagatgctattgatgcttggaatttggctgaaatgtactatcggggagatgtaaggccgcatcgtacatggcaagagacttatactgaacttcagcatgcaacaaggcagcatgaatttgtgacctcactgtatgtgcaagcaaaacttaacatgagagctttgctagaccaagtgtttcctcaatatgaaaatgtattctatgatttatattccgtaacggcactaaaggttttgcagacttgcctccaaggaaatatagaaaatatggaagaaactattttggatactgctggtaaatcccattctaaaagctggattaacgagaaattggcgtgtttgagagaaactcttggtgtatgggaaaaaagagacaaaagcctatcacagtcagcggctttagaaggcatgcttgcgctgttattaaccttgcgcatgcaattggaacagttagaggaacagatagcaaagctagcagcaaatctttcggaagttgctttgttgaaatcaatcccagggattggagataaacttgcggcaactattatatccgaaattggagatgccaagcagttcgaaagtgcaaaacagttagtagcttatgcggggttagatccgggagtccatagttctggaactttcacagcaactaataatcggattaccaaacggggatcaaaacgactcagacgtgcgttatatttggcggtacaatgcagcatgcgaaaagggacagaaaatagaattaggaattactatgataagaaaaagagagaaggcaagccgtataaggtagctgtaattgcttgtgccaacaagcttctgcattatatatacgctatcttaactaaaggtcagccttacagcaactaacaaccaaaaatttccataaacctccatggagatggaggttatttgtcatgttgaaaaacaggtataaaaataataatcagctaaaagccttgacaaacattagctgg

SEQ ID NO: 3508 - DNA, 1221 bp, unidentified
  source 1..1221: mol_type = unassigned DNA; note = element_523b022
  misc_feature 1..2: note = core
  misc_feature 3..240: note = LE
  misc_feature 241..1203: note = CDS
  misc_feature 1204..1221: note = RE
  misc_feature 6..208: note = bridgeRNA
cttatgtcttggcatcagtccccatggattggtacccttcggttgatccccggagcgaggcaggcaagattgtgtatagactaaggacatgatcctgactttcagattaatcacctgcctcaactttgccatcagttcggacggtatccaaggcctgccataggcaagagcctggacagataaggatgaaccggcttggtccgatgatcgccgctatctttattttaggagactggcatgatgcatactttatctgtcggtattgatatggccaaggccaagttcgacgcagcgattttaaactcagaagacaaatatcgcagcaagatctttcccaacacatcagcgggatttctgcagtttttggattggttggctaaacacaatgctcttggagcccatctctgcatggaaaccacaggtatctatgggcgtgacctggccaattttctagtccagaagcagctgcttgtaagcgtagtaaacccggcacagattcacgcctttggcaagacagagctgaaccgggccaaaacagacaaggccgatgcccggcttatcgcccgttattgccggatgcaccggccagcaccctgggcacccccagcagaggagattgccaccctacaggcattggtgcagcggctggaggatctcttggggctccaaatgatggaaaacagccgactggaagccgctacagggccagcgcgggagtccgtggaggcagtcctgcaatttattgagcaacagatagagatggttcgtctgcagatccagatccatatcgatcaacaccccggactcaagagccaaaaggaactgctatccagcatcccaggaattggtgacaataccgccgccaccttattggccttcctcagtccggtagaacggtttcacacagcaaagcaggtggttgcctatgctggcctcaatccccgtattcgacagtctggccagtgggcgggaaagagccccatcgcgaaaacaggaaatgctctgctgcgcaaggccctgtatttgccggcagtggtggcgaaacaccataacccaatcatcgcagccttttgcgacaggctactggccagaggtaagcgtcctatgcaggtggtcgttgcggctatgcgtaggcttttgcatctggttttcggtgtcctcaagtctgggaagcgattcgaccccaaatttggccttgcatagtaccgttcaagacggtat

SEQ ID NO: 3509 - DNA, 1374 bp, unidentified
  source 1..1374: mol_type = unassigned DNA; note = element_523f729
  misc_feature 1..4: note = core
  misc_feature 5..80: note = LE
  misc_feature 81..1112: note = CDS
  misc_feature 1113..1374: note = RE
  misc_feature 1145..1362: note = bridgeRNA
atgatggggtggacggcccccgaacggcatcgatgtgccagactggcgatgtcgattcgaccagacgaagggagccgtccatgggtgagattagcatgattggtttggatttggcgaagaacgtatttcaggttcacggcgtagatgcgtcgggagcggtggtggtgcgtcggcaactgcggcgtggccaagtggagaagttctttgcgcagctaccagcctgcacagtcgggcttgaggcctgtggcagcgcgcaccactgggcgcgggtgattggccgttatggccaccaggtaagattgatgccaccggcctatgtgaagccttatgtgaagcgcaacaagaacgatggccgggacgcggaggcgatctgcgaggcggtcaaccgtccgacgatgcggttcgtgccggtgaagagcgtggagcagcaggcgacgctggcggttcatacggcacgcgcgctattggtccggcagcgcactatgctggccaactcgctgcgagcggcgctgagcgagttgggaatcgtggcagcacaaggtatcaaggggctgcgtgagctgatggtcaagctggaagcgccgaaccaggagatcccggaaatgatgcgcggggcgctgttaatgctggcgcagcattggcaggcgctcgatgtcgacgagcgcgcgctcgagcagcagatcgcgaaggcggcccgtagcgatcgcgaggctcgccggctgatggaagtgccgtgcgtcggtccgattatcgccagcacggttttggccaaagtgcctgatgcaaccgtgttccgcagcggacgcgattttgcagcgtggatcgggctgaccggtcgcgatcacggtaccggcggcaggcatcgtcccgggcgcatctccaagcagggggaccgcacgctgcgagccctgctgatcaatggggcaagcgcctatctgcggcaccagagagtgcgtggtgtcagcaacccgtggctgcgcggcctgctcgcgcgaaggccctacaaggtcgtaatggtggcgcttgctgccaagaccgcccggattctctgggccatgttggttaaaggagaaccataccgcgaccgcgcgagcgcgccggctgctgcctagtcgaagggcgacagccgccgcgctcgcgctcatccaatcggaagggcaactttggtgtgatggcaaaatggtcaggaaaccgggatcgaaacactccgtaccgtcatcgcgcgtcacagcgcgccgcaatgattggaattcgatccgcgatctccatcagggcccgcggtcaaaggccgcattcagaggccgtatacatgaccgctcccgattcgtttgccgaaacgccaaaaagtccttgccgagagggggccgtccatac

SEQ ID NO: 3510 - DNA, 1343 bp, unidentified
  source 1..1343: mol_type = unassigned DNA; note = element_524a0f3
  misc_feature 1..3: note = core
  misc_feature 4..79: note = LE
  misc_feature 80..1108: note = CDS
  misc_feature 1109..1343: note = RE
  misc_feature 1084..1332: note = bridgeRNA
tgatgatgtggacgcccctgccagcacagcgccaagtatggtgctgagaaagaagtgaaggcaggaaaggaaggttccaatgaacatcacaacacttgggctggatctggcgaagagcgttttccaggcgcatgggatagatgcatccggcaagacagttctggtgaaaaagctgcatcgcaaacagatgctgccattcttctcgaaactagcgccctgtgtgatcggggttgaggcctgcgcgacagcacatcactgggcgcgtacactgatcgccatgggccatgacgtcaggatcatgccgccgtcttacgtaaaaggatacgtcaagcgcggcaaaagcgatgcgattgatgcagaagcgatctgcgaggccgtgcaacgtccgacaatgcggtttgtaccggtaaagacagttgaacagcagagtgttctgatggcgcaccgaacccgatcgttgattgtgcgtcagcggaccatggcggcgaatgcgctacgcgcgcacttggccgaattcggcttggtcgccaacccgggtatcgccaatctggtgaagctggccgacaacgcttttgccgatgaagcccttcctgcttacgctcatcgagcgcttgagatcctgatccgacggatcaccgaattaaacgaggagattggcgaactcgataaggaattacgcatctggcatgccgagaacgaggccagtcgaaggctcgcggctatcccggatgtcggcgtgatcacagcgacagccatcgcggccacggtgaaagaccccgatcaattccaatcaggcaggcaattcgccgcctggcttgggttgacgccgcagcaacagtcgaccggaggcaaaacacgtctcggtggtatatccaaacagggcgacaggtacttgcggcgactgctcgtcgttggcgcaacggccgtcatgcgacacgcaaagcgtaaccccacgccgatgacagattgggtgactgggctcatggagaggaagccgttccggctcgcatcggtcgccctcgcgaacaagcttgcccgcatcgcctgggcaatactcaccggggagaaacatataaaccctacgggcggactgcataagcacgcgtagcccgcactgaattggcaatggcagtcgatgatgcgtaacgatcgagccaatggagaggcaaacccgtctgattcaatgcgcacctcaagcgcgccagcttgatcagggacctcaccagcggatttccatcagggccagcggcaaacgcacgccgcacaaaaaggccggacatatgaaagcaaccgatcaacgcaacaagacaaaaacagctcttgccatagggggcgtccacata

SEQ ID NO: 3511 - DNA, 1839 bp, unidentified
  source 1..1839: mol_type = unassigned DNA; note = element_5258143
  misc_feature 1..2: note = core
  misc_feature 3..97: note = LE
  misc_feature 98..1279: note = CDS
  misc_feature 1280..1839: note = RE
  misc_feature 1342..1577: note = bridgeRNA
agacatgatgttttgacctgcccgtcctcaacgcacgtgggttatgttgaggatggacaaatccatgaacacagagccacattgaggggagcaggtcatgcaagagtgtaacgcagcggtgcagcagattgagacggcgtcatcgccgattgcgttgtcggcggcgagcgggaaaggggcggcgaagcagtacgcggcctacattggtctggacgtgcacaaagagacgattgcggtggcggtcgcggaaccgggccgcgatgagccgctgtatcgtggcgaaatcgccaacacgccgaagaaggtcgagcgtttgatcgctcagctgagcgaggcctacgacggcggcctgctgctgttctgctacgaggctggcccctgcggctacggactctaccgtcagctcatcgccagcggccacgactgcgaggtcgtcgccccgtcgctgatcccgcagaaggcgggcgagcgcatcaagaccgatcgccgcgatgcgctcaagctcgcgcgtctgctgcgcagcggggatctgacggcggtgtgggtccccgaccaggagcaggagcgcaaggcgcgccagcagctcaacgccttcctgctgcgtcacggccaacactggcccaaaggcaagagccgctggacgccggcacatgagaactggctggccgggctgaagctggatgatccctggcagcaggtggtgctgcagagcgacatcgatgccgagcgcgccgccggcgagcgggtggcccaactcaacgatcagctcatgcgcgcgctgcccgagtggtcgctggcgccggtggtcgactcactggtggcgctgcgcggcctcgacaagctcgccgccatcgtgctgctggccgagctcggcgacatcactcgcttcgactcacccaagcagctgatggccttcctcgggctggtgccgagcgagcactcctcgggtgggcgccgacgccaaggcgcgatcacgctcaccggcaacagccatgcccggcgcatgctcatcgaatcggcctggagctatcgtttcccggcacgccagaccaagcatctgaaggccaaggccgccaacgcctcgccggcggcgaaacagattgcctggaaggcgcaggtgcgcttgtgcgggcgctatcgcagcatgacgcgtgccggcaagaacaccaagctggtctgcgtggccatcgcccgcgagctggccggattcctctgggacatcgtgcgccaggagaggccgcgcctggcactaacgcaagcccctgtaacgggcgcctgatggtcggctgtacacacagacgtgcggcggtgatgacccctcactgatcagcgcatgcgcgagcgaacagacacattgactcagggcatccgcggccggtgtggagaacccttgttcaggctataccggtggtgcacgggagaatccctcatcgggtatcccgcacaccgatccctgctcttagagaaaggccagctccgcgacgcagtgaagtccggtggtacccaatccacgtatatcagcatgatccaccgtcgcagtctgccgctgggtgtcctgagccaatgtgtttgtaccgacagcgccgttggcctgtggagatgtggatgagtccgcatccctgcggaccggtccgagctaaagccgtgcggacaaccgatggaccgcgccgacacctcggtgcaagatgccagcaccgcgcaggcgcggcccacaggttgcccgcactctcgggcctctcgcccacatccccacaggccctacaacaaactgtttaataaaagaaagaagaggtgtgtaacgggaattcggtgccaatagttgacaggtcaaaacatatc

SEQ ID NO: 3512 - DNA, 1384 bp, unidentified
  source 1..1384: mol_type = unassigned DNA; note = element_5259a5a
  misc_feature 1..2: note = core
  misc_feature 3..76: note = LE
  misc_feature 77..1117: note = CDS
  misc_feature 1118..1384: note = RE
  misc_feature 1117..1371: note = bridgeRNA
tgatggggtggacggccccctacggcatcgatgtgccagaatgaggttgttgaaatctcagacaaaggagccgtccgtgaaccagattatccgaattggaatggatacgtcgaagcatatttttcagctgcatggggttgatgccgccgagcaaccggtgttgcgcaagcggctgcggcgcaagcaagtgctggcgttttttgccaaactgccgccgaccgtgatcgggatggaagcttgcggggcgtcacactactgggcgcgggagttgggccggctcggtcacgaggtgaggctgatcgcgccgcagcacgtgaagccctacgtcacgcggaacaagaacgacgggcgggacgccgaggggacgtgtgaagcgatgagccgaccgacgatgcggttcgtgccggtgaagacggcggagcagcaggcggccttgatgctggcagggatccgcgagcagctgatcgcccggcgcactcagctgagcaatacaatccgcggctatgcggcggagttcggtgtgacggcggccaagggcctcgacaagatcgagccgctattggcgcaaatcgcgcaagaggaggatttgccggcgctggcgcgcgaactgtttgcgaccgagggcagggaatacgcacgactgcaggccgaactgaaggcgatcgaggccaggctgatggcctggcatcgcgccaacgcctgcagccgacgcctggcgcagattccaggggtaggaccgatcggtgccacggcgctggtgatgaagacgcccgatccgcgcgcgttcgcctccggccggcactttgcggcttggctcgggctgacaccgaaagaccattccactgccggcaagaccaggctcggcaagatcactcgcgccggcgacgaggtcttgcgcaggctgttggtggcgggagcgaccgcggtgatccagcaggttcgcaacggccgtggccgtccgtcgccctggctgcttgccgtgctgaagcgcaagccaccaaaactcgcggccgtggcgctcgccaacaagattgcccgcatcgcctggaagctgatgacgacgggcgaaagttacgacggcgcgcggatgcctggcgcatcggctgtcgccgcttaagagatcggccggtcggcggattcgccgcaccggttgagccggagctgcaagagaggagcagatggtaggatcgatcgatccgaggtgcgagacaatccgtgggacccattggccgaaggaaggtcgcgtggttgtttggagctcgcgtcgcggaaaccatcttggccagcggtccattgcgaccgcatcaacaggccggacatatggatgcaagtgatccgatcagaccgtcgaaaaaactcttgtggcacgggggccgtccacata

SEQ ID NO: 3513 - DNA, 1357 bp, unidentified
  source 1..1357: mol_type = unassigned DNA; note = element_525c5a4
  misc_feature 1..2: note = core
  misc_feature 3..8: note = LE
  misc_feature 9..1100: note = CDS
  misc_feature 1101..1357: note = RE
  misc_feature 1125..1354: note = bridgeRNA
ttaataggatggtcagcccgatcctcacccagcggactacgctgagtgaggattttgtccttttgggggccatcatggacacggtatcgctagtcggcatcgatctcggcaagcactgcttccacctgcatgcgcaggatgggtcgggcaggatggtgttgcgcaagaagctcacgcgcaatcagatgttcacgctgctgggcaattttccgagttgtaccgtggtcatggaggcctgcgccggtgctcactggatcgcccgccgacttcaaacgctgggccatgaggccaagttaatctccccccaattcgtcaagccgttccggcaaggcaacaagaacgatttcgcggatgcgcaggcgatctgtgaagccgcttcgcgcccgagcatgcgcttcgtgagtccgcgtaacgaagcgcagcaggtcgtatcagccttgcaccgcgtgcgcgaggcgctggtgcgggagcgcaccggtacgatcaaccagattcacgcatttctgctggagttcggtatcagcctgccgcgtggcatggcggtgatccgcagactgccggccgtactggagacgcaagcgttgccgcccaggctggtggccgtgctcgaacggctgcaggcgcatttcaagtatctggacgagcagatcggccagctcgaacacgagctgctcacgcaattgcacgaggacgagcgcagcgaacggctgctggagattcccggcatcgggccaatcaccgccagcgtgttgatgtcggaattgggcgacgcccatcaatatggttcggcaaggcagtttgccgcttcgatcggtctggtgccgcgacagtacagcaccggcggcaaaccaacgctactgggcatcagcaagcgcggcgacaaggaactgcgacggctgctggtgcaatgcgcgcgggtcatcatgctgggtatcgagcgccgaacggattccttgggcacctgggtccgcagcctgttggcgcgacggcactcgaacgtagtggcttgcgcgctggccaataaattggcgaggatcgcgtgggccatcctcgccaaagggacacactacagaagcgcgccggcggctcttgcggcctgacgcttccgatcgcttacggcttcagtagtcacacctggttttgcgacgcgagatacgtgaaggcataaacgactcaacggccgggcaagtaacctgacaacaaaaacagcatctcgatgctgagcgctttttgaggtttgcccggcgcggctcccatcatggggcgggatcattcccatccgcgaccccggatagattcgagcaagtccactttaggtcaacactgcctcgcttgcaaaaatcgggctgaccataga

SEQ ID NO: 3514 - DNA, 1530 bp, unidentified
  source 1..1530: mol_type = unassigned DNA; note = element_5261417
  misc_feature 1: note = core
  misc_feature 2..114: note = LE
  misc_feature 115..1143: note = CDS
  misc_feature 1144..1530: note = RE
  misc_feature 1211..1447: note = bridgeRNA
gaatgaaagggacttccccgtcccgaggtgcccgctggattgcggagtacggcaacgaagtgccacgatgggaagtgtgaactctcatcaactcaccgtcgaaaggggaagtccgtggctattgtcttcgttggtatcgatctggccaagagcgtgtttgcggtgcacggcgtggatgaagcgggccgagcggcgctggtgcgcccgagcgtggcgcgcgccaagctgctcgagctggtcgcgtcactgccgccgtgcaccatcggcatggaggcgtgctcgggggcgcaccactgggcgcggctgttcgctgggcacggccacacggtgcggctgatcgcgccgaagttcgtcaccccttaccgcatgagcgggcggcgcggcaagaacgacgccgccgacgccgcggcgacctgcgaagcgctgcagcgccccaacatgcgcttcgtgccggtgaagagccaggagcagcaatcgcagttgatggtgcaccgggcgcgccagggattcgtgcagcagcgcaccgcgacgatcaaccgcatccgcggcctgctcagcgagttcggcatcgtgctgccgctgaaggccgccgtcgtgcggcgccaggcggcggcgcatctggaggacctgcccggctggggcaacaccgtgatcggcgacttgctcagcgaggtgcatcggctcgatgagcgcattgcgcagtacgacgtgcacctgcgcgcgatcgcccagcgcagcacgccggcgcaacggctgatgcggctgatgggcatcggccagaccagcgccacggcgatcgtggcgatggtgggcaacgcgcacgagttcagcagcggccggcagttcgccgcttggctcgggctggtgccggggcagtacagctcgggcggcaaggcgcggctggggcgcatcacgaaggccggcgacgcctacctgcgcagcttgctggtgctcggggcccgctcggtgctcaacgccgcgcccggcaagaacgactcgatcagccgctgggcgctgcggttgcgccagcgccgcggctactggaaggcggtggtggcgatcgcggcgaagaacgcacgcctggcgggcggcgctgaccaagggcgaagccttcaaacagccggcttgaggcgttggccgtgatcaccgtcgcgatcgctgcgcgccacttgctgcctccggcggccgcaccgccgccaagccaagcgttgaccaccaccgcgtgaccacccgcgttgatgagtaagggttggacctgcgcggggagtgaccgttgaactctgggagtcgtttgtcgcaagacagactcgactaacgaatgggtcccccgcgcgcgtctttcatcagggtccgcggtccacagtccgactgcatcgatgaccggttgtagtttctccagtccgcaccttgctcgcccatcgacgcgatcgacaccgcgaccgtggttctcgacagtccgatcttccttgatcaatcgcgcagcgatcgatcaaggcctggaatcgcttgacaaatggggaagcccttgta

SEQ ID NO: 3515 - DNA, 1509 bp, unidentified
  source 1..1509: mol_type = unassigned DNA; note = element_5275aff
  misc_feature 1..2: note = core
  misc_feature 3..574: note = LE
  misc_feature 575..1492: note = CDS
  misc_feature 1493..1509: note = RE
tctaccattgtattttacaggtgacgggcatacctttgtcaagtagaatgtctacttgacgggggtgtggctcacggggtccgcaggcctgtaaaggtactgctcggttctgaactgccgcccccgtcatcttcttcatccagtgtgtctgttggaatgatgcgcatccgtgaggatggtcgcttgagcgcagtagacgagaataactggatgagctttcatcactctccaaggaggttacagtgatggacccccagattcgtgtcggtattgatgttggctgtaaagcccatcgcgtaggtattagcaagccggacggctcaatcctggaagagttcgacatctcccacacagatgccggcttttgtgacttctttcgccggattgatcatcacagacagcagttggatctgccggtggcagtagctatggaggggttcaatgggtatgcacgtccattggaccggatgatacaagaacacgggtacatcctgtacaacgtgaacaacctgaagcctgccccgtagaataagtccatcccatgtattccacggggtaaacccggttcaaggaagtgtttccgggagcggcgaagacagatccgatcgatacgagaaagatcctggagctgtttcacctcaaagaccacttgccgttggctaaagacgcgctccagaaggtagtgtcagcccccttggtcaacgacaagttgaagcgtctcagtcgccgccgtcgccagttggtgaatgagaagattcgtgtagccaaccggctgcagtccgatatgcaagctgtctgtccggaactactcgccatcacgagtaacgtgagcaacctcaagttcctccggtttctcacgtgccgtgacgacctgacacagttggctcgcttgcggcgcaccactctgcttaagatcccgagtgttgggcagaaatacgcttgcatcatccaggaatggcagagaaaggcaaacttctcagctgaggtggagtatgtaggaccgatgatcattcaggatgccaggcggatccttgagcttcgcaagcagatccacgcgttggatgaagtgatggctgaattagccgatcagtcagagcttgcttgccggatcggttccatacagggttttggcaagacctgcgttgctgaactcgctggtgaggttggaactacggagcgctttgccggtgaaagaagtctttccctctacgtagggatgagtcctctttccagagattcaggacaacatcacggcagcaagtgtccacgccaggtcaatcaccgggccaaggcagcgatgatgacagccgtagcacgtcatatcaattgtgttcctgagtccagggcgtattacgagaagaaacgagcagagggcaagagtcacaaccaagcggtccgtgctctcggtcggcatctcgtacgagtgatctggtcaatgctcaagaacgaaagggactacgaactccgggaggtgatccccagtgtaacttgaaaatccaagaggaatgt

SEQ ID NO: 3516 - DNA, 1531 bp, unidentified
  source 1..1531: mol_type = unassigned DNA; note = element_52785e4
  misc_feature 1..2: note = core
  misc_feature 3..238: note = LE
  misc_feature 239..1414: note = CDS
  misc_feature 1415..1531: note = RE
  misc_feature 3..218: note = bridgeRNA
cttgtattatagagtagtagtttatgaagcccctctccaagggctgtgctacactgtaagggatgctgtggattggtttaatcttcctaccacaagatggttccagaaaggctccgaccacagtcctttgcgggtttgttaatcagttagataccgcccgacggtttatgtggaacaaggttacaagagcaaagtgccctgtggatacagcatcaaatataccgtcggaggttttgttatgatttgcgtgggaatcgacgtcgccaaggacaagcacgactgcttcatcatcagttcagaaggggtagtcctcgcggacgtattcaccatccccaacaacacggagggtttcaactgcctgcttcagaaaatcagggcttgctctgccggccagggcagaataaaagtaggacttgaggctaccggacactacagctacaacattcttgggtttctgcttgacaacggcctggacagctttgtcattaaccccttgcacaccaacctgtaccggaaaagcctcagtctcagaaagacaaagaccgaccgtgtcgatgcgcgaacgattgcggctatgctcatgtctgatgtgggcctcaagccctacacagatacagcttaccacaacgaggaactgaagtcactgacaagataccgtttcgacaaggtaaaagaacgggcccagctcaagcagtcggtgtccagactggtgtgcatcctgttcccggagttggaaaagctggtgccaacgctgcatatggccacggtttatgcactgctggacgagttccccggggcgcgtcagattgccgacgccaatctgacgcatttaaaaactgttctccatgacgcttcaaaaggacgctacggccgggacaggaccatggagatacgcgaggccgccagagtctccgtcggctccgtgatgccggcaaagtctttggagctgcggcacaccatccggctgatccgtgagctggatgctgagatcgaagaaattgagtccgccatccggcacatcatggatcagcttcattcgccgatcacaactatccccggcatcggtaaccgcatgggcgcgatgattctggctgaggtcggcgacttctcccggtttgattctccggataaggttctggcctacgccgggctttcgccctccacataccaatccgggcagatggccaattgctatgcccatatggaaaagcgcggctccagatacctgcgctttgccatcttcaacgccgccaagtacgtttgccgctgggacccggcctttgccgcttaccttgccaagaagcgcgccgagggcaagcattacaacgtcgccatctctcatgccgccaagaagctggttcggcttatctatgctttggagaaatccagagaaccttatcgtttggcagcttaaattttctcacgatagctgatgcggcgtcttgacggacgtctgctttgctataccctttctatgccatcgggttttggcatccctcctcattttggggcttgacttttaatagttagt

SEQ ID NO: 3517 - DNA, 1407 bp, unidentified
  source 1..1407: mol_type = unassigned DNA; note = element_527c93c
  misc_feature 1: note = core
  misc_feature 2..91: note = LE
  misc_feature 92..1129: note = CDS
  misc_feature 1130..1407: note = RE
  misc_feature 1160..1399: note = bridgeRNA
caatgggatggacgcccccatcctcaacggcatcaatcgtgccaaagtggaagtgttctgcaaccactgagagagaatgggagcgtccccgatgaatgttacagctgtcgtaattgatttggcgaagaacgtactgcaggtgcatggaatcgatgcgcgagggaaggtcgtcttgcgcaggcagctgcggcgggatttggtgatggcgttctttgcacagctgccgccgtgcctcattggcatggaagcctgtgcgagcgcgcatcattggggtcgttcgcttgagcgcttcgggcacacggtgcgtctcatggcagcgcagttcgtcaagccgtacgtgaaagcgaataagaacgacgtggcagatgcggaagccatctgtgaggccgtgacccgcccgaatatgcgcttcgtgccgatcaagagcatcgagcagcaggcggtcctgtcgctacaccgcgtacggcaggggttcgtcaaggcacgcacggcccaggcgaaccagatcaggggtttgctcggggagtttggtctgatcatcccgaagggtatctggcacattgctcagcgtgtacccgagctgctgcaggatgccagcaacgagctcccactggccttgcgccagctgatcgaccgcttgacctgtcatctgaaggaactcgaccgacaggttcgtgagctcgagcgcgagatccttgcctggcacagaaccagcgacctcagccgcaagctcgagcaaatccccgggatcggaccactcgcggccaccgcactggttgcgtcgatcgccaatgcgaggagctttgacaatggccggcaagtctcggcttggcttgggctggtgccgcgacagaagtccagcggcggaaaacccacgctactcgggatcagcaagcggggtgacgtgtacctgcgcaccctgctgatccatggagcccgctcggccatcctcgcggccaggcgccgcaatgacagcaagaacggctggctgaccgctctgcttaaccgtcggcaccctaacatcgccgccgtggcactagcctacaagaacgtccgaaccgtgtgggcgttgctggcgcacggtcgagactttagacccgactacgtgccgctgcgtacagccgcctaatcgctcgttacgaggacaggatcacccaccacagattgctcaggcgatcacgcagtgatggcaaagcaggttagaccggggttggcacaacccaaaatgaccggggcacttcgagtgcgagataccgattgggagccagcccgccgaacccatcagggacagcggcaaatgccgcacaaaaagtccggatgtacgggtgcacgagctccgccatcacgaaacctctccctgccagccatcaagactgaaagcctggcaaggctgggggcgtccatgta

SEQ ID NO: 3518 - DNA, 1215 bp, unidentified
  source 1..1215: mol_type = unassigned DNA; note = element_527e598
  misc_feature 1..2: note = core
  misc_feature 3..194: note = LE
  misc_feature 195..1181: note = CDS
  misc_feature 1182..1215: note = RE
  misc_feature 12..200: note = bridgeRNA
cttgtatctctcacatattggtgattagctgtcaccaataaaaacctgaggctaatgagtttgagcccaaccttagcataagatgctgcgttgtagatgaaaccttagccttattcatgtctccttaaactgaatggtatccaagcgctcttagttttcaagatgacgctgtatgtacaagggaagaaaaagagatgaatgcagttattggtattgatgtaagtaaggataagtttgacacctgctggttgagagatgccagcactgggaaaaagaaatcaaaatcgcttagaaacaatagcaaagggtatcaagaaatacatcagtggttacttaagaatgttgaatgcgaagcaccagatattttgatcgtagtggagcccacaaatgtctaccacgaagccctgattcactttctttatgaaaaagggtttaaaatttttctggccaactctggaaaagcgaaaaaatttgcagagtccctttgcatgactcataagacagataaaagtgatgccgcgatgttggcttactatggtcatgcgcaggctgcccaagcaacattatgggagccagaaccaaaggaaatcaggcagttaaaagcaatgatgcgtcgactggatgccttggagaaagatcttcagcgggaaaaaaacagacgtgaaacaagtgaaattagcgatgtctccgagcgtgttttacaatcattggataacatgattaaggcgctggaagatgaaattgagcagctagaaaatgatatagacaatcacatagatcatgatagtcatctgaagaaaaatagagagctattgaaaagcataagtgggattggcccagttttgtcgcgggaattgacttatcttttcgcagcaaaacgttttaaaaatgctaaacaggttgcagcttatttaggccttattccgaagcagcatgagtcaggtaaactgaaagggcgcacgacgataagcaaggttggcccttcaagattacgtgcaaagttatatatggctgcagtcgttgcgagcatgtgcaatcctgacataaaagcccaaaaagataggctaatgaacgctgggaagtgcaagatggaagcactcggtgcagccatgagaaagcttgtccaaatttgttttggtgttatcaagcaccaggccaaataccaacctcaaatcgcttaatgaagtgattgagattgggtttgagagatggtat

SEQ ID NO: 3519 - DNA, 1402 bp, unidentified
  source 1..1402: mol_type = unassigned DNA; note = element_5295f66
  misc_feature 1: note = core
  misc_feature 2..228: note = LE
  misc_feature 229..1389: note = CDS
  misc_feature 1390..1402: note = RE
  misc_feature 14..240: note = bridgeRNA
ctacttagagacttggcccaggatcggtgtctggccagactcggtccaggtgcccggcgggacgctctctcattgcggctgcccgctagcgtcattggtgtggctctcatctggcctgcggtctcgccgggcaccgtgcgaggagaggctcgaaaggggtttgcccagctcgaagtagcagtgccctccttgcctgacatcactgggatgtagcagggagggaacaaggtgggcgtgattaccggcatggacccgcataagcgctcggccaccatcgaggtggtggacgagcgggccgcggtgctggcgggtggcaggttcggcacggacaaggccggctatgcgcagatgctcgccgcgggccggaagttccgcggccggctgtgggcggttgagggctgcaatggaatcggcaagcacatcgcgcaccgcctggtgcacgacggcgagaccgtggccggtgtgccgccgaggctgtcagcccgggtgcgggtcttcgctacgggcaacggccgcaaaaccggccctgccggcgcccgcccggtggctatggtcgcgctgcgcagccccggcctggtccgggtccaggtcgacgatgacctggtcgtgatgggcatgctcgctgaccgccgcgacgagctgggccgggcccgcacccagacgatcaaccggctgcaccgcctgctgccggggctgtttcccggcggggcgaagcagttcctgtccgcgcagcaggccagagcgatgctcgtcacgatccggccaggggacctgcccggcaagacccgccgccgcctcgccgctgagctgatcagtgagctcgaggtcatcgataagaagatcaaggcgatcaggaaagaactcaccgccctggtcatcgcccgtggatccacgctgctggaactgcacggcatcggtccctccagcgccgcccggctgctcgccgacgtcggcgacatccaccgcttcgccgaccgcggcaagttcgcgtcccgggacggcaccgcaccgctggatgcttcctccggcaaccaggaacgccaccgtctgtcgcgggcaggcaaccggcggaccagccgcgcgctgcacatcatggccgtggtccagctgcgtaaccagacccaaggccgcgcctattacgacgcgcgcaaggccggcgggatgccctcaatgatggccatgcgcgcactcagacggcggctatccaacgtggtgttcgcacgcatgctcgccgaccagaaacgacgggaagcagcgggcccgggcgggcaaccggggacgactactgactccagcgtgaccgacctgaccccggacatcggctcttcggagaagccacgtcccgggcccgccacccagtctagaacgatcctccaggcagtcccttgacataaaggggtgc

SEQ ID NO: 3520 - DNA, 1366 bp, unidentified
  source 1..1366: mol_type = unassigned DNA; note = element_52aa2dc
  misc_feature 1..2: note = core
  misc_feature 3..82: note = LE
  misc_feature 83..1108: note = CDS
  misc_feature 1109..1366: note = RE
  misc_feature 1085..1353: note = bridgeRNA
tgatggattggatgcccctcctgccggttcattattgaaccgtccgagtagtttctgctcgggtaaattgcaggaggaagaaatgactgaactattcattgttggtgtcgacttggcgaaacgcgttttccaagttcatggtgtcacatccaccggtgaagttttgctgcgaaaaaagctgagccgtgcccagttcgccagatttctcgcggagataccgccttgcattgttgcgatggaagcatgtgcatcggctcactactggggtcgagaagcacattctgcgggtcatgaggtgcggctggtaccagctgcttacgtgaagccgttcgttaaacggcacaagagtgatgctgttgatgctgaagccatttcggaagcggccttgcggccatcaatgcggtttgtaccggttaagaccccggagcagcaggctcaggcaatgctgtttcgcactcgggagacattcgttcgtcagcgaacgcaaactatcaacgcgttgcgtgcgcatcttgcggaattcggggttatccttcggctcagaatccgcaatccagacacatttaggcgtgaggtcgacgaaaaggtcgtagcgttgccggaactggcccgatccttggcagagcgcctattggaacagatcgcaacgattagcgaacaggtctctgctctcgatctggacatcaaggcacatgccaggtcctctcacgacgcacaattgatgcaaaccatgcccggcgttggtccgatgtctgcgatggcggttgaagccttttgcccgccagtgaagaacttccgaagcgggcgcgatttcgctgcgtggctaggtctcgttcctcggcaacattccactggtggcaaggaacggctgggacgcgtgacaaagatgggccagaaggatgtgaggcggctactgatcatcggtgcgatgtctgtgatcaactcgattgaacgacgaaagcgttgtgtcgaaccctggctcgcccgtatgcttgagacacggcccagaatggtcgtggcggtcgcattggcaaatcgtatggcgagacggctttgggcaatgctgacgacaggccaacaataccgaattccgggcgctgctgtgtaacgcagatcccggattccggcaggtatgtgaggacgaaaggatcgaataaggaaagcggatcgacgagatcgagtttgggaaaaccagtgcaacccttcgcggctttgagcccgataaactgatttggacccgagctcgcgcatctccataagggccagcggtcacttgcaccgcacaaacaggccggacacgtgacagcacccgatcatgctatccagacctcgaaacttccctctcatagaccggggcatccacacg

SEQ ID NO: 3521 - DNA, 1480 bp, unidentified
  source 1..1480: mol_type = unassigned DNA; note = element_52aae89
  misc_feature 1..2: note = core
  misc_feature 3..236: note = LE
  misc_feature 237..1460: note = CDS
  misc_feature 1461..1480: note = RE
  misc_feature 7..233: note = bridgeRNA
ctaatgggggtgtatcggcttgttgtggcaggctggttcctgagctgccggccggtgagcactcctgccccctggagcgtttgattcctggccagagatcgtgccccggccggtcggtgagggaggagacctggagcactgttggggtgtcgtgccatcgagcactgatccattaggacttcgccaggttcccttcggctcgacaggccacgtaggcattggaaggagaaggagcaatgatctttgttggcaatgattgggctgaggcccatcacgacgtgtgggtgatggacgagaccggtagccaggtggcgtatcgtcggttgtccgagggcatcgaaggcgtatccgggttccatggattggtgggcgggttcgtctcggatcccgccgacgtcgttgtcgggatcgaaacggatcgaggcttgtgggtccatgccctggtcgcagccggctatcaggtgtatgtgatcaacccgtttgctgcatcgaggtatcgggatcggcaccacgtgtcgggtgcgaaatcggatcgtggcgacgccaagatgctcgctgatctggtccgcaccgaccggcatctccaccgccaggtcgccggcgacacgcccgaagcagagacgatcaaggtgctggctcgaacgcatcagacgatggtgtgggagaaacgccggcacacgaaccggctccggtcgatgatgcgcgagtactaccccgcagcgctcgaagcgttcaaggatctggcacaccgcgacgcgatagctgtgttgagtgctgcaccaaccccgatggcgggtgcccgactcaccaaaccccagatccgtgctgcgctcaaaaagggcggccgacaacggaacctcgaccggcgaacagccgagatccaagacgtgctccgtagccgccacctcgcaacaggcccgaggctcgaagaagggttcggaaccgccgccacagcgatcctggaggtcattgcaacgatcgacacgcagatcgccgagttggaaaccgaactcgcagaagtcttccacacgcacccggacgccgccatctacctgtcaatgccaggactcgcagatgtgctcggcgcccggatactcggcgagttcggagacgatccgaaccgctatgccaccgccaagtgtcgcagaaactatgcgggaacgtcgccgctgaccagagcgtcggggaacaccaaaaccgtcaccgcacgctacatcggcaacgaccgactcaaagacgttgcgctccgctgggcattcacatcgctgaaagccagcgaaggctctcggaactactacgacgaacgcagagccaaaggcgatcaccatcgcaaggccctccgagcattagcgaacaggctcgtcggaatcctgcacggctgtctggaacaccacgccacctacaacgaagacatcgcatgggcacaccgtcaacccgccatcgaagcgatcgccgcttgacatttacgaacaaggggtgt

SEQ ID NO: 3522 - DNA, 1589 bp, unidentified
  source 1..1589: mol_type = unassigned DNA; note = element_52acc2c
  misc_feature 1..4: note = core
  misc_feature 5..274: note = LE
  misc_feature 275..1474: note = CDS
  misc_feature 1475..1589: note = RE
  misc_feature 36..294: note = bridgeRNA
ttttagtaccataaaagtgtaagtgttaagcacatcattagtgctgtaacatttgcacttatttttttataataagggaagtaattggtctggcgtggtcttttttggattaaccacatccgtcataaaaaccgtcaaccaccccttattataagcgttcgattaagcaggttggaactcaaggatgagctttcgtgtaacgaactaaaatgaattgtaataagtgtggatggaaacaattacaaattttttagaatgtgaggaataacgctcaatgataagtgtaggtatcgatatttcaaaagaaaagagtaccgtttgtattttaaaaccatacggtgaaataatttccatgccttttgaaataaaacatgcagaaaaagcattgtcagaattaaccacgatgattttaagatttaacgaagaagttaaagttgtgatggaagctaccggaatctatcatctgccggtacttagttatttacaggaaaaaggaatttttgtagcagtgatcaatcctttcgagatgaaacagtatcgtaatcagggactaagatcggtaaaaacagacaaaaaggacgccattacaatagcgaactatggaatagattattggtttcggcttaggaaatatgaagtgaccgcggaaatttatcaggagcttaaaatattgggaagacaatatagtcattatatgtgtatgaggatagaaagtgtgcaatcattgacacatttactggattataccatgccgggtattaaaggactgctgaagggatggcaggatgccaatggcaaagacaaattatcggattttgttgaagaatattggcattttgataacataacaaatatgtcggaagaaaactttatcaatagttatgtgaactgggcgaaagaaaaaggataccatcaaagccaaaataaagccgtcaagatttattccctggcaaaagaaggtatccctacactgtctgcagatatggaatcaaccaaaataatgctacagcaggcagtaagcgtattgaaacaagtcaatacaactttgacaatcattttagcacgaatgaaggaattagccaagcgattaccggaataccctattgtaagagcaatgggtggagtaggtgatgtattggcaccaaaacttattgctgaaataggcgatataagaagatttcacagcggtaaagcattaattgcatatgccggcattgatgcaccaccgtatcaatccggacaattcgtaggaacgaatcgaaaaattagtaagcgaggatcgtcaaccctacgaaaaattggttatgaaaccatgcgcgttctaaaaacgcatggtgttcctgaagacagtgctgtatattggtatattctaaaaaaagaagctgaaggcaaagcgaaacgggtagcaaaaattgctggcctcaataaattcctgcgcatttattatgcaagggtaaaagaagtatatcaataaagaaagtgaatacatatttcaaggctggctgaataaatccagtcattttatgatgcaataaaactgaataaaaaattaaaatctgctaaaaaagttcttgatttttcttagcagg

SEQ ID NO: 3523 - DNA, 1426 bp, unidentified
  source 1..1426: mol_type = unassigned DNA; note = element_52bbb0e
  misc_feature 1: note = core
  misc_feature 2..124: note = LE
  misc_feature 125..1144: note = CDS
  misc_feature 1145..1426: note = RE
  misc_feature 1185..1426: note = bridgeRNA
taattgaatgaacgcgtcccaccccagatcgtaggagcaattggcggggatccttgtggttcgacggcatcaatatgcccaagtggaaaatctctgcatttccagtcagccggaggatttcgcaatgaagcttatgcctgttggtatcgacatcgcaaagaatgtttttcaagtgcactacatcgaccaggagacgggagagatcgtgaacaagccgataaagcgagcgcagttccttgaacatttcgcgaatcatgcccgatgcctgattgggatggaggcctgcggcggtgcacaccactgggcccggcaactcgcgaagctggggcatgaggtgaggctgatacctgcggaatacgtgaaagccttcaatgtccgtaacaaaaatggcgctgccgatgcaaaggccatttggcatgccgtacaacaaccggggaaacccgtgtcggtgaaaactgagatgcaacaggcaatgctggcgctgcaccgaatgcgcgagcaactcgtgaaatttcgcacgatgcggatcaatggcttgcgtggcttgttgacggaatacggcgaggtaatgagcagggggcgggctcaacttgaccgtgagatcccggcggcgtttgcacgcattgcggagcggttaccggcagcgctggtggacacgttacgtgagcagtggaacggactggcgaagctcgatcaacagattgccgagatcgaacggcgaatgcgtgactggaagaaagaggatgcggccgtgagagcaatcagcgagatcccaggtgtcggactactcacggcgacggcggcagtcgcgatgatgggcgatccaaaggcatttcgctcggggcgggaatttgcagcgtgggctggccttgttccaaagcagacgggctccggaggcaaggtaaacctgcatgggatcagcaagcggggcgatacctatctgcgcacgctattgattcacggtgcgagatctgtattgacccatgccaaagacccaggtccttgggttgatcagatcaagaagcgccgaccgatgaacgtaacagttgtcgctttggcgaacaagatcgcgcgaacaatctgggcagtgctggcgcgaggcaaggcgtacgagaagggatatgtgagcgtgagacctgcgtaagcggatctcgctcgatatgtgagtaatggttagcaaaagggtggacgtcgaaaggttgcgctggcaatagcgtgtgatggcaagacaggtaggaccgggactcgctaaacctggatcagaacaagagccttgagctcgtggtggtaatgaggtgcgagtcagcggattccataggggcccgcagcggatggtatggctgcaataaggccggatacatagctgcagaccttcctggcatgtcagatacacgcaatacttgcgcaaacgggacgcgttcataca

SEQ ID NO: 3524 - DNA, 1394 bp, unidentified
  source 1..1394: mol_type = unassigned DNA; note = element_52c23ef
  misc_feature 1: note = core
  misc_feature 2..92: note = LE
  misc_feature 93..1130: note = CDS
  misc_feature 1131..1394: note = RE
  misc_feature 1160..1386: note = bridgeRNA
taatggaatggacgcccccgtccgaaacggcatcgccgtgtcaaagtggtgaggctgtcgaaacaccaccttcatcggaggagggcgtcaccatgaacgttactacgatcggcattgacctcgccaagaacatcttccaggtccacggcgtgaatgagcacggcaagaccgtgttaaagaagcagctcaagcggcaccagatggtggcgttcttcgcgaaccttcctccctgcgtgatcggcatggaagcctgcgccagcgcccacttctgggcacgtaagctgcaggcgctcggccatacggtgcggctcatggctccccagttcgtcaagccctacgtgaagacgaacaagaacgacgttgccgatgcggaagccatatgtgaagccgtgtcacgtccaaacatgcggtttgtgcccatcaagaatgccgaccaacaggcggttctcgcattgcaccgcgcccgccaggggttcgtccgcgctcgcacggcgcaggccaaccagatccgtggactgctaggggaatttggtctcgtgatcccccaaggtatcagcagcattacgcaaatggtgcacgaactcatcgaagacgctgaccatgaattgccggggtcattccgcctgctgatacagcgcctgacggatcacctgaaggaacttgaccgacaggtcgaagagctcgagacgcagatcaaagcctggcatcacgcgaatgatgccagccgcaggctggcggccattcctggcatcggtccgatcacagccagtgccctggttgcgtcaatcggcgacgccagatccttcagcaacgcccggcaactggcggcctggctaggcctggtgccacgacagcattcgagtggaggcaagccaacactgctgggcatcacgaagcgcggcgatacctacttgcgtacgttaatggtgcacggcgcgcgggctgtcgtccgatattgcgttaacaaggatgatgcgttctcgggctggcttcaacgcctgctgacgcgccgtcacaagaacgtcgccgtggtggcagtcgccaacaggaacgcccgcattgcctgggctctgctcacgcaaggcactgcgttccggtcggattacgcgccgtccacaaacgccgagtaatccgatcgggttcagttaaggctcccccaggaggttgcttgggcaatcgtgacgtgatggcaagataggttggaccgggatcggaatactctgccctcccacaggcgcttcgagcgcgaggtggtgattagagcccgatcagcagattccatcagggacagaggcgttgctgtcgcctcctcaacagtccggatgtatggccgcaatctcaatcccatctgccgatcgttcgcgaaggccttgcaaaacgggggcgtccatgta

SEQ ID NO: 3525 - DNA, 1282 bp, unidentified
  source 1..1282: mol_type = unassigned DNA; note = element_52c33b4
  misc_feature 1..2: note = core
  misc_feature 3..318: note = LE
  misc_feature 319..1161: note = CDS
  misc_feature 1162..1282: note = RE
cttgtatgataaatatataaataattatataaaataccacacactcctttctctatatttcttatttttttcttttctgttcctattgcttttctcttcccttattttgtataattattttagggaaactgcggactttttatttttcttaaggagccctcgctacttttcaaaggagattattgccgctgttttatctttaacccttataggaaatttaatgtcactctagtcaatcctgcaaatgtcgccaattttagaaaatcttatggcagggattctaaaaacgacaggattgattccatcaatatcgctaaaatgctgctttcccgtgaatactcccttgttacacagagcgatattgaatatctttcattgaaaaaactcaacagaatcagagattcccttgtcaaacagaaaagtaaatgcaaaattttgctgaccagaaatctcgattccatattccctgaacttcacctgctgccttcaggcatccattctaaagctgtctatgcccttttgaagaaatatccttcttcagaagaaatagccgccttaggaattgatgttttaacaaatattttaaaaactaattccagggggcatttctgtgaaaagactgcctgtattatcaaaagtcaggctaaatcttctgtcggttttgaggacatctccttaagttttcatatttcacagctgatttcctctattgagctgttggaagagcagataaggaatactgaaaagcagatcaatgccatcattgaaaagcttaaacctgttatcctgtctattcctggcataagcaatgttgcctgtgcctgcattctgggagaaatcggaaatatatcaagattccgttccccttcaaagctattagcatttgcaggcttagatcctaaagtcagacagtcagggcagttcagagccttatcatgccgaatgtcaaaacgtggctcaaaatatttacgatattccctaatctacactgcctggaatgctgtccgaaacaatgaagttttcagtaattactatgctcttaaacgttcacaggggaaaaatcattacaaggcactggggcatgttgcccataagcttgtaagagttatttacagacttatgaaagataatattccatttgatgctgagcagcttatttaaaaaaactatacaaaatatctaagaaaatctattttcaataggttaatttaaattcgcccaaaattcaagatcaaaaatttaaaaattttttttaaaaagggcttgacaattcatagttgat

SEQ ID NO: 3526 - DNA, 1772 bp, unidentified
  source 1..1772: mol_type = unassigned DNA; note = element_52ddd46
  misc_feature 1: note = core
  misc_feature 2..121: note = LE
  misc_feature 122..1399: note = CDS
  misc_feature 1400..1772: note = RE
  misc_feature 1429..1585: note = bridgeRNA
aaggagcattcctgttagaagttttttcggggacttgaataaaaaaagccctcttggtatgattcgggggtgtcaatcgcacgaaattgacccctaatttggataccaaggaggactatacatgcattctatctcaaacaagaagatgaatcaagtcaccgatcaaacgctggttgttggcatggatatcgcgaaaaagaagcattatgcctgctttgtggatgagcgagggagggtgttaaaaaagtcgtttcccgttctgcaatcgaaagaaggattggaatggttgtaccagtgtatcgtggaagccatgaaggaatttggaaaaactgaggtgatcgttggcatcgagccaacgggacattattggctgaatctcgcctattttcttgatgagaaaggcatccctctcgtcatgacaaacccgatgcacgtgaagcgatccaaagagctggacgataaccttccaaccaagcatgatgcgaaagatgcgctcgtcattgcccggttagtgaaagacggccgattcagctatccgcgcattctcaaagggatggaagcggagctgcgcgttggagcgacatttcgctccaaattggtggaagaacagggagcagttcgaaatcagatgattcgctggctcgatcggtattttccagagtttacgcaagtctttccgtcgtttgggaaaatggcgctcgcggtactggaatatacgccatttccgagtgatctagcaggaaaagagctagaagaggttctcgccctttaccggcaaagcgagggattacaatcgccgcaaaggccgaaagcgaagaagctcatagaacgggcccaacactccattggcgtaacggaaggacaacagatggcccgtatcgaaatcgccacacttgtccgccggtaccgccaattggaggaagaaatcgaggcactgacccagcaactgacggaacttgtgcaaacatccgtggaatacgaatggctcaaaacggtttcgggcttaggggatgcgactatcgtggaactgttatcggaaatcgggagtttttcccactatcaggatccgcgccaattattgaaacttgcgggcctggcactgcgggaacattcctccggccaccacaaagggcaaaaacggatctcgaagcgtggaagaaggcggttgcgcgccctcctcttccgcgtgatgatgccgatgatccgccacaacgaagcgtttcgacagttacatgaatattacacgacacggcccgataatccgttgcgcaagaagcaatcgattgtggtgttatgtgggaaattactgaaggtactgcacgcggtgtgtacgaagcaccaagcgttcgatgcgaagcgaatgatgcaggacatctttggtctcgaaacggcggcttgatgcctgcatgccttgtgattccctagacaataaggatgacacggagaagctggcatgataccatccattcgaccttgagtccctaaaggagcttagctggcctctgcctgatgactagaccgaacgaaggaatgtaggcacaaggatgcccagagacatgggagggttcgtcatcatcagcgatgcagagatccaagatgcatcccatacgcttccctcactacaaccaaatttaaccagtagtgaccgcgaagcatacccacccaatgtaagatatacacatatttaagaaataatgttaggaactttgtcgaaaaatatttttttgacacccctgaaacggctacaaccgttgatatatcaacatttatag

SEQ ID NO: 3527 - DNA, 1439 bp, unidentified
  source 1..1439: mol_type = unassigned DNA; note = element_52de529
  misc_feature 1..2: note = core
  misc_feature 3..134: note = LE
  misc_feature 135..1172: note = CDS
  misc_feature 1173..1439: note = RE
  misc_feature 1210..1434: note = bridgeRNA
agatggggtaacgggccggtgtcgagcccctccctccaggagcttggcgggaagggtggtcgtccctcaaactgatgatgtcaagacaatcggcgtcgtgctttcgcgcgcgccaagcatcaatggggacgaccatggaacagtatgcaggattggacgtgtcgttggaaagcaccagcgtgtgcgttgtcgattctacggggcgcgttatccgggaagcgaaggttttgagcgaaccggaggcattgatcggctggtttcaagagcacggtacaccgatgacgcgaatcggcctggaggcgggtccgctgtcgcaatggctctacgcggcgatggagaacgcaggactgccagtggaattgctggagacacgccatgtgcgtgcagctttcaaggcgatgacgatcaagacggatcgcaaggacgcgctcggcatcgcccatctgatgcggatgggatggttccgaccggttcactgcaagtcggttccggcacaggaggtccgtgcgttgctcaccgcccgcaagctcctgcaaaacaagcgtatcgatatcgagatgagcctacggggtatcctgcgcggattcggtctaaaggtcggcccgacgacaccaaagaacttcgagggccgcatccatgagcttgtcgaggggcacacggtcctctcccagatcgctcatgccatgctgacggcacgggccgccatcatgaaggagttcaaggcgatcgagagccgccttctggcgcagtcgcgtcgcgatgagcgcgttcgcaggctgatgtccacgccaggtgtcggcgccttcacggcgctcactttcgttgcggcaatcgacgatcccgaacggttcggatcctccaggatggttggcgcccatttcggcctcacgccaagaaaataccagtccggcgagacggacgtcacgggccggatatcgaaggtcggcgatcatgctgtcagggtcgcgctctacgaggctgcgaatatcattctgacgcgatcagcgaagacctcggctctgaagagctgggcgcaggcactcgcaaaacgcgccggcatgaagaaggcaaaggtggcactggcccgcaagcttgctgttgtgctgcaccagatgctcaaatccggcagccggttctcgctcaccggtgtcccgcaatcggtcgcagcatgacggggggagcacggttgaccataaaaggaatagaagggtctcgatagcagacttcttcgtgcagggtccccccgccgggacgagggaacgatcaggccgcttattcgggagcagcgcttcggcgactgcgtgtctctagattggccggtcgccccttatcagatcccatcatgcagcagctgcgcgctgactgcggacagaagcaagaccttggcgggacggatcacgcaactgaatgagggttgacaatcgaaggcccgttacaga

SEQ ID NO: 3528 - DNA, 1595 bp, unidentified
  source 1..1595: mol_type = unassigned DNA; note = element_52ea201
  misc_feature 1: note = core
  misc_feature 2..278: note = LE
  misc_feature 279..1493: note = CDS
  misc_feature 1494..1595: note = RE
  misc_feature 16..301: note = bridgeRNA
tcctacaatatatttatggtggttaggtacctttcagccagaaaggactaaccgttcattgcttaagctgttagaatggtgtggtatggtgtgacgaagttctccttggacccgtttggcgtccgtaagaaagcccgtcagccagccatccattcgcagccgttcggtttatgcaggttggactgcctttgtgtacgttccgtgtgatacccaggagattgaataagcaatggaaaccgctggtaccatgcaatatttttcttcatggaggtacgtgtatgttaaacgcagtcggtattgatgtttcaaagggtagaagcaccgtggcggtcctgcagccgggaggtactgtcatcaggaaacccttcgttgttaaacactcaccctgtgagcttaaaagccttgccgagtacatcctgtcgctcagtggggaaaccaaagcagtgatggaatgtaccggtcggtatcatgagcctatcctgaaagttcttaatgaagctggtgtctttgtcagcgccgtcaatcctcatctgatcaagaactatggtaacaattcgctccgcagggtcaaatccgatcccgccgatgcaaagaagatcgccagttatactcttgacagttgggctgatctgcgtcagtattcaagtatggatactacacgcactcaactgaaaacactcaatgcgcagatggactttttcatcaagcaaaaggtatctgccagaaacaacctcatctctcttctggatatgacctatcctggagtgaacaaactgttcgatagtcccacacgcagtgatggaactgagaaatgggtcgattacgcatcttccttctggcatgtcgattgtgtacgcaagatcggcctcaaagcatttaccgaacgttaccgggccttctgcaaacggcacggttacaactttcaacccggcaagccggaagagctttacaatgcctcaaaggaacttgtagctgtgtttccgaaggaccaggcgtacaaggacctgatccaggctggtattctccagttccacactgcttctgctaatgttgaacgcatgcgtaaggctatgaatgaacttgcgtcttcgctgcctgaatatgaaaccgtcctttccattcgcggtgttggtgctacttttggcccacaacttatggctgagatcggagacatcactcgctttactcatcgcgaagcattgactgcttttgcaggcgtcgatcccggagtaaatgaatccggcgacttcaagtctaagagcaacagagcttctaaagtaggctctgcccggcttaggaagaccttgttcctcataatgttaacgctccttcaaactcgccctgaaaacgatcccgtatacagatttcttgacaaaaagcgttcggaaggcaaaccttatcaggtttacatgaccgctgggtgtaacaaattcctgaggatctattacggtaaagtcaaagagtgtatggctaatcagcccaaaaacgattaatctgcctgattcatatcattacctcaagccggctttatggcggctttgtttgtgtgtcagaaaccgtccttcgaatttttgcttgactttttattagcaggc

SEQ ID NO: 3529 - DNA, 1376 bp, unidentified
  source 1..1376: mol_type = unassigned DNA; note = element_52ec162
  misc_feature 1..2: note = core
  misc_feature 3..81: note = LE
  misc_feature 82..1101: note = CDS
  misc_feature 1102..1376: note = RE
  misc_feature 1152..1371: note = bridgeRNA
ataatgaaatggacgctccaacttttacggcatcaaagtgcctaaatgtgagtgttaaaactcagaagaaggagcgtccacatgaaagtatctactcttggtatcgacctggcaaaaaatgttttccagcttcatggtgtcggctgcaacggtcaaactgttcttaagaagaaactcacccgcgataaattcctcccttttctcatgcaacttgaaccttgcctgattggcatggaggcctgtgcttccagtcatcattttgcgcgtgttttacggcagtatgggcatgaggttaaactcattccccctcagtatgtgaaaccttatgtcaaaacgaataagacagatgccgctgatgcagaagccatttgtgaagctgttgcacggtctaatatgcgttttgttcagattaaaacggcagagcaacaagctattctggtgctgcataccgagcgaaacatccttatccgcgaacgcactgcttgtgctaatagtatgcgggccattttggccgaatttggcatcatcatgcctcgcacattaagtcagctgtataagaaaatccctgaaatattggaagaatatgataacgagttatcaccttttgtccgttgtagtgtcgcgcgtcaacttgaacaccttcagggtgtggaagatcaaatcacgttgatcgaacaagaacttagccgttgggcaaaaacacaacccgcctgccagcgggtcatgaaagtccccggagtgggattgatgacggcgacataccttgtggcgtcagtggtgaatgggcaacaatttcattcagtgaaacaatttgccgcctggttgggattggtgccgagagagttctcaagtggcggtaagcagagattgggccgaatcagcaaaagaggtgaccgctatttccgttatcttgtggtccatggtgcgcgggcagttgcagccgttattgtgagacacaaagacaatatgccgtggctttacaggctgttgaataaaaaggcctataacgtagccgttgtggcacaagccaataaaacggcacgtattttgtggtcgatgctggttcatcatacggaatatcgaaccttatccgtggtttgagataatctcaaacacggataaggctcaagaacaaaagtgaatacgtttcaggtaattgcaagtgtaattattgagatggcaaaacaggtaagaccgcaagtgagagactccgtgagccgccggggcatttggcccgtaaggatgacaggaactcacttggcggatttcatcatggttcgggcgcaatcgcgcccataaagaaaccggatatatggctgcaatacctgagcgctattttcaagaaaaaacacttggtttattgggagcgtccatat

SEQ ID NO: 3530 - DNA, 1416 bp, unidentified
  source 1..1416: mol_type = unassigned DNA; note = element_52eee75
  misc_feature 1: note = core
  misc_feature 2..62: note = LE
  misc_feature 63..1100: note = CDS
  misc_feature 1101..1416: note = RE
  misc_feature 1190..1410: note = bridgeRNA
taatgagatggtccgccgccgagtagattacaactcggtagtcacacaaaggaggatggtctatggacatcgcatcaatcggcatcgatctgggcaagaccaccttccacctggttgcattaggagagcgaagtaaggttctgttgcgtaagaaattctcacgttcgcaacttctggtctacacagccatgctgccccactcactgatcgggctggaggcgtgctcgggagcacactttctgggaggcaaactgcgcgaacaggggcaccatgtgcggctgattccggcgcagtttgtgaagccctatcgcaagtccaacaagaacgatttcctcgatgccgaggcgatcgccgaagccgtgaccaaacagaacatgcgctttgcgcagctcaagacccaggagcaactcgactggcaggccctgcaccgtgtgcgggatcggttggtgcagcgtcgcaccgcactcatcaatgagattcgtgggttcctactggaacgcgggatcgcttttgcagcccagcccattcacctgcgaaagaacctccccggagtcatcgaagatgccgaacagaatctgagcccacgtctgcgctggctgctggatcgcatgtggcaagagtggaaacagattgagatcgacgtcgcggcggttaccgaggagattgaacgcatcagtaaggacgacgcccgctgccggcaactgcggcagatcccgggcttcggaccgctgatctccaccgccactgtggctgctatcggcaacggctgtgcttttcgtcggggacgtgatttcgccgcttgggtgggagtggtgccgcgacagcactccaccggtggcaagcagaaactgtacggcatcagcaagcgcgggaacgtctacctgcgccgcatgctgatccacggtgctcgctcagtattgtttcgcgtcaagtacaacaccggaggattcggacaatgggtgcgtaggctggcacagcgtgctcccagcaacaaggttgtggttgctatcgccaacaagctagcacgcattgcctgggccgtgttgtccagcggccgagactaccgacatcaacccctgcagcaactggccgccgcatgacggccgtggaaaagacgctgcgcttggaaagcacaaaacgctttccactttcccaccgccacgacgacgagagataggttcagttctaccaagttctgctgagaagagaagaagacgaaaagaacagcccaatggcgtgccggaaaacctgatggcgaaaatgcgtccctggtgaccgagggatttataaggaccggcacgtgcgtagcatcatcgagtgcccggagaacattctccacctagaggccgaatacatttacgcggactgtctcttcgccagcttcaaacctcttgcagttcagaggcggaccataca

SEQ ID NO: 3531 - DNA, 1499 bp, unidentified
  source 1..1499: mol_type = unassigned DNA; note = element_530054a
  misc_feature 1..2: note = core
  misc_feature 3..202: note = LE
  misc_feature 203..1477: note = CDS
  misc_feature 1478..1499: note = RE
  misc_feature 6..202: note = bridgeRNA
ctgatggctttaccctcctgagtcatggggtctccccctgggaacgctttggttgcttgtcccttgaggactgagatgagacggcgtcccagggggacggccccgcaggcccgacgcccacaagggtgtcgtccctcgaggactggtccatcagcacggcgccgtgcctgcaccggtgtgtcggtcgagcgaaggaggcatggtgcttgctgttgggatcgactgggccgaggcgttccacctggtcgccctgggccgccccggcgagggggtgatcggggtccgccgggtcgagcacaccccggccgcggtggcggcgctgctggccgacatcgccgccttggagcccgacccggccgaggtccgcgtggtgctggagacccgccacggtgtgctggtcgagtggctggtcgatgccgggttcacggtgctgccggtcaaccccgacctgatcgcgcggcgccgcggcccggcccgcaagaaggatgacgccgaggacgcccgcctggcctgcctgctggcgcttgaccgctacaccagcttgcggccgctgctgccccacggcgagttggccgccgagctgcgggcgatcgcccgcgatgacgaacgcgccgcccgtgaccagcgccgcctgctcaaccggctgcgccaggacctgctcagcaccttcccggccgccctgcagctggccggtgaggagctgggcgcgccgaccatcctcaagctgctggcgcgctggccgaccgccgccgcgctgggcaccgcaacccgacatgagctggtcgccttcgcccgaggggcccaccacggctggcccgagcgcctggccgaccaggtcgccgcggcgctggccacagaccagttcaccccgcgggactacctggtccgcgccaaggccgacacgatccgcctggccgccacccagcttttggccatcgccacccagcgtcgcgtctgggagcgcaggatgggcacgctgctgctgggcgctccccgccgcggccgcgccaacaccccacgccaagacgagctcgaccaggggcaggcgttccctggcggcgaggtctacctgagctttcccggcctcggtgaccgcctcgccgccagggtcgccggcgagatcggcgaccatccccaacagttcgggtcgccgaacgcgctggcatgctacgccggcaaggcctcggtcacccgccgttccggcaagagcgagctggtggtcgcctgccggctggcctgcaaccgctacctggcaggcgcggtgcagcagtgggcgttttgcagcttgcgggaatcgggctgggcgcgggcgttctatgacgcccaacgcgcccgcggcaagacccaccaggccgccctgcgagccctcggcaaccgctggctggaggtgctgtggcactgcctgcgcaagggcgtgcgctatgacgaggccacccacgtcgccaaccgcaaccgcgccctcggtaaggccgcttgaaaccgtggttgacaaagggtgt

SEQ ID NO: 3532 - DNA, 1462 bp, unidentified
  source 1..1462: mol_type = unassigned DNA; note = element_530081e
  misc_feature 1: note = core
  misc_feature 2..250: note = LE
  misc_feature 251..1195: note = CDS
  misc_feature 1196..1462: note = RE
  misc_feature 41..221: note = bridgeRNA
cgttatgttgttgacagcccctaaaagaggatcatagggactgtcggccgaccagcctcggcatggtgtcttgcccctgcttaaccaatagtccggggggtgttgccaccgaggctgggatggcagcagggtgattgctgatgaggggcgcggcgccagaaaatggacgcctgtcataacgtggatgtaagactttgctaccgacggttggtcgaccttggacaaaaactagttcaaaggagcactagccatgatcacctcagacgtggacattttcttcggactcgacgtggggaaaacagaccactgggcctgcgccgtcaccaaagacggaaccaaaatctggaacaagaccctacccaacgacgaagccaaacttgtctcggtctaccagaaactcagcgcccagggcaccgttctcgtggtcgtggatcagccagccaccatcggcgccctcgctgttgctgtcgcccagcacatgggaatcaccgttgcctatttaccgggtctgccgatgcgacgtatcgcagatatgtatcccgggacggcgaaaaccgacgaaaaggacgcgttcattatcgctgacgcggcccgcaccatgccgcacacgctgcgcagcattcagctctccgacgaggacgaagccaccctgggcatgctcaccggattcgatctggatctagcacggcagatcacccaaaccagcaacaagatccgcggactcttcacccaaatccacccgccactagaacgggtcctaggcccatggctggaacacgacgcggtgctcgaagtcctcgcctcctggccgacaccggcgcaactgaagcatgccggccaagccaggatcgacgcgaagctgaagaaatacggagcccgtcggcacaccgcctgggccgggaccatcattgacgccctggaagagcagagcgtcatcgtggtcggcaccgacgccgcaggactggtcatcccgcacctggcccggcaactgatctcgttgcatgcccagcgtgtggacgtggccacgcacctcgaagccatggtggaggcccaccctctttaccaggtcctgacatccatgccaggggtcgccgtcaggaccgccgcgatcatcatcgccgagacctccggcaagactttcaccagtgccgcatctctgtcttcttacgccggcctggcaccaaccacccgctagtccggcacgtcgatcaaatccgagcgcgtcagccattcaggcaacaaacggctgaagcgagcgcttttcctctcggcgttcgcgtcgatcaggttcgatccgaccagccgggcctattatgaccggaaacgagcccagggcaagcgccaaaaccaagctctgatcgcactggcccaccgacgactcacggtcctgttcgccatgatccgtgacggctcactctatgatgttccggaactaaaaattgcttgacacagaacatagggg

SEQ ID NO: 3533 - DNA, 1402 bp, unidentified
  source 1..1402: mol_type = unassigned DNA; note = element_5308d2f
  misc_feature 1: note = core
  misc_feature 2..150: note = LE
  misc_feature 151..1128: note = CDS
  misc_feature 1129..1402: note = RE
  misc_feature 1177..1397: note = bridgeRNA
caatgggatggagtcctccccaccctacactggcgtcattgcgccactctggtgggtgagtgcatcacttaccagcctgaggatgaggagaactccccatgaacattacccgggtcggcgtcgatatcgcaaagtccgtcttccacgtccatggcgtggaccgccatgaccaggtgcagtggcgcggaaattactcacgtggcaagtggctatcgtcaaacgcgtccctgtcggtgccgtgatcggcatggagcctgtgcctccgcccaccattgggcacgtgagctgcaggcacgcggttatcacgtcacgttgatcgccgctcagttcgtcaagccctacgtgaagagccacaagaacgaccgcgtcgatgccgaggccatctgtgaggccatgggccgaccgaacatgcgcttcgtggcggtcaagaccgtcgctcagcaagatgtccaggcagcgcaccggatccgcgaagagctcgttcaccagcgaacggccaaggccaaccagatacgcggtctgataggggagaacggactcgtggctccggtcggtatcggtcaactgcgcaccgccttgccacgctggctggaagatgccgggaacggcctgaccgataccttccgcgtgctgctggctggcctcgccgaggatcttcgccacctggatgaccgcattgccacggtcacggcgggcatcgagaagcaggcgaaagccaatcccgtaacgaaacacctgatgtcgctgcggggtgtcggtccactgacggccagcgccttggccggtgctctgggcgatggccaggctttccgatgtggtcgggactttgcggcttctcttggcctgacgcctcgacaacacagtaccggtggacgagaccacttgctgggtatcagcaagcgaggcgacagttacctacgcaagttactggtgcatggcgccagagctgttttccgccatgtagagcaccaggaggacggtctgagtcactggatcaggcaactggctgagcgcaagcatggcaatgtggccgtcgctgcgctcgccaacaagacagcacgcattgcctgggctatcacgcgccatgaggcagcctatgatcccgcgttggcagcccatgcagcgtaaatacagccagctgattttaaagaatttatcacagctatgacccaccaccacgattgctgagcatgctgcaagatggcgaacaggtcgaaccgacgtcagaaaacccctgtggatcgctgagccatagagctcgtgtaagcgtctgggagctgacgtgcggatagcccatcagggtccgatgccactggcatcattagagagaccggatatacgtgtgcagtcgtacctaccgtccatcgcgcctcatgctggcaaacggggaggactccatata

SEQ ID NO: 3534 - DNA, 1440 bp, unidentified
  source 1..1440: mol_type = unassigned DNA; note = element_5313717
  misc_feature 1..3: note = core
  misc_feature 4..234: note = LE
  misc_feature 235..1425: note = CDS
  misc_feature 1426..1440: note = RE
  misc_feature 13..198: note = bridgeRNA
gccctactttcttgtcttgggttcgaactggtcactcgtaagatcagcggggcccgggggctctgggtatggctgtcatggcggcgccgtgagatggctggaaaggcttggccgcccggagccccgcgacgactcgaccgccgattgggagatgcgactcgatcgctgtgtagggcaacgtcggcgaggtcgtctgctgggccttgaacgcgcgacgagctggcggaggtgaccgtgccccagatatgggccggagtggatatcggtaaggaacaccaccactgcgtggtgatcaacacgggcggcgaacgcctgctgtcccgccgggtcctgaacgacgagacggctttgctggaactgatcggggacgtcctggccctcgatgccgacgtgctgtgggcggtcgacctcaaccacggcggagccgccctgctgatcgggttgctgctcagccacgaccagctgatggtctacatcaccggcctgaccgtgcaccgcgcttcggcctcctaccggggtgaaggcaagacggacgccaaggacgcctttgtcatcgcggaccaggcccgcatgcgccgagacctgggcctgctgcggcccggcgacgagatcgccgtggacctgcgtaccctgaccggccgtcgcaccgatctgatgtgtgaccgcactcgccagatcaaccggttgagggcccaactgctggaaattttcccggcgttggagcgcgaactggagttgacgaacaaggggcccgttgtcctgctgacgggctatcagaccccggcggcgatccgtcgcagtggcacgaagcgcatcgagacgtggctgcgcaaccgcaaggtccgcagcgccgcggccctcgccaggacggcggtggaggccgctgaagcacagcacaccgcgctgcccggcgagaagctggccgccgcgatggtggtccgcctcgcgaagggggtgatggcccttgatgaggagatcgcggaagtcgataccctgatcgaggcccggtttcgcgaacatccgcacgccgaggtgatcctcagcctgcccggcatgggcaagcaattgggtgccgtgttcctggccgccaccggcggtgacatggacgccttcggcagcgccgaccggctcgccggtttcgcgggcctggcgccgactccgcgcgactccggccgcgtcagcggcaacctgcgccgaccacgtcgcttccaccgtgcgctgctcaacgcgatgtatctctctgcactctccagcctcaagagttgcccggcctcgaaggcgtactaccaacgcaaacgcgctgaggggaagggccacaaacaggcactgctggcacttgcgcgccggcgggtcaacgtcctgtgggccatgatccgcgacggagcgtgttaccaagccgcaccgcctgtcacagcagcggcttgacatcagcattgggaa

SEQ ID NO: 3535 - DNA, 1379 bp, unidentified
  source 1..1379: mol_type = unassigned DNA; note = element_5321b79
  misc_feature 1..2: note = core
  misc_feature 3..85: note = LE
  misc_feature 86..1117: note = CDS
  misc_feature 1118..1379: note = RE
  misc_feature 1150..1367: note = bridgeRNA
tgatgctgtggacggctcctccaccggcacgtaagtgccattgaggtggtcgccgttggggcggtcacgatcgggggaggcggacatgcaaaaggtcacaacgattggtctcgatatcgcgaagtcggtctttcaggttcacggcgtcgacgcagcaggcaacgtgatcatccgtcgccaactcaagcgccggtatgtcgttgcgttcttcgagaagctgccaccgtgcctcgtgggcatcgaagcctgcgcaacgtcgcaccattggtcgcgtgagctccaggcgctcggccatagggtgcgcctaatgccgccggcgtacgtgaagccgtacgtcaagcggcagaagaacgacgccgccgatgccgaggcgatttgcgaggcggtcaccagggcaaacatgcgattcgtggagaccaagacatcggagcagcagagctgcctgatgctccaccgcacccgccatctcttcatccggcagcagaccgccgtgatcaattcgatccgcgcgcatcttgccgagttcgggattgtggcgcgggttggacgcaacggcgtcgaagatttactcgatgtcgttgccgattccggcgatcaacgggtgcccgagctggcgcgcgcctgcctgactgttctgggcgctcagctgcggatgctaaaagcccagatcctggagtttgaccggcggatcatggcctggcaccgatcgaacgcgacgagcaagcggctcgatgagatccccggtgtcggtccggcgctcgccactgccctcgttggcagcgttgccgatcccacggcattccgctcggcacggcacttctcggcatgggtagggctcgtgcccaggcagcactcgagcgggggcaaggacaagctcggcagcatcagcaagcaaggcgaccgctatctgcggagcctctttacgacaggcgcactcgccgtcatccgctacgccaaaatccacggcaccaaacaccgcccttggctcgcggcgttgctagcgcggcggccgacgaaggtcgcggcgatcgccctagcgaataagatcgccagaatggcttgggccatgatgatcaagggtgagcgctacaaggaacccgccgcgctggcggcgtgacccgaaagcacgctgggcgatctggcgtgatgtgaaggttgggagggcgaacagcacgtaatgcagagccgatcgatccggcgatcaggacaacccacaatgtgccacgcatcatcgaatgcgaccttttgaccgggacctgatccgcggagggcattatggccagcggacatgtgatccgcgcaaacaggccgaacacatggctgcaccgaccagctctgcacgtgaagaaaacccttgccagccgggagccgtccacaca

SEQ ID NO: 3536 - DNA, 1653 bp, unidentified
  source 1..1653: mol_type = unassigned DNA; note = element_5324f4e
  misc_feature 1: note = core
  misc_feature 2..296: note = LE
  misc_feature 297..1481: note = CDS
  misc_feature 1482..1653: note = RE
  misc_feature 61..273: note = bridgeRNA
cctggtatattataaatgactcatttaattgatcatttacagtataccttctcctttctatcaaccttatttatacgtggttgataacggttaaatttccttgtaaaattgaatattgtgaatgtggatttgtaattttccctgtggcttgactactttagaaaggatcttaccacaccttattcctaaacaatgatgagtttgatgagtcttgaattcgtattttgcaccaggttttgtggtctaagtgtcgtggataccattttcacaattttatctagaaaggatgttttattatgaaattagttggtattgatattggtaagaataaacacttcttttgtgttatggataaagatactggtgaactttcagttaaccctgtttctttttctaataataaagaaggttttgatttccttatcaataaacttaagccttattctaaggaatctattttaatcggtatggaagataccgggcattatcattttgctttattaaagtatcttttaaatgatggttttactgttgctttaataaatcctaaaaccactgattttactcgtaaaatgcagggtggtattactaaaaatgatgaacttgatactttaactatttgtgatgttcttgatacacctgaacgtaagaaacaatatcgcattactaaggtgaatagctttgatctctatgaacaaaaacaattaactagacatcatcatcatttaaaagaagaattaaatgtctatactaatcgtttacaaaaatgtattgatatcgtttttcctgaattcaatagcttatttaaatctaaatatggctctgtctatatgaatgtgctcaaaacatttggtagtgctgaatctattgcaaacactgacatcagaactattcgcaaatgttttgacagcaatggtagaggaagatatatctctttaacacctgagcagttaaaagaatgtgccagatcttctattggtatttcttctgtagccgaagttattcagataaaacatttgatcagtcaaatagaactcatcaatgaacaaatcactgaaatagataaaaaaatagaagagttctccgtgaaaaacaactctcctatcctaaccatcccagggatttctcatttctctggtacttctattttagctgaattaggagatataagcaactataaaaagccttcacaaattataaaatttgcaggagtcgctccggtgcattatgaatctagccaatttactgcacaacataccgctatcactaagaaaggctctaaatatttaagaaagacattatatcagattatattgcctgtgattcataataatcctgtatttaaacaatattatgaattaaagatttctcaaggtaaaggacatcgctgtgctcaaggtcattgtgtaagaaaattgcttagaatcatttatcatctattaagtaccggaaaaaaatttgatccaaaactgttaagataactatgaactatacaaatttttaaaaatgccttttgaaaagttatttttgtcatgcccaaaatcacatataaatattcaattttcaaagttctatacaagttagctcataaaatcaataattttaaaattttcaaactttttcataaaaaactcttgatttttatatagttag

SEQ ID NO: 3537 - DNA, 1399 bp, unidentified
  source 1..1399: mol_type = unassigned DNA; note = element_53296ac
  misc_feature 1: note = core
  misc_feature 2..88: note = LE
  misc_feature 89..1126: note = CDS
  misc_feature 1127..1399: note = RE
  misc_feature 1171..1394: note = bridgeRNA
taatgggatggacgcccccttcctcgatgggcatgagagtgccagagtggaaattcaagttcaccactgagcgaagggagaatcggaaatgacgatcacgacggttgggctggatttggcgaagaacgtgattcaggtgcacgggatcgacgagcgaaacgaggcggtgctgaggaagcagctgaagcgccatcagctattggctgttttcgtcaaattggccccgtgtctgatcggcatggaagcgtgcggtagcgcccactattgggcaaggaaactgacaggccttggccacaccgtgaaattgatggcgccgcaattcgtgaaaccctacgtcaagaccaacaagaatgatgcggccgacgcagaagcgatctgcgaagcggtacgccggccgaacatgcgcttcgtacccatgaagaattgtgagcaacaggcaatcctgtcgctgcaccgggctcggcaaggattcgtaaaggcgcgaaccgcacaggcgaaccagatccgcggcctgctgttggagtttggcatcgtgatcccgaagggcatcgggcacatcgcaacgcgcctaccggaaatactagaggatggggcgaacgatttgcctggacggtttcgccagctgctgcggcggctcggggaacatctgaaggagatggaccggcaggtcattgaactggagcatgagattaccctgtggcaccgagagaacgaagccagccgcaaactcgcacaaatgcccggcatcggcccgatcacggcgagtgcgctgtgcgcctcggtgggcgatgcgaagtgcttcaagaacgggcgtcagatggcagcttggctcggactggttcccaagcatcaatccaccggcggcaaaacgatgctgctggggatcagcaagcgcggagatccttacgtgcgctcgttgctcgtccacggagcgagatcgatgattcgccacgcggagggcaagaccgaccagaccaccgcctggtttgcgcgactgcttgcgcggcgcaacaagaacatcaccgccgtggccattgcaaacaagaacgcacggatcgcgtgggcgctgttggcacatgaccgtgagttccggattgattacgcgcctgctggcgccaccgcgtaatcggcccagatccataacagactggaggcataacgcaggattcccaaccgattgcacaagtaatcatgacgtgatggaaagacaggtcagaccgcggctggttaaaccttaccgttagcaggagctaacagctcgcagcagtgatcaggcaccagccggcgaatcccatcagggtcagcggcaaaagccgcgtcaaagaccggatgtatgcatgcaatcttcaccttctcgccgtcatcgattgagcgcttggcaaaagggggcgtccatgta

SEQ ID NO: 3538 - DNA, 1589 bp, unidentified
  source 1..1589: mol_type = unassigned DNA; note = element_532e82c
  misc_feature 1..2: note = core
  misc_feature 3..248: note = LE
  misc_feature 249..1412: note = CDS
  misc_feature 1413..1589: note = RE
  misc_feature 3..227: note = bridgeRNA
ctcgtattataaagtagtagtgtttatagtccctctccaaggactgtatgctatactgcctaagatactgtggattgtttttttttctcctaccactcgatggttcgtgaaaggctccaaccacagtctctttgtatatttgttgatcagttagataccgcatgacggtttatttagaacgaggttacatgcgcaaggagtacctgtggctctaaacagtatcaaatactttacaaaggagttttcttatgatctatgttggaattgatgttgccaaaaataagcacgactgctttatcactgactcagatggtgcggtattattcaacccttttaccattcttaacaaccgtgagggctttgaaaccttatttcaaacaatcgaatccctttccgaagatttgtccaaagtaaaagtaggactggaagccaccggacactacagttacaatcttctgggttttctcattagtaaaggtttgccgacctacgttatcaatccgttacacactaatctttacagaaaaagtctgagccttagaaagaccaaaacggataaagttgattcccgcaccattgccactatgatgatgtctgacatgaacttaaagtcctactcagacacatcttaccacaacgaagagctaaagtcattaacccgttatcgttttgataaagtaaaagagagggcaaaactgaaatcatctgtttccagactagtgtgtatcctgttccctgaactcgaaatgctggtgccaacactccatatggcttctgtctatgcgcttttgtcagaattttcaggttcttcggctgttgcagccgcccacctgacaagactgacaaatcttcttttagaagcttcgaaaggtcgctatggaaaagatatggcaatcctctttagggaaactgcaagagcctctgtcggttccaacatgcccgccaaatccctggagccgaagcacaccatcaagctcattgaagaattaaccacagaaattgacgagattgaaagcgaaatcaaatccatcatggatgagatcagctctcccatccttactatcccgggtatcagctatcgtatgggtgctatgatcattgcagaaatcggtgatttcagccgttttgattcagccgacaagatacttgcctatgccggaatgtcaccgtccacttaccagtcggggcagttggataactgctattcccacatggaaaaacaaggttcaaggtatctgcggtatgctctttataatgcgaccaagtatgtctgctattgggatagttcttttggcaaatatcttgaaaagaaacgttccgaaggtaagcattataatgtagccttatcccatgccactaaaaaaacttgtgagactgatttacgcaatggaaaaatcgggacagccatatagtaaagcagcttaattctttcagtaaacatctcctttttgagcgtcactaacgacactctgtttgtcatgcagttttcaaggtcctaagaatcattttttgattcttttctatatgaaatgcttttcagcaattcactccaaaaattttattttgggacttgacttttaatagttagt

SEQ ID NO: 3539 - DNA, 1394 bp, unidentified
  source 1..1394: mol_type = unassigned DNA; note = element_5342439
  misc_feature 1: note = core
  misc_feature 2..98: note = LE
  misc_feature 99..1130: note = CDS
  misc_feature 1131..1394: note = RE
  misc_feature 1175..1391: note = bridgeRNA
taatgtaatgaaccatccccacccagactgctaagaatttgctttctgccagtttggcatccaagttgaaagttcttaatctgagatgggggatagacatgaatactaaagtattgggtatcgatattgcaaagaacgtttttcaacttcacggcgttgatggtcctggcaaggcggttctgaaaaaacgcttatcgcgcaatcaactggccgcctatgttgctaatttacctgagtgtctgattgtgatggaatcatgcggaggggctaattattgggcgcgcgtattccagagaagtggccataccgtgaggttgattagtccgcaatttgtgaaaccctttgtcaagacgaataaaaatgatgcgaatgatgccgaggcgatagtagaagcggcgagcagaccctcgatgcactttgttccgatcaagcaggttgaacaacaggatatccagtcgatacatagagttcgtagccgagtcgtcaaaaatagaaccgcattgatcaatgaaattagaggcttgaatttggagtatggaattaccgttgctccaggcgcagccagggtcaagcggtcactatgcgcaatcattgctgacaacataaacgagctcacgccgctatcccgcgagtgtatgcaaaatctctacgatgagcttgtagctattgaagccaggttaaaaaatctggataaaacgatccgacaactctgtcaacagaatgaaacctgccgtcgcatactgaaaataccaggtgtcggtgaattaaccgcaacggctatggtagcggctgttccaaacgccaacgagttcaacaatggtcgtcacatgtcggcctggttggggctggtaccaaggcaatcatccagtggtgataaacgggtcttgctgggtattagtaagcggggtgaccggtatttacgcaccttgctgatacatggcgcgagatcggctttaagccattataaaaatacagacaacgactatggtcgctggttaacggggaaaagagagcggcttagttttaataaggcagctgtcgcgttggccaacaaaaatgcccggataatatggtcgttgcttaatacaggcgaagaatttaattgcaatgcacaaatggctgctacctgatactcgatattgggtggcttctttcaacacaacggaacatatcacaagtttgctgatgttgatttcaatgatggctaataggtcaaaccggctcttttaaatcctgtaacttgtcacggcccttagaggccatggtactgatgaggaaaaagagtgcggatttacatcagggcacaagcctggcttgcatgccgaatatatgactgcaacttagacctatggtatgaatcggaaatcagcttgcaaaaggggatggttcatata

SEQ ID NO: 3540 - DNA, 1489 bp, unidentified
  source 1..1489: mol_type = unassigned DNA; note = element_5342cb3
  misc_feature 1..2: note = core
  misc_feature 3..204: note = LE
  misc_feature 205..1473: note = CDS
  misc_feature 1474..1489: note = RE
  misc_feature 2..203: note = bridgeRNA
ctgatgggactaccttctctagccacgggagcctccgaggaacgcttcgctcgcttgtcccgcgaggacttcaatgagacggcgtcctcgggggttaccggcggaggtctgacgcccacgaggatgtcgtcctaagaggactggtccatcagcacggcgctgtgcctccaccgaccgtttcgatcgacggtgaaggaggcaaccttgctgggagtcggtctggactgggccgaggactatcacgacgtggcgctcgggctgccgggtaagggggtgatcgagcagttccgcatcgagcatggcccggctggggtagcccgactggtggctcgctgtctggctgtggagccggacccggccgaggtccgggtggtcctggagacccgccacggactgcttgtcgaggccctcgtcgacgccgggttcacggtgttgccggtcaacccggacctggtcgcccgccgccgcggcccggcgaagaagaaagacgacgccgaggacgcccggatctgctgcctgctggccctggatcagttcgtcgagctgcgccggctgatcccgcacggcgagctcggcgccgaactgcgcgccatcgcccgcgacgacgaccgggccgcccgcgatgaacgccgcctcggtaaccggctgcgcgcggacctgctggcggtgttccccgccgcggtcgacatcgccgacggcgacctcggctcggcggtgttcctgcgactgctgcaacgctggcccagtgccgaggaactggccgccgccggccgcgacgcggtcgaagccctggcccgcgccaacaagcatggctggcccgaccggttcgccgagcgagttatcaccgccctggccgtaccccggctgccgatacggcccgagctgggccgagccaaagctggcagcatccgactggccaccgcgcaactgctgctgctgcgcgagcagcggcgggcctggcaccggcggatgggcgaactgctgctgggcggtccgcgccacggccgcaccaaccgacccaaggacccccagccggggaacgcgttccctggcggcgagatctacctgagcatgcccggcctgggtgatcgtctcgccgccagggtcgccggtgagatcggcgaacacatcgagcagttcaccacgcccaacgccctgcaatgctatgccggcgccgccccggtcacgagacgatccggccgcagcgaacacgtcgtggcccgacgcctggcctacaaccgctacctcggcaacgccgtgcggcagtgggccttctgcagcctgcaacagtccgcttgggcccgcaccttctacaacgccaagatcgtcgcaggcaagcgccaccacaccgcattgcgcgccctcgccaaccgctggctggaaatcctctggcactgcctgcaccgcggcaccctctacgacgaggccatccacaccgccaaccgcgcacatacagtcacccaggcggcctgacgttgacagaggatgt

SEQ ID NO: 3541 - DNA, 1451 bp, unidentified
  source 1..1451: mol_type = unassigned DNA; note = element_535701d
  misc_feature 1: note = core
  misc_feature 2..144: note = LE
  misc_feature 145..1167: note = CDS
  misc_feature 1168..1451: note = RE
  misc_feature 1198..1451: note = bridgeRNA
gaatggaatggacgcttccccccggcgacgggctgctgagatggcgtgaggtgggagtggggtggatcctcatgggccgacggcatctaagtgccaaatttggaggaacatggagttcttcacaggcaaaccagaggatccatcatgaagcatagcgtagtcggcattgatattgcaaagagggtatttcaactgcattgggttgatattgagacgggagagatggtgagtttgcagctcaaacgcgagaagtttctggcgcattttgccaaccggcaaccgtgcctgattggcatggaagcgtgcggcggcgcccagcactgggcacgagaactcatcaagctggggcatcaagtcaaattgctgtcgggcaagctcgtcaaatccttacgaatgggcaacaagggcgatgttgccgatgcaagagccatttggacagcggtgcagcagccgggcatcaaaccgattgcgatcaagacagaacaacagcaagccatcctggcactacaccgcatgcgtcaagggctggtcaagatacgcaccatgcaaaccaacgcgctgcgtggcttgttaacagaatacggtgaggtcatgccacaaggcaaaatcggtttgcgcaaaggaatttctgcagcacttgaacaggttgaattgcgtctaccaggcattgttgtggaagtactgcgtgagcaatggcaacgcattacagaattggataagcagatcgtggaaatcgaacgcaagctgcaagcctggctgaagtcaaataaggctgcgaaagctattgcagccatccccggggttgggctgctcacggcgacagccgctgtggccacgatgggcgatgccaaagccttcaggtcaggccgtgaattcgccgcctgggtaggcttggtgcccaagcaaaccggcacgggtggcaagacgaggctgcttggcatcagcaagcgcggcgatacctacttgaggacactactcatccacggcgcccgctcggtattgacgcacgccaagcgaccgggggcgtgggttgacgaattaggcaagcgccggccatccaatgtggtggtggtcgcgctggccaacaagatggcacgaacgatctgggcgatgctggcgcatgaccgggcgtaccagggagactgggtcagcatcaaccccgcgtgaggctcaaacaccgacccggtcaaagagtaacgaacagaggaatgaatgctgaaaggttgcgataggtaaaaattgtgtgatggcaaacaggtcagaccgtggcttgctaaacctgaatggctgatcggacatcaaaagtccgccaggagaatgaggggcaagtcagcgaaatccatcggggcccgcagggaaatatcctgcaacaaggccggatatagaactgcagccttatcttgtttaccaaaacacaacaatacccttggcaatcgggaagcgtccatata

SEQ ID NO: 3542 - DNA, 1414 bp, unidentified
  source 1..1414: mol_type = unassigned DNA; note = element_5357250
  misc_feature 1..2: note = core
  misc_feature 3..87: note = LE
  misc_feature 88..1116: note = CDS
  misc_feature 1117..1414: note = RE
  misc_feature 1160..1401: note = bridgeRNA
tgatgtggtggacggcgcccgctcccggcatcgaagtgccatagggtggttgcgtcgaaacgcaccacattgaggggagccgtccacatgcaaattaccacgattggcttggatatcgccaagaacgttttccaggttcacgccattgatggcgatgagaaggtcgttgtccgaaagcaactgcggcgccgccaggtgctggagttcttcaaggggcagccgccgtgtctagtcggcatggaggcttgcgccacggcccattattgggcgcgtgaactcagcaagctcggccatctggtgcgactgatgccggcgaaggacgtgaaggcttacgtcaagcgcaacaagaacgatgccgctgatgccgaggcgatctgcgaggcggtacgacggccgaccatgcgctttgtgcagatcaaatcggtcgagcagcaggcacgattgatgttgcatcgcacgcgcgatctattgatgcggcagcggacccaggtgatcaatgccttgcgggcgcatatggccgagcttggcatcgtggctgcacaagggcgcgaagggatcaaggagctgctgaagatcattgccagcgaagaggatgagcgattgccggtcgatgcccatgcgagccttatggttctggccgcggagcttcaggcgatacagacgatgattggatcgatcgagcagcggatcgtggtgcagcatcgatcgaacgaagcaagccagcggctggagactatccctggaattggtgtcaccggggcgaccgcgatcgccgccactatcccggatccaaaagtctttcgatcgggtcgtgactttgcggcctggattggcatcgtgccgcgcgaagattcgactggcggcaagcggaagctggggccgatctccaaacggggggatcgctatctgcggcgcatcctggtggtcggagcctgcgcggtgttgcgttacgcgcgccagaacccggagaagcatccctggctcacgcgacttcttgcgcgcaagccattcaaggtggcggcggtggcacttgctaataagatggcgcgcatcgcctgggcattgctggccaagggcggcacctatcgggcgcctgcgcttgcaactgcgccgtaaggaggctggcaatggcaggatgacgtttgcgtctgtgtgttcacgaactgcaggggtgatgacgacttgatgcgaaacggtcgagaccgtcgattgggacaacccgtaatgggtcacgcgatccttgagcgcgtgcgagtgtttgggacccgatcagcggattacatcacggccagcggccatagtggccgcatcgcatggagccaagctccagcgagaacaggccgaatacatgaccgcacccgaacgcttcgctcgatagtcagattccccttgcaccgcgggcgccgtccataca

SEQ ID NO: 3543 - DNA, 1394 bp, unidentified
  source 1..1394: mol_type = unassigned DNA; note = element_53654b4
  misc_feature 1..2: note = core
  misc_feature 3..96: note = LE
  misc_feature 97..1149: note = CDS
  misc_feature 1150..1394: note = RE
  misc_feature 1162..1381: note = bridgeRNA
agatggtgtggacggcgctccaagagggaattgagtcgcgctacgcgacacctcacggtgtgattgtcaaagatccaccaaagcggagcaccatccatgaacaagctatcacgcgatttatcggcagtcacggtcgttgggcttgatttggccaagcatgtttttcaggtttgctgtgttgatgggcaaggccgcattgttgtcaaccgcgctcttaaacgtcgagaggttttgagtttttttcgtggccttccagcctgccttgtggggattgaggcttgcggctctgcgcatcactgggcccgcatgcttattggtgtcggacatgaggtgaagttgatgccgcctgcctacgtgaaggcttatgtgcgccgtcagaagaatgacgccatggatgctgctgcgattgccgaggcggttacccgtcccacaatgcgctttgtcccggtgcgttctatcgacaatcaggcccatctcatgcatcaccgggtgcgcgagatgctcgtccagcaacgtacgcagatcttcaatgccttgcgctcgcatcttggcgaggttggggtgattgctgcacaaggtgcccgcaatgtccgagctttggccaatctgctttccagtgggcacgaggatattccggtgccagtcgctcaggcattacagcctctggtcaggcaaatcgaaaagcttgatgaggagattgccgggctcgacaagatactggcccttgccgccaaagcggatgcggatgcatgccgtctgatgaccatccccgggataggagcgcacaccgcccatgccgtaacagccacgctaggctcggacgggattgcccaattctgcggcccgcgcgagttcgcagcctttctcgggctgacgccaaggcagaactccagcggaggcaagacgcgactgggcaagatcagcaagatgggcaaccagtatattcgcaagctgctcgtggtgggcgcccatgcggtgttgtgccatcgcgacaaacatgatgacgctttacgcatctgggtccggcgcttgatcgcaaacaagcccttcaaactggtcgcggtggccctggccaacaaaatggcacgcctgatctatgccctcctgaaaggtcagggccactatatcaaggtcatgcaaccggcctgatctatcgttacaaagatcgctcaagggacccatgaagtgatgtgattaacggacaccagcgatagtcaagcccgctcactgccttggccgataaaggtcgtgccgcagatcggggcaagctatcgcaagcggacattcatcagggccagcggactttaaacccgcaaaaacaggccgaagacaagaccgctcccgattaactcaaaacttctcacaaccccttgacgaggagcgccgtccagaca

SEQ ID NO: 3544 - DNA, 1533 bp, unidentified
  source 1..1533: mol_type = unassigned DNA; note = element_5367882
  misc_feature 1..2: note = core
  misc_feature 3..240: note = LE
  misc_feature 241..1416: note = CDS
  misc_feature 1417..1533: note = RE
  misc_feature 3..219: note = bridgeRNA
cttgtattatagagtagtagttattagagcccctctccaagggctatatgctacactgtaaaggatgctgtggattggttttatctcctaccaccagatggttcaagagaggctccaaccgcagccctttgcaggtttgttaatcagttagataccgccagacggttgatgtagaacaaggttacaagagcaaagtgttctgtgggtacagcatcaaataataccgttggaggtcttgctatgatttgtgtcgggattgatgtcgctaaggataaacacgactgcttcatcatcagttcggagggtaaagtccttgcaaatgtgttcaccatccaaaacagcatggaaggatttggctacctgttggaaaaaatccgtgcctgttctttgcccctggacaaaataaaggtagggcttgaggctaccggacactacagctacaacattctcgggtttctccttgacaatggtctggacacctatgtcattaaccccttgcacaccaatctttaccggaaaagcctcaccctgcgaaagacgaagacagaccgtgtcgatgcgcgaacaattgcggctatgctcatgtctgatgtgggcctcaagccctacacagacacagcttaccacaatgaggagctaaagtcactcaccagataccggttcgacaaggtgaaggtacgcgctaagctgaagtcctcaattgccaggctggtatgcatcctgttcccggagctggaaaagctggtatcgtcactccatatggcctctgtttacgccttgctcgatgagttcccgggggctaagcagattgcagcggcacatctgacgcggctcacccatttgcttgccgaatcctccaaaggccgttacggacgggacaaagccatagagatacgtgaagccgccaggcaatcgattggctctgtgacgaccgcgaaatcactggaactgcggcataccatccggctcatccgtgaactcgatgccgagattgcggaaattgaacaggtcatccaacgcatcatggacaagatgctttcgcctattaccacgattcccggcattggctacaggatgggggctatgattctgtctgaggtgggtgacttttcacgctttgattcccctgacaagattttggcctatgccggcctgtcgccctctacctaccaatccgggcagcttaaaaattgctatgcccatatggagaagcgcggctccagatacctacgctatgccatcttcaatgccacaaaatttgtttgcctttgggaccctgtctttgccgcttacctcgccaggaaacgcgccgagggaaagcattacaatgtggccatctctcatgctgccaagaagctggtccggctcatttatgctctggagaaatccggcgagccttatcgtctggcagcctgattctctctcgatagcccgcatggcgtcctgtggacgtctgttttgctatacccttttttgaaccatctgttttttgtcctccatcctcaaattcgggcttgacttttaatagttagt

SEQ ID NO: 3545 - DNA, 1356 bp, unidentified
  source 1..1356: mol_type = unassigned DNA; note = element_5388e58
  misc_feature 1: note = core
  misc_feature 2..62: note = LE
  misc_feature 63..1052: note = CDS
  misc_feature 1053..1356: note = RE
  misc_feature 1135..1350: note = bridgeRNA
taattggtatggtccgccgcctcaggccttcgggctataagaggtgggacaggaggcggtccatggaaatcgacaccatcggcatcgatctgggcaagacagtctttcacctcgttggtctgaacagggctggcgaggttgtggtgcgcaggaagtgctcgcgcctgcagttgctgcgtttcacttcgaacctgcgcgtcaggctcatcggcatggagtcctgtggagggtcgaacttcctcgggcgcgccctgcgcgaacagggtcacgaggttcgcctgatgccggcgcagtacgtgaagccgtacgtgaagaccaacaagaacgactacatcgatgctgaagccatcgccgaagctgtggggcgagcgaacatgcggttcgtgccgatcaaaagcgatgagcaactggatatgcagtcgctgcaccgcgtgcgcgatcgctgggtggcacgcagaacgtcggtgatcaaccagatccgcgggttgctgctggagcgcggcatcacctttcgtaagggacgccgccatgccgaagcttcgctgccagccgtactggaggatgccgataatggcctttccgggcttctgcgcatgctgctgatgcagttacgggacgggctgagacagaaccgtgccgtcgtctcctggccatcctggcgtcggcctctgacggcgactgcggtcgtggcctccatcggcaacggcggcgagtttcgcaaagggcgttcgtttgcggcctggctggggctggtgccgaaacagcagtctaccggcggcaagcaaaagctgctgagcatcagcaaacgcgggaaccactacctgcgcagattgtttgtgaggggagcacgcgccgtgctgcagtgcagggatacgcaatcatccggtctcagtgcgtggctcagtcagcttgcgtcgcgaatgcacagcaacgtcgcgacggtcgcactggccaacaagatggctcgcatagcctgggcggtactggccaaaagcgaagcctaccggcctccgctgttggtcgtctcgacgaaggcactggcctgcaattgacgcctggcagagccaggctcggaaatcgctgcggcgattcctacaatcgcagcccagcgacgacgctcaacgaggttttctgccaggtctgctggcgaacaacgagatggcaaaatggtcgaacccggcgccctcgaaacctgttatacggaaaagccctctgaggctcccaaactaattaggacgagagcgtagcgcattccatcagggtcccgagcttcggctcaatcaaagaccggatacatttgcgcagaccaacccgctatcttcacttttcgcttgcagcacggcggcggaccataca

SEQ ID NO: 3546 - DNA, 1374 bp, unidentified
  source 1..1374: mol_type = unassigned DNA; note = element_539f980
  misc_feature 1..2: note = core
  misc_feature 3..84: note = LE
  misc_feature 85..1107: note = CDS
  misc_feature 1108..1374: note = RE
  misc_feature 1087..1361: note = bridgeRNA
cgatggggtggacgcccctcccgacggcatcgcgatgtgccaggttggcggtgttgttaacgccaagcgaggaagggcgcgtccatggaacaagtttacatgatcgggatcgatttggcgaagaacagctttcagctgcatggtgcgcgggcggacgggtcggttgctttccgcaagaagctgagccgggcgaagctgttggactttgtggctgcgcagccacgctgcacggtggcgatggaggcgtgcggcggcacgcaccattggggccgggagatcggcagtctcggccatgcggtgcgactggtcccaccgatctacgtcaaagcgtacgtcaagcggcaaaagaacgacgcgtcggatgcggaggcgatctgcgaggcgtcgtcgcggccgaccatgcgctttgtggctgtgaagacggaggaacagcaggctcggggcatgctgttccggacgcgcgatcttctggtgcgccagcgcacccagacgatcaatgcgctgcgcggccatctggcggagttcggtgtcattgccccgcaggggccggtgcatgtcggccggctggcctcggcgcttgagggacaggcttcggggttgccggaaggggtccgcgagctgggcggccttctgcttgagcagatcgccggcctcgatgcgaagattgcgggcctggagagggaggtccacgtgagagcacggcaggatgaggagacgaggcgcctgatgagcgtgccgggcatcggaccgatcagcgcgatggcgatccaggccttcgcaccgccgatggagagtttccggcgcggccgcgacttctccgcctggttcggcctcgtgccgcgccagcacacgaccggcggcaagccgaagctgggcaagatatcgaaaatgggccagcgcgatctgagacggctgctgatcacaggtgcgatgactgtggtccgctgggcggttcggcgcggcgtgacgacggatccctggctggccgggatgctggcgcgcaagccgaggatgctcgtcgcggtggcgctggccaacaggatggcgcgcatcgtctgggcgctactgacgaagaaggagagctaccgggctcccgccaccgcctgagagaacggtgaagtgcgggaagccgtcgggggatgtgggcagggcggaggacaggtaagggcaaaggtcaacgagaccgggttgggaaaaccagcatccgaacggagagcctcaagctcgcgtaaccgatttggacccaatccgcgtatctccatacgggcccgcggcgtgtcatctgccgcatagagaggccggacacacgacagcacctgaccgcatgcaccgagccgaccaaaaactgcttgcatcaacgggggcgtccacaca

SEQ ID NO: 3547 - DNA, 1458 bp, unidentified
  source 1..1458: mol_type = unassigned DNA; note = element_53a189d
  misc_feature 1..3: note = core
  misc_feature 4..222: note = LE
  misc_feature 223..1437: note = CDS
  misc_feature 1438..1458: note = RE
  misc_feature 7..220: note = bridgeRNA
ctaatgggagtcgagtagctcggctgaggagcaagctgctcccgagccgccggcgggtgaccacttctatgcccagagcgttgagctccaactctcgatcgtggccccatcggtggcgaggagacaggacggccggtgggatgtcgtgccttgagcactgatccattagggtgccgcgatgctcctccggctcacgtcgtgtccggcaccaggaggagcgccatggtctatctcggcatcgattgggcggaggcgcaccacgatgtgtgtctccttgacgaggcaggaacacgtctcggcagggcgcgcgtgcccgacgggattgagggccttgcgcgcatccacgagttggtcggcgcacacacctcgaaccccgagaccgtggtggtggggatcgaaaccgaccgcggtctcctggtccaggggttagtggctaccggctaccaggtgtacgccctgaacccgttcgcggtgagtcgctaccgcgatcgccatacggtgtcgcgggcgaagtcggatccgggcgacgccaaggtgttggccgacttggtacgcaccgatcgccagaaccatcgtcccttggccggagacagcgagcttgcggaaagtctgaaagtgctcgcccgcacccatcagacgctggtgtgggcacgcgtccggcatgtcaatcagctgcgcagcgcgttgcgggagttctatcccgccgcactggacgcgctgggcacggatttggccggtcgagacgcgctggccctgctgggcagagcgccgacgcctgagcaaggacgccgactctcgctgacccaactccgcacggcgctcaagcgtggcgggcgtgagcgcggcgttgcggctcgcgccgcccaattgcagcgcgcgctgcgcactccgcagctgcagccgcccgctcgactggccggtgcgtacggcagctcggtgcgggctctcgtccatgtgctgggcgagttcaacgcccaaatcgccgcccttgaggccgagcttgccgaggcttttgaagatcacccggacgccgagatcctgcgcagtctgcccggacttggtgtggtcctcggcgcccgggtcttggcggagttcggtgacgaccggacccgctatcaggatgccagagcgcgacgctgctacgccggcagtgccccgatcacccgtgcttcaggaacccggttggtggtcctggctcgcgtcgcgcgcaaccgtcgtctcgccgatgcgctccacatgtgggccttctgcacgctgacgcaatcgcctggtgcgcgttcttactatgcggcccatcgtgctcgcggccacacgcatcatcaggcgcttcgtgcccttggcaaccggcttgtcggcatcctgcacggctgcctcgaacaccgctgctgctactccgagacggttgcctggccatccctcggccaggcagtcgcttgacacgttatccccgtgggatgt

SEQ ID NO: 3548 - DNA, 1734 bp, unidentified
  source 1..1734: mol_type = unassigned DNA; note = element_53b143c
  misc_feature 1..2: note = core
  misc_feature 3..59: note = LE
  misc_feature 60..1235: note = CDS
  misc_feature 1236..1734: note = RE
  misc_feature 1272..1489: note = bridgeRNA
agatgctatggggcgggcgtcggcgaggatattgcaaccgtcgacgttgatgtgaaccgatggagagcaaccccatgcagaagttgaacgacccgagccgatccctcacgcctctcaaaccggatggcacgctgatcgccgtgatcgagatgagcctttcgagctggctcgttgcggggattgtgcctggcatcgagcgccagccattgaagaagctcgaggtcgacgagagcaccttgctgaagctgctcaatcgctggcgagaagaggcgcagaagtcaggacacaggatcgaacgcatcgcggtcgccttcgaggccggccgtgacggcttctggctggcgcgttggctcagggcgcgcgacatcgaggcccacatcatccacgcatcgagcgtagccgtatcgcgcgagcaccggcgcgccaagaccgatcgtctcgacaccgagttgctcaaacgcgcctttctcggttggttgcggggcgagcgtgatcactgcaagatggtcgcgatcccgacaatcaaggacgaagatgccaaacgacccaaccgtgagcgcgagagccttgtcggagagcaaagtcggatcgtcaaccgaatgaaagcagcgttggttcggctcggcatccgcggcttcaatcccaagttaaagaaggccgtcgaacgccttgacggcctgcgcacacccgagggcgagccgatcccgcccaacacgctggctgagctgcgtcgcgacatggcgcgccgacggctcgtcagtgatcagatacggcagatcgaggatactcgccttgaacgtctcgaacaggcgcccggtgatggaccacacgcaatggtgcgcttgttggcacgcgtgatcggggtcggtatcgagacggccgacatgctggtgcaggaagtgctgtcacgaaacatgcgcgaccgacgggccatagcgcgttatgccggcctcacgggctcgcccgacgagagcggcagaaaacgccgggagaaagggctggcccgttccggcaacgctcgggttcgacgaggcatgatccaattggcgtggcgatttctcatgttccagaaggacagcaccttggcgcagtggtttcgagcccgcaccgagaacgcccgcagcactcgcaagaccatgatcgtggccttggcgcgcaagctactgatcggcctgtggcgtctcgtgcgggagggcgtggtgccggacggcgtcgttctgcgcccggtatcatgagcggaagtcgccgaaggcatccaacaatttcggccttgtccgcccgctggtgacgggtcgccgatgacggttcgaggtggcggggtcccgacgtgtttccttggcttcaatgccgaaatggagaatgggtccgccgcctcggagcttcgctgccgatgcgcatgactgcatcatggttcgggtccttggacccaccggatacaaggttgtggcgcgactgatcgcgcccgaacgcgggctcccctctgatcgtcatcccgatcgcaccaagcgtgccgtcgtgctcgaagctgtcaaggtgtggcctggcaacggcggagcttgtcggaaagggttggtgcgacggccaaccttgacagcttctgtgcgcgccagcggcaaacgaggtgcaggtcgggacgaagaaacgggctctcagatcgaacaaagaaactgacaaaggaaaaaagatgcgccgacctgtcgcctattgaaacgcctccttgacaaagcccataca

SEQ ID NO: 3549 - DNA, 1484 bp, unidentified
  source 1..1484: mol_type = unassigned DNA; note = element_53b2983
  misc_feature 1..2: note = core
  misc_feature 3..119: note = LE
  misc_feature 120..1160: note = CDS
  misc_feature 1161..1484: note = RE
  misc_feature 1248..1479: note = bridgeRNA
agatgccgtaatgggccctgctccgtgcaagggggcatgatggtggctgtcccccgatagatgatgaaacggggtcacgacttgagtcggccccaagcatctggagacggaggacagccgtggagaattatgccggaattgacgtgtcgttggaactgtcgagcgtatgcgttgtggattcccagggtaagatcctgaagaaggcgaaggtcgcaagcgaacccgacgccttagtcgaatttttcgagacgcttggctttgcagtgaatcggatcgggctggaggctgggccactgtcgcaatggctgcatgcggggctgcaaagagcaggattcgagacggttctgctggaaacacggcatgtgaaggcagcattgtcggcgatgacagtgaagacggatcgcaaggatgcacgcggaattgcccagttgatccggatgggatggttccgcgcggtgcacgcaaagtcgataggggctcaagagatccgagcgctgctggttgcgcgcaagcagcttcttgggcgacttatcgatgtggagttaagtatccgcgggattttgcgtggctttgggctgaaggttggcccggtgacgcggaagaatttcgaagcgcggatccgagagttggttgcgggtcaggcgacattggaacgcattgccatagcgatgctttcggcacgatcggccttgaaggcagagtacggaaggctacacaaagctgtgctggcaacggtgcgtgacgatgcggtctgtcgccggctcatgacagtgccaggtgttggtcccctagtggcgattacctacaaatcggcgattgatgatcctcatcgcattgtaaaatcgaaggcggcaggcgcgctgttcgggctcacgccaaagaaataccaatcgggagaaaaggacgtcacgggcgggatcacgctggccggcgacgagatagtcgtacggtgttgtatgaggccgccaacgttctgctatcgcgcatcacgcgattctcaaaacttaagcgctgggggatggacgtcgccaagcggcgaggctcgaagcgcgcaaaagtcgcccgcgagttctcaaaactcaagcgctgggggatggacgtcgccaagcggcgaggctcgaagcgcgcaaaagtcgccttggcacgcaagctcgcagtgatcctgcatcgaatctgggtcgacggcacaacctaccgatggaccgacgcgggcccgatcgcagcatagaacacgaggagaagagttggaatgcaaccgggctgaactgagcctggtgcccgaagtcccgtcgccgggacggtggatccggtgaagccgttacacgcccagtggccgtcttctgacggaccacgcgtatctagataggctcaccgctccctctgacagcatgatgtggcggccaggcgttgaccacggacagaagcatgagctcggcggcgtgacattcactcgggaggcttgacatcatcgggcccattacaga

SEQ ID NO: 3550 - DNA, 1656 bp, unidentified
  source 1..1656: mol_type = unassigned DNA; note = element_53b837f
  misc_feature 1..2: note = core
  misc_feature 3..352: note = LE
  misc_feature 353..1564: note = CDS
  misc_feature 1565..1656: note = RE
ctggtataaagatcacagtgtgtgatctaggttaaaggttagtcgtcgtaggtttctttctttttgctactttttctttctttacaacgcatgtggaatggtggaaatcttaagttcatgaatggttctttaagcaggcttgacggtctgcctcctccttatggctctgatctttcagggaccatttgccaaagactaccgcttcctgctggtctaactgggaatattcattcaggatgctatggccttcagctgacaccgaaggaccatttatctcccaggctatatgagttagactctcgcagggaggccacctgcttaaaaccatgacccaaagaaaggagaatcaatcatgttctgcctcggcatcgatgtttcaaaaaaatcctgtcgctatctcatcctcaacgaagaaggtcaaaaactgaaatctttctcgctggacaatacccacgaggctttccagaatcttttggagcgtcttaagggtctttctgtccctaaggagaagcttctgatcggtttggaagcctcggggggattctgggaaaacctctactctcatctcaaagaaaatggtttttccatcgtcctcctgaatccttaccacaccaataaattcagggaagctctggcaaagaaagccaagacggatgatatcgatgccctcgtcattgcccagcttctacgaaccggagaatacgtccaaagccaagtggcagaagaactcacccaatctctcagggagttgaccaagctgcgttatgagctggtcaaagaacgtaaaaactaccagcgtcaggtcttctctctgctctccatcatcttccccgaacatgagaagaccgccctcaaaaaccccttctccgtcgcttctctggccattctccaagcctttcctaccgccaaagatcttgcccaggccaaacctaagcagatcgagaaaatcgttcgctccatcaaagggaataacttcgacctcaaagagatcgaatccctcctgagaaccgctcaaaactcgatctactccggccgagcaaaagatgccagaggaacttccctccggatcctcctccgccatatcgacactctctcttcttccatcgaagaactggagacggagattaaacagctcctctcaccgcaagaacccaaagactcctttccaggagaaaatcttctgacgatccctggggtcggagaaaagacccttgcagccgtcctctcttacttgggggcagatggctccaacttctccgattccaccaaggccatcggctacgtcggtttcttccccaagatctatcagtccggtcaatccctatgggaaaacaagatctgtaaaagaggacccaagctccttcgatgggccctctacatggccgccgtagcctgcttacggcataatccagaaatgagaaacctttaccataaaaagctctcccaaggaaaaaccgaaaaacaggcccttatctgcatagctaaaaaactgctcgaaatcatgctggccatgctgaaatccggagaagcctatgatcccctgagggtctacatcaattgttaaattgtcaaagaacggctctttgaaaattgaatagcctgtggaaaactctcttacaaacccatcattttttctcttgacaccttataggatgt

SEQ ID NO: 3551 - DNA, 1170 bp, unidentified
  source 1..1170: mol_type = unassigned DNA; note = element_53bf9e3
  misc_feature 1..2: note = core
  misc_feature 3..204: note = LE
  misc_feature 205..1167: note = CDS
  misc_feature 1168..1170: note = RE
  misc_feature 3..180: note = bridgeRNA
cttgtatgtttagacttgaaggggtgggggtgggaccaaagctccgcttctgactctgaccagtacagaccgtgggagaattcatcctcccccccttcacccaatgcgccgataaggaatgcatcggctagaccgacgatagaagcaagccagcgcaacggtgaaccccgacaagctcttaaaccctagctcggaggatgggtcatgacaatccttgattctcaggtggtcgttggtgttgatgttgccaaggacgagatcgtcgtttaccggagggatctggagaaaatccagatcgtagccaacgaaggcgcgaccctgaaacggtggttgcgcaccctgccgtccaatagcgccatcggcatcgaagccaccaacatttaccacgtcgagacagtggagttggcctattcaatggggcatcaggtgttcgtagtcgatccaggaaagctgagtaaataccgggacagtctcggcaaacgcgctaaaaccgatgcttcagatgcggctcttctggcgcggtacctggcgcatgaaaaggctggactaaggctctggagtccacctcccgaggtttataccgagctgaaaagtctgctgcatcgtcgtgcgaaactggtctccatgcgagtgaccctgcggcaaagctggggcagtcacaatgatttagcccacgaatttgaggccgtaattaagggcctggacactctggatcaagcgcttcaagggctgatgaaagaccttctaagcaagactggactgatgcctcaggtcaaaaggtgcgaagccatcgaaggtgtgggatttctgacggcgacagcgtttttaacggcctttatgcgcggagagttcgaaaacagtgatgcatatatcgcctttttggggctggatttatgcgtcagggactctggtaaaaaatccggtcgccgcagactaaccaagaaaggcgaccctgaaatccgcagactcgggcacaacgcctcaatggcagcctgccggtctgcaacctggaaacctttttatcagcggcatctcgctagcggcaaagccaggacgcaggcgctggtaatcttgacccgaaaactggcgagggtggcgtttgcactgatgaagaatcagaccgattacaggccaaactctatatttggggcttcaccccaaacatagaat

SEQ ID NO: 3552 - DNA, 1359 bp, unidentified
  source 1..1359: mol_type = unassigned DNA; note = element_53c2cc9
  misc_feature 1..2: note = core
  misc_feature 3..74: note = LE
  misc_feature 75..1100: note = CDS
  misc_feature 1101..1359: note = RE
  misc_feature 1126..1346: note = bridgeRNA
tgatgccgtggacggcgctccaccccaagcggagtcgggtttaatctgctccgcccaagtggaggagaagtgtcatggcggatgtacacgttatcgggttagacattgcaaagtcggtcttccagctgcacgggcttgatggtgcaggagccaccgttctgcagaaacggctgagccgagcccgactgctacccttcttccagaagctaccaccatgcctggtcgggatagaggcgtgtgcaacctctcactattgggctcgtgagattgcccggcttgggcacgaggtgaggcttatgccggcgcaatacgtaaagccatacctgaagcggcagaagaacgacatggcagacgcggaggcgatcgccgaagcggtcacccggcccaacatgcgcttcgtggcaggcaaggatccgcacgagcagagcgcgatgatgctgcacaaggtgaggctgatgctcaaccgtcagctggttatgctcaccaatgccattcgcgcccatatggccgaatttggcatcgttgcgcctgtcggccgtcttggcgtcgatcgattgttggcggtgattgaagacgagaccgatcatcgcatccctgaggcagcgcgtcagtgcctgcagatgctcgttgcccagttgaaggtggtcaaacagcagatcctcgagaacgaccgccgtgtccttgcccttgcccgttcaagcgagctgggcaggcggctcatggcagtgcctggcatcgggccgctcgtcgcatcggcgctggtcgcatgcgttccagacccatcagtctttcaatgcggacgcaacatggcagcctggatgggattggtgcctcggcaaaactcgtctggcggcaaggcgcggctgggatcgattaccaaggctggcaaccgctatctacggcagatgctgtttgctggcgccatggccgtaatccgacgagccatgcagagcacgcaacgtacatggctcgtcagcttgcttgaccgtcgcaagcctaaggtcgcggcgatggcattggcgaacaagaacgctcggatcgcatgggccatgatgacgagcggggacgcttatcgtgggccagccgctatcgctgcataaagctgcctggctgaaagccagcttagaggttggaaagggcaaaggagctattgcacgaacgccggtcgacaccgccggatcagaccaccctataacgcccacgcacctctaagtgcgagcaattgatcagggatccggtccgcgaaaggcattatggccagcggcaacaacacgccgcatcaaaaggccggacacatggccgcaccgaccaccaagtgcatgcactcagaacccttgccaacggagcgccgtccacaca

SEQ ID NO: 3553 - DNA, 1354 bp, unidentified
  source 1..1354: mol_type = unassigned DNA; note = element_53c749d
  misc_feature 1..6: note = core
  misc_feature 7..240: note = LE
  misc_feature 241..1293: note = CDS
  misc_feature 1294..1354: note = RE
  misc_feature 36..222: note = bridgeRNA
ccttttatttttgttgagaattagaaaaaggtcattacattgttgagattcaaaatgtaattgactagtgtgtgagatcaggggttgccagataagcattagctatatcgtaaaaaaggattgatccacacacgaaaattctcaagagtctgaacagtacttaagaccaacaatgattgagtctggataaaacaaaaggaaaggcgaaggagaataagtcaatattaaattctacttcaaatgaccagaaacaaacaaagtgtagggattgacatttcaaaggatagtttcactgcttgtttatgtacatcccagaaagatggttcgttacagtatagtaatgtcttgagctttaagaatgaaaagcaaggttataatcaattacttcgctggattaggaaacatcatcagaaagagacagagcttgtctatttaatggaagcaacaggagtctattatgaatctcttgcttaccatttaaataagattaaacagatggttcatgttgtattacccaatacctccaagcactattttttaagtttgaatgtaaaaacgaaaacggataagattgatgcaaagatactcagtcggtttggagttgagcgtaggcataaagcatgggagccaccaagtccattgttacttgaattaagaaatctgacacgttactatgttcaacttcaagagcagaagacagctatcaataacattaagcatagtaaagaggaggcttatgcagtccagaagttcatcctgcagagtaacaagaagttgattgctcagatagataagcaaatagaactttgtaagcaaaaaatagaggttctgattggttgtaataaggaacttaaagcgaaagttgataatattcttacaattaagggtgttggaattataaccattgcaacaattatagcagaaacactagggtttgctcaagttcggaatgttaaacagcttgtaagttatgcgggttatgatgtagttcagcgcgaatcaggcacttcgattaagggaaaaacaagaatctctaagaaaggaaatcgctacatacgaaatgcattatattttcctgcaatggtagcttgtagatacaatccagacttgaagacagcttatctgagaatcataatgaaaaagccctcaaagatgattggtcaagttgcaatacaacgaaaattattaattttaatatatactttatggagaaatgaaactgtatttgttccaggatacaaaaaagtagccttgccaaatgctgccaaggctacgcaagatagtctttcatagaaagatcttcttcttatgtaaagatacttttttcgtcttttacttggttatttaaacagta

SEQ ID NO: 3554 - DNA, 1332 bp, unidentified
  source 1..1332: mol_type = unassigned DNA; note = element_53d3d74
  misc_feature 1: note = core
  misc_feature 2..217: note = LE
  misc_feature 218..1192: note = CDS
  misc_feature 1193..1332: note = RE
  misc_feature 43..208: note = bridgeRNA
tcttaagtttgatttctcttaaaacagttaactttaaatatgaaccagaaagaaacagagagaggatcaaggttattatatacagtgaggaccgaacctcgtcaacaaagtcaaccccctctctttttcatctatagcacgttcagttctgtgaggcctagacctcgttttcaagatgttgtgccattgatgatcgttctttcacaatccaattattatgaataaatataaagaaactttcggagtcgacattagtaaggctgtatttgatgtccaaggcagtaagtgcggtccccaccaatttagtaattcacccaatggctttagatcatttttgaagcttttgccagatgatagtttggtggtcatggaagccactggctactatcactacaggctttcacagtttctttgcaagaatgaaatagcggtttccgtagtaaacccactttcggtaaaacgttttattgagatgaaactatcacgggtaaaaacggacaagagtgacgctcagtctatttgtgattacggaatctacaataaagttcccttgtataaccaaattagtgctgtccaatccgaatgcagacagttactaagtttaaagtccagttatcttaagaggagaactagcactaagaacaaattacacggtgagcgggttttagatgtaccctcaaaattagtcgtacggtcattactgttggacaaaaaacatattgacagagaactagtcaagatcgagaaaagactactgttgctcgttaagcaatcatctcagcgagagcttaccctattgaaaagtattcctgggataggggacaaaaccgctgtgttcttgattgttgctacggactcgttccgtaagttcagcaatgcgtctcaattgtgcagttacttagggaccacacctatgataaaacgttctggaagtagtgttagagggcgcagcaggataagtaagatgggcaacagaaacctgaggaacctaatgttcatgtgctctatgtccgcctataaacacaatagatcctgtaaggcaatccatgacagaattgtaagtaagggcaagagcagcaagctggcattaatggccgtgtgcaacaaattgattcaccaagcatttgcaatcgtgagatctggtgtggaatataacccagactatgtttcggtaagaaagagattaatttaaaaaaatatcaacttgtgatactaataatagcttgttgaattggaaataaatccatgaaagatttattccacttcaataatgccaagcaacactattggcaaaaattaaatgaaattaaacttggattttaactcagttct

SEQ ID NO: 3555 - DNA, 1193 bp, unidentified
  source 1..1193: mol_type = unassigned DNA; note = element_53d69a0
  misc_feature 1..2: note = core
  misc_feature 3..221: note = LE
  misc_feature 222..1178: note = CDS
  misc_feature 1179..1193: note = RE
  misc_feature 25..200: note = bridgeRNA
cttgtatggtgtaggtgcgccctctgcagtggggagggcgctggggtatgggacgtcgtcatccatcagccggtaggcgccggactgccacaacgagagcatcccaccccgcctcacagcgtcgataaggaatctagcggccaggaccgccgattgatcgcaaggtaacgcccgaggcgaggctaccccagcggacttaacgtatcgcagggagagcaatcatgcaaacatcaggctgttttattggggtcgatgtcggtaaatttgagctgcaagttgccggtcatgaaggagggattgtggcgggcgtgctgcccaacaatcgttccagtatcgtcggttggctcaagcgtttgcccgccggcagcgtgatcgcgatggaggcgactgggggctaccaggagttattggcccgcacggcgcacgaccagggatttgaggtttacgtcctgaaccctacccatgtgcatcattacgccatctcgttgggcaaccggggcaagaccgatcgtctggatgccaaggttattgcgcagtacatcgcacagcggcgtacaaaactacaccgttatgagccaatatcgccagagctgcaacaggccaagtcgctccaggcgcttcggtcaacggtggtgcgcgtaggcacgtcgttgaggctgtccgcgcagcgccatggttgcgccagcagccatcagaagaaggccctggcaagcctgaacttgtgggccgaacagcttgagcgggagttgatcgccacgatcaaggccgacagtgagtgggccaagacctacggcctgctgactagcatctgcggcatcggcccgatcaatggcgcggccctgacgaccttgttcaaccgggtccacttcgccagcagcgatgcagcggtggccttctgcgggctggaccccaggccgaacgagtccggtagaaagacgggccggcggcgcttgagcaaacagggagacaaggcagccaggaccttgctctacaacgcggccagttcggcagcgcgttcgatctacttcaaggattactacgccatgctccgggcacgcggcctggcttcgacggcagccttggtggtgattgcgcgcaaactcttgcgcatcgcctacggggtctggcgcactggtcagcccttcgatcctgggaaattgcggccggttatgggttgacccaaaccatagaat

SEQ ID NO: 3556 - DNA, 1681 bp, unidentified
  source 1..1681: mol_type = unassigned DNA; note = element_53dd6db
  misc_feature 1: note = core
  misc_feature 2..231: note = LE
  misc_feature 232..1323: note = CDS
  misc_feature 1324..1681: note = RE
  misc_feature 4..230: note = bridgeRNA
cagtgaggatgtacttggcaccggacgctgggtctgactcaccgatagcccgacgcgagcctgctgtctttggatcgattcgtcgacctggcgggcggtgctgcttgcacgggagcggtcgggtggcgtgacctcataggagcctgcgcaacaggcgcccatcactggcttgtccgccctgcccgaccgccgcgtgccgacccatccgatgcaaccggaagaggtacggccatgaccagcatgagcgtgatgacgccgggtgtcaccggtggcatcgacacccacagccagacccaccacgccgcagtactcgaccacgtcggtcggcagctcggcgaccgggagttcccgacgaccccagccggttaccgccagctgctggcgtggttgcggggccacggcccgctcgagcgagttggggtggagggcaccgggacctacggcgcggcgctcgcccggcacttgggcagccacagcgtgccggtcgtcgaggtcgaccgcccagaccgaaaggcccgtcgagctaagggcaaatccgacccgctggacgcctacgccgccgcacgggccgcgctgtccgggaccgcggccggcacaccgaaggctcaggacggcccggtggaggcgatccgggcgctgcgggtagtccgctgcggcgcggtcaaggcccgcacccaggcgatgaaccaactcaaggcgctgctggtcaccgcaccggccgagctgcgtgaacaactgcggccgctcaccacaacggcactgatcgccacctgcgcccggctgcgtcccaccagcgagctcaccgaccccgagcaggccaccaagactgcgctgcgccggctagcccaacgccaccagcacctgtccgaggagatcgtcgaggccgacactgagctccgaacactagtgaccgccgccgccccgcggctgctcgcgctgcccggcgtcgggatcgaggtcgccgggcagatcctcaccaccgccggcgacaacccccaccggttgcgttccgaagccgcgttcgcgcacctgtgcggcgtggccccgatcccagccagcagcggccgaacccaccgtcaccggctcaaccacggaggtgaccgggccgccaacaacgccctgtacatcgtcgtactcggccggctgcgctacgacccccgcaaacgcagatacgtcgatcgacgcaccaccgaaggcctgtccaaaccagagatcatccgctgcctcaagcgttacgtcgcccgcgagatctacaacctgctcgctacccacgccgccgacgatcggcctacaacgcccccgagcatgtcaagggcggcttgacatgaccaccgcgccagctcgctgcctctacgccctccggccccacgatcgacccggctgccagctgaccgcgaccgtcgcctacggccccaccatgctgtgctcgtcctgcaatcagcagcgcagcaccgtcggcaaaggccacgtcacacgggcgctacccgacaccatgctcgacccactcggcctgctcgccgacgtccaccaccagctcgacgacgccggccaacggctgaacgcagcagtcacccgcgcccggcaacatcacgccacctggagcgccatcgcgaccgtgctcggcaccacgcgacaagccgcccaacaacgcttcagccgaccttgacatccataggagcat

SEQ ID NO: 3557 - DNA, 1519 bp, unidentified
  source 1..1519: mol_type = unassigned DNA; note = element_53def63
  misc_feature 1: note = core
  misc_feature 2..261: note = LE
  misc_feature 262..1503: note = CDS
  misc_feature 1504..1519: note = RE
  misc_feature 5..252: note = bridgeRNA
cattacagtttgagtcgtccgtaagggcggctctttcaatcccaagacattacgattgagccgtaccgatggtcgccgaccgaccgccccggatggccgtctgcccctgccccgcggagggcccggggggtgttgccaccggggcgggacggcgcgcgggaaacgactgatagagatgtgccgggtccggctcgggccacggccgggtgatgtgggtgtcgcctccgcgctctccggtcggctcaagggagaggatacaccatggtcgaagcgagcggggccgccgtggcctacctgggaatcgacgtcgggaagctgtcgcacagcgcgtgcgccatcgacgcgggcggcgaggtggtcttcagggccgacctcgagaaccggcccgacgacatcgaccgactgctcgagcgcgccggcgcctccgcgctggtcgtcgtcgaccagaggcgcaacatcggggcgctcgtcctcgcgcgcgcgttcgcgcacggcaacccctgcgcctacctgcccggatacgccgagaagcaggcccgcggcatgttcccgggcgtcgccaagaccgacgccatcgacgcggaggtgatcgcgaggaccgcgcgcgggctccccggcgcgctcaggccgctcgccgagaagcccgaggacaccgcttcgctgcgcatcctgtcgtcgcagcgggagttcgctgccgccgcgcgcaccagggcgaagaaccgcctgcgcgcgaccctgctggaagccgacccggcgctcgagcgggccgtcgacccctcccgcccatggcaggtggccctgctcgcggagttcggctcggccgcggggtgctccgccgccggctggagcgggttctcggcggcggcggagcgcgccgaggcgcccgccgacggcgcgaggcggctctgggagtccatggccgcgtcggcgcggtcggggcggcgcgtcccggccggcgaggacgtcgcggtgcgcatgctcgcgcgcgatatcgccgccctcgacgccgacgtcgccgagctcgacggcctcatcgccgacgccctggcgggaaacgagctgtacgagtgcccgctcacggttccgggcatcggcccgaagaccgtcgcggcgctggtcacgtcggtcgacatctccatgttccgcggccacgacgagctcgcgagctactgcggcgtggcgcccgcgggcagcaggtccgggaccagcgtgaggtcgacatcccctcagcgcggcggcaacaagcagctaaagaaccttctgatattcagctgcaactccctcgtcagcacgcaaaacaggttcgggaggtactacgacgagggggatgaggcacaacaaggcgctgaaggccgtggcgagaaagaggctcaaggtcatctacgccgtcatgcgggacgcggccccgtactcggcctgaacggacgcgcgacaacccggcgcgcagcagggcgcacggcgccccgatgcatcatgccgaaaatcagagggaaatcaggttgacaaaaccatagagaca

SEQ ID NO: 3558 - DNA, 1437 bp, unidentified
  source 1..1437: mol_type = unassigned DNA; note = element_53e5e88
  misc_feature 1..2: note = core
  misc_feature 3..230: note = LE
  misc_feature 231..1421: note = CDS
  misc_feature 1422..1437: note = RE
  misc_feature 10..223: note = bridgeRNA
tccctacgttgttctgcgggatgtggtgagcccctcgtacggttgacccgcccaggggcgccgggtgtggttcaaaacgctctgccgtatgtggctttcagtgattggccgcccagcgccccacgacgactcggctgccaattaggaattgcgaatgatcgctgagtagggaatcgacagcgaggtcgtccgtcgggaagcgcccgcagcacaccgcacggaggcaccacatggccatgatctgggccggcatcgatgcaggcaagacccatcatcactgcgtcgcgatcgacgagagtggccaccggctgctgtcccgacgcgtcgccaacgacgaacccgaacttctcgaactcctcactgacgtcctggccttgggagatgaggtggcctggggcattgacctggccgacggcggggccgctctggtcatcacgctcctgttcaaccacgctcagccggtgcactacatctccggccgggccatccaccgcgcctcggagagctaccgcggcgagggcaagaccgacgccaaggacgcagctgtcatcgcggaccaggcccgcatccgacgcgacctgcacctcttacgtgccgacgacgacactgtcaccgacctcaagatcctcaccggccgtcgaacggacctggtcgccgaccgcacccgcaccgtcaaccggctccgcgcccaactgaccggcatcttcccggccctggagcgggcactggacctcaccaacaccggcccgctcatgctgctgaccggctaccagaccccagcctccctgcgccggacaggcaaaaagcggctcgagacctggctgcgcaaccgcaaggtcctgcgcgccgacctgctcgccgaaaccgctctggaggctgccggacgccagcacaccagcctgcccggcgagaaactcaccgctcagatggtgcacacactcgcgcaggaagtgacggccctcaaccaacagatcgccgagctcgacaaggcgatcgaggcccgttttcgcgaacatcgagacttcgaagtgatcaccagcatgcccggccagggggtcatcctcggcgccgagttcctggccgcgaccggcggcgacatgaccgccttcggcaccgcagaccgcctcgccggcttcggtggcgtcgcacctgttccccgcgactccggcaagatcagcggcaatcttcgccggccacgacgctacaaccgcagactccaacgcgtcttctacatctctgccttgttcagcatccgccactgcgatgagtcccgccggttttacgaacgcaagcgagccgaaggcaagcgtcacatccaggccgtcctcgccctggcccgccgccgcgtcaacgtcctgtgggccctcctgcgcgacgaacggacctacgaactcgtgccacccaccgcgcacgcggcttgacagacagcattaggaa

SEQ ID NO: 3559 - DNA, 1497 bp, unidentified
  source 1..1497: mol_type = unassigned DNA; note = element_53e7026
  misc_feature 1..2: note = core
  misc_feature 3..238: note = LE
  misc_feature 239..1477: note = CDS
  misc_feature 1478..1497: note = RE
  misc_feature 6..232: note = bridgeRNA
ctaatggcattcatcgggcctctttggcaggctcggttccggtagcggctggcgggtcagcactttcctcatctgacctcgcaggtcttgcggcagaccgtgcgcccgctggtcgtgaggagacgaaatcgctgctgggatgacgtgccccgtgttgttgcggtgagcacttgaccattagatcgccggctgactcctccacgctgctgaccgtgtccgaatcggatctggaggggcgatgttgtttgtgggggacgactgggccgaggaccatcacgatgtcgagatcgtcgatgacggcggccggctgctggcacggcggaggctgcctgaaggcctggagggggttacccggctgcacgccctgataggtgaacacacgccggccgagtgggccgacctggaacctgaccgagccgcagccatggtcaaggtcggcatcgaaaccgatcgtggaccctgggtcgcggcattggcagcggccggctacgaggtcttcgcaatcaacccgatgtcagtggcccggtatcgagaacgtcactccacctcgggtgcgaagtctgatgccgccgacgcgcacctgctggccgagatcgtccgggtggaccgggcccaccatctaccgcttgccggcgacaccgccgaaggtgaagcgatcaagttgaccgcccgggcccaccagagtctggtgtgggaccgcacccggcatgtgctgcgccttcgctcggcgctgcgtgacttctttcccgctgcgctaaaggctttcagcgacctggacgcccctgacacactcgagctcctcgcgaaggcacccggccccgaccaggcggcccggctgaccaagtcgcgaatcatcgccgcgctccgccgggcccaccgccgtcacgtcgagaccaaggccaccgagctggccgcgatcctgggcgagaagcaactacgacaaccaccagcaatccagtcagcctacgaggccgtcgtgagcagcgaggtcgccatcatcaccgcgctgaacacccagatcgaccagctgggcacggtggtggccgcacattttggccagcacccggacgctgagatctacaccagccaaccaggcctgggtacgatcctcgccgcccgggtcctgggagagttcggcgacgacccccaccgctaccgcgacgccaaagcgcgcaagaactaccccggcacctcacccatcacccgcgcctccggcaccaggagaatcgtgctggcacggtacgcacgcaaccggcgactagccgacgcactccaacaatgggccttctccgcgatgcgcggctcaccgggcgccaggagctactaccaccagctgcgggccaggaacatcggccaccaagctgccctgcgacaactggccaaccggctcgtcggcatcctgcacggctgcctgaaaacccacacccgctacgacgaacacaccgcctgggcccacctcacaaccgccgccgcttgacttcaaagaacctgggatgt

SEQ ID NO: 3560 - DNA, 1539 bp, unidentified
  source 1..1539: mol_type = unassigned DNA; note = element_53ea5ec
  misc_feature 1..3: note = core
  misc_feature 4..274: note = LE
  misc_feature 275..1432: note = CDS
  misc_feature 1433..1539: note = RE
  misc_feature 17..263: note = bridgeRNA
cccattacagtctgagatacgccatcgatgaacttcggtggcgagcattcggcgcattgcctacgatacgggcaagccccgaggggccgccgatcgggcgcctccggatggccgtctgcccctgccccgaagagggcccggggggtgttgccaccggaggcgctcgccgctccgaacgactgataggaaactgccgggcgcgggcgccacggccaggtaatgtgggtgtcgcagggagggcttccgatcggcctgacgattggaggataccaccatggcaccaccgagaaggccggaaatcgtcatagggctcgacgtcgggaagtcgtcgcactgggcgtgcgtcgcgacgcgcgacggcgaggtgctcgcgagcaagcccgtagccaacagggaaaacgccctcgactcgcttttcaccgagttccccggagccctcgtcgtcgtcgaccaggtccgcaacatcggcgcgctcgcgctctcccgcgcgcgggcggcgggaatgccgtcggcgtacctgccgggcctggccgcccacgaggccgccaggctgttcggcggcgacgccaagaccgacgagcgcgacgcgatggtcatcgcgaagaccgcgctcggcatcccggacgcgctgctgccggtcccccatcccgaccccgcgatcgccgcggcgagggcgctcgcggcgcaaagggacttcctgacccgcgagagcaccaggagcaaaaacaggctgcgcagcatcctgctggagtcgtgccccgagttcgaatcgctggtcgacctgtccgacgtctccgaactgcggctcatggccgccctcggcgggccgtggtcggtggccgacgccgggcgccgaagggcggcggccaccgcccgcggcgcgcggcgcggcaaggtggacgcgctcgtcgggtccgtggggtcgtctgccaggccggacgcggccgcgatcgccgccgaggaccgcgcggtgaggttcttggcgcggagaatcgccgagaacgcggccgagctccaggccgccacggcggagatatccgccctgctcgagcgcgacgagacctaccgatgcctgctcaccgtccccgggatagggccgaaaacggcgtccgagctggcgatctccgtaaacatcgacgacttcccgaaccatgacaggctggcgtcgtactgcgggctggcgccgcgcaaccgccaatccgggacttcggtgtcgtcggtgtcggcgtcccggcagggcaacaagcgcctgaagaacctgcttatcttctcgtgcaactgcctcgcccgaaccgacgggcggtggggcgagtactacgcgaggtgccgcgaccgcggcatgccgcacggcaaggcgctgaaggccgtcgcgaggaagaggctcaaggtgatctacgcggtcatgagggacaaggttccgtacgtcgcgtaggccggtccgccgcataagaacaattcggccctccagggtccgcgcgagcatgccccgatttcctcatcctatcgaagaatcaggggttgacgaaactataggaacac

SEQ ID NO: 3561 - DNA, 1379 bp, unidentified
  source 1..1379: mol_type = unassigned DNA; note = element_53f61f4
  misc_feature 1..2: note = core
  misc_feature 3..88: note = LE
  misc_feature 89..1108: note = CDS
  misc_feature 1109..1379: note = RE
  misc_feature 1120..1366: note = bridgeRNA
tgatggggtggatgccccctgctccgcggcatcgaggtgccatagcgtggttggtgctgagcctgaccacgggagagaggaggcatccatggaggagattaggacgatcggcctcgacttggccaagagcgtgttccaggtgcatgggatcagtgcagcaggtggggtggtagtgcggcgcaagctgcgtcggtcagcgctgctggagttcttcgcggccctgccgccggcgctggtcggcatggaggcctgcgacggagcgcaccattgggcgcgcgaactcactcgcctcggccatacggtccggctcatgccaccggcctacgtgaagccctatgtcaagcgcggcaagaccgacgcggcggacgccgaggcgatctgcgaggcggtgacgcgcccgaccatgcgctttgtgcccgtcaagaccgaggcgcagcaggccagcctgatggagctgaaggtccgcgacatgctggtgcgccagcgcacccagaccatcaacgcgctgcgctcccaccttgccgagtacggcatcgtggcggcgcaggggcgcaagtttgccgagctgatcgcggtagtccgcgacggtgatgacacccgattgcctgaaatggcccgcgaggctctgggcgacttggtagcgcagatcgaggccttggaaggacgcatcgagcggctcgacagccgcatggtccgccatgctcgtgaggatgaagcggtgcgtcggcttgcgagcatccccggcatcggggcgatcagcgcgacagccctggccgcgatgctgcccaatccgcatggcttcgcctcggggcggcacttcgcggcctcgcttggcttgaccccgaagccgcactcgagcggcggcaaggagcgcctgggccggatctcccggcagggcaattccgtgctacgccggctgctggtccccggcgccaccagccgtctacgcaatgcccggcgcaacccagaggctgcggactgggccacacggctgctggcgcggcgacctttcaaggtcgtggccgtggcgctggccaacaagatggcccgcatcacctgggccttgctggcccggggaggaacctacacaacaaccgcgaccgcctagtcggttgtgtcagagctcgccgggcgccgcgtccggcgagggccaaggtgctgaagcgacgatgacagcgagagaccggtgagccggtgacgagacaggccgtttatcgcaatgcgctcccgagcgcgctcgcatgattgcccctcgttccgcgcagctcatcagggcccgcggccaagccggccgcatacgaggccggacacatgaccgcacccgtgctctcgatgcctgcgtcgctgattcgccttgacccgcaggaggcatccacaca

SEQ ID NO: 3562 - DNA, 1155 bp, unidentified
  source 1..1155: mol_type = unassigned DNA; note = element_53fa060
  misc_feature 1..2: note = core
  misc_feature 3..207: note = LE
  misc_feature 208..1143: note = CDS
  misc_feature 1144..1155: note = RE
  misc_feature 12..213: note = bridgeRNA
cttgtcttatgctgatccaggctcttgtgcgaagagagagccagcgcgcgccacgccatttatggcgcgcgctggcgggggctggatcgtcacgggcttggtcgtgatggaccgttttagagtgtgatcagccatcgtcttcgcctgaggcctgaacggatacagagcggcacgaagccctctacgacaagcataggacacgcgaagatgacaaaggataccatcggaatcgatatctctaaagacacgcttgatgtccaccgcctgagtacggacgagacggcgcaatttcccaacgccccagcaggtctgcgtgcgctgcggcgctggatcggggtcaaaacgccggatctggtggtctatgaggcgaccggggcctatcacgccctccttgagcgcacctgtgcaggcgctctgccgctcgtgaaggtaaacccgctacaggcgcgccgctttgcccaggcccgcgggacaagggcaaagaccgatgccgttgatgcgcgtgccctcgccatgatgggatccgcgcttgatcttgtagcagacgcaccggcggacaaaaatcagcctgctctcaaagagttgcagatcgcacgcttggctctgatcaaggagcgcacgcgattgctgaaccgatctaaaacgcagtccttgaccctgctcaaacgacaggccaaggctcggcttgagcatatcaaacgccagctctgtgaactggaagacgcgctgctggacctcgcgcgccagtgcctgaaacgcgcacgcgccttcgacattctctgctcgatcccggggctgggccaggtctctgcggttgcgatccttgtcgaatgtccggaaatcggcaccctgacccgcaaacagattgccagccttgccggtctcgctcccatgacccgacaatcgggccaatggcgtggtaaggcgttcatacaaggcggacgaaaattcctgcgcgatgcactctatatgcccgcgctcgtcgctgcccgctacaatccggatctgaggcagaaataccaagcgatgaaatcggatggaaaacccgccaaagtcgctctgacagccctcatgcgaaagctcatcgaactggccaacgcactagtccgacaagaccgcacatggacgccaaaacccgcttgatcaagacggata

SEQ ID NO: 3563 - DNA, 1630 bp, unidentified
  source 1..1630: mol_type = unassigned DNA; note = element_53fd254
  misc_feature 1..3: note = core
  misc_feature 4..123: note = LE
  misc_feature 124..1314: note = CDS
  misc_feature 1315..1630: note = RE
agtaactatgtaagaaaagcatagcgcagtgtatgcggtcatcctcttagagagagggccgaaatttaatttaaaagcgataacttaaagtttcgcaatgattaacaattaaataactgcgctatgctacgtacaaatttgcaaaaacaaaatgattttacgggccaggacttttatataggcctggatgttcacaagcaatcatggtatgtaaccatcagaagtcttggaatagaggtagggcacttcagccaagtgccggatgcggcggcgctgcatcagtatttacaaaggaattttccagggggagattatcattcggcttatgaagcgggcttttgtggaacaggagcccacgaacagctttgtaaggcaggattagataatattattgtgcatgcagccgatgtcccgtctacggataagcaaaaaaagaataaaacggacttgcgtgacagtcgggcgatcgcggaccacttggagcgcggcaatctgcatggcatatatgtattaagccaggagcaacaagagttgcggagtttgtttcgtttacgggaatgtaaggtaaaggatactacgcgggcgaataaccgactgaaaagctttttaatgtattatagcatactaatcccggagagcgtgtcaaaacgcggtgatctgacgggcagagcattgacatggctggatatggaactgcggagtgcggccggtaccattgccctgcaacagtatgtaggagagttaaagtaccagcgtaagcaattgtttgagctaactaaaaccctcagagagcaggtgatggcttatgatatgcaaacttacatcaatctgattaccgtacccggtatgggcagtattacagccatggggttaatagcagagataggagatttcaggcgttttgaagacccggacgattacgccagccttttgggactgtgtccatgggaagacagttccggcgactgtatcaaaacaaaaggtatgcagccgcgttgcaacagccatcttcggcctctactgatagaagcctcgtggcattcgataagaaaatcccgtaacctgtttgcttattacagcaaacattcaggtggcaagaatggcaaaaaggcaattgtgaaggtagcccgtaaactggccatgattgcccggggagtggcaatgtcaggtcagccttatcaggaggattaccaaaagaacaaggacaatcagcaaccagtgaaaaaagtgaaagcggaaaggttttcttcaggcattacgaaacagcatataaacaaacagtcaagctatgggctattgcctatgcctggctgatatgctttatccggctgtaatatccctggcggttgctcctcagcagagccgcttccgtttcttacagcatagtaaatttattaaatatgttcagttaaaaaaaatgtatctcatcaacatcaaagaggaaaacgcaccaacgaaaactgtatttaagttacattgcgaagtattcgtacctcttttaattacacacaattactggcggcttttgatcgcatatagcagtttgagcacttttttgatactgaaataaattgtacctttatgtgattaaagaaatctcatacctgttcgctatgcttttctacatagc

SEQ ID NO: 3564 - DNA, 1702 bp, unidentified
  source 1..1702: mol_type = unassigned DNA; note = element_540b5e9
  misc_feature 1..5: note = core
  misc_feature 6..329: note = LE
  misc_feature 330..1553: note = CDS
  misc_feature 1554..1702: note = RE
  misc_feature 13..349: note = bridgeRNA
ctcctacaatagaattacggtttaaggcacggcagccagccgtgtcttttatcgtctcgtgcttagctgttagaatgagagcggattggtctgacggtgttgcccagatactggcttttgtcacgttcgtaaaggagtccgtcagccgccctctcgttcgcagtgttcgttttacgcaggttgtgccgccgtcatcggtgtgttcgtgtaacccgggagattgaataggcattgagaaaatgaaaagctggtggacggcttgccggacagacgcttttcaaaagggtggttgccaataccgtaaaataactattgggaggttttccacaatgaactctgtcggcatcgacgtatccaaaggcaaaagcatggtcgcggccatgcgccccgggggtgaggtttctcttgtcccgttcgaggttcctcatacctatgcgaaacttgaaaatctcggttatcaaatcctcgggcttggcgaagacatacgggttatcatggaggctacaggtcgttatcacgaaccggtggcggcggctctccatgagctggggatttacgtttgtgtcttgaatcccatcgtcatcaagcaaagtggggccgggtcagtccgcaaagtcaagagcgacaagaaagatgctctcaaaattgcaaaatacgggcttgacaactgggtgaaattgcgagaacatacccctatggatgctacaagacaacaattgaaactgtttagccgccagtacaatctgtacatgaagacctcggtggcgttgcaaaacaacctcatttcgctgctggacaagacttggccgggtgcaaatgatatttttgacagcccgacccgtgccaacggccatcagaaatgggtggattttgttgcggccttttggcattgcgattgtgtctgccgcatgagcgaggccgcatttgtcgagcgttaccaaaagtggtgtaaacgcaaggggtatcacttttcccaagtaaaagcagaagatgtgtacatcgaaagcctcgggcattgccccaccttgccgaagaacgccaacaccaagctgctgattacatcagctaccaacgagcttaccgccgttaggaaggttttgatgaccatcaaagccgaggtaatccgtctggccaagcagctacccgaatacgaaatcgtgcaaaccatgtatggcgttggtgaaatcaccggctcccagctgatggcggagcttggggatgtgcggaattttgccaaccgcggctccatcgtggcctttgcgggcattgacccggaggttaatcaatccggttcccagcagagggaaagcaatccggccagcaagcggggttcgccccatcttcgcaaaacactgttcctcgtggtggaaaaatatctcatgcgttcgcccgccgaagagccggtgtatcaattccttgacaaaaagcgtgctgagggcaagaaatattacgtctacatgaccgccgccgccaacaagttcctgcggatttactatgcacgggtcaaggcatatttgaatgagcattgccccgaacaagagccgctggaatagctgggcgtaaccacatcctctcagtttgtttttgatttagggcggattttcaaaaaacctttttgtccgctctggttgtcatgcccatttttaccagactaaatttttttgacttttttcaaaaaaaggcttgacttttgtttgcagga

SEQ ID NO: 3565 - DNA, 1399 bp, unidentified
  source 1..1399: mol_type = unassigned DNA; note = element_5420636
  misc_feature 1..2: note = core
  misc_feature 3..88: note = LE
  misc_feature 89..1120: note = CDS
  misc_feature 1121..1399: note = RE
  misc_feature 1091..1383: note = bridgeRNA
agatggggtggttgccgccctccctgacggcatcgcaatgtgccaagatagtggtgattacagccactgagcggaaaggacggcaaccatgacgaaagataccatgattggagtagatctggctaagaatgttttccagctacacgcggcctcaatgacggggcagccacagttttgcaggaagatgtcgcggcaaagtttcccagggtttatggcgaagcagcctcccgcagtggtcgtgatggaggcctgtggcagtgctcattattgggcccgggagatggcgaagcttggccatgaggtgaagctgattgcgccgcgctacgttaaaccgttcgtgaagcgccagaagaacgatgcggcagacgccgaggcgatcgtgatcgctgcccagcggcccgagatgcgcttcgttcttccgaagggagctgaccaacaaagttgggcgattttgtttcgcgcccgggaacggcttgtccaccagcgcaccgaactggtcaatgcactcagggcgagcctttatgaatatggtcacgttgttccccagggaatccgccaaattaaacggatcgcagagatcctggaggcgccgaataatgatttgccagatctgatgcgggaggaatgccgcgatatggtggagcagatcgccgagcaaacaacccgcatcaatgcccggacccggaagatccaggcgctggccaatgaagctgacatcgcgcggcgtttgcaaaccatacccggggtcggtccaatgactgctttggcagtcgaagcttttgcacctgcgatggagaacttcagctgcagccgcgactttgcggcctggctgggcctcgttccacgccagttctcttcaggtgcgaaagaacggcttggccgcacttccaaggctgggcaggctgatatccgcagactgctcataattggcgcgatgtcccgtctgaactggttgggccgtaaatcaataccagaggactcgtggctggcacggatctcatcccggaagccgcgaatgcttgtggctattgctttggccaacaagatggcgcggatgatctgggcgctaataattagaaatgaggattatcgagttccggcacaggtggtggcgacatgagcaacatgccgcaaaatctgcctgacgtcggataagggaggtgtgagaaggcgacgaccacaatgggcaaaatgatcgaacagatctgggtcagaaaaaccagttagggacactgagcataaaatctcgctagcgagatttggatctgacccgcagatcaccataccggccagcggctttgcaaatatcccgcgatcaaaggccttacagaagaccgcactcgatcaccaacccgtaggatcaaaaacttcttgcatcatgggcggcaaccacagaaga

SEQ ID NO: 3566 - DNA, 1393 bp, unidentified
  source 1..1393: mol_type = unassigned DNA; note = element_542156b
  misc_feature 1..2: note = core
  misc_feature 3..83: note = LE
  misc_feature 84..1127: note = CDS
  misc_feature 1128..1393: note = RE
  misc_feature 1144..1363: note = bridgeRNA
tgatgaggtggaacggcccgctccgacagcatcaaagtgctaacgtggtcgttgtcgcaaacgccacaaggagggaccgttccgtgaaagatcttaccactattggactggacttggcgaagcacgttttccaggcatttggcgcggacgctgagggggcgccgctgtttaaccggaaactacggcgcgccgaggtgctccgcttcttcgagagattgcctccgtgcctggtcggcatggaagcatgcgcgagtgcgcactactgggcgcgggaaatctcggccttcggccacgaggtccgattgctaccgccgcaatacgtgaagccattcgtcaagcgcggcaagtgcgacgcagccgatgcggaagccatcgctgaggcggtaactcgaaagacgatgcggttcgtcccggtgaagacgaccaagcagcaagctgcggttatggtgctcaaaacgcgcgccttactcgtgcgccagagaacacaggcgatcaacgcattacgcgcccatatgggagaactgagtatcatcgccccaaccggcatcgccaacatcaaagcattggcgcctatcattcgggatgaaaaggattctcgcctacctccggccgcgcggttcgccctgaccgaaatcatcgatcagatcgagatgctcgccacacagattgacaaactcgaacatgagatcgtcgtccaggcccgacaagatgacgagatgcggcgcctcgcgactataccaggcgttggcgcgatcatcgccatggccgtgaaggcattcgttcccgatcccgccggcttcaagtcggctcgccactttgcagcctggatcggattgaccccgaaagcacattccagcggcggcaaagaacggttggggcggatatcgaagatggggaatccggtgctgcgatcattgctgacgacgggggcggcatcggtgctacgtcatgtgcagtatcgcgaccgagtttggccgtggctgaagaacatgctcacgcggcgacccttcaaggtcgtggcggtcgcgcttgccaataagatcgcccggatgatctgggcattgctaaccagaggtggaatctaccgagacccaacagcaattgaggcaggacctgtcgccgcataagcgcaggaccgccgagacgagctgcccggcaaccgccggcaggcaaggtgccaacagacgatgaaccacgggacgaaatcccgaaacaggacaggccgaaacccgtgacgcgcacaaagcgcgcccccttgatccagctacctgcttcgcggacttcatcgaggccagcggtaatgaccgcacaagtaggccggacatatgaccgcaccgttcccatgtggtgaaacgactgaagagcacccttgcaccgcgggccgttccacata

SEQ ID NO: 3567 - DNA, 1445 bp, unidentified
  source 1..1445: mol_type = unassigned DNA; note = element_5428281
  misc_feature 1..3: note = core
  misc_feature 4..293: note = LE
  misc_feature 294..1085: note = CDS
  misc_feature 1086..1445: note = RE
  misc_feature 1196..1397: note = bridgeRNA
agatggggtattcggcctgccgccgctttccccaaccctcggagaaggcgctgcgcttcaggttgatgatagacgtggtgtggattgaaacagccacagcatcagatggagaagcgcagcatgaagcactatgccggtctggacgtttcggtcaaagagacctcggtgtgcattgtcgacgaagcgggcgcgatctgctgcgaagggaaggtgccgagccatccggaggatctggcgcggttactcagggatacagcctggcggcttgtccgggtaggtctcgggccgggcccttgtcgcaatggctgttcagtgggatggcggaagccggattgccggtggtctgcattgaaacccggcacacgaaggcgttcctcaaagcccaggtcaacaagagcgaccgcaatgacgcccgcggcatcgcccaaatgatgcgtgtgcagctattccggcccgtgcatgtgaagaccctgaccagccagaagcatcgcgccctgctgacggcccgtaagctgctgcaggagaaattcatcgccatcgagaacgacatccgcggcctgctgcgcaacttcgggctcaaggtcggcgtcgtcggcgtgctcaaattcgaccaacggatccgggagcttgtcgagggcttgcccgacctcgtcgaaatcatggaaccgctcctggcatccaggaaacagcttcgcgaggcgttcatggcactccaccgcaggctgctcgcgatcgttcgagatgacgccgtctgccggcggttgatgacgatacccggcgtcggtccggtcgtatcgctggcgttccgaagcaccatcgacagtccagcacggttcacgagctcaaaggctgtcggcccagccttggggttgacgcccgtgctgcatcaatcgggagagagccaccggctgggtcggatctcgctgtgcggggacgagatgatgcgtcacctgctctacgaagccgctcaggtcatgctgacgcgagcacagacatggtcgtggctgaaggcctgggcgatgagcatcgccaaacggcgcggtcagcaaaggcgattgtcgcgctcgcccgccgactggcggtgatcatgcatcgcatgtggatggacggcacggagttccgctggaccagggagagcataccggcttctgtctgacgggtttccgaagcctcccgtcgcacgagaaggaaatcttgagttccgccagccggcggatcgatgtccctcgcgggacgatggatggggtgagttcgcctgggctcttgtgccggtcgcccgacacgtgatcaggacgcgcgtcagattgttccaccccatcttcctgatcccatgctgggagagccaaacggctgatcccgaagagaagcgcggatccgcgagcgacagcaaccgacggaacggcggatcgcctgaaagcgcttgacctcaaccggccgaatagaga

SEQ ID NO: 3568 - DNA, 1342 bp, unidentified
  source 1..1342: mol_type = unassigned DNA; note = element_542ba5b
  misc_feature 1: note = core
  misc_feature 2..103: note = LE
  misc_feature 104..1108: note = CDS
  misc_feature 1109..1342: note = RE
  misc_feature 1112..1336: note = bridgeRNA
gaatgaaagggacttcccctactcggttgcggtggaaccgcccggcatcgaagtgccaagattgaagtgctgttgtcatcaatctaagacgagaggggaagtcatggaacagattactaccgtgggaatcgatttggcaaagagtgtcttctcgctgcacgcagttgatggcgccggtcggatggtattccgacgcacggtgcggcgcgaccagctgctgggggtcgtggccggtctgccgccttgcctgatcggcatggaagcctgctcgggagcgcacgaatggggccgccggtttcagggattcggacatacggtgcgactgatggcgcccaagttcgtgatcccttaccgcaagagcggcaagaacgacggcaacgatgccgaagcgatctgcgaggcagtgacgcgcccgaacatgcgcttcgtgccggtgaaatcggccgaacagcaagcgttgcttgcgatgcaccgggtgcgccagggattcatcgtcgagcgcaccgcgatcatcaatcggttgcgcgggctgatgtcggagttcggtgtggttctgccgctgcgctcggtcacggtgcgccgtcaggcgatggaggcggcggaagcattgcccgcgctcgccaggcgcgccatcagcgacctgctcgatcagctgcgcgtgctcgatgaacgcatcggtggctatgactgggagatcgaggcacaggccaagctcagcgatgccgccaggcgcctgatgcagattcgcggcatcggaccgacgacggcgctggcgatcgtggccaccgttggcgacgcgcgcgaattcaggaacggccgacagttcgccgcctggattggtctggtgccggggcaatactccaccggcggaaagacgcgtctggggcacatcagcaaacgcggcgatgcctacctgcgaaacctgcttgtacagggcgcgcgctcggttctgaactccgccggtgcgcaccaggaccgcatgtcgcgctgggcactggagttgcagccgcggcgcggctactaccgcacgctggtggcgatcgcgaacaagaatgcccgcatcgcgtgggcactgctggccagaaacgaagacctgcgcaccgcctgaaccattaacctgccacgactgccacatcgacgatgacgaaacggttaaaccggtgcccggggatcctgatcaaactcaacggcagctgcctcgatgccgactaacgagcgaggaccgggcatgcggctttcatcagggccagagcaatgctcacaaacaggccggttatagtgaagcagtccgttcttccgtcgtccgttaagtagctgttgcaggaatggggaagtacttata

SEQ ID NO: 3569 - DNA, 1502 bp, unidentified
  source 1..1502: mol_type = unassigned DNA; note = element_542daeb
  misc_feature 1..2: note = core
  misc_feature 3..283: note = LE
  misc_feature 284..1354: note = CDS
  misc_feature 1355..1502: note = RE
  misc_feature 13..259: note = bridgeRNA
tcatataaaccttgtatgattaattagaagctagtaatcatactatcctttcatttttctataaacatggtttaatacaattcagatactatggacttttgattttaccctgtagcttgactactcgactggagtgtattgccgctacctttatctgaattgtttatcagctggatgttgccggagtgtttttcactcagagcacttatttctatcaagtctacaatgataatcgatggtggatatcatggtatcagactttatgaaagggaggtacaacctcatgaaaatttacgtaggcattgacattgccaaacttaaccatttcgccgctgcgatttcttccgacggtgaaataatgattgagccgtttaaattcacaaacgacgctgatggcttccaactgctgatctctaaactcgaatcattcgataagaacagcatcatcatcggtcttgagtcaacggcacactacggtgacaaccttgttcgataccttgttaccgagctttaccaagtgtgtgtgttgaaccccatcaaaacctgtcagatgcgaaaaaataacgtccgcaaaactaagacagataaggtcgacacatatgtgattgctaaaactcttatgatgcaagatgacattagattcgtcagtttctttgatctcgatatgatggatctcaaggcattgggacgctttaggcagaaaaccataaagcagagaacccgcttaaaaatccaactaacaacctatgttgatcaggtatttccggaaatccaatacttctttaaatccggtctgcatcagaaagctgtctatgctcttttaaaagaggcaccttctccaaaggaagtaacttccatgcatatgactcatctggctaatctgctcaaagtgaactcacacggagctatatctatccaaataactcaaaccatccaacaaatcgagttacttgatagccaattagaaaagattgaagctgagatgacagaaatcatgaaattcaacgattctgttatcaaaaccattcctggtatcggatatatcaatggtggaatgattcttggtgagataggtgatattcaccgtttctccaatccaaataaactgcttgcatttgctggtttggatccatctgtctaccagtctggtaacttccaggctaagacaactcgtatgtccaaacgtggctcccgcgtattaagatacgcacttgtcaatgcagcttggaacgttgttagaaacaacgcaaccttcatgccaagagggctgaaggccggtctcattataatgcacttgggcattgcgccggcaagcttgtcagagtcatctggaagatgctcactgacaatgtagaatttaacctcgagtaagaggtctgtatatctatcaatagtatattttgaaaaagggcttttcgggagctttgttaaagttacccatttttaccataaaaagaattttgaaatttccagctaatatatgcttgacttttcatagctgg

SEQ ID NO: 3570 - DNA, 1307 bp, unidentified
  source 1..1307: mol_type = unassigned DNA; note = element_5434655
  misc_feature 1: note = core
  misc_feature 2..267: note = LE
  misc_feature 268..1260: note = CDS
  misc_feature 1261..1307: note = RE
  misc_feature 57..256: note = bridgeRNA
cctttggttaaattttaatgataatcttaagattgttgttattgttgaaatgggggggctggggggtgttaaaaaccaaaaactttgtgaataagttaacataaaaggcagggtgaactaaatacgcctgtagttttcgagaacttggcgcctgtatagaagtccctgccttttatgattgcccaaggcccaactagaatacttcctttgcgtcaacaaaggtgattggcaaaaggcaatttattagaatacttaatttaccaacgtatgaaaagctggaatgttattttgggtgttgacgtgtctaagcttaccctcgacatctgttgcgcagatcggaatttgtatttaaaaaccgataactcgtccaaagggtttgccgtttttaaaaagtggtgtaaagcccagaggatcgatctgaaagagtgtttggttgtcatggaacatacgggagggtatgagtatcgctttatgcagttttgtgaatcgtactccatctcctattgcagagtcccgggtttagaaattaaacaatcttcaggcatggtaagaggcaaaagcgaccgtgctgatgcttttagaatagggcaatatggtgaagaaaagataaaaaagctgacgccttcaaagccgctggacaatgacatattgataatcaggcggttaatgtcactcagaaaaagactagtccgggaaagagcaggttggaaaagtaccttaaaagagcacaaacacatgtatttggggaagaaactggctacggttattcgaatagctaatgctcaaataaaagaaaaaacgaaatatattaaccaggtagaacaggagatcatggagttgatccgaagcaatacggcattaatgcaaacctaccggataataaccagcattaaaggaatagggaatataaatgcctggatgaccattgcatatactgaaaacttcagcagcttcccaaatgcgcggaaatatgcggtgtatgtgggcgtcataccctacgagcacacctccgggaccagtataaaaggccgaaaaagagtgagccaatttgctcataaggaaataaagcaggaattgaatcaagcagctaaaaccgcgataagacacgatccggaacttcgggcatatgcggaacgaaagttaaaaaacaaatgctatcccctggtattaaacaacgtgaaattcaagctcattctacggatgtttgctttggtaaaaagaggtgaacagttcgtggaaaattataaaagagctgcataagaacaactgttttaaataaaatttggaaatatggttaacctagaata

SEQ ID NO: 3571 - DNA, 1145 bp, unidentified
  source 1..1145: mol_type = unassigned DNA; note = element_5439ffe
  misc_feature 1..2: note = core
  misc_feature 3..190: note = LE
  misc_feature 191..1129: note = CDS
  misc_feature 1130..1145: note = RE
  misc_feature 30..200: note = bridgeRNA
cttgtatgtcgggaaaggagcatattgagagctgacgggggtgggttcatgacaccgcccccgtcgcgactggaagcccgcagccgcctcggcttttaaaccgcgaatgagcttggtgctccagtcgcttcttccactcccggacagttgccagggcagaaacccgcatcagcaaggaaggggcacgaagatggtagatcattgctacggtggaatcgacgtatcgaaggatcgtctcgacgtacaagtgctgccgcaggggcgatgcttttcggtggataacaccgctgccggctggaaacagttggtcgaccggctgcgcggcctgtcgattgcggcgcttggcatcgaaccgagtggcggctacgagcgcggcgtcatccgagccctgctggccgcgggcctgtcggtgcgacgcatcaaccccaacaaacttcgccagttcgcccgcgcccgcggcgtcctggccaagaacgatcgcctcgatgcccggctgatcgccgagtatgtcgcgatcatgccgacacgggtcgtgcaccgcgatcctgccgcagagcagctcgctgcggtcgtcaccatgcggcggcagcttagcgatgagcatgtcacggtcgagaaccagaccgcccacatcgaggatgccatgttgcggcgcctcaataaacgtcgcctggcgcggctcaaggccgacatccttctgctcgacaaacgtatggccgagatcgtcgccagcaatgccaatctcgcgcggcgttacgacctgctgacctcgatgcggggcgtaggcccgacccttgccttcaccctcatcgcgttgttgcccgaactcggccagatgagccgcaaacagatcgctgctctcgtcggccttgcgccctacgacttcgatagtggcaggctcaaaggacatcgctgcatctacggtggccgcatgccggtccgcaacgtcctttacatggccgccctcagtgcagcccgatataatcccgtcctcaaaacccttcacaatcgtctcgcagcgaccaacaagaaacccaaagtcgttatcgttgccgtcatgcgaaagatgatcacaaccctcaacgccatgctccgcgacaatcttgcgtggcagcctaaatccgcctgagccaacgtcacagttg

SEQ ID NO: 3572 - DNA, 1484 bp, unidentified
  source 1..1484: mol_type = unassigned DNA; note = element_5446ebd
  misc_feature 1..4: note = core
  misc_feature 5..256: note = LE
  misc_feature 257..1474: note = CDS
  misc_feature 1475..1484: note = RE
ctcactggtgcaccctccccgcggaagaagctggaaggatgcttgagaactcccggtgcccgtcgggccatcgccacgaaggcttgccttgcgaaggccacgatgagttcagcgaggcccgacggcccgggacgccttgagcggcaacaggaccacgcgctctcaagcgccgatcagtgagcctcctgccacggcgtcccggtaccggcgggtgcaaccgccccctcccactgccaccgcagcggaaaggatcagcatgaatgctgccacaccagcccggctggccgggctcgactgggcctcgcgcctgcacgtggtgtgcgtgctggaccccaacgggcaggtccgcgcccgtttccaggtgccccacaccggcaaggacctgcgcggcctgaccagacgcctggccaagctgcaggtcggccgggtggcgatcgagcggcccgacggcccggtcgtccagaccctgctggacgccgggttccaggtggtcgtgatcccaagccgccaggtcaagcacctgcggggacggtacgggtcggccggcaacaaggacgaccgcttcgacgcctacctgctggccgacgtgctgcgcaccgacggccaccggctgcacccgctgcgccccgacagccctgagaccgccgggctgcgggcggtcagccgcgcccgcaagcaactggtcgaccaccgcgtcgccctggccaacgagctgcgcgccaacctggagatcgccttccccggcgcggcctgcctgttcgccgaggtcgacagcccgatcgcgctgaccttccttggccgcttcccctcggccgagcgggccgcctggctcacccaggcccgccttggcgggttcctgcgccgcgtcggctactgcggccgggccaccgccgcccagttgtaccagcgcctgctggacgcgcccgacgggttggccggcgccgaagcagatgcccgcgccgcggtcaccggcagcctggtcgccgccctgcaggccgtccgcgcccagatcgaccagctggacggcgagatcatcgagcggctgggcgcccacgccgacggccacatcttcaccagcctgccccgctccggccgggtccgggccgcggccctgctggccgagctgggcgactgccgccagcgcttccccgacagcccctcgctggaatgcctggccggggcggcgccttccacccgccagtccggcaagcacaagaccgtcaccttccggttcgcctgcaacaagaagctgcgccaagccgtcatggacttcgccggcgactcccgccacgccaacccctgggccgcccacctctacaaccaagcgcgcgcccgaggccaccgccacccccacgccgtgcgcatcttggcccgagcgtggcttcgagtgatctggcgctgctggcaagacggcgtcgcctacgaccccgcccaccacggcgcctaccagcgcctgatcgcgcaaggaggttgacacagggcta

SEQ ID NO: 3573 - DNA, 1386 bp, unidentified
  source 1..1386: mol_type = unassigned DNA; note = element_544a9ea
  misc_feature 1..2: note = core
  misc_feature 3..83: note = LE
  misc_feature 84..1124: note = CDS
  misc_feature 1125..1386: note = RE
  misc_feature 1155..1372: note = bridgeRNA
gatgaggtggatggctcccgctcacggcatctaagtgccaagatgagttgctgtcatgcaaacccgataaggagccacccaccatggagattagcacgatcggccttgatttggccaagaacgtttttcaggttcacggtatcagcgcgaccggagaggtcgtcattcgcaaggcgctgcggcgatcgcagatgctgccgttcttcgagaagctgccgccctgcctggtcggtgccgaggcttgcgggacatcgcatcactgggcgcgcgaactgaccaagctgggtcatgaggtgcggctgatgccggcgacttacgtgaagccctatgtgaagcgcggtaagaatgatgccgccgatgccgaagcgatttgcgaagcggtcacacgccagacgatgcggttcgtgcccatcaagtcgcgcgagcagcaggcggcgttgtcactgcaccgcgtgcgccagctgttgatcaaacagcgcacgcaactggtcaacatgatgcgcagcgtgctcgctgagctgggtaccgccatcccggtcgggatcgtaaaggcactgcagatggcgcgggagatcgccgagggtgagtccaagctcgacctgccgaccgaggcgaccaacgtcgtcaccatgttggcagagcagttgctccagcttcacgcccagttgcgcaagctcgacctgcgtctcgccgctctgcagcgaagcgacgagcgggccaaacgcttggccacgatccctggtattggaccagtcggggcgactgcgctagctgcatcggtgaccgatccaggccagttctcgtcagggcgcgagttcgccgcttggctcgggctgaccccgcggcagagctctagtggcggcaaggaacgcctggggcgcattacaaagatgggcgaccgatatctgcggcagctcctggtcatcggcgcaaccgcgctggtccgatacgccaaggagaaacccagcacggtcgatccgcgctttgtcgctctgctcgccagaaagcccgcgcgcgtcgcctcggtcgccatcgccaacaagatggcgcggatcgcatgggcgatcatggcgcgcggcggcgtcttcgaacgcgggcattcgccgatgctggcggcagcatagatcaggagcttagctgaggagatcagcttcacgaagttgtgagagcgaaggatgtgatggcaaaaccggtcggaccgggaacaaggacaacccaaggaccgtcctaggcgtaatagcctgcttagccgataggaccttgttcgcggaccccatcagggccagcagtctacaccgactgcatcaacaggccggacagacgactgcacacaacggaatgtcagatcatcactttatgcttgcaacgcgggagccatccacagag

SEQ ID NO: 3574 - DNA, 1505 bp, unidentified
  source 1..1505: mol_type = unassigned DNA; note = element_5453d57
  misc_feature 1..2: note = core
  misc_feature 3..214: note = LE
  misc_feature 215..1489: note = CDS
  misc_feature 1490..1505: note = RE
  misc_feature 2..205: note = bridgeRNA
ctgatacgactaccttcgttcatggccgggacctccggggaacgctttgttcgcttgtcctgcgaggactgtcgtgagacggcgtccctggaggtttcagccggaggcttgtcatctcggaaggtgtcgtcccggtgaggactggtttatcagcacgatgcaatgcctcccgctccggttgtcgtgtccatagacgggaaaggaatcgacgcacttgttgggagttggtatcgactgggcggagtcgtttcacgatgtcgcgctcggcagacctgataatgggatcgtcgaacagtttcgtatcgaccacaccgcggccggtgtgggccggttgatcgctcggtgcttggagttggaaaccgacccggctgatgtgcgtgttgtgttggaaacccggcacggtgtattggtcgaggcattgaccgacgcggggtttaccgtgttgccggtcaaccctgacctggtcgcccgccgtcgtggcccggcgaagaagaaagacgacgccgaagacgcccggatctgttgtttgctggcgttggatcagtttctggaattgcggaagttgatcccgcacggcaatctggctggcgaattgcgttcgatcgcccgcgatgacgaacgagcggcccgggaccagcggcggctgctcaaccgtcttcgcgccgatctgctggccactttcccggccgcgctgaccatcgccggtgacgatctgggcagccctgtcatgctgaaactgctggccacctggcccacacacgcccaactcgccggcgccggtaccgacgcgatcgagtccttcgcgcggtcttcccgacacggctggccggaccggttcgccgcccgtgttgccgacgccctcaccgtcgagcaactcccggttcgcgattacctgatccgcgcgaaagccaccacaatctcgttgaccgcgacccagcttctcgcgttgcgtgaggctcggaaatcgtgggaacgccgcatggcagaactgctcctcggcgacacccggtacggccgcgccaaacaacccagaaatcccgatccgggaaaagcgataccgggcggtgacatctacctgagtttccccggacttggggacatcctcgccgcccggatcgccggagagatcggggatcacatcgagcaattcgacaccccgaacgggctgcaatgctacgccggaaccgcacccgtaacccgacgatccggccgcagcgagctcgtcatcgcccgccgcctggcccataaccgatatctcggcaccgccgtgcaccaatgggccttctgcaccctcacaacctcgacctgggcgcgcgagttctacgaccggaaaatcaccgccggaaaagcacaccacagcgccctgcgcgccctcgccaaccgctggctggaaatcctctggcactgcctcaccaaaggcatccgctacgacgaagccgtacacatacgcaaccgatccaaaaccctccaaacagctaccgccgcctgaggttgacagaaggtgt

SEQ ID NO: 3575 - DNA, 1399 bp, unidentified
  source 1..1399: mol_type = unassigned DNA; note = element_54548ef
  misc_feature 1: note = core
  misc_feature 2..254: note = LE
  misc_feature 255..1073: note = CDS
  misc_feature 1074..1399: note = RE
  misc_feature 1174..1393: note = bridgeRNA
taatgggatggtccgccgccttgacccaagtcgggtataagaggcttacgaaggaggcgtcccatggaactacacacgatcggcattgatctcggcaagacagtcttttatctggttgggcttaaccggcgtggcgaggttgtggtgcgcaagaagttttcgcgcaagcaactgccgcactttacggcgaatctgcaggtcgaattgatcggtatggccgggcgctgcaagagcaagggcatgcagtgcggctcatgccggcgcagtatgtaaagccctacgtaaagacgaacaagagcgactatatcgatgctgaggcgatcgctgaagctgtgaccaggccaaggatgcgtttcgtgccgatcaagagcgatgaccaactggacctgcagtccctgcatcgggtgcgtgagcgctgggtaacgcgtcgtacggccgtagtcaaccagattcggggcttgctattggaacgtgggatcactatacgcaagggacgttgccacgtggatgcggccttgcccgggatactggaagatgccagcgccaggctatcgggcgccttgcgcgtgctgctggcgcaactgaggctggagctcgatcacctgcaaacccgaatcgacgaagctgatgcggtgatccagcagacggctggcgagaacgaagcctgccgacgtttggttgcgatccccggcgtcgggcctgtgacggcgaccgccatcatcgcggcgattggtaacggagcagctttccgcaagggtcgggagttcagtgcctggctcgggatggtcccgggagaatacaccaccgggggtaagcaaaaactgctggggatcagcaaacgggggaacacctatttgcgaagacttttcgtgcaaggggctcgcgccgtcctgcaacagagcgcgaagcaatcttccggcttgagtgcgtggctggcccaactcacagcacgcacccaccctaacgtagccgcagtggccttagccaataaactggcgcgcatggcctgggcggtgctcgccaagaatgaaccctatcggccccccgtgttggccgatgcggctacagactgactggcctgcagatgacgcctggctgaggccaggcttggaaatcgcatacgcgattcccacatctacagcccagcggctactacggagttgatgatttctgccaggtctgctggcgaagcatgagatggcacaacggtcgaacccggcgctctcgaaacctgtcaaccggaaaagtctataaagactgcctaactaagtaggacgagggcgcagcgcattccatcaaggccaggagcttcgcgctccaacgaaggccgtatacattggcgcagaccaaactgttgtcactctcatttttcgcttgcgacgcggtcgcggaccataca

SEQ ID NO: 3576 - DNA, 1351 bp, unidentified
  source 1..1351: mol_type = unassigned DNA; note = element_5460186
  misc_feature 1..2: note = core
  misc_feature 3..55: note = LE
  misc_feature 56..1093: note = CDS
  misc_feature 1094..1351: note = RE
  misc_feature 1092..1339: note = bridgeRNA
tgatggtgtggacacccccacccattccgccgatgctggcgggaggcaaatggtgatgggaaaggtgaatgctatgcgtcagcttactttcggaatcgatctcgccaagaatgtcttccaggtacacgccgtcgacgcggctggggtaatcgtcgtccagcaaaagcttcgtcgagggcaacttctggctttcttccagaaggtcgagccaagcctcatcggtatggaggcatgctccgctgcacatcattgggcgcgcgaattgatggcgattggccacgacgtgaaattaatggtcccggcatatgtgaagccatatgtcaaacgggggaagaatgatgcggtggacgccgaagcgatctgcgaggcggtggcccggcccacaatgcgcttcgtcccggtaaaaacctcactgcaacaatccattctcatggttcatcgctcgcgcgcgctgctagtccggcagagaacgatgcttgtgaacgctcttcgagggcatttggcggaactgggtatcgtggcgccggtagggatcgagagggtagcggacctggtgcaacgtgtcttttctgaaaggcgggatctgcccgatcttgtctacgatattgttgcttccctggtgaagcagatcggctgcctgacagatgaggttcgcatccttgaggtgaagatcaagcaatggcatcgcgacaatccggtcagccgtaggcttgcgacgatcccaggcgtcggcgtcattactgcgaccgctctggccgctaccatcagtgacgcctctgcgttcagatctggaagacagttcgctgcgtggcttgggttgaccccgagatcgaattcttcaggcgggaaggaaaggctcgggcgcatcacaaaggccggtgacaggtatctccgaacgttattggttgtcggcgcaaccgccgtcatacgatacgcgcggcagaaggccggtagcccgctgatggaatgggttaggaagctgctgcagtcgaagtcgccacggctggcctcggtcgccttggccaacaagatggctcgaatggtttgggctgtcatggcacacaataccgtctaccgaccgacagcagcttagagaattacgacgtaccgatcgtcgaccaagttcggagggcctgcacataatcttgatgaataccggcgccgccggagatctgggaaaatccgttcgcggagctgcatcttgtgtatgcgcaattttggtaggaacccacgatctgcggacttcatcagggccaacggctattagccgaccatcaaaggccgtacatatggaagcagcccgccgagattcttgattgtgaaaaggcttgacgaagggggtgtccacata

SEQ ID NO: 3577 - DNA, 1439 bp, unidentified
  source 1..1439: mol_type = unassigned DNA; note = element_546af0b
  misc_feature 1: note = core
  misc_feature 2..185: note = LE
  misc_feature 186..1169: note = CDS
  misc_feature 1170..1439: note = RE
  misc_feature 1194..1436: note = bridgeRNA
atggtatggacgcctccctctacgccagcttgcggcgagaggtaagcgaaggtaggtgaggaccctccgggccaacggcatcttaagtgcccacggtgtaaacggaggtccacacaggcaaaccggaggctccatcatgaacgatacaacttccatggttggcgtggacatcgccaagcaagcaggtgttccagatccacgaggtgagccgggcgaccggagagatcgtgcgggtacagctcaagcgcgcgaagtttctggcctacttcgtcaaccggccgccatgcgtgatcggcatggaggcgtgcggcggcgcgtatcactgggcgcgtgagctgatcgcgctggggcatgcggtgaagctgctgccaccgcagaaggtgcgtccgttcgcggcgggcaacaagaacgatgtcgccgacgcgcaggcgatctggacggcgatgcagcaaccgggcatgaaagcggtcgccgtgaagacggagtcgcagcaggcggtgctggcgatgcaccggatgcgcacgcagttggtcaagttccgcacggcgcaggtcaatgcgctgcggggcctgtttggcgagtacggcgaggtgatgcccgtgggacgtctgtcggcgatgaaggcgatccccgaggtgctgggtcgtctggaggatcggctgcccacggtgttgatcgagacgttgcgcgaacagttccagcggatccatgacctggatggtcaggtgctgatgatcgagcagcgcttgaagcaatggtttgagatggagccggagtgtcagcggatcgcggcgatcccgggtgtcgggttactaagcgctacggcggcagtcgccacgatcggcgatccggcgacattccgctccgggcgggagtttgccgcatggttagggttggtgccgcgacaggtgggtacgggaggcagggtgaagctgctggggatcagcaagcggggcgatacgtatctgcgcacgttgctgatccatggggcacgggcggtgcttgcgcgtaacaagacgccatctccttgggtcgcgaggttgtgtgaacgacgcccacagaacgtggtcgtggtggcgatggccaacaagatggcgcggacgttatgggccttgatggcccaccagcggacgtatctggcgaattacgccggtgcggaggtgttgtaacagtgtcaataggaagatgttccagacagcgttccagagctgcgcaagtgacgtgatgtaagtgatggcaaacaggtcggaccgtgactcaccaaacctggtttcccctttgggcgatgaagcccttcggcaagataaggcgtgagtcagcgattatccatcagggcccgcaggcgatcggtctgcacgacaggccggatataagactgcagttctcctgtcgctcatcactgcaaagcggctcttgccagatcgggaggcgtccatata

SEQ ID NO: 3578 - DNA, 1362 bp, unidentified
  source 1..1362: mol_type = unassigned DNA; note = element_5474ae4
  misc_feature 1: note = core
  misc_feature 2..74: note = LE
  misc_feature 75..1100: note = CDS
  misc_feature 1101..1362: note = RE
  misc_feature 1113..1352: note = bridgeRNA
tatgggatggcccgcccctctcggggcgatcgtttaggatcgccttggtgaaagttagagagaggagcggaccgatgaagatcgtggtactggggattgatctgggcaagacctactgcagcgtagtgggtttggacgagagcggcgcggtggttctgcgtcgccggttgggtcgggtcactttggagaggtttgtcggcggcttgccgccctgcgtggtggcgatggaggcttgctgcggtgcgcatcaccttggccgtgtgttcggcgagcagggctacgaggtgcggctgatgtcgccggagtatgttcgggcctatgtaaaggcgcagaagaacgacgaccgtgacgccgaggcgattgccgaagctgcgaggcggccgacgatgcgcttcgtgccggtgaagagcgtggcgcagtcggacgtgcaggcgctgcatcgggcgcgggagcgtttggtgtcggcacgcaccgcgctgatcaatcatttgcgtgctctgctgctggagcgtgggatcgtcgctccgcaggggcgcgccaggttggaggcggagctctgcaccttcgccgacgaggaggccggctctttgagcccgcgcatccggctcctggtcgaagatctgcgccgggaatggcggtccctggatcagcggatcgctgccttcgataaggaatttgttgccctggcgcgccaggacgaggccgcgcggcggctgagcacgatccccggcatcggcaccatcaatgctacggcgctggtcgcggcgctcggcgacgcccggagcttccgccggggccgcgacttggcagcctggcttggcctgacgccgcggcagaggacgacaggtggcaagcctcggctgcttgggatcagcaagcgcggcaatcgatacctgcgcaagaacctgatccatggcgcccgcgccgcgctgcgccacttggtcgcgcaggatacgccgctcggtcgatggctgcgcagtctcctgcaacgggcgcacaagaacgtcgtcgtggtcgctctcgccaacaagctggcgcggatcgtctgggcggtcctgacgcagggccgagcctatgcgtccggataccagggagtgtgaagcgataacgaagcggtcgcgcggcgcatcgagcatcgggcggtcggcgatgtctgcgggtggtggaaggaagatggcccaacagtcgaacggcagcacggaaacctggggtactgaacggccctcgaggccgatgtgattatgaggaccgagctgcgcggatctccatcttggccagagcgcgaccctgagaccggatacgttgaagcagactgaatagtgccgaacaccaaaaccacttgccgatggggcgggccatacg

SEQ ID NO: 3579 - DNA, 1344 bp, unidentified
  source 1..1344: mol_type = unassigned DNA; note = element_54780fe
  misc_feature 1: note = core
  misc_feature 2..70: note = LE
  misc_feature 71..1093: note = CDS
  misc_feature 1094..1344: note = RE
  misc_feature 1094..1319: note = bridgeRNA
taattatatggtccgcctcactctcaaactcctatgcttagagtaggcatgcagaaatgaggtgaaccatatgtcttccatccaaattttaggtatcgatttaggtaaacatagctttcacgtggttggtcataaccacttgggaaaagaagttttacggaaaaaatatagtcgtaaccaattaatctcttttattgcgaagctagaaccaacaataattgcttttgaagcatgtggtggctcccattggctcgctcgaaaatgcatagacttaggccatcaggccaaacttatcccgcctcaatatgtaaaaccttatgtgaaaggtaataaaaatgacttcattgatgcggctgcgatagcagaagcagcaagtcggccatctatgcgttttgttgcggtaaaaacagaagatgcacaagttatagcaaccattcatcgaattagagatggttatataaaagaacgaacggcatgtatgtctagaattggcgccattctactcgaatttgggctgagcctgcccaaagggcatgcgaagatgaaagctctttttcaatggttagcagagcaaaatcaagaattacccccgagtttactcaatgagttatgcagtattcatgagcattactcttatttgagccaacaaataaagaaacaagacattaagcttcatgatatttctgaaaataatgaattagctcggttattaaaaacaattcctggtattggagatttaacatcaacgctttgtatcgctgatgtgagttcttcaaataactttgtaaacggtcgtaatatggcagcatggctaggtcttgttcctaggcagttttcgacaggaggtaaacccaaattactgggtgttagtaaacgaggaaataaacagcttcgaaccttatttgttcatggtgctagagcggttctatctagacctgacaccacagggaaagtatttggtcagtggttggttaatttgagggcaaccaagccgtttaatgttgtagtggtagcacttgccaacaagctagcaagaatagcttgggcggtgttacaacaccgccaagcttttaaggctgcaaagcagccataaccgagtttgcaacgtcaatgaatgtgatgacaaaaacggtcaatcggccagattaaaaacctgatacaaaaaacagcataaaaatgctttcggctttttaaggataatctggcgcggatatcatcgtggagctggtaagccatgggctcaccaaacgtgactccgaatacattagcgcaaactaactccgtcattaattaattgtagttgcaattaagaggcggaccatacattaagaggcggaccataca

SEQ ID NO: 3580 - DNA, 1228 bp, unidentified
  source 1..1228: mol_type = unassigned DNA; note = element_5487394
  misc_feature 1..2: note = core
  misc_feature 3..241: note = LE
  misc_feature 242..1213: note = CDS
  misc_feature 1214..1228: note = RE
  misc_feature 6..212: note = bridgeRNA
cttgtatctggacaccaccgccgaacagaggtatgtcttccgactgatcatcggagcagatgcaagaagcccatgcgctcctgaagcttcgagcttgtatcgtagatcggctctgcatctgtacttgctggccctgggtgtccgcacggtatccagagtctgccgcagggcgtgaactcacatcacaaggcaggaccaggaccggcgttgatcgtcgtccattccgtctgaggaggtttccatgtcccccatcgtgggcatcgacgtcgccaagcatagcgtggctctggccatcgagctggacaatggcaagcaccgcactaaggccaagctcgccaacgatccgaaaggatttgcgaccctgcacgcctggctgtgcacccacgcccagcctgacagctgggtcgtgatggaagccaccggcatctatcaccaggcgctggccgagttcctatacgcgcacggctaccgggtgtgcgtactcaatccagcgcaggtggcgctgtacgcgcgtcgccagttgcagcgggtcaagaccgaccgcagcgatgcgaagctgatcgccagctacggcttgcgccaccgcgaccaactgcgtgcctggcatcccgatccgccggccctgaagacgctcaaggcgctggtgcgccgccgcgatgacctgctgcagatgctgcagatggaacgcaaccggctggaggttgcgcaggcgaatggacagccctcgatccagggcctgatcgaccatctgcatgcccgcatcagcgagatccagcaggccatcgaggaccatatcgaccaggatccggacctgcgccggcagcgcagtctgctgaccagcatcgacggcatcggtgacatcagcgccgccctgctgctggccgagttggggccggtgaagcgcttggccgacgcggccgcggtcacggccgttgccggcctgaatcggcgtctgcacgaatcgggcaggtaccagggcaaggtctgcatctgccgcaccggctcggcgcggctgcgcgccggactgtacatgccagccctggtggccatgcgccataacccggtggtcacggcgctcaaacagcgtctgcatgcccgcggcaagcacggcaagcagatcgtctgcgccgccatgcgcaagctgctgcatctggcctacggcgtgctcaaatccggcactgcatttgacccgcacaacgctcttgccagataaggggcaagacggtat

SEQ ID NO: 3581 - DNA, 1367 bp, unidentified
  source 1..1367: mol_type = unassigned DNA; note = element_54b3c86
  misc_feature 1..2: note = core
  misc_feature 3..82: note = LE
  misc_feature 83..1105: note = CDS
  misc_feature 1106..1367: note = RE
  misc_feature 1079..1354: note = bridgeRNA
tgatgggttggatgcccctcctgtcggcatcgtaatgtgccacagtggttttgttcaaagccacaaaaaggagaaagcatccatgtccgaagttagcattataggggtagaccttgcaaagcggttttttcaagttcatggcgcgttgccagatggcaacgtcgcctttcgcaagaaattatcccgctcgcagtttatgaagtttcttgcagaacaaccaccttgcctgattgcaatggaggcttgtgcgacggcccattattggggacgggaggcgctcggatctggccatgaggtgcgccttattccaccgatttacgtcaaaccttttgttaagcggcaaaagaatgatgctgctgacgcggaagcgattgtggaagcggcactacggccaaccatgcggtttgttgaagtgaagagtgccgatcagcaatccctcgggctactgtttcgcacacgagagcttcttgtgcgccaaagaactcaattaattaatgctttgcgcgggcatttggccgaatatggaattgtcgtcgccatcggggttagaaacgtaaaggtttttcaacaagtgcttcttgatcatggcacaaggcttcccaagaccgttctgtcgatcagtggggtgtattttgagcaaatagccgcgttgacagagaaggttactgagttggaaatagcactaaggcgtgagaccgctcgtgatggtcaggcaacactcttgcaaaccatgcctgggatcggtccgatgagtgccgcagccattcaggcatttgcgccaccgctggaaaactttgcccgtggtcgggactttgcggcatggctgggcttggttccgcgccaacactcgagtggaggcaaggaccggttagggcgcatttccaaaatgggacagcgtgacattcgcaggcttctgatcatcggggccatgtccatcgtaaactgggccagccgaaaggggagccgagactcttggcttatgcgtctactggagagcaagcccaaaatggtggttgccgtagccttagcaaacaaaatggcccggcgtctctgggcgatgtgcgttaagaaagaggtctatgaaattccaatcctggtggcgtaataccatcaagacttggatgacgacgggtatgtgaggagttcagaagacattacggaaacacgatcgacgagagaggctcaggaaaaccagttggatacgcggcgcaaaaagcccgttaagatgatttggacctgacccgcgtatgtccataaaggcccgcagcaaatgtaaggctgcaatctgaggccgaacacatgactgcacccgatcataccttccgaagtgttcaaaaattccttgcgtaaaacggggcatccacaca

SEQ ID NO: 3582 - DNA, 1340 bp, unidentified
  source 1..1340: mol_type = unassigned DNA; note = element_54bbf49
  misc_feature 1: note = core
  misc_feature 2..81: note = LE
  misc_feature 82..1110: note = CDS
  misc_feature 1111..1340: note = RE
  misc_feature 1109..1334: note = bridgeRNA
gaatgatatggactcccctgcatagcggcatcgatgtgccatagtgaagttgctaaacgcttcaaaattaggagagtccatatgtctttaattaaagttcttggcattgatttagccaaatatgtttttagtatccatggcgtagatgaacatggcaagtgtaaattacgtaaaactatcaaacgaaacaaactcttagctgaagttgcgaagctaccgccttgcctgattggtatggaggcctgctcaggagcccattactgggcacgagaatttaccaagctcggtcatgaagtgcgtatcatggcgcccaagtttgttattccttatcgacaaagcgaaaagaatgacgctaatgatgccgaagctatttgtgaggcagttactcgccctaaaacccggtttgtttccgtcaagagtgaagagcaacaggccgtactgtgtctacaccgtattcgtcaaggtctgatcaaagacagaaccgctcgcatcaatcgccttcgaggtctactggctgaatttggcattatcatgcccaaaggccgctatcctgcacaaaatgccatttccagcattttagaggatgctgaaaatagcttacccatacttgccagagaattacttaatgatgtctggcaaagcattaaagggttaaataaagaaatactcagctacgacagaaggctatatgcactggccaatcaaatgaaagatacaaagcggttaatgaccattcctggtataggagaggtgactgcgacggcagttattgccgcggtgaatgacgcaaagcattttagctctagtagacagtttgctgcctgggttggtttagtccccaggcaatacacaacaggtgggcaagtaaaactagggcggatcagcaaacgtggtgaaaagcatatacgaacctctctcattcacggtgctcgagccgttattgccaactgtaaacataaaaccgacaagacgagtctctgggttaaagacttaattgaacgacgagggtttaaacgagcaacagttgccttagccgccaaaaacgcccggttgatctgggcattattacactctggaaaagagtatcaggttaattatttacacggttaaccccaccgggtcttagcattagcaattgacgataacacggtcagaccgagagtgattgaatctggttattcgggaagtgagaaaacactgtctaacgaatgagatcttcactcaagcgcaaatcatcagggcgatagcgtagataagctaataaacgccgaatgtagagctgctgtcagatcttcttgttgtcgaaaagagctattgcttgacaaaggggagtccatgta

SEQ ID NO: 3583 - DNA, 1354 bp, unidentified
  source 1..1354: mol_type = unassigned DNA; note = element_54bf0e9
  misc_feature 1..2: note = core
  misc_feature 3..123: note = LE
  misc_feature 124..1092: note = CDS
  misc_feature 1093..1354: note = RE
  misc_feature 1073..1341: note = bridgeRNA
tgatggggtggacgcccccagcggcatctatgtggcagagtggtggtgctgcagaccaccaaggaggcgtccgtgaaacaaattatcacagtcgggctagatttggcgaagcacgttttttaggtgcatggcgcggatcgcgacggcgcagtcgttgtgcgcaagaagcttcggcgtgagcagcttctaccctttttcgcggaattgccacgctgcacggtggcgatggaggcgtgcggcggtgcgcatcactgggcgcgggagatcggacggcttggtcacgacgtgaagctgattgcgccagcctatgtgaagcccttcgtgaagcgagaaaagaacgacatggccgatgccgaggcgatctgcgaggccgcgcagcgccctaccatgcgattcgtgtcggtgaagagcgaagcggcacaggcttctcctctggcgttccgcacccgcgacctgttggtccggcagcgaacgcagcccatcaacgcgcttcgtggtcacatgaccgagttcggtatggtcgtcgcgcaagggcccatgcacgtcgctaggctgattgccattgtcggagatccggactctgatctccccgagtcagcacgcgtcgtgctggaggtgctcatcgtcgaactgcgtgcgcttgacgagcgggttctcaagcttgatgccgagatcgtgcaccgcgcgaaaaatgatccagttgcaaggcggctgatgaccattcccggtattggagcgatcacggcgacggctctggtggcattggcgccatcggctgcaacgttccggcgggggcgtgatttcgccgcctggctggggctcacgccagtgcagcgatcaagcggcggcaaagaacggctaggtcgcatctccaagatgggcgaacgcacattgcgacgcctgctcatcgtaggggcgagcgccgtcgccggctgggcgtctcgcaagggcgcaaagccgggatcgtggttggccagcatgatgacgcgcaagccgccaatgctggtgcgggtcgcactcgccaacaaaattacccgaatagtctgggcgctgctcgccatggcggggtctaccgagctccggccatggtagcgtaagccgtcagggtcgtgggtgccgtgaagcaggctgagggcgaaggagagtatggcgcaacggtcgtgagacggggtcggtgagccagttcatggacaagcgctatccaagcgccaggttgttttggagccgatcctcgaactcccatacgggcccgcggcatgtcatggccgcatgaaggccggacacatgtcagcacccgatccgcgcgccgttcgcttcttcagattcagcttgcttcaacgggggcgtccacaca

SEQ ID NO: 3584 - DNA, 1452 bp, unidentified
  source 1..1452: mol_type = unassigned DNA; note = element_54c678e
  misc_feature 1: note = core
  misc_feature 2..79: note = LE
  misc_feature 80..1135: note = CDS
  misc_feature 1136..1452: note = RE
  misc_feature 1217..1443: note = bridgeRNA
taatgggatggtccggccgtgcttctgccctgcttgcccgtaagctgtggggtttcgagccgcgcaaggagcacgtcccatgtcacggtcttcttcctctgccaccattgccacgctgggcatcgatcggggcaagaacagcttccaccttgtcggtcaggatgagcgcggcgccatcgtgcggcgcatcaagctctcccgctcccagatcacccagcgactggccaatatcccacagtgcctgatcggcatggaggcctgcgccggggccccccacatcggccggcaactgcaagcgctcggccatgacgtgcgcctgatcccggcccagtccgtgaagccgtttctgaaggggcacaagaacgactaccgcgatgctgaagccattgcggaggcggttcagcggccgaccatgtcgttcgtggccatcaagaccccggaccagatggaccttttggctctgcatcgggtgcgcgcgcgcctggtcagccagcgcaccggcgtcaccaaccagatccgcggccttcttctcgagcgtggcctcaccgtgcgccaggggctcgtgccgttacgccggaccttgccggggatcctgggttcgtcctgtgacgccctgtcgccacggatggttcgcctcatcgtcgacttggctgaggattggcgccggctcgacgagcgcatcaccgaggtctcggccgagatcgaggcgctcgccgcgcaggacgagcactgccagcgcctgatgagcgtgccaggtgtcggaccgatcatctcgtcggccgtcgtggcggcgattggcacaggcgccgggttcaagcaggggcgggacttcggggcctggctcgggctggtgccaaagcaggagtcgaccggcgaccgtacgatcctgggcaagatctcgaaacgcggcaacaagtacctgagaccgctctttgtccaggccgcccatatcgtgctggtgcgccggccgcatggggcgaggctcggcctatggccctggatcgagaccgccgggcggcggctgcatcgcaacatgttggtgatcgcgccggccaacaaacttgctcgtatcgcttgggcggtgctggcgcgtgggcatgcttatcagccgaggagcgcctcccatgcgatgtgaggtgagggcgcttcaggctctttctgcaaccgatcagccctgaggagacgacgatgaagtcgatgatctcatcagcggctgtcccaccgaggtctgcgagatgaagaaggagatggacgaacggtctgcccgcagcaaccacaagactgggtgccatgatggcctataaaggtctttctccgagcgagtcctggatgcgcgcggatacccatgatggcccggagcagaggctccacacagaggccgaatacattgatgcagctctcacgttcgtcagtctgccaacatcatcttgcgacgcacggccggaccataca

SEQ ID NO: 3585 - DNA, 1444 bp, unidentified
  source 1..1444: mol_type = unassigned DNA; note = element_54c73b0
  misc_feature 1..2: note = core
  misc_feature 3..151: note = LE
  misc_feature 152..1171: note = CDS
  misc_feature 1172..1444: note = RE
  misc_feature 1210..1444: note = bridgeRNA
agaatgagatgaacgcatccccaaccattaaatacagtgcacgatgatggatgaagggaaagaacttgaaggtgtggagcctcgcagatttccggcatcatagtgcccaatacgggatacaaaaagttccctcagactggagactccacaaatgaaatatacaccggttggcgttgatatcgcaaaacatctgattcaggttcacttcatcaatgagcacactggcgaagtggtggataagcagcttcgaagcaaggattttctgacattcttcagtaaccgggagccttgcctgattggcatggaggcttgtgggggctctctgcactgggcacgtgagctgaaaaaactggggcacgaagttcggctgttgcaggctcgcttcgttaaagcgttcgttatgggcaacaaaaacgatgtgatggatgcgcgtgctatctggatggcggtacagcagctcagtaaagaaatcgccgttaaaacggaagagcagcagtcagttctggccctgcaccgttcgcgcagacaactggtgaagttcagaaccgcgcagattaatgccctgcatggcacgctcctcgagtttggtgaaaccctacacaaaggtcgggcagcgatggacagagagctaccggcagccctggagcgaatgaagacgaagttgccgccgtatctcatcaccgtgcttgaagaccagtacaccaggttgagtgagctggatatgctgatagatgaccttgaaaagcagcttaacagcgtggcacggcagagcgaaacctgtaagcgcctgatggaaatccccggtgtggggccgttaatcgctacggcggcggtcgccaccatgggaaaggcctcagcatttaaatccggacgtgagtttgccgcctgtgtcggtctggtgccgaagcagacgggctccggtgggaaggttcgcatgctgggcataagcaaacgcggggatacctacctccggacattatttattcatggggcaaggtcggcagcattgctgaccaaagagcccgatccatggatcacggagctgaaaaaacggcggccgacaggtgtggctatcgtggcaatggcgaacaagctggcacggacagtgtgggcaatagtcgctcatgatcgtaagtacgacaaaaatcatgtcagtatcaggccatattaatcgctgataccgataaacataaactctttacaaaagggtgaatgctgaaaggttgctatggcggcccgagtgatgacaaagacggtaagaccgtgactcactaaacctggatgctgccttgggcttaaagctcgccaggagaataaggcgtgagtcagcgaatctcatagtggcccgcagttctgactgactgcaataaggccggatacagagctgcaactactcgtcaatgtcagaacaacggaagccttgcaaacggggatgcgttcatac

SEQ ID NO: 3586 - DNA, 1390 bp, unidentified
  source 1..1390: mol_type = unassigned DNA; note = element_54c814d
  misc_feature 1..2: note = core
  misc_feature 3..1118: note = CDS
  misc_feature 1119..1390: note = RE
  misc_feature 1092..1376: note = bridgeRNA
agatggggtggatgccagccttctccgacggcatcgcaatgtgccaagattgtggtgttagcgccacgcaaaggagaggcaggcatccatggaaaaaggttaccatcattggggtcgatctggcaaagaacgtctttcagctgcacggggcggcagctgatggatcggttgtgttccgcaagaagctgtcgcgcctgcagttttgcaagttcatggcgggtcatccgacatgtatcgtggcgatggaggcgtgcggcatttcccactactgggctcgcgagatggcccggcttggccatcagccgaagctgattgcccctggctgtgtcaaaccgttcatcaagcggcataagaacgacgcagcggatgcggaggcgatcgtcgaggcggcgcagcggccaacgatgcgcttcgtcgagaccaagagcgaggagcagcagtcccgggcgattgtgtttcgcacccgcgaacagctggtcaatcagcgcaccgagttggtcaacgccttgcgcgcgcacctttacgagttcggccatattgctccgcaaggcatcggccacctgcggcgtctggcagaggtcgttgaggacgagaacacggaactgccggatctggtccgcgagatctgcggcgatctgttggaccagatcgaccagctgactggccggctcgacgcactgaagaagacgatcgacgcgctgtccaggaaaggtgaaacatcgcaacgcttgcagaccatgcccggtgtcggccccatcgccgcccttgccatcgaaaccttcgcgccgccgatggagacattcaaatgcggccgtgactttgccgcttggcttgggctggtcccgctgcagaagtcgaccggcggcaagcaacgactaggcaagacctcgaagataggccagcgcgacattcgacgtctgctcatcgtcggcgccatggccgtggtgcaatgggcatcccggaagggtgcgcccgagggttcctggctcgcccgcatgacggcgaagaagccgcgcatgctggtggcaatcgcgctggccaacaagatggcgcgaggcatctgggccatgctgaagaaacaagaggattaccggaatccggcgatggtgcgcgcatgatcattcagcagcgcacctgaagccggtacgtcggggatgtgaggaaggcaagaaccgcatgggcaaatgatcgaccagatcggggtcaggaaaaccagtgtttgaacgagagccgcatgagctcgccaagcagatttggacctgatccgcgcatcaccataccggcccgcggcatgtgaaatggccgcacccgaaaggcctgacacaagtccgcactcgatcacgcgttcaaaggtacaaatcttccttgcaaaacggctggcatccacaca

SEQ ID NO: 3587 - DNA, 1388 bp, unidentified
  source 1..1388: mol_type = unassigned DNA; note = element_54d1cf5
  misc_feature 1: note = core
  misc_feature 2..89: note = LE
  misc_feature 90..932: note = CDS
  misc_feature 933..1388: note = RE
  misc_feature 1159..1383: note = bridgeRNA
caatgggatggactcctcctcccctaaacggcatctaggtgccagactggaagcgttatctaccagtcaacagagaaaaggagtccaccatgaacaagcttagtcgcgtgggtattgatttggcaaagaacgtctttcaattacatggcgctgatcggcatggcaaggtgctgtggaaacggcgtctgtcgcggaacaaatggcttaaggccttgttggaggtggccgcccccgactgcgagatcggcatggaggcctgtgggggcgcacatcactgggctcggatccttcaatcctacggatacacggtcaagctgatcccgccccagttcgtcaaaccctatgttaagagcaacaaaaatgatgccaaggatgccgaggccatctgtgaggccatgagtcgccccggcatgcgttttgtctcggtcaagacggttgagcagcaagatatacaggcagtacaccgggtccgctcggggttaatgactgagcgcaccgcactcgcaaaccggatccggggattggtggccgagtacggtctggtgacgccacaggcattgtctgccttaaaacgtgcggttccggattggctggaggatgccgacaacggcttaagtgatcgcttccgttcaatgttgcacggactctgggaagaccttcaacggttgagtcaacggattggtgaattggataaagagattatcttgattgcgcaaagcaattcagtgacccaacgactgcaacaactgcgtggcgtaggtcctctggtggccactgcattagttgccaccgtcggcacggggcaacagtatgccaagggcaaacagatggcagcctccatcgggctcacgcccaggcaacacagctctggcaacaaagaccgttattgggcattagcaaacggggtgatgcctatctgcggaccctcttgatccacggggcaagagctgtggtctcccaggccaaacaccgggacgatcgtttaagtcgctggtgcaccgatcttgcccggcgaagccaccccaatgtagcagcggtggcgctggctaacaagaccgtccgcatggcttgggcgatgatgcaaaatgagtcagattacgatcccgggttctcgtcaccttgatgaaatcccaggatcatcaccccttaaccgacaacaacgattgcgaagcaaattgatagatggttaacaggtcgaaccggcgttgatcaaccccgtgaatgtccaggtgcatcaagcacggagaaccgattgggagtcaacgcgcgaatagcccattatggcccggcatcaacgcatgccaacttaacgaggccgaatatacgtgcgcagtcgatcctaaaaaaccaaaagacagtttgcttgcaaatgaggaggagtccatata

SEQ ID NO: 3588 - DNA, 1413 bp, unidentified
  source 1..1413: mol_type = unassigned DNA; note = element_54e2e22
  misc_feature 1: note = core
  misc_feature 2..90: note = LE
  misc_feature 91..1125: note = CDS
  misc_feature 1126..1413: note = RE
  misc_feature 1182..1408: note = bridgeRNA
caatgggatggactcctcctcccctaaacggcatctagtgtgccagactggaagtgtgagtcaccagtcacgagagagaaggagtccactatgaacaagcttagtcgcgttggtattgatttggcaaaaaacgtattccagctgcacggtgttgatcggcatggagagagcgcatggcgtcggcggttgacgcgcaataactggctgaaggtattactggataaagtcgagccgggttgtacgatcggcatggaggcttgcacaggtgcgcatcattgggcacgtgaactacaggctaaggggttcacggtgaagctgattgccccgcagtttgtaaaaccctacgtgaagagtaacaagaatgacgccaatgatgcagaagcggtctgcgaagccatgagccggcccagcatgcgtttcgtggccgtcaagacagttgagcaacaggacattcaggcggcccaccggattcgtagtgagttgatcgggcaacgcacgtccaaggcgaaccagatccgtgggctggtggccgagtacgggctggtagcaccccaacacttggcacgtttgcgagcggcggtgccagcttggctggaagatgcggagaatggcctgaccagtcggttccgctggttgttgaacggtctgtgggatgatctcaatcgattggaccagcgtatagaggagctcaaccgcgagatcacctcaatggctcagaacgacccggtcgcaaagcggctgcaacagcttcgcggtgtcgggccgttgatcgcaacggcactggttgccgctgtgggtaatgcggagcagttcgccaacggccgacaaatggcggcgtcactgggactgacaccgaaacaacacagttccgggggcaaagaccgcttgcttggcatcagtaagcgtggtgatgcctatctgcgcaccatactgatccatggcgcgcgatcggtgatccgaaccgccaagcacaaggatgaccgattgagccaatgggtaaccagtctggcggcacgaagacacgcgaatgtagccgccgcagcgttagccaataaaacggtgcgcattgcctgggccatgttgaggcatggcacggattaccagcctgatcggattgtagcttgataagcagcctctatccgatcaccgattaaccgccgtgtaaacaggagaacctcacttacgattgcagagcaaaccgaacgatggcgaacaggtcgaaccggcgccggcagaacccgagaatgagcaggtgcgagaagtacgatgaaccgattgggagttggcgcgcgaatagcccatcatggcccggtaccgaatactcgatgccaaagctagaggccggatatacgtgagcagtcgtgcctaaccgccataaaacggaatgcttgcagctgaggaggagtccatata

SEQ ID NO: 3589 - DNA, 1324 bp, unidentified
  source 1..1324: mol_type = unassigned DNA; note = element_54eb39d
  misc_feature 1..3: note = core
  misc_feature 4..69: note = LE
  misc_feature 70..1107: note = CDS
  misc_feature 1108..1324: note = RE
  misc_feature 1082..1309: note = bridgeRNA
agatgtatggactccctatcccgaaaggaatacggtcttaattgtcacattagtccaaggagtccaaacatgaacaaggttactattattgctattgatttggcaaagaactcatttcaggtctgcaaatttaataaaaacaacaacgttgcatacaacaaggctatcaatcgtaaagcattaatcgagcttttgggaaagcatgagcctgtacttgtagcaatggaagcctgcggcggagctcattattgggctcgtttagcacagcgctatggtcatcaagtaaaaatacttcaagctcgagccgtaaaaggtcttcagttaaagcaaaaaactgataaaaatgatgcctatgcaattggtattgcagctcaattacctcacattcgatcttgttgcgtcatgtctgaagaagagcaaggattgcaatcgttggaacgagtgcgaacactgcaaattgagcagagaacagcattggtaaatcaaatcagagggctactgtcagaatttggtattgttatatcgaaaggtattcgtaatttgattaaatctttatctgacattttagaagatggggaaaatggcttgcctatgaattatcggcaggcactacatgctcaatcagagttattaaaacaatatacggaacagatagaaggttatgacaagcttatcactgagcatacgcgtgataatcctacttgtcagaaactaagtaaattggaaggagtaggtcctctggctgcattagggttaaccgttcgactgggtaatgcgcaggaatttgataccggacgagatgcttcatcttgtataggcctaacaccgaaacaacattcaacaggcggaaaagagcatatagggcatatatcaaaattcagtgcggataaacggctaagaagcttgctataccagggagcaatgtctgtagtgcacaaagttgcactaaggaaaccgaaaacggtgaaggaacaatggttaaagaaactgattgaaagaagaggaaagaaagtcgcagcgatagctatggcaaataaaacagtaagaacggcagtggcactaataaaaaacaatgatgattatcaaccagctctactagcgggttaaagaaataagtaaatcaacgaattgcgaaaagaaaatggtaagaccaaccaatagaattcagtcgtcctctctagtacctagatactgttcgtgagattgaactattggtgcgaatacatcaaagggcaggagtagctctccagttaaagcccgtatataagagcgcatctaccacaatattttcaaaataagttgattacttcagggagtccatata

SEQ ID NO: 3590 - DNA, 1532 bp, unidentified
  source 1..1532: mol_type = unassigned DNA; note = element_54ff6e0
  misc_feature 1..4: note = core
  misc_feature 5..253: note = LE
  misc_feature 254..1507: note = CDS
  misc_feature 1508..1532: note = RE
ctcactggactaccttcctcacgtcagcgggttcagatgaccggctgatgcacccctggtccccaccggaccaccgccacggcggctcgacccacaacaaggtcctgcatgagttctgcggggtccggtggcccaggaccctcggaccggctacagggctgtgcgccagcgagcgccgatcagtgagcgaccggcagcggggtcccgggaccaccgggtggctccccactgctgccacagcgaggaaaccactatgagtgtcactgctgaacccaccccgacgcgagcccagagccgagtgtgcgcgggcgtggactgggccaaggacgaccacgtcgtgtgcatcgtcgatgccgacggcgaggccatcgaccggtacagcgtcaaccacaccgcggccgggctgcgacgcatggtcgcccgcctgctggccgcaggagtggtcgaggtcggcatcgaacgacccgacggccccgtcatcgacgcgctcctggccgccggtctgacggtgctggtcatcgcacccgcgcaggtcaagaacctgcgctcccgatacggctccgccggcaacaaggacgaccggttcgacgcctacgtcctggccgacgtggtccgcaccgaccgccgacgcctcaccccactgacccggtcgaccccggccgcgcaggccctgcgatccagcgtccgcgcgcgtcgtgatctggtcgagcaccgtgtcgccgcagccaaccagctccgcgcccacctgcagatcgtcttcccgggtgtcgtggacctcttcgccgacctggactccgcgatcagcctggccttcctggagcgattccccacccagaccaaggccgactggctcaccgtcgaacggcttgccgcgtggctgaagaaggtctcctactccggccgcaccgaccccgcgatcctgcacgcccggctgctggccgcaccccgcggcaccaccggccccgaagccggattccacgcccagaccaccctcgcgttcgccgcagtcctgcggaccctgaacacccagatcgccgtcctggccaactcgattgccgcccagctcgacattcaccccgatgctcacatcgtgacctcgctgccccgcgccggcaccgtgcgcgccgcccggctgctcgcagaaatcggcgacgcccgcggccggttccccaccgccgacgctctggcctgcctggccggcgtcgctccctccacacgccagtccggcaaagtcaaagccgtgaccttccgttggggagccgacaaggaactcagagacgcactgtgcgacttcgccgccgactcccgacacgccaacccatgggccgcccagctctacaacaacgccagagcccgcaaccacgaccacccccacgccacacggatcctcgcccgagcctgggtcgacatcatctggcgctgctggcaaaaccacctcgcctacaacccccaccaacaccgcgccctccaacgcgtcctcaacgagcacgccacacaggccgcctgacacgggagaggttgacacagggcaa

SEQ ID NO: 3591 - DNA, 1367 bp, unidentified
  source 1..1367: mol_type = unassigned DNA; note = element_5500a10
  misc_feature 1..2: note = core
  misc_feature 3..37: note = LE
  misc_feature 38..1114: note = CDS
  misc_feature 1115..1367: note = RE
  misc_feature 1087..1355: note = bridgeRNA
tgatggggtggacgccccccggcggcatcgatgtgccatggtggaggtgttgatcaccaccattaaggaggcgtccatgtcggaagttagcacgattgggttggatatcgggaagactgtttttcatgcgcacggggcggatgcgagcggacggatgatattcagcaggcggcttacccgggccagactgcttgcgttcttcgccgatcaaccgcgctgccttgttgcgctggaggcatgcgggggcgcgcatcactgggcgcgggagctggcttcgctcggccatgacgtgcggctgatcccgcctgcctatgtaaagccgttcgtaaagcgctccaagaacgatgctgcggatgcggaagcgatctgcgaggcagcgcagcgacccagcatgcgctatgcagcgatcaagaccgaagcgcagcaggccgcgggcatggtgttccgcacccgcgatcttctggtgcgtcagcgcacccagctgatcaatgcgatccgcgggcatctgaccgagtttggatgggtagcgcccaagggaccttcgcatatatcggtgctggccggtttgcttgacgagagtgaagagctcggcgcctcgcttcccgaagcggcacggacgatgtttgtcgtcatgaccgaacagctcgagcaattgaacaagcagatcgcactgctcgataaagagatcgcaagacgtgcccgcgaggatgcatcggctcgccagcttatgaccatccccggcatcggcccgatcaccgcaatcgcgatcctcgctctcgcgccgccgcccgagagctttgccaagggccgcgacttcgcagcctggctagggcttaccccaaggcagcactcgagtgggggcaaggagaagctcggttcgatctcgaagatgggcgagcgcacgcttcgacgattgctgatcatcggtagcagcgcggtcgtgcttcatgccagcaagcgcggcgcaccggcaggatcgtggctggagcagatgatggcaaggaagccgcgcatgctggtaacggtcgccctggcgaacaagacagcgcggatcgtgtgggccgtgctcacgaagaacgaagaatacaaagctccggtcgcagctgcggcatagccgcaagcggaccagaggtcgtcggtagaggcaaaagatcgaaggagggtatggcaccacagtcggcgagacggggccggaagaaccagggctttccactgtgccacgagcacgccgtgggtgatgtggttccggtccgcgaactcccatacgggccagcggctagaccgcatcaacaggccggacagatggcagcatccgactaccgccgatacccgaatttaccgcttgcttcttcaggggcgcccacaga

SEQ ID NO: 3592 - DNA, 1482 bp, unidentified
  source 1..1482: mol_type = unassigned DNA; note = element_55020e6
  misc_feature 1: note = core
  misc_feature 2..238: note = LE
  misc_feature 239..1462: note = CDS
  misc_feature 1463..1482: note = RE
  misc_feature 14..250: note = bridgeRNA
ctaatagtgactgaggtcgacgttgcggtgtttgccgtagcgttcagaggtccgatgggctggctcccgaaccgcctgccggccgcgtcagtgtcgtggtctggctttagatcgaggtgccggcctgtcggttctcgccgtggcgtggctcgaaagaggcgcgagcgctagcagatccggtattaggcatgcccgccatggtccgcccattttctggtgacgatgctggagcgtgcagatgatggcagtgatgatcgggatcgatccgcataagggctcgcatacggcggtggcgatcggcgcggcggaagaaccgctgggggatctccgggtccgcgcgggcgcggcccaggcagacacgctagtcgggtgggcggcagcgtggccggagcggacgtgggcggtcgaaggcgccggcggtctgggtcacctgctggcccagcagctggtcgccgccggggagcgggtgctggacgtgccgcccaagctcgctgcccgggtgcggctgctggaggccggtgacacgaacaagaacgacccgaacgacgcgctgtcggtcgcggtcgcggcgctgcgctccaaggcaaggcgcgaggtggcggctgaggaccatgcggcggtgctgaaggtctgggccaagcggcaccgcgacctggcgcgggcccgcaatcaggtcgcctgccggctccacgcggtgctgtgcgacctgctcgccggcggcgtcagcaaagagatcaccgcagctcacgccgcccgcatcctggagcaggtcacgccgtccgggccggtcgcggcggcgcgccgcgacctggccggccagttcctggaggacctgcgaggcctggatgcccagctccgcgacaccaagaagaagctggccgcggccgtcagagcctcgggcaccagcctcaccgaggtcttcggcttcggcccagtcaacaccggcaccgtgatcggcgacgtcaccgacgtcaccaggttccccagccgggaccacttcgcctcctacaacggcaccgccccggtcgaggtgtcctcggggaaccgcaagatctaccgcctgtcgctgcgcgggaaccggcggatcaaccacgccctgcacatggccgcgatcacccagatccggcaccggcacagcgacggccgcgcctactacgaccggaaaatcgccgagggaaaaactcacaaagaagcgctccgctgcctcaaacggcggatcagcgacgccgtcttcgcccgcctccaggccgacgcccggaaggccatcgccacggcagccgcgaagggcccgggagggcaaccggggaacgactctgactccagcgcggccggctcacaccccgagcgccagctcttcggacaagccactcccgagcccgccaccaccctacgacccgccaccccggccacaaggaccatctcgccgaagcccacatcaaagaaaacccggcgtgacccttgacaacaacaacaaagaggact

SEQ ID NO: 3593 - DNA, 1515 bp, unidentified
  source 1..1515: mol_type = unassigned DNA; note = element_5508301
  misc_feature 1..4: note = core
  misc_feature 5..243: note = LE
  misc_feature 244..1497: note = CDS
  misc_feature 1498..1515: note = RE
  misc_feature 1..240: note = bridgeRNA
ccccgttacctttttgatcgtcgccagccgggggactgctcggtcgcccggctcggtatgacttaccgcccctgtcgtacgcatgatccgggggtgttgtcgtcgggccgggtggcgtcggcggaccactgatagggacccggccaccccattctcggggtaggtctcctcgtaacgtggctgccggcagtccgacgcccttccagcggccgagccacgatgatgacggtggggaggccagacgtgcacgaccagttcggcgtcttcgtaggactcgacgtcggcaaggaaggacaccacgcggtcgcgttgaaccgcgacgggaagcggctacacgacgccacgctgcccaacaccgaggccgggctgcgcaagctgttcgacaaactcgcccgacacggccggatcctgctggtggtcgaccagcccgcctcgatcggcgcgctgcccgtcgcggtcgcccgcgcacgcggccatcaggtggcctacctgcccggtctggtcatgcgccggctggccgacctgcacccgggcacggccaagaccgacgcccgcgacgcctacgtgatcgccgatgccgcccgcaccctgccgcatacgctgcgccgggtcgacaccggcgacgaaacgttggccgagctggaagtcctggtcggctacgacgacgacctcgccggcgaggtcacccgcatctccaaccgcatccggggcctgctcacccaaacccacccaccgctggaacgggtcctgggcccgaaactgcagcaccccaccgtgctggagctgctgtcgcggtgcggcggaccagccgggatccgcgaggccggccgcgcgaaactcaccgagatcgtcaagaaacgtgccccacgcatgggcgtccgcctggtcgagcagatcctgaccgcgctcgacccacgcatgggcgtccgcctggtcgagcagatcctgaccgcgctcgacgcgcagaccgtcgtggtccccggcaccacggcggcccagaccgtcctgctccgactggccgacagcctgcgtgacctgctgcgccaacgcgaccaggtcgccgagcaggtcgaggggatgcttgatgcgcaccctcttgccgaggtcctgacctcgatacccggcatcggggtcaggaccgcagcccgcatcctgctcgaagtcggcgacggcagctcgtttccgaccgccgggcacctggccgcctacgccggcctggccccggtcaccaggcgctccggcaccagcatccgcggcgaacacccacccaagggcggcaacaagcagctcaaacgcgcgttcttcctgtccgcgttcgctgccctggccgacccagccagccgcacctactacgaccgcaaacgcgccgaaggcaagaaacacaacgccgcccttatctgcgtggcccgccgccgcgtcgacgccctccacgccatgctgcgcacccgaaccccataccagcccagaacagcggacgaaccccgcctcgcagcttgacaaaacccatagggacac

SEQ ID NO: 3594 - DNA, 1369 bp, unidentified
  source 1..1369: mol_type = unassigned DNA; note = element_5511f13
  misc_feature 1..2: note = core
  misc_feature 3..76: note = LE
  misc_feature 77..1117: note = CDS
  misc_feature 1118..1369: note = RE
  misc_feature 1117..1356: note = bridgeRNA
tgatggtgtggacggccccctacggcatcagtgtgccagaatgaggttgttgagatctcagacaagggagccgtccgtgaaccagattatccgcattggaatggatacgtcgaagcatatttttcagttacatggggttgatgctgccgagcaggtcgggttgcgcaagcggcttggtcgccagcaaatggtggcattttttgccaagctgccgccaactgtgatcgggatggaagcttgcggggcatcgcatcattgggcgcgggtgctgggtaagttcggccatgaggtgaagctgatcgcgccacaacacgtgaagccctacgtgatgcggaacaagaacgacgggcgggatgccgacgcggtgtgtgaagcgacgggccggccgagaatgcggtttgtgccggtgaagacggccgagcagcaggcggccctgatgctgacgggcctgcgcgagcagatggtcgcccggcgcacccagttgagcaatacgatccgcggctatgcggcggagttcggtgtcacggtggccaaggggctcgacaagatcgagccgctattagcccagattgcgcgagacgagagcgtgccggcgctggcgcgcgagttatttgccatgcaggggggcgagtacgcgcagttgcaggtggagttgaaggcgatcgaggtcaaactgagggcctggcaccgtggcaatgccgacagccggcgtctggccaagattccaggggttggaccgatcggcgccacggcgctggtcatgaagacgcccgatccgcgcgcgttcccttccggccggcattttgcagcctggctcggactgacaccgaaagaccattccaccgcgggcaagacccggctcggcaagatcacccgtgccggagatgagaggttgcgcaacgtactggtggcgggcgcgaccgcggtaatccagcaggccaagcatggccgcggccatccatcgccttgggtggtggcgctgctgaagcgcaagccgccgaagcttgccgctgtcgcgcttgccaacaagattgcccgcatcgcgtggaagttgctggcaacgggcgagagttacgacggcgcgcggatgcccggtgcatcggcgtccgccgcctaagagatcagccgatcttatcggctgagccggagctgcaagaggagtagatggtaggatcgatcggtccaaggtgcgagacaatccgtgggacccattggccgaagccaggtcgtgtggttgtttggaactcgcgtcgcggaaaccatcttggccagcgggacaaaccaaccgcatcaacaggccggacatatggatgcaagcgatccgatcagaccgttaaaaacttcttgtggcacgggggccgtccacata

SEQ ID NO: 3595 - DNA, 1308 bp, unidentified
  source 1..1308: mol_type = unassigned DNA; note = element_551ae26
  misc_feature 1..3: note = core
  misc_feature 4..214: note = LE
  misc_feature 215..1180: note = CDS
  misc_feature 1181..1308: note = RE
  misc_feature 36..199: note = bridgeRNA
cattgtataataatttatcattataattttgcataaacattcaacatcaaagtgtggaataaggctgacctttcattagccataaagactgtgtagtatgttttgcccccacactttatacatcagaaaccggatagttcaatgggcttttgcccccgcattcgcaatgatggctcacgatgtacagatgttgttttaataaatcattcagactatgacctacgttggaattgatgtcagcaaggcaacttttgttgtcgcttattcgtcaggaaagacaaacaggacgaaaacattcaagaacaccgcaaagggagttcacgagtttatccaaaccatttctcccgcaacacatcattgcgtgctggaagccacaggcaattacagttcgttgctcgtttatctactctccgaggccggtattaccgtcagccttgagaatccgctgaagataaagaacttcgcccgtgtcatgctcaccgtcaccaaaacagatgagattgatgctcgcctgatagccatgtacggtgagaagatgcaacccgcaccttacaagctacgcagcaattctatccttgtccttaagcagaagcgcactgtgctgcgtcagctcaaaaaacagcttgtagctacacgtaacctcaaaggctcgatggaagtcctgccgttccttgatcccaagtgcaagaaaacaatcgaaaagaccattgcgtttcttgaaaagcaaatcaaagggatggaagaagaactggcttctctggcgcaaagtgaatacaagaaacagatggacctgctcacttctatcaagggtatcggaatcaccttggccgctgcactcattgtagccaccggcggattcgcatactttgataatgccaaacaactaacccgatatttggggttgtcgcccactttccaacaatccggtacgtcagtctatgtcaaaggacacatcaaccgaaacggggattcaagccttagaagccagctctatgtggcggctttctcatcactcaggtgtaatactgagtgtaaggcatgtttcgaccgtctcaggtctaacggcaagcccggcaaggtggcggtcattgcagtcgccaacaaacttgtaaggcaagccttcgctgtggtcacgcatggaaaaaactatgtcgatgggttcaaatctgaaaagccataacagctcctgcggagggaacgccatgcggcaaggggctgagcactcagcaccgacgagctttctatgcacgataacttgcatcattatgctaattatcgttaaccgtattcagtttttctattatagtt

SEQ ID NO: 3596 - DNA, 1505 bp, unidentified
  source 1..1505: mol_type = unassigned DNA; note = element_5540bf2
  misc_feature 1..2: note = core
  misc_feature 3..214: note = LE
  misc_feature 215..1489: note = CDS
  misc_feature 1490..1505: note = RE
  misc_feature 9..205: note = bridgeRNA
ctgatagcagtaccttccttcatggtcggagcctccggggaacgcttgcttcgcttgtcctgcgaggactgtcgtgagacggcgtccctgggggtttgggctggaggtttgtcatctcggagggtgtcgtcccggtgaggactggtttatcagcacgatgcaacgcctcttgctccggttgtttcgcccgcacgcaggaaaggaatcgacgtaggtgttgggagtggggattgactgggccgaagcgtttcatgacgtcgcgctcggcagacctgacgacggaatcatcgaccagttccgtatcgatcacaccgtggccggtgtcgaacggttgatcacccgctgcctggaactggaaccggacccggctgatgtgcgtgtcgtgttggaaacccgacacggtgttctggtcgaggccctggccgatgccgggttcaccgtgctcccggtcaaccctgacctggtcgctcggcgacgcggcccggcgaagaagaaagacgacgccgaagacgcccgaatctgttgtgtgctcgcattggaccagttcctggaactgcggaaactgatcccgcacggcgacctcgccggtgagttgcgttcgatcgcccgcgacgacgaacgcgccgctcgtgaccagcggcggctgctcaaccggctgcgcgctgacctgctcgcgaccttcccggccgcgttggctatcgccggcgacgacctcggctcgcccgtgatgctgaaactgctggtcacctggcccacccacactcaactcaccgacgccggcgctgacacgctcgaggacttcgcccgcaccgccaagcatggctggccggcccgtttcgccgcccgcgtgaccgacgccctggccgccccgcaactcccggtccgggactacctgatccgcgcgaaagccaccacgatcgcgttgaccgccacccaactgctcgcgttgcgtgatgcccggaaatcctgggaacgccgcatggccgagctcctgctcggcgacacccgatacggccgctccaaacaaccaagaaaccccgatccgggaaaagcggtgccgggcggtgacatctacctgagcttccccgggctcggagacatcctcgccgcccggatcgctggagagatcggggaccacatcgaacagttcgacaccccgaacgggctgcaatgctacggcggcaccgcacccgtcacccgacgctccggccgcagtgaactcgtcatcgcccgacgcctggcccataaccgatacctcggcaccgccgtgcaccaatgggccttctgcagcctcaagaactccacctgggcacgcgagttctacgacaccaaaatcagagccggaaaagcccaccacaacgcgctgcgagccctggccaaccgatggctggaaatcctgtggcactgcctcaccaagaacgtctactacgacgaaaccatccacatccgcaaccgacagcgggccctccaaccctcgccggcggcatgaggttgacagaaggtgt

SEQ ID NO: 3597 - DNA, 1211 bp, unidentified
  source 1..1211: mol_type = unassigned DNA; note = element_554caaf
  misc_feature 1..2: note = core
  misc_feature 3..190: note = LE
  misc_feature 191..1177: note = CDS
  misc_feature 1178..1211: note = RE
  misc_feature 12..199: note = bridgeRNA
cttgtatctctctgcattaagtggttagctattacttaatgcatccagaagtcagtgagtttgttgccaacctgagcaaatatatgctgtcgcgtagattaaaccctgacttctttttctcaataaactgaatggtatccaagcgcactttaacgagttgacgctgcatgtacaaggggagtatatagagatgatgtactttactggcatcgatattagtaaaaataaaattgacgtttgttggcttagagacgctcacaaaggaaagaaaaaatccaaagtattaaaaaataatactgacggccatcaagcattggctaaatggctgttagacaacattaaagctaaacctgagcaggttatcgtgactcttgaaccgaccggtgtttatcatgaaaccttaatgtattttttgcatgatcacggatttaaggtctaccttgtgaattcagggtacgcaaaaaagtatgcacaggcgattaacctaacgcataagacggataaatctgatgcatttatgctcgccaattacggttgtgctcagcaggggcacatagagttttggaagcccgagcccattgaagtacgggagcttaacgcactgctgagacgattagatgcgctagaagccgactacaagagagaattaaatcgtctagattccagtgagtttggcttgtcttctgagcgggttgtaatgtctttaaaagacatgctccaagcgcttgaaacagaaataaagaagcttacagaagacatagatgatcatattaacagaaacccggaattaaaaaataaccgaaagcttctaggaagtattccaggtattggctcggttctatcgagagagctaacatatctctttgcatctaaaacctttaaaaatgccaaggaagtcggtgcatatctaggtttaatccccaaattaaacgaatcaggtaagctaaaaggccgcacgactttaagtaaggctggtccctctcgtattcgagcaaaactatatatggccgcgatagtcgcaggtcaattcaatcacagcataaaggcgcaaaagagtcggctattggcaaaaggaaaaacaaaaatgcaggctttaggtgcagcgatgcgcaaactggcacaaatgtgttttggagtgatcaaaaatcaaaccgaatatcagcctcaagtcacttaaatctcgacttgaagctggttgtgagagatggtat

SEQ ID NO: 3598 - DNA, 1360 bp, unidentified
  source 1..1360: mol_type = unassigned DNA; note = element_5554440
  misc_feature 1: note = core
  misc_feature 2..68: note = LE
  misc_feature 69..1097: note = CDS
  misc_feature 1098..1360: note = RE
  misc_feature 1137..1354: note = bridgeRNA
taatgggatggtccgccgccttcacacctgagcacaagggtgtagaagatgaacgaaggaggcattccatgaaggtccacacgatcggcattgatttaggcaagacgaagtttcatatagtaggtctgaacgagcgcggcgaagtaatcatacgcaaacagttctcgcgagcacagttgctacatttcaccgcgaaccggaaggtgtatttgattggcatggaagcctgcggaggcgcccacttccttggccgggcgctgcagcaacagggacatgaggtacgtctgattcccgcccagtatgtgaagccgtacgtgaagaccaacaagaatgactacattgatgcggaggcgattgcggaagcggtgagccggccgaggatgcggttcgtgccgatcaagagcgacgaccagctggatctgcagtccctgcatcgagtgcgcgaacggtgggtgtcgcgtcgcacggcggtgatcaaccagattcgtagcttgctgctcgaacgcgggatcaccgtgcgcaagggccggcgctatatagaagctgcgttaccggggatcttggaggacgcggatgcgaaactgtcgggagcattacgcttgctgctggcgcaactgaagttggagctggaccagatggccaaacgcttagaggaggccgatgcgctgattgaacagaccgcacttgagaacgaagcctgccgccggatggtaaagatcccgggcctcgggccggtaacggcgaccgcagtgatcgcggcgattggcaacggagcggcgtttcgcaaagggcgagagttcgcggcctggatgggagtagttcctcgagagcactccacaggcggcaaacaaaaattgctcggtatcagcaaacggggaaaccgatatttacgaaaactattcgtgcaatgtgcgcgggccgtgttgcagcagaagaccaagcagactcccggcctgagggcatggctggaaaagctaacagcacgtagccactaccacgtggccggcgtggcgttagccaataagttggcgcgcatggcttgggcggtactggctactggcgaagcttatcgggctccgctgccggccgctgcttaagcccgactgaccacagctgaggagtttatgattttcctgccaggtttgctgacgaacaatgagatggcacaacggtcaaaccggcgctctccaaacccgcatccggaagaagtcttccaagactgcataactaaatgggaagagagcgtagcgcattccatcgtggcccggagatttttccctccactgaaggccgtatacatttgcgcaaaccaatcttgtccctctcacttttcgcttgcatccaggcggcggaccataca

SEQ ID NO: 3599 - DNA, 1349 bp, unidentified
  source 1..1349: mol_type = unassigned DNA; note = element_5560990
  misc_feature 1..2: note = core
  misc_feature 3..77: note = LE
  misc_feature 78..1112: note = CDS
  misc_feature 1113..1349: note = RE
  misc_feature 1146..1344: note = bridgeRNA
tgatgttatggacgccccttactgaggtagtcagtgccatacttttactgactgcattaatccgggagtaacatcacatgaacacgatcagagttgttggtatcgatattgccaaatctgtttttcaggtctgcgtctggatggatgatggctccgtcgcatggaataaaaaaatctcacgatccaaattgcaggataccgttcgacaatttgagcccggaacacttctcgccatggaggcttgttcaacctctcatttctggggaagaacgttcagtgcgatgggatattccgtgaggctgattcctgcacaacatgtgaaagcctttgtccgcagccagaagaacgatgccaacgatgcgctggcaatttgtgaaaccgcactccgccccggtattcattttgtttcggttaaaaccacggaacaacaggatatcaaggcgcttcgaaacacacgtcaactgatggttgagcagagaacggcgctggccaaccagcttcgttctctgctcgctgaatatggtgttactatacccgtcgggatccagtacctacagcaacagctgcctgaggtgattgaagatgcctcaaacaacctgaccttcactcttcgccatttgctctcttcattgcgggcaaatatgcaggcgctgaatgaactggtcgccagcctggacagtgaaattgcagcgttgtcatcacaacagaccgtgtaccgtcatttattaacaatcccgggcgtaggccccctgattgctgcggcgtttatcagcgaagttgatgctactcaattctcgagtgggcgagaattatcggcgtggtgtggcctggttcctcgtcagtacagttcgggcggaaaacaacggctgtcttctgtgacgaaaaatggcaaccggagcctgagaacgctcattatccatggtgcccggtcagtaatgcgatgtgtaaaaaagcgtgatgacaatctggggcgatggttgcaaaaacttgaagcccgccgtggatttctgaaagcaacggtcgcactggcaaataaactgccccgaattatctggcgcgtactaactgactcggttgattttaatatgaataaggcattttctatggtttaacccaatatgagactgacagtaaaaatgtaccactgagtttgcaggcactgatgagaaaacggctaccgtccctgtaacagcctgaacttaacctgggtaatcaaataccggagtaatgattaggaagcagggttcggatgacatcatggcgcaggtcattgaacctactgacgacgccggatatatggtcgcaaaccgcatcgaaccagtacttgcatcacccggggcgtccatata

SEQ ID NO: 3600 - DNA, 1516 bp, unidentified
  source 1..1516: mol_type = unassigned DNA; note = element_55640ad
  misc_feature 1..2: note = core
  misc_feature 3..213: note = LE
  misc_feature 214..1491: note = CDS
  misc_feature 1492..1516: note = RE
  misc_feature 6..210: note = bridgeRNA
ctgatggctctaccctcccctccgatggagcttccccgcgcggagcgcttccggtgcttgtcccgcgaggactgaagtgagacggcgcccgcgggggcggctcccggagacccgatgccaacgagggtgtcgtcccgcgaggactggtccatcagcacggcagcgcgtctccagcgtcgtgttctctcgctcgttcaatcggaaggaggccccgtgctcgcagtcgggatcgactggtcggaggagttccacctggtcgcgctgggcaggcccagcgaaggcgtctttgaggtacggagggtcgagcactcgccgaaggccgtcgacgcgctctgcgcgcggatcgccgcgctcgagcccgacccggccgaggtcagggtcgtgctcgaggcccgccacggcctcttggtcgagcggctcatcgacgccggctacgtcgtcgtgccggtcaaccccgacctgatcgccagaaggcgtggcccggcgaagaagaaggacgacgtcgaggacgcgcgcatcgcctgcctgctcgcgctcgaccgcttcgagcggctgcgcccgctcgtcccgcacggcgagctcgccggcgagctgcgggcgatcgcccgcgacgacgagcgggcgacgaaggacgcgcggcgcctgctgaaccgcctgcgccaggacctgctcgcgaccttcccgggagcgcttgcgatcgccggcgacgatctcggctcgccgaccttcctgcgagcgctcgagcgctggccgagcgcggaggccctgggcgcggcctcgcgcgcggagctcgtcgccttcgcccgcggctgcaagcacggctggccggagcgcttcgccgacaaggtcgaggcggcactcgccggcgaccacttccaggcgcgcccctacctggtgcgcgccaaggccgacacgatccgcctcaccgccagccagctgctcgcgatcggcaagcagcgcagggcctgggagcggcggatgggcgagctcctgctcggggcgccgcgccgcggtcgcagcaagacgccgcggccggacgagctgggcgaaggcttccctgacggcgagatctacctgagctttccgggcctcggtgatcgcctcgccgccagggtcgccggcgagatcggcgaccatccctcgcagttcgagtcgccgaacgcgctccaatgctacgggggcaaggcccccgtcacgaggcgctcggggaagagcgagctcgtcgtctcctgccgcctcgcctacaaccgccacctcggcgacgcggtccagcaatgggccttctgcagcctgcggcgctcgtcctgggcgcgcgccttctacgacgggaagcgggcgcaggggaagggacaccacgccgccctgcgcgcgctcggcaaccgctggctcgggctgctctggcactgcctccgaaggggcctcccctacgacgaggcggtccacgtcgccaaccgcgagcgggcgcgcagcagtcagctgctcgctgcctgacggggcgggggttgacagagggtgt

SEQ ID NO: 3601 - DNA, 1440 bp, unidentified
  source 1..1440: mol_type = unassigned DNA; note = element_557edc3
  misc_feature 1: note = core
  misc_feature 2..84: note = LE
  misc_feature 85..1161: note = CDS
  misc_feature 1162..1440: note = RE
  misc_feature 1158..1427: note = bridgeRNA
tgatgtgatggatggcgacctgcttcggcatcaggtgtgccattattggtttatcggacaaaccataggaaggaaccatccatcatgacgcagattacgacaatcggacttgaccttgcaaagaatgttttccaggttcacggggttgacgcaaacggacaggttttgttgcgcaaaaccctccgccgctcgcagatgcttgcgttcttcgaacagcttcggccctgtctgattggcatagaggcctgtgcgacagcgcactattgggcaagaacattgcaatcgctggggcatgaggttcgtctcatctcacccacttacgtaaaaccctacgtcaaacgtcagaagaatgatgtggctgatgccgctgccatctgtgaagcagtctcgcgtccttcgatgcgttttgcaccggtcaagagcgttgagcaacaatcgcatttgatgctgcattcagcgcgcgagcttctcatcacgcagcgcaccgcactgatcaacgcactgcgcgcgcatttttctgagttggggatcgttgccgctgaaggtgcacgcaatgttcgtaatttgctgaatcttttagagcaacagaaagagaacgtgaccgagacaacaaatatcccgaaggttgcaataactgctctccagccattggctgagatgctgcttgagaccgacaagcagattgccaaactcgaccgtgaaattttggcactgcatcgtgacaatggaaccagtaaccggttagcgactatccccggtattggtgtgctgactgcgacctatatgacggccagtctcgcagcctttgctaaccagttttcctgtggtcgtgaattcgcagcctatctcggacttgtgccccgccaatattccagtggcggaaaaccacgtctggggcgcatatccaaaatgggcaatcgccatttgcgaaagcttctggtcgttggagcaactgcagcgctctacagtatccgaaagggaacaagccaatccgctctggctgtttgggcgcgacaattactggagaagaagccattcaggctggtggcggttgctttggccaacaagatggcccgcattgcatgggcagtcatcgtgcatgaacgtgattatcaggcagatatcaaaccgaaccgattgatccatacgcagaccgcataaactgaagcatgcaatgaacctccggtaacggagtaatctttggcggcgtgactatgacgtgatgacaagacatagcggaatggaccgcataatcagaagaacccgtggcaccgtattgcacatcaaagcgcgctaaggtgataggaatctgatcaggcggataacatcagggccagcggcatgtaaccaccgcatcaaaggccggagacatgactgcacccgacccgctctgcaaatcatcccggaatggacacttgccaaacgggcgccatccagaca

SEQ ID NO: 3602 - DNA, 1406 bp, unidentified
  source 1..1406: mol_type = unassigned DNA; note = element_558b18f
  misc_feature 1: note = core
  misc_feature 2..53: note = LE
  misc_feature 54..1121: note = CDS
  misc_feature 1122..1406: note = RE
  misc_feature 1174..1404: note = bridgeRNA
taatggtatggaccctctcctcccataaaggcttcaaatgagccaagatagagttgttgaatcactatcaagaaggagaaggtcacataaataaggtaacaataggtttagatatcgccaagtctgtttttcatttagttgttatgaatcagtccggcagagtactcaaaaagaagaagttaaagcgttatcaggtgctgtcctattttagccaactggagccaagtatcgtggtgatggaagcctgtggcagttgccattattggtgtcgtgagctgacaaaagcggggcatgaagtcaaagccatcgcgccgcaatatgttgtggcataccgaaaaagcaataaacacgattacaatgatgcagaggcgatagccgaggcctcacagcgtgaagggatgcgatttgtgccgtttaagtctcaggaacaacaagatattcagctcatgcatcgtattcgagagcgtatgatagcgcagcaaacagcgttgagtaatcagataagaggctcgttggctgaatacgatattgtgtatgcacggggcgtagcgaccgtggtgaaagaattacctttcaccttggaagaggctgacaatggattgagtatgctagctcgccaactgtttcaaggtttattcaacgatttgttggtgttacgggagcgcattaaggaaatggataaggaattgaaagcatttgcacaaaaccaccctgtatgcgagcgcttaatgagcatgaccggtattgggccactgattgctactgctttatatgcaggtattggacaaggacaggcttttaatagtggtcgacatttagccgcttggttgggtatcgtccccaaacaacatacaacgggagataacccgagattgctgggtatcagcaaacgcgggaatacgtatttacgcacccagatgattaacggtgccagagccgccttgcgccatatcggtgataaaaccgataaagtgagccagtggtgtcgggcttgcttagcgcgaatgagctttaacaaagcttgcgtcgcgctggccaataagatggcgagaatggcctgggccatgctgcaccatcaacaggattatctgccagggcagataaataaagctgcggtatagccggtaaaaccaaaccagtagtaagcacgtaaacgaaaacgaaaacaggaagcctgtcaacgcattgcaaaagacaacgtactgatgattaactgttcataaccatcttgttcaaatcagattataccaagggccttcgaggccgccggattgatgagacaacaagatgcgaacaaccatcaaggctagaagccacatgacttcactaaaaagccgaatatatggcagcaatgaatcacgttaattagtcaacacgatgtcttgaaatcggagtgggcccatata

SEQ ID NO: 3603 - DNA, 1321 bp, unidentified
  source 1..1321: mol_type = unassigned DNA; note = element_558c466
  misc_feature 1: note = core
  misc_feature 2..255: note = LE
  misc_feature 256..1305: note = CDS
  misc_feature 1306..1321: note = RE
  misc_feature 14..251: note = bridgeRNA
ctgtgaggatctcgacgcagcctcgttgagtgcggtgggctgtggtcggtggctgcgcgtgtgacccttcgtctgactggcgtgatgccttcgagccgacttgtccgcgtgtggtcgccggccccggcccgaccggagttgctggcctgatcaggagcttgaccgcccgtggctgcgggcgtgtcccgtcacagtcctgccgtctccagccggaccggaaccttcacgttcccccggatcaaggagatgaacgcgatgcccagtcttgccgaagtcgtcgatgtcgtcatcggggtcgacacccacaagcacacccacaccgcggtggtcgtggacgccaggaccggcggggtgctggccgagcggacggtcagcaccgacgcgaggggctatgccgaactgctcgagtgggcgcgggcacacgggccggccgtggcgtgggccctggaaggtgccggcggctacggcgccggcctggcccgccacctccaggccgctggccagcaggtcctggagctggaccgaccggtgcgtgcggtgcgccgtcacggcgcgaagtcggactccctggacgctgcccgggccgcccgtgaggcgctgggtcgggcgcacctggcgcaggtgaagagcgatggaccacgcggccagctggccgcgttgatggccgcgcgacgctcggcggtcgaggccgccacgctcgcgcaacgtcagctgcacgcgctggtgatcgcagccccggaggtgctgcgggcgatgttccgtggccagtccaccgcgacgatgaccacgaccgccgcacggctgcgcccacgcgctgcctgggacgggcacaccgccaccaccgccacggtgctgcgcgccttggcccgacgcgtgatcgcgctgcaggccgaggctcgccagcacgagcaggccatggccgtgatcgtgcgggcctggcgcccggacctgctgacccagccaggggtcggggtcatcgtcgcggtggaggtcctgatcagctggtcccaccccgggcggatccgctccgaggccgcgttcgcgatgctcgccggcaccgcacccgtcccggcctcctcgggactgcgcacccgccaccggctcaaccgctccggcgatcgtcagctcaaccgcgccctgcacgtcgtggtcctgtcccgcacccgctacgaccaacgcacccgcgactacatcgaacggcgccgccacgagggcaagaccgaccgggagatccgccgctgcctcaagcgctacatcgcccgcgacctgttccgccagctcgaacaccgaccaacgaccgcttgacgatccataggagcgt

SEQ ID NO: 3604 - DNA, 1282 bp, unidentified
  source 1..1282: mol_type = unassigned DNA; note = element_559617b
  misc_feature 1..2: note = core
  misc_feature 3..236: note = LE
  misc_feature 237..1196: note = CDS
  misc_feature 1197..1282: note = RE
  misc_feature 18..236: note = bridgeRNA
ctgacttgttggatcgggggcagacgcgagggtctgcagcccatagcgttcagggcgccggtcggctcaggtccgcgtgttccttgccgcccgtgtggttggctcactgatagcgtgccacgtcggccggtgcccggccgtggcgtggctcgacagaggcatgcgatcgatcttcaagtcaggatgcccaccacggcacatgcccctgccagccgcccgccgtggagacatccgtcgtgatcgtgatcggaatcgacccgcacaagtcatcgctgaccgccgtcgccgttgacgacactggccatgaactggcggcccgacgcttcgtcgtcaacgccggcaccttcacccagctcatcagctgggcccaacgctggccgcagcaccgcttcgctgtcgagggcgccaagggactcggccgcggtatcgctcaacagttggccgccaccggcgcgggcgtcgtcgatgtccccgcaaccctcgccgcccgggcgcggctgctgaccaccggcggcggccgcaagaccgacgccaccgacgctgccagcatcgcccgagtcggcctgcaccaccaccggctcgaccccgtgcaacccgaagaccagagcaccatcctgcggctgctgaccgagcaccgcgacgacctcacccacgaacgcacccgcatcctcaaccgtctgcacggactcctgcgagacctggtccccggcggcgcacccaccggcctgtccgccgacaaaaccgccgcagccctacgaggtgtgcgaccggccaccgccaccgactcctgccgacgcgacatcgcccggcaactcctggccgcactccggcgaatcgacgcacagctcaaggcaaacgaaaccgagctagaccacgcagtcaccgcagcccgaagcagcctgaccgaactacccggcatcggcgtgatcatggcggcgaagatcctcggccacgtcggcaacgtcacccggtttcccaacgccgaccacttcgccagctacaccggcgcggcacccatcgacgcctccagcggaccccgcaagcgccaccgcctcaacaccggcgcaaccgccaactcaactccgccctgcacatcatcgccgtcgtccaagcccaccactcagacctcggacgggcctactaccagcgcaaactcggcgaaggtaagacaccagccgaagcccgacgcgccctgaaacgccgcctcgccaacatcatctaccgacgaatcctcaaagatcagaaacaagcacacccaacggccacttgacagacagaggcg

SEQ ID NO: 3605 - DNA, 1377 bp, unidentified
  source 1..1377: mol_type = unassigned DNA; note = element_5597913
  misc_feature 1..2: note = core
  misc_feature 3..77: note = LE
  misc_feature 78..1097: note = CDS
  misc_feature 1098..1377: note = RE
  misc_feature 1124..1375: note = bridgeRNA
tgatgatatggactcctctccccctaagggtgccataatgcaccaactttactaacgggatagaagaggagtttacaatgagtcatagcgtaattggattagatatagcaaagtctgtctttcatgtttatacgattcaggaagacggtaaggttttaaagaaaatgttaagacgccaacaagttttggagttttttgccaattatcccgtaagtttgattggcatagaagcttgcggtagctcgcattattgggcaagagagctgattgctctgggtcataacgtcaagctgctcaatgcccgccatgttaaagcctttgtcaaaggcaacaaaaatgattttaatgatgcggaagcgatttttgatgcggtctcgaggccgaatgctcgaaccattgcgattaaaaccgtggaacaacaggatatccagctgattcatcgcatacggcaagaagcggtgaaaagacgaacggcgctggtgaatcaaatcagaggtttattaggagaacgaggcattgtgattggacagggcattcatcaagtcagaaaacgcctgcctgaattgttggaagatgcggaaaactccttaacaaccctgagtcgtgctgcctttggtgagcaatacgagcgcttattggaactggacaaagaaataaaacgttatgatcaaaagatgggccaactttgccaggcgaatgaactcagcaaacgattggctgaagtcccgggcgtaggccccatgacagcaaccatcgtggcggcggatttaggtgaaggtcagcattatgtcaatgcacgacactattcagccagcttggggatcgtcccccggcagagcagcagtggcggtaaatcggtattgctaggtatcagcaaacgcggtaactgttacatcaggagcttattgattcatggtgccagagccgtgttacgaacctgtcataacaaagaagacaaacttagtttatggttacagaagttgattaagcggcggggttttaatgtggcggccgtggcgttagctaataagaacgcacggattctctgggccttggcgcataaatccgagcattatgaaatgcctgttggtgcttaatcactcccaccgataaacaaccgagtataaccagattgcggaggtaaccatccctattgatgacaaaaacaggtcagaccgatgcttttaaagtccgattgacacaaaggttcatagaaaccgacaggctgttttgggaaaaaagcatgcggatagattcatcaaggctggaaagataagtctttccactaaaagccgaatatatgtcagcaatcttgatctctgtttgaagcattcatttagggataatttatcttgcaataaccgaggagtccatata

SEQ ID NO: 3606 - DNA, 1363 bp, unidentified
  source 1..1363: mol_type = unassigned DNA; note = element_5598175
  misc_feature 1..2: note = core
  misc_feature 3..83: note = LE
  misc_feature 84..1094: note = CDS
  misc_feature 1095..1363: note = RE
  misc_feature 1132..1350: note = bridgeRNA
tgatggagtggatggctcctgctcccggcgtcgcgatgcgccatagtggggacatcggaagtccccgagcaaaggagccatccatggaagagattagcgcaatcggccttgatttggccaagtcggtttttcaggtgcatgcggttgatgcggcagggcgggtcgttctgcgcaggcagatcaagcgggcgcagcttctcgcgttcttcgccgctctgagcccctgcttggtcggtatggaggcttgttccggtgcgcatttctggtcgcgggaactgggtaagctcgggcatgacacccgtctgatgccaccgtcctatgtgaagccctatgtcaagcgcggcaagactgatgcggctgatgccgaggccatctgcgaagctgtgacgcgaccgaacatgcgtttcgtgccggtgaaaacagaggagcagcaagcgattttgatgatgcacagggcgcgggattttctggtgcgacagctgacgcaagtcagcaatgccctgcgggcccatctcggggaattcggcctggtggttccgaaaggggtgcagaacatcgagcggcttgtgacgctggccgaagccacaggccttcccgccaatgcgctcaattccgtctggcttctggctgaacagttccgcaataccaaggtgaagatcgaagatgttacttccgagatcagcagcgcctcggacaccgattcgatcgcgcgccgcctgaagacgattcccggcatcggcccgatcacctccagcgttctggcggccactttgccggatgcttccggcttcaagaccgcacgagatctggctgcatggcttgggctgacgcccaaaccccactcaagcggcggcaaggagcggttgggcaagatatctaaaatgggcaaccgttacatccgtcgcctgctttacctcggggccatgggcgtcattgctgcgcgccgccgcaggccagcaggggacgattggctgtggcagctgttggaaagaaagcccgtgaagctggtggccatcgccttggcgagccgtaatgcccgaatggtctgggcgctcctcaaatccggcgaaagctatcaggtggcgcgggcctgagcaaagaacagcggctgatcagcaatgagcagccagacgagatggtaaggtgcagcgtgaggtgatggcaaactgacggaaaaggatttggccaccctgttcggaccgaagcgcatcaaagcgcgcgccattgattgggaccagatccacgcggactttcatcagggcgcgcggctatcacgccgcatcttagacgccgtatacatggccgcagccgaccagatgtcaaagctgaacaacccccttgccacgcaggagccatccataca

SEQ ID NO: 3607 - DNA, 1712 bp, unidentified
  source 1..1712: mol_type = unassigned DNA; note = element_55a4fa2
  misc_feature 1..2: note = core
  misc_feature 3..236: note = LE
  misc_feature 237..1556: note = CDS
  misc_feature 1557..1712: note = RE
ctcgtataataagtttgaaagttaataattcagatatcagcaggcttagagatgcccgtgatacaatagctgtaggacagcagggtcaagttctctacctcctggttgagccgtagggctgcttcaaaataagtcagtttccctgagccggaagttagctgcaaactcattggctgtttgccagagtgtgggtcgccctttcagcagtgagggatatcgcattggtctgctctggaatgattctgatacgcgaggttgcggatgctccggttatcatgggtatctccaagcctgctggcctgaaatctccatgcggggaggtgaaaatcgtgaacccattattcgttggcattgatgtgagcagcaggagcaatgtcgcctacctgatgaagccggatggaagcaagcacagtagcttttctgtgcagaacaatcttggtggtgctaaaatgttgtcagagagaattgtgtcggcactcagctccatgcggctcagtgatgtggtgattggcctggaagccacctctatctacgggaacaaccttgtgtatgccctccgggaggatggcagcctgagtcggttccagcggaagatccatgtcctcaatcccaagcaagtcaaaaaattcaaggaagcctatccagatctgcccaaaaatgactttgtggatgcctttgtgattgccgaccatctccgttttggcagaatcgccaaggaggtctatatggacgactatcgctaccaggctctcagaaccctcaccagagccagatttgatgtcattcagaatctgacacgggagaagcagaggtttgccaactacttattcctaaaatgctctggtattgctcaggagaaagacattcaaaacaccagcgccactaccattgctctcatggagcattttgaaactgtggatgatctggcaaatactgatctggatgaactgaccgactttattgctcaagcaggccggggcagatttgtcgatccagatgccactgccagagcagtacgggctgcggccaaaggctcttaccgtctgcccaagacagtgaacgacaccgtgaaccaggcaatgtctgtttccatcgcctctatgcgggcactgaaggaacaggttaaggttctggacaaagccattgaacaacagcttgaaattatcccaaacactctaacttccatccctggcattggtaaggtttactccgccggtattattgctgaaattggtgatatccaccgtttcgattcccaagcctctgtcgccaagtttgccggccttgtctggacacagtaccagtccggtgaatttgaagcggagcactcccgaatgattaaatccggcaaccgctatctccgctactacctgctggaagctgccaactctgtgagaagatgcgactccgagttccggcgttactatgaccttaaattcaaagaggtcaacaagtaccagcataaacgcgcactcgctttaactgccagaaaactggttcggttggtctttcggctgctgaaagacaaccgcctgtatatcccatcggagggctaagcgtaccgcttgccactctgatgtccaagccctgtttcaaattttcttaggggcagggctttggttggtgttgccttttggctgctcacatagctctcctatggcgttttcttctgttgtttccgtgaatcaccctcttgacttaataccattgga

SEQ ID NO: 3608 - DNA, 1368 bp, unidentified
  source 1..1368: mol_type = unassigned DNA; note = element_55ab865
  misc_feature 1..2: note = core
  misc_feature 3..198: note = LE
  misc_feature 199..1164: note = CDS
  misc_feature 1165..1368: note = RE
  misc_feature 1137..1357: note = bridgeRNA
tgatggggtggacggcccccgctcccggcatcgatgtgccataacgtggtcgtctgtgaacgccacaatgagaggagccgtccaccatgcagattaccaccatcggtttgatttggatctcgccaaacactggttccaagtccacggcgtcgaggccgtggacgcgttgtcgttcgccggcggctgtggcggagcggtgtgatcgcctacttccggtcgctcgagccgtgtctggccggcatggaagcctgtgcaacagcgcactattgggcgcgtgagctgatcgcactcgggcatagggtgaaactgatgccgccggcctacgtgaaggcctacgtcgagcgcaacaagaacgatgccgctggtgcggaagcgatctgcgaagccgtaacccgcccttcgatgcggctcgtgccggtaaaggacgccgaacagcagtcagtgctgatgctgcatcgggggcgcagtcttctggtccggcaacgcacgatgctggtcaatgccttgcgcgctcacctagccgagttcggcatagttgcgccgcagggtctgcggcatgacgagatcctgaccgagacgattgctcatcaacaagcgcagctcccggaactcgcgcgctcgatgctgcagacgattgtcaaccagctggatggcacaatggccaggatccaggagatcgaaggtgcgcctggccaggtggcaccgcgagagccgggtcagtcgtttgctggcgaccgtgccggggtcggcatcatgggtgccagcgcgatcgccgcgacggttgccgatccttcgctgttccgatcaggccgagagtttgcggcttggctggggatgacgccgcggcagaattcgagcggcggcaaggaacccttgggccggatcagcaagcgcggcgacaaatatatccacagcctgctcaccgcgggcgcggttgccgtactgcgccatgctcgtaatcgaccaacccgcgatggcgagtgggttcgcgcgctgctggcacgcaaaccgaccaaacttgctgcggtcgcattggccaacaagaccgcccgcatcgtctgggcagtgatgacgcgcggggagggctaccgggcgaagaaagttttcggccagccggcatggccgccgaccgctcgttcagcatgcgaggtgaagaggaggtgatggcaagcggtcgagccgcggatcggcaagacccgaataagtcaaagcgcaaagcagcgcgcagtcttgatagggacccgaccagcgaactccatcagggccagcggtcagatgtaccgcaccaaagggccggacatatgactgcacctgaccacttcgccgaatcgaactcaacatccttcgcaggcgagggccgtccacata

SEQ ID NO: 3609 - DNA, 1361 bp, unidentified
  source 1..1361: mol_type = unassigned DNA; note = element_55b5f4f
  misc_feature 1: note = core
  misc_feature 2..67: note = LE
  misc_feature 68..1120: note = CDS
  misc_feature 1121..1361: note = RE
  misc_feature 1141..1355: note = bridgeRNA
taatgggatggttcgccccgtcgccttgggcaacaactaggtcgctatcaacatcggagatatgaagatgcaacatcaacccaagatctgcgctgtttttggcgtcgacatcggcaaaattctttttcacgttgttggcctcgacgcctccggcgcaccaattcaaaaggtcaagctgcgacgcgacacgattcttcagttctttgcgcaagcagatccgaccctcgttggaatggaggcctgcccgggttcacagtggcttgccaggaaactgcagcagctcggccatgaagtccgcatcatcccggctcagttcgtcaagccttacgtgaagtcgcacaagaacgacatcattgatgctgaagccatcgcggaagctacgaccagacctactttgcggttcgtcggcgtcaaggaggcgcatcaggtcgatctgcagatgctgcatcgtgttcgtagccgactggtgaagggacgtaccaatctgatctgtcaaatgcgttcatattgtctggagcatggcgtcgcgcttcgccaaggtgccggggtgttcaagcttgatatcgtccgcgcgatcgataatcccgagaacgatttgaccgagcgggcacgcatagttctgcgagagctacaggcggaccttcttcgccttgaagaacggatcctcagcgtgacgaccgagatcaagaacatcgcagacacggatgagaccgcgcgccgactgatgaccattccgggtgtcggccctcttggagcgactgccatccttgcatccatcggagacccttctcgcttccggaaagcacgagacgtcgccgcatggctcggtctcgtgccgcggcaacactccacaggaggcaagcagacactgctcggcatagcgaagcgagggagcggctatctccgaacgctgctaatccacggagcgcgatccgtcttgatgcatctcgaccgaacgaaagaccggcttggccaatgggcagacgagcttcgaagcaggatgcacgtcaacaaggtcactgtcgccctggcggccaagttggcgagagtaatctgggtcgtgctcagcaagcccggagcaacctatgaaaggcgcgcaccagaaggaagctgcgcctaaccttatccggatcgcccggatcagaatgcgaggctcgaaatgatgacgaaaaggatgatcgacgcgccgtaaaccctttccgaaagcgggctccgtgcccgaacaagctaattgggaacggcgcgtgcgaatctcatcatggcctggctggaaaaccagcccactcgcgagaggccggatacatttatgcaatcctgaacgtcatcaggaagaaccttgtacaggcggggcgaaccataca

SEQ ID NO: 3610 - DNA, 1542 bp, unidentified
  source 1..1542: mol_type = unassigned DNA; note = element_55b6116
  misc_feature 1..2: note = core
  misc_feature 3..255: note = LE
  misc_feature 256..1434: note = CDS
  misc_feature 1435..1542: note = RE
  misc_feature 14..237: note = bridgeRNA
cttgtataatgaacatgtagtaaaaaattcattatactttttcctttcttaaagattttttactataattatcataagacgctgtggattagttttcgcacctatagctagactattttaattgaggatctaaccactgtcttatgcttatttgttaattagttagataacgcatgacgttttatatagagcaaggatacatttagcataggatttgtggagcatagcggactaaaccttaaaggagttgtttttatgatttacattggcattgatgtagctaaaaataagcatgactgctgtatcataaattctgatggtgctattcttaatgattctttacgtatatccaattctcgtcaaggctttgagttcctttactcttccatactttctattctgcctgataaggatatttctaacgtaaaaataggacttgaatcaacaggtcattatagcactaatcttcaaaattttttgtatgctaaaggcttcaggctctccattctcaaccctttagctacaaatcttttccgtaaagctcagactcttagaaaaactaagactgataaaacggatgcattagttattgctaaaatgcttttttctgatgatacaaaatcctattctcctgtatcataccagattcaagagctaaagtcactaactaggcacagatatcgtttaataggatatcgagctaaattgaaaatatctgtcaatagattgatagacattatatttccagagttacctaagctattttggtcaatccatcaaagttcttcctatgctcttttatctatattgccaaatgcaaatgagatagccgcttgccacttgactaagcttacaaacatactaagtgcagcttccaaaggcaagtatagtaaagataaagcaatttctataaagaaatctgccgtggattctattggcactagttcgagggctttaagttttgaacttcaacaaactattaggttaatacaatcagttcaagttgaaattgatgctttagaacttcaaataaaagaaattcttattgaaataaattcaccactgattagtattcctggcatttcatatactctagcagcaataatattgtctgaaattggggatatagaaaggttcacaagtccttgtaagctcttagctttcgcaggattagatccttcaacttaccaatctggcaaatataatgcttcgcataccccaatggtcaaacgtggatctacttatctacgttgggctgtacttacagctgccagaactgtttcaatgagagacgcaaccttttttgcatatttatcaaagaaacgatctgaaggtaagcactattatgttgctctgagtcatgttgctaaaaaattagtgcgtgtaatattttatcttttaaaaaccaatacagcttttgttccacaaatgtaatccttatttttaaaattggcaacttagttgctctatttgttatgcacttttttaagaggctaaaaaatgaaaaaacctttaaaattatattgacttcatatagttagt

SEQ ID NO: 3611 - DNA, 1668 bp, unidentified
  source 1..1668: mol_type = unassigned DNA; note = element_55c343c
  misc_feature 1..4: note = core
  misc_feature 5..302: note = LE
  misc_feature 303..1658: note = CDS
  misc_feature 1659..1668: note = RE
  misc_feature 62..255: note = bridgeRNA
aattctccacataaagaaactctattaatttcttttgctaacgttacgaagtcccgaactttattgtgatcctatgaaaggccgatttttaaactgatgcataatagctcgggcgtaattctggttgaaatgtaaaagcctctgaattcgtggttcagaggcttgttgataatttcagtggtggaactgattgctcagttaccccgttcagaataattttcaagtacaaagttacatttccttagggtcattttttatgaatctttaatttttttaaaatggaaagaaaaatgaaactaggaatggatgtggtgaatttcaatgcagcaggaattgatattggaagtcgttctcattatgctgctattggtcaagagttagaagatgtaaaagagtttggcgtatatgctgaggatttgacttcattatgtgagtggtttgtgagcaacgatgtaactactgtagctatggaatctacaggagattattggcagaatctatatacggaacttattagttttggttttgaggtagtactagtcaatgggaaattcactaaaaatgccaaaggaaaaaagaccgatgtgaaagattgtagatggatacaaaaactacatactcttgggctacttacgggaagttttctaccagatcttgttactgaacatttacgaacatattgccgacaaagaacaaattggattgaacttgcttcatctgcaacacataaaatgcagaaatatctaaaactactgaacttcagattggatgtagtagtcaaagatgtttgcggacttactggaatgaaaatcattgaagatatctgtaaaggtaatcttgatccatataacctagcagaacatcggcattttaactgtagaaaacctaaagaagaaattgcaaaagcgctacacggtaataatagagaagacttcctttttggattgcaacaagagctcaaaagttatcaattcttccaaagaaacataaaagcttgtgacaaaaagattgagcagtttataaaacaagaactcaaacaatatcccgaaagaaaaaaactcaaaacaacagaaaaaacttataaaagaatcaataaaaatgctcctaaaattaaaaatatgaatcaaattgcttttagatattttgatggtgttgacctttttgcaattgaaggattgagtcattcatccattcttagcattatgagcgaaattggacctgaaggttttaaaaaattccctactgctaaacattttacctcttggctaaggttggctcccaacaacaaaatatctggaggaaaaatactaagtaatagagtgcccaaaggaagtaacagactcaaaatagcactcaggcaagcagcaaatgctattggaaacttaaaagatactcatctttctgattttttcagaagagtagcctacaggaagggaaggcactcagcggtaagcgcaacagctagaaagttggcagtaataatatggaatatgataactaagaaaatacaataccaaccgcctaaactatatttattcctcgatcaaaaaagaaaactagggcttgtcaaaagaattaaaaaacaaatcgataaatttgacttaaaacccgaagatttagggtttaacaacagcataataatcaataaacaaaattgacgttagtcag

SEQ ID NO: 3612 - DNA, 1680 bp, unidentified
  source 1..1680: mol_type = unassigned DNA; note = element_55c9131
  misc_feature 1..3: note = core
  misc_feature 4..247: note = LE
  misc_feature 248..1462: note = CDS
  misc_feature 1463..1680: note = RE
cttatacattaaactagtaacaagccctctcgacacagggctggaacaagggtagacttgttctatacaaccgttgaactcgtcggggaaagtctagatactccacccggctcgaccgattgagaaagctcgcacttccccgacgctgttcctgagccaaagcgatcatgagagagtcgcgcttcgagcgccatagtataagggcacgcaagctcaggaaccatgtttgcagagaggagcgtttttcatgtggtataccggaattgactgggcaaatgctcatcatgacgccctggtcattgatgaatggggtcatcaactcggatctcttcgtgtcagccacactgcgcaagggctggcaaagctgaacacctttttggagcagatcattggaacggcctctaaagagcaaatggcctgcatcattgaaaccacgcatggcctgctgattgctcagttgttggaagcaggctggccagtctacccagtcaaccctcgcacggtggatcgaaagcgaggagcctctggagccaagaccgatctgattgatgcttacctgctggcgaaaacagggcgggctgactttgccgatttgcaccgtctcactcctgacagtgagcaggtggccgaattgaaactgcttacgcgggatcaggatagcttgatccagatgcaaacgcgcctggtcaatcagctcactgcttgtcttaaagcctattacccagtagctctggatctctttggcaaattgcatcaaaagagcacgttgctgttcttgcagacctaccccacaccacaagaggcggcggcggcctcggttgagcagatccagcaggtgctcaggcaaacgagacatccacaagccaggaaggtggctctctccatcatcgagcagttgcagcaaccccagttgcaagccgacgcggtgaccacgcgtagcaagtcgcgtttgatgctcgccttggtgcgtcaactgctgccgttgagcgagcaaatcgctgagtatgataaggagatcagcgccctttttttgacccatcctgaccacgagatctttgcaagcttgccgcgcgcaggtaaacatctggctcctcggctgctggcagagattggtgatgaccggagccgctacctggatgccagcagtctgcaagccttgggtggcacctcgcccgtcctgtttcaaagcggggcatatgccaaagcgcatcgccgcctggggtgtatcaaacctctgcgcaatgcccttcatcagttcgcctggcaaagcacgcaaagtgaaccgtgggccagagcctattatcaacgcaaacgagctgagggcaaaagccatacagtggccgtgcgagcacttgccaacatttgggtcaggatcatcttcgcgatgtggacccactactgctgctaccaagcggcgacgtttgagctggcacagcagctgcatgctcgcagagcggcatagtgctgcatctgcgtgcatctcaggcggctggtgtctatggggggccaggcatctgcatcggttcgcacttgctgagcggctcttttcgataccaccacgcaagcttttggcgtggttgactttcctgtacccacttgctggcattgcgcctttcctcatactttcggattttttctgctggtccaaattggtcccaaaaagacttgactatagagagt

SEQ ID NO: 3613 - DNA, 1683 bp, unidentified
  source 1..1683: mol_type = unassigned DNA; note = element_55cc45c
  misc_feature 1: note = core
  misc_feature 2..470: note = LE
  misc_feature 471..1484: note = CDS
  misc_feature 1485..1683: note = RE
  misc_feature 54..274: note = bridgeRNA
cctggtatattctaattagctcatctagctaataggaatatacatttcctttctatcaactttatatacgtagttgattactgtttagaaatagtatatgtttgaaaaagtgaatgtgtatgtggatttatatccctccctgtagctttgactacttaagaaagtatcataccgcagacttattcaccagcaaccatcagttagatgagtctttgaactcgcatttcgaaccaggatttgcagattaagccctgtgggttcaacacagtcacaaaatctataatcgaaaggaacttaactatgattacatcaggaattgacattggaaagaattcccatgtcatctcagtcattgatcaggatacaggcgttctgctagtcaagccgacatccttcaccaacaactttgaaggattcaagaagctcgacaaaattctagaaccgtattcagaaaaaatctgagaatcggcatggaagataccggacactatcacttcaatcttctccatcatcttcttaaagaaggatacagcacgtatctcattaacccttcaaagacagatgcagaaagaaagttaaccggaaacatcacaaaaaatgatcagcaggattcaatgcagattgcagatattctagcatatccagcaagaaagaagctttaccgaaaggttgatatgaccttcttttccatggacgagcagaaaagtcttacgcgtctgcacgcagatcttacggaacagctgtgtccaataggcaataaaatacagaagtcgctggacatcctgtttcccgaatacaacagcttatttggcggccattatggcaaaacctatatgaagatccttatgacctttaaatcagccactaacattgccgaagctgacattagcgatatcaaggaagcaatgaagcataacggccgaggaagaggcgttagctttactgctgaggacctccaggcactagcaagaaattcggttgcacaggcaaataaaggcgaggaatacgcccttgaagcccgactcaatcagtacactgtagtagcagagcagcttgaaaaagtggataaaaaaatagaagagctgtcaaaagaaacaaactctcctatgctaaccattccaggaatttcgcacctttcctgtaccaccattctagctgaaatacgctgcattggcaacttcaattcggcagcaaagcttacaaaatttgcaggagtagctccaaagcactacgaatcaagccagtttgacgctaagcactgctcaatatccaagaaaggtaacaagtatctgagaaagatactctatcagataataacgcctgtcattaacaataataaggtcttcaaggactactatgacaagaagatcagcgaaggaaagagccataggtgtgcacagggccactgcgtaagaaagcttctcaggatcatcttccacattcttgcgactggcgaaggctttgatccaaacaagctgaagtagacgcttcagtttcttcgatattttttacatatcattttgaaaattgtgcaaaaagctataggagatttgcatcacaaatttgtgaataatctcgcatattattcatttttcaaagttctatatactatttgtatactaactaaaatcaaataaaattttcaaactttttcataaaactacttgatttttatatagttag

SEQ ID NO: 3614 - DNA, 1618 bp, unidentified
  source 1..1618: mol_type = unassigned DNA; note = element_55ce4b8
  misc_feature 1..2: note = core
  misc_feature 3..138: note = LE
  misc_feature 139..1179: note = CDS
  misc_feature 1180..1618: note = RE
  misc_feature 1368..1571: note = bridgeRNA
agatggggtattcggcttgagcctatcttcgggcgaccatggcatggtggataagcttgaaggtgctgcgcttcgaggctgatggttaaacgtggtctgcatgcccgcagccacaagcatcacagggagaagcgcagcatgaaacattatgcaggattggatgtctccgtaaaagagaccgcaatttgcattgtcgacgaaacaggcaagatctgccgggagatgaaggtgccgagccatcccgaggatcttgtgcgggtgctctcggatcctgcctggacctttgagcggatcggcctcgaggccgggccgctgtcgcaatggctgttcagcggcctggccgaagccggcctaccggtgatctgcatcgagacccgccacaccaaggccttcctggaggcgcagccgaacaaatccgaccccattgacgcccgtggcatcgcccagatgatgcgggtcaacctgttccgcccggtccatgtcaagacgctgacgagccagaagcgccgggcactgctgacggcgcgcaagctcttgcaggacaaggcgatcgccatccagaacgacatccgcgggctattgcgcaacttcggcctcaaggtcggcatggtcggcgccgtcaaattcgagcaccgtatccgcgagctcaccgaaggcatgcccgatctggccgaaatcgtcgagccgctgctcgaggcgcgcagcaagctgcgcgagaattttgccgcgcttcaccgcaagcttctggcgatcgtccgggataacgaggtctgccggcggctgacgacgataccgggcgtcggtccggtggtggcgctggcctataccgcgaccatcgacattccggcccgcttccgcaactccaaggcggtcggaccgatcttggggctgacgccggtgctccatgagtcgggcgaaagccgccgcatcggccggatctcctgctgcggcgatcgcatgatgcgaacgctgctttacgaagccgcgcagaccctgctaacgcgcgtgacgaaatggtcgtggctgagggcgtgggcgatgaatgtcgccaggcggcgcggccgacagaaggccattgtcgcattggctcgccggctggcggtgatcatgcaacgcatgtggcgcgacggcacagagtttcgttggacgcgacaagacatcatgccgaaagccgcctgattgcgcgcccgaccattgcagcctgccggcgcgcgcagtgggcccgtcaagggcaagtcgcggcgcgctgaccttcggccacccttgaccgaccactgcgcgcgccggccaagccgaaaccaggtcggggacggccaaacacggagatgaaacatgatcgcagagcgagcgtgacaaggatcacccataaggttccaccagtcggtggaaaagcgtccttcgcgggacgatgaatgaggtgagttcgcgagggttgcagtaccggtcgcatcacaacgatcaggacgcttccgagattgttccacctcattctcctgaatccccattagggtagggccaaagcgccgatcccggagagaagcaagaccccgcgaaagatgcgcaacgccgcgaagcggaaggctcgaaaagcgcttgacttcaacacgccgaatagaga

SEQ ID NO: 3615 - DNA, 1562 bp, unidentified
  source 1..1562: mol_type = unassigned DNA; note = element_55d0128
  misc_feature 1..3: note = core
  misc_feature 4..256: note = LE
  misc_feature 257..1456: note = CDS
  misc_feature 1457..1562: note = RE
  misc_feature 29..276: note = bridgeRNA
tttagtaccataaaagtgtagcagatagagattacactctctacttgctgcacttatttcatataatgagggaagtagttggtctggcgaggtgcttttctgggtcatcgcatccgacataaaaaccgtcaaccaaccccttgttatatgaactcgtttaagcaggttgggacgatatggcgcttccgtgtaacgaactaaaatgagtgataataagtgcggttggacagctacaaaatacactcaggaggtcgttatgataagcgtaggaatcgatgtttcaaagggaaaaagtacaacttgtgccattaaaccttacggcgagatcgtcgcaagtccgtttgagtttcagcacacggaaacagacttgaaatcactggctaatatgttcaaaaggatggatgacgaggtcaggtttgtgatggaagctaccagcatctatcatctgccggtggcaacctatctgaaagaacatggaatgttcgtatctgtggttaatccgtatgaaatgaagcagtatcgcacaagaggcctgaggaaggtcaagacagatcgtgccgactccatgatgatagccggatatggcattgacaactggcactccctgaacgagtttcagataacgcaggatgtatacgcagagctgaaaatactcagccgtcagtatcgacaccatatgcaacttcgcatatctgcgttgctagggcttacacacttgctggattacacaatgccaggaatcaagcgagagctgaaaagctggaatgaggataacggcaaggacaagcttggagattttgtcagtagatactggcattacgacaacatcaccaaaatgtcggaaccaaagtttgttgagcattactgcaaatgggcagagaaaaagggataccatcaaaaccagagtaaagccgctaagatttattctatggctaaagaaggcatccctacgcttccagcgaatcaaaccaccaagatgctggtacatgaggcggtcgaggtgctgaaaagagtcaatgaaactctcaacacaatattagcacgcatgaaggaactcgccaagagtctgcctgaatatcctgtggttcgagcaatgggcggtgtaggagacacgcttgcccctagactgatagcagatatcggagatgtgcgaaggttccatagcagcaaggccttgatagcatttgcagggatagatgcgccaccataccaatcagggcagtttgtagggacagaacgccacatatccaaacgtggatcttcagcaattcgtaagactggatacgaagttatgcgatctcttaaatcacaccaggaaccagaggacagcgcagtataccattttatactcaaaaaagaagcggagggcaagcccaaaaaagtagctaagatggcaggattgaataaattcctgcgtatctattacgccagggtgcaagaggtgtatagaggataagctcacttgagatatatggattaggtcggggatggctccggccattttgtgatggaagaaaacctgctatgaagagtcaattttccacttgacttttcttagcagg

SEQ ID NO: 3616 - DNA, 1354 bp, unidentified
  source 1..1354: mol_type = unassigned DNA; note = element_55d22e2
  misc_feature 1..3: note = core
  misc_feature 4..86: note = LE
  misc_feature 87..1106: note = CDS
  misc_feature 1107..1354: note = RE
  misc_feature 1122..1341: note = bridgeRNA
tgatggtgtggacggcccctgctcggcggcatcgaagtgccatagcgtggtcgttgcgagcaacgccacaaagagaggagccgtccatgacgaaggttatcacgatcggattggatcttgggaagaacgtgtttcaggtgcacggcgtcgatgcatcgggtgcggcggtgctacggcggcggctgcggcggggcgaggtgctgaggtttttcgcgaagctcgaaccggcgacggtcggcattgaggcgtgcgcgacggcgcatcattgggggcgtgcgttggcggcgctcggacacacggtgcggctgatgccggcgcgctacgtcaaagcgtatgtgaagcgccagaagaacgacgcgagcgacgcggctgcgatctgcgaggcggtgacgcggccgacgatgcacttcgtgcccgtcaagactatggagcagcaggcggctttgatgctgcaccgggcgcgcgatcttctgatccgccagcgcacgatgctggtcaatgcgttgcgggggcacttggcggagttcggcctcgttcgcgcgcgcggcgcgaaggcgctgggcgagctggtcgcgctcatcgggagcgccgacgtgccggcggaggcgcaggcggcgctgcgcccgctcgtctcgcagctcgaagcgagcgaagcccagatcgctgcgctcgacggggtgatccgcgaatggcaccagagcaacgacgtgagctgccggctggcgacggttccgggcatcggccccctgacggcgagcgccatcgcggccagcgtgcccgatgcgggcgcgttcgcgaacgcccggcagttcgcggcctggctcggcttggttccacgccagaacacgacgggcggaaagccgcggctcggaggcatcagcaagcaaggcaatgcctatatccggcgattgctgatcatcggcgcgcagtcggtgttgcgctgggcacgacccacgcgaccgaccccgtggctgctggcgctgctggcacgcaggccgcgcaaggtcgccgccgtggccctggccaacaagatggcgcgcatcgcctgggcgctcttggcgcgcggcgaacgctaccgccaccagatcctgcctgccgccgcttaaccgcgcccggcaccgacagcttgcgagggtgaacgagacgtgacggcacgcggtccatccgacgatcggccaaacccgccgtgggtcagggagcgctcgagctcgctactctgattgggacccggtcagcggcagccatcaaggccagcggtcatgcgaccgcgtcaacaggccggacacatgaccgcaagcgaccaccgcgccgtcgcatcacgattcgctcttgccaagagggggccgtccacaca

SEQ ID NO: 3617 - DNA, 1198 bp, unidentified
  source 1..1198: mol_type = unassigned DNA; note = element_55d484a
  misc_feature 1..2: note = core
  misc_feature 3..223: note = LE
  misc_feature 224..1183: note = CDS
  misc_feature 1184..1198: note = RE
  misc_feature 9..188: note = bridgeRNA
cttgtatctagctctcgagagaagttgagagcattctgatcggggcgccagctcgatgttgccttggtggtagacaccgtgcgttagccggagcggcgtcccgagttctcgtcgcatcgagcccgaacagttgcgggggccggccgcgtgccgagcccgaattctcacaaggacgggcgacgcgacatacctcgacactcctcagcgtggtggaggacggcgcatgttcgtcgggatcgacgtcgcgaaagcggagctggtggtgagcatactcccagccgcggaacggttcacggtggccaatgacgaacgcggcgtccacacgcttgtcgagcgtctgcggggcatcgcgccgacgctcatcgtgctcgaagccacgggcggctatgagctgctcggggtcgcggccctcgcggcggcgacgctccccgttgtcgtcgtcaacccgcgccaggtgcgcgacttcgccaaggcgaccggccagctcgcgaagacggaccgcatcgacgccgacatcctcgcccgcttcgccgacgtcgtccggcccgcagtgcgcccgatcgcggatgacgcggcgcacgagctcgaggccctgctcacccggcgccggcagctcttggagatgctgcaggccgagcgcaatcggaccggtcaggtgttcggcagaggcaagcgggcggtgaagaagagtctcaaaaatcacatcagctatctggagcgcgagctccggatgacggacacggatcttggcgacatgatcaaagcgagtccggtgtggcgcgagcgggacgcgctgctccagagtgtgccgggcgtcgggccggtgctctcgcgcacgctgctcgcggacttaccggagctcgggcagctctcgcgccgtgccatcgcgaagctcgttggggtggccccgctcagccgcgactcgggcacgctgcgcgggcggcgcttcgtgcagggcgggcgcgcgaccgtgcgggcggtgctgtacatggcggcgctcgtcgcgacgaagcgcaacgcggtgatccgcgcgttctaccagcggctcgtcgcctcggggaagccgaagaagctcgcgctcgtcgcgtgcatgcggaaactgctcacgatcctcaacgtcatggtccgcacggcacagccatgggccgctgatcccactgcagtcactcacactgctgcttgactttcaagacagttg

SEQ ID NO: 3618 - DNA, 1741 bp, unidentified
  source 1..1741: mol_type = unassigned DNA; note = element_55d4c8f
  misc_feature 1..2: note = core
  misc_feature 3..283: note = LE
  misc_feature 284..1420: note = CDS
  misc_feature 1421..1741: note = RE
  misc_feature 62..340: note = bridgeRNA
ctcgtataatatcttttatatacataaatacatgtatcttggttaataagttacaaaataaatattgttcaataggcttagtaaagcccatgatataattgtcctagtgtcaatcaggtaatagttcttttttctcctgttgaaccagtaatggttgcttcataaatagtctgttcccctgacatggaagttagcttcaaaccggctggctgtttgcttaagtacatggactaccatctagcagtatggtttcgcatctgtccatcttaagctggattcttatatgcgagggtgtcgatgctccatgatcatgggttttaccaagccgattgaacactttaattcacaacgaaagaaggggattacaatgaacacactttacgtcggtattgatgtaagcagcaaatccaatgtcgtttacttaatgcttccaaatggtgataagcacagtaacttttctgttgcaaactcgcatgaaggttctacccagttggtaaaaagaattcattctgctttaacttcgcattcccttgacacggttctgattggtcttaaagcaacctctgtttatggagacaatcttgtgtacttcttaagggaagatgccactctggcaccatttaacagaaagattcatgtcctcaaccctaagcaggtcaaaaagtttcatgatacttataacgatctgccaaagaatgattatgtggactcttttgttatttctgactgcctgcgtttcggtagaatcaacaaagaggtttatctcggagactaccactacaaagcactccagaacctcactcgtgcacgtttcttcgatgttcaaaatctggtaaaagaaaagcagcgatttatgaatgtgctgttcaagaagtattctacgatgacgcaggagaaggtatttagtgataccttcagtactactgcccttgctgtatacgatgaatttgaatccgcagaagcactggcaaatatggacttacatgagcttactgacttcatcatgaaaaaaggaaagaaccgctttcctgatccggatgcagtagccaaagccattcagaaagctgcccgcagttcttaccgtttacccaagacggtaaatgattctgtcaaccaggtgatttctatatccataacctccatgaaggcattggaatctcaaatcaaagagttcgataaagccattaaagcccagatggaactcttgccaaacgtattgatatccattccgggtatcggacctgtatattcagccggaatcatggctgaaatcggtgatatcaatcgttttaacaggcaggctgctcttgctaaatatgcaggacttgcctggaagcagcaccagtccggtggtttcgaagccgaagttacacggctcatcccatctggtaaccgatttttaaggtactatctgtgttaagcagcattctctcttgtaagatgtgacaagaaatacagcgacttctaccacctcaaatacaaagaggtcaacagatgccaacacaaacgtgcactcgcattaactgcccgtaaatttgtgcgtttagtctttcgactgctgaaagacaaccgcctatactgtccaacaaagtagatttcatctatttgctgatgagctacgccctgctcatttttaaaaatctggtcgacagggcttaggtgggtgttttttgtcttcatgagatatatacaaaaatacatgatttttatatcattgatctcttgacataacaccgctgga

SEQ ID NO: 3619 - DNA, 1422 bp, unidentified
  source 1..1422: mol_type = unassigned DNA; note = element_55d5d87
  misc_feature 1: note = core
  misc_feature 2..143: note = LE
  misc_feature 144..1148: note = CDS
  misc_feature 1149..1422: note = RE
  misc_feature 1190..1421: note = bridgeRNA
gaatgtaatgaacgcatcccacccacttagccatcggcattgtgctggaattgagagatgaggtgtggatcctctcagatttccggccttatagtgcctaaatgtgggagcctgtcgctccctgatgactggaggatccactcatgaaatttactccttttggcgtcgatattgcaaaacatttgatgcaaattcattttgttgatgaatataccggtgaagtcattgataagcagttgcgacgaggtgattttttaacgttcttcagtaaccgacagccttgcttgattggcatggaagcctgtggcggtgcgcattattgggcgcgggaactgaggaagctaggccatgaagtgcgtttgcttcaggcccgatttgtcaaagcattccggatgggaaacaaaaacgatgtgatggatgcccgggccatttggatggccgttcagcaacccggtaaatcggtggcggtcaaaaacgaagaacaacaggctatcttgtcattacaccgaatgcgccgccaattagtgaaattcagaaccgcgcaaatcaatgcgttacatggtttgctgctggaatttggtgaaaccctgcataagggaagagcctccctagataaagcgatgccggaagtgcttgagcggttaagggaaaaactggccccgttcctgcttgacctcctggaagaacaatatcaccgtctgaacgacatcgatgaacaaattgaacaggtggaaaagcaactgattgcgtgggcaaaacaaaatgccgattgccagcggatcatgaaaattcccggtgtcggcatcctgattgccacgatgggagaagccagtgctttccggtcgggcagagaattttccgcctatctgggattagtaccgaaacaaacgggaacgggggggcggacccaattatgggggatcagtaaacgcggggatgtctatctgcgaaccctctttatccacggtgcaagagccgccactttgctcacgaaaacgccgtcgccgtgggtgacagaactgagaaaacggcgcccggcctgtgtggcaatcgtggggatggcgaataagctggcccgtaccgtttgggcgctgatagcccatcagcgggaataccaaaacgattacgtcagtgtcaggccttattgaggcgtttcgctgtccaaccttaacttttttaaccacaaggatggatgcagaaagagtgctgaggcaaaaataaatgatgacaaagacaggtaagaccgtgactggctaaacctgaatgattgacagagcgtaaagctcgtcaggagaatgaggagccagtcagcggattacatcgaggcccgcagccccggctgcaataaggccggatatagagctgcaacctaccgtcgatgtcaacgtcacttttgtcttgcaaacgggatgcgttcatata

SEQ ID NO: 3620 - DNA, 1561 bp, unidentified
  source 1..1561: mol_type = unassigned DNA; note = element_55de9f6
  misc_feature 1: note = core
  misc_feature 2..380: note = LE
  misc_feature 381..1454: note = CDS
  misc_feature 1455..1561: note = RE
  misc_feature 9..223: note = bridgeRNA
aacatactaagattagctgtgaagaaatctatgacgatagattttttcacagctattttttatagttgtaaagagagaagtagactgtgcaggctcttgggttttaaatccgtttataaaacaagtcagctttactctcgccttttgaaattcgattgtagtatgttgggttcttgaaaccgtgtataggaaaatgaaatgagaaaggttaagtaaagtttaaacttctcaaattaagcaaggaggttttagttatcgattatttagggattgatattagtaaaagaaatagtgtcgtcgcccattataaagatgagaaattccaaaaggaatttaccattcagaataataaaaatggttacaattatttattaaagtatttgaacgacttaaaccatccaaaaatcatttttgaatctacaggtatctattcaagagctatggtacgattttgtcgtgtaaatcaaattaactatatagaaatgaatccgttagaagctaaatttagaacgagttctttaagatcatggaaaactgatcaggctgatgctcacaaactcgctcatttagcgcctactctcaaacaaacggacagcttacctactcatgaatcaatattctttgaattaagagaacgtgcccgttttcatctagagattgaaagtgaacaaaatcattttaaatttgagattgttgaactactccatcaaacatttcctggtttagaaaaattatttagtagtcgatattcaatcattgcgcttaacatcgctgaaatattcactcatccagacttggttattgatttagatagagacatactgattacacatatattcaattctacagataaaggtttatcaatatataaagctgaaaaatatgcgcaacaactaataaatatcgcttcggaaagctatcctaatgtcgatagacattcttttctagttgaaaaagtacgtttacttattcaacaattaaaacaatctatccaacgtcttaaacaattagatgatgccatgattcaattagcaaaacaactcgattgttttgaaaagatttattcgataccaggtattggtgaactaagcgcagcgatgattattggggaaattggagatattacaagatttagatcacataaacagctcaatgcttttgtaggtattgatatcaaacgatatcaatcaggtggtacttctagtagagatacaatcaacaagcgtagaaataaaaaagcgagaagacttttattttgggtggttatgaatattataaggggtcaacatcattatgataatcatgtcgtcgattattattacaaactaagaaagcagcctaatgagaaatctcataagactgccgtcatcgcttgtataaatcgactattaaaaacgattcattacttgataatgaatcagaaattgtacgattatcaaatgtccccacattagccaaacgtacaatcaaatacagtttaacaccttattcaaaaaaattaaattgaacggtttagttaagtaatgcttattttaattataagtacttgactaatcgtagg

SEQ ID NO: 3621 - DNA, 1370 bp, unidentified
  source 1..1370: mol_type = unassigned DNA; note = element_55e6024
  misc_feature 1..2: note = core
  misc_feature 3..75: note = LE
  misc_feature 76..1110: note = CDS
  misc_feature 1111..1370: note = RE
  misc_feature 1083..1358: note = bridgeRNA
tgatggggtggacgccccccgacggcatcgatgtgccagagtggaggtgttgaaacaccactgagggaggcgtccgtgtcgcgggttatcacaattggtctggatatcgccaagaacgtttttcacgcccatggcgtcgatgagcgcggtgcgatggtgttcagccggaagctgacgcgtggcaagctgctcgacttctttgcgaggcagccgcgatgcacggtcgcgctggaagcatgtggaggtgcgcatcactgggcgcgcgagctccaggcgatgggtcacgaggtgcggctgatcccgccggcgtacgtgaagccgtttgtgaagcggcacaagaatgatgcgatcgacgcggaggctatctgcgaggcggcacagcggcccggcatgcgcttcgtggcggtaaagagcgaggagcagcaggcagcaggtctcgtgttccgcacgcgtgatctggcggtgcgccagcgcacccagctcattaatgcgatccgcggccacctggcggagtatggctgggtagcgccacgcggcaccgcgcacatgacgatgctggctgatcttctggaggatgaggaaatgatctcgaccctgccggaggcgacgcggccgatgttcaagctcatgacagacatgctggccgaactgggaaagcggatcgccgtgctcgaccacgagattgccaagcgggcgaaggaggacgaggcagcgcgccggctgatgaccatccccggcatcgggccaatcgccgcaaccgcgatcatcgcgctcgcaccgccgattgaggcattccgaaaggggcgcgactttgccgcatggctcggtctagcgccgcgccagcactcgaccggtggcaagcagcgactcgggagcatctcgaagatgggagaacgtaccatcaggcggctgctcatcatcggcggtagctcgatggtccgcagtgcgtgtcgccacggcgcgccggctggctcgtggctggagcggatattggcgcgcaagccccgcatgctggtctcggtcgcgctcgccaacaagatcgctcgcgtggtgtgggcgttgctgacgaagaaggaagattacaaggctccggcagcggtcgtggcgtaagccagggacgaggccagaggcgtcggggacgtaggcggtcgaaggagggtatggcacaacagtcggcgagacggggccggaagaaccagggaatggcagagcgctacccaagcgcgcaaagctgatgtggttccggtccgcaaactcccatactggcccgcagctatggcgctgctcatcgaggccggacagatgacagcatccgactacgtgccaacacaccccgatttaccgcttgcatccgaaggggcgtccacaga

SEQ ID NO: 3622 - DNA, 1431 bp, unidentified
  source 1..1431: mol_type = unassigned DNA; note = element_55ebcbc
  misc_feature 1..3: note = core
  misc_feature 4..128: note = LE
  misc_feature 129..1166: note = CDS
  misc_feature 1167..1431: note = RE
  misc_feature 1184..1387: note = bridgeRNA
agatgggatattcggcttgagccccacctttaacggcagtggattgtaggagaaggtgctgcgcttcgagtgatgataaacgtggtcatgtcttgcaacagccacaagcatcggaaaggaagcgcagcatgaagtattatagcggcctcgacgtctcggtgaaagagacatctgtttgtattatcgacgaaacaggcaagatttgccgcgaggtgaaggtggtcagtcatcctgatgatctgatcgcggccttgagccacccagcgtggcaaatcgaacggatcggtcttgaagcgggacccttgtcgcaatggcttttcgaaggcttggccaacgccggtttgccggtggtctgcatagagacccggcataccaaggccttcctcaaggcgcaggtcaacaagaccgaccgcaacgatgcgcgtggcattgcccagatgatgcgggttaatctgtaccggcctgtgcatgtgaagacactgacgagccaaaaacgccgggccttactgacagcccgcaaactgcttcaggagaaagctattgctattgagaacgacattcgcggattgttacgcaatttcgggctcaaggtcggtgttgttggaactgttggttttgatgatcgcatccgcgaactcgttgacgatagtccggagttgcttgagatcatggaacccttgttgtcggcacggcaaaaactgcatgaaacattcatggtactccaccgcaagctgctaacgattgtccgtgatgacggggcgtgccagcggttaatgacgatccctggcgtcggtcctgttacctcacttgcgttcatcagcaccatcgacgttccagcgcgcttcagtaaatcacgcgctgtcggtccggcattgggattgaccccggttctcaatcaatcaggcgaaagtcatcgcgtcggccgcgtttccttgtgtggtgatggtatgatgcgggctctgctttacgaagcagcccaggtcatgttgagccgggtgaagaaatggtcatggttgaaagcctgggcgatgaacgtcgccaagcggcgcgggcgccaaaaagcaatcgttgcacttgctcgccggctggcagtgatcatgcatcgcatgtggagcgatggtacggaattccactggacaaaagaaagcatacccgcagccgtctgaaccgagagccaaacaacaaagttccacttgccggtggaaagacgtccttcgcaggacgatggatgaggtgagttcgcttggggtcttgtgccggtcccactatcatgatcaggacgcgaggaagattggaccacttcattctactgatcccatgctgggagggccacagagtcgatctcgaagagaagcgcgggcctgcgaagacgtcagatgttggcacaacggaacggtttttaagccttgacttcaacacgccgaatagaga

SEQ ID NO: 3623 - DNA, 1354 bp, unidentified
  source 1..1354: mol_type = unassigned DNA; note = element_55ed7be
  misc_feature 1: note = core
  misc_feature 2..64: note = LE
  misc_feature 65..1099: note = CDS
  misc_feature 1100..1354: note = RE
  misc_feature 1107..1344: note = bridgeRNA
tatggaatggcccgcccctcacttcctggtgccatgctggccctggatctggaggagaggaacaatgaccaagacccccatcgccgtgctcgggatcgatctcggcaagaacagttgcagcttggccggactggacgcgaccggcgccgtcgtcatgcgccggaagatgatccgggagggcttgctcgcctttgcggcgggattgccatcctgtgttgtcgccatggaagcctgctgcggggcgcacttcctggggcggacctttgaagcgcacggccacgaggtccggcttatgtcgccggagtatgttcaaccctacgtgaaggcacagaagaccgacgatcgggatgcggaggcgatcgctgaggccgccacccggccgacgatgcgcttcgtgtcattgaagagcgaggcccagcttgatctgcaagtgcttcatcgcgtgcgagagcgcctggtgctcgctcgaaccgcgttgaccaaccagctgcgcgccattctgctcgagcgcgggatcatcatgcccaagggccgcatgatactgatgcggcgtcttcaggagattgggcttgagaacctggccgtgggcgctcgcacacgggcccttcttaaggatctgatcgacgaatgcgccgaactcgaccgtcgcatccgggcctacgacgaggagttcgccgcggtggcgcgacatgatgctcaagcacgtcagctatcagggatccccggcgtcggcgtaataaacgctaccgcgctgttggccgccgtcggcgacggcagcgcgttcgcgcgggggcgtgacttggcatcctggctcggtctgacgccacgtcagcactcgacaggcggcaagaccaagatgctgggcatcagcaagcgggggaaccgctatctgcgcaagcagctgatccatggcgcgcgagccgccatgccccatctcgccgccaagtccacgaggatgggcgcatggttgcggggtctgctcgaacgagcccacccgaacgtggtcgtggtggcgctcgccgccaagctggcgcggatcatctgggcggtgttgcgcaataagacgaacttcgatccaggcgcagtcttggcggcctgatcggaaacggatgcggtgaggctgaattagcctggccgctcaaggtctgcgaaggtgaaagacagatggtgtaacggtcagaccggcggactggagatcctggttctaaatgcggcgctcgacgccgaggcttttataaggacccgggacgcgcggatatccatcttggccagggctcgccctgagaccggatacgttgatgcagaccgatcacgccatcaggaaaacacccttgcggacggggcgggccatacg

SEQ ID NO: 3624 - DNA, 1472 bp, unidentified
  source 1..1472: mol_type = unassigned DNA; note = element_55f3843
  misc_feature 1: note = core
  misc_feature 2..90: note = LE
  misc_feature 91..1170: note = CDS
  misc_feature 1171..1472: note = RE
  misc_feature 1214..1411: note = bridgeRNA
gaatacgaagggacttcccgcaattcctaaacggtgtcgatgcaccaagattgaagtttggaagtcaatctgacaggaaaggggaagtccatgagcgagattacacgaggcttgatcgcgcgggtaggggtcgacctggcgaagcgagtgattcaggttcatgcggtcgataccgctgggcgagtcgtggtcgcgaaggcgttgcagcgtgacacgttcttgccttggtgcgctcagttgccgccaggcacgttgatcgccatggaggcctgtagcggcgcccatcattggacgcgtaaattgcgggccatgggcttagatgcccggatgatggcggcccacttcgtggcgccgtaccgcatgcagggcaagggcggcaagaacgacgcaaacgacgcggccgcggtttgcgaagcagcctcgcggccgtcgatgcggttcgttccgctcaagacgcctgcgcagcaggccatgctcgccattcaccgactgcgcgaggggtacaaggaagagcgcaccgcctgcatcaaccgcatccgcggtctgctgactgagtttggattggtcttcgctcggtgcccggaagtcttgcgtcgagaactctccgacgtgatcgaggatgcaagcaacgatctgccggcgatcctgcgcatggggctgcgagaggcccacctgcactggatcgagctcgagtgccacatcgcgtggtgcgacgagcgcatcgaggcgcacgttcgaaccgacgaacaggccaaggtcgccgcccagttgtgcggcgtcggcccagtgacggcctcggcgttggtggcgacggtgggtgacttcaagcagttcagatcgggcaaccaattcggcgcctggttagggctcgtgccccggcagaactccagcggcggcaaaaccagtctcggccagatcaccaaacgaggcgacgactacctgcgaaccttgctgatccagggcgccaaggcggccatgatccacgccaagaaacgcaccgaccgcgtctcagtatggctggcggcattggtcgatcgcatcggctggcagaaggccatcgtcgcgatggccaacaagaatgcccggatcctgtgggccgtgctaaccaagggcacggcctacgatcccaaccacgtgtcgatcaacccaggtttacagacgacggcctgaaggcttgcaagcattcgtcgagaaaaagaaagattcgttccccgcagacgtgcgttcggagatgcaccccacaggtcagaccggcagcaggtgaactcgggctagtgtccgccgcgccaagatggtgacgacgatggccgaatggagtcctgctgagcggtttgtatctgggccagcaccgatgagtgcaataaggccgcctgtagatgtgcagtctgtactgtgcggcgtagcctcttcggtacgcaggtcacgcgaggaagaaagaataccggctattgaattaacgagaagtccctgta

SEQ ID NO: 3625 - DNA, 1220 bp, unidentified
  source 1..1220: mol_type = unassigned DNA; note = element_55fbc2c
  misc_feature 1..2: note = core
  misc_feature 3..218: note = LE
  misc_feature 219..1205: note = CDS
  misc_feature 1206..1220: note = RE
  misc_feature 12..191: note = bridgeRNA
cttgtatctttatcccggtcgtgattagctatcatgacttgagacagaaagagcttgttaccgcccttaaggatcaaccttgtactgtagatcaagccttctgtctcgcttctgatgccaacacagacactgaacggtagccaagggcgttgaccctgtatgcacaaggcaagtgggctcagttggtggttttttatactcatggaggtcttttgtttatgtactttatcggcatcgatgtttccaaagccaaactcgactgcagcctgttgctggatgtcgccaccagcaagcgccgcgctaaagccgctgccaactcgaaagccggcattgccgatttactggcctggtgtgccaagcagcacgtgcttccccatgaacttcgcgccatcctggaagggactggcgtgtatcacgaacaggcggccttggcgctcaccgatgccggtgtgaccgtctctatcgtcaatccggcgcaggtcaaagacttcggccgtagcctcggcatccgcaccaaaaccgatggtgtcgacagcctgatcctggcccgttacggcgccttattgaaccctaaaccttggcacccgcccagccaagaggcgcgtgtcctgcaagctctgctgtcacgccgcgaagccattgcgcaggatttacaacgcgaacgcaaccgcttggaaaaagccggcgccaccgacacacccgccttgattcatcaatcccttctggattcaattgcctttctggaaaaacagcttgccaaacttcagcacgatatcgatgagcatatccacaaacatcccggcctgaaagccgaccgagagctgctgaccagcattccggcggtagggccgcaagtcggcaatcatttgctctcggtgatgcacaatcattgttttcagtccgccgaacaactggctgcctacctgggcctggtgccagtggaacggcaatccggcacctcgcttctgggtcgaccccgcttgtcgaaagcaggccctgcccgtattcgcgccattttgtatatggccgctgtggtcggtactcagcataatccacatctcaaagcgctctatctacgattacaggctcgaggcaaaaccaaaatgtctgccttgggggctgtcatgcgcaaattggcccatttatgcttcggcgtgctgaaaactcgtcaaccttatcgacctgattatggaataccggcttgatttttaagacggtat

SEQ ID NO: 3626 - DNA, 1367 bp, unidentified
  source 1..1367: mol_type = unassigned DNA; note = element_55fd8c4
  misc_feature 1..2: note = core
  misc_feature 3..78: note = LE
  misc_feature 79..1104: note = CDS
  misc_feature 1105..1367: note = RE
  misc_feature 1080..1355: note = bridgeRNA
tgatggggtggacgccccccgacggcatctatgtgccaagatggtggtgttgcacgaccatctgagagggaggcgtccatggacgaagttaccacgatcgggctcgacatcgcaaagcaggttttccacgcgcacggcgctgatgcatcgggcaggagggttttcagtcgccgcatcacccggacgaagctgatcgagttcttcgctgcacagccacgctgcacggtggcgctggaagcctgcgccggtgcgcatcattggggtcgcgagttgcaacgcctgggtcccgaggtgcggctcattccgccggtgtatgtgaagccgttcgtcaagcggcagaagaacgatgccgccgatgcggaggcgatctgcgaggccgcgcagcgaccgaccatgcggttcgtgccggtgaagagcgaggagcaacaggcgagcgccgcggtgttccgcgcccgcgacctgctcgtgcggcagcggacccagctgctcaatgccttgcggggcttgctcgccgagcacggttgggtcgcgcccaaggggctgttccatgccggcgcgatgatggcgaagatcgaggatcctgggtgcgcgttgccgccgagtgcgcgtgatgtgttcctggtgatgattgggagcgcaaaggcattggacgaacgcattggcctgctcgaccgcgagatcacgaagcgagcccgcgaggatgagaccgcgcgtcggctgatgaccattccgggaatcggtccgatcacggccaccgcgctggttgccttggccccacctccggagagctttcgcaagggccgcgactttgccgcctgggtcggcctcacaccgctgcagcgatcgaccggtggcaaggcgaggcttggttcgatcagcaggatgggcgagcgaacgttgaggcgcttgctgatcctcggcagcgctgccgtcgttcttcacgcgagcaggcgcggtgcgcccaagggatcgtggctcgagcagatgatggcgcgaaaaccgcgcatgctggtgaccgttgcgctcgccaacaagacggcgcggatcgtctgggcggtgctcgccaatggaggagtttatcgagctccggctgtcgcggcctagagctgcgtcgggcgtgaggatgccagagcgttagcgatcgaaggagagtatggcaccacagtcggcgagacgggatcggaagaaccagtgctttccaccgtgccacccaagcacgctagtgggtgatttggatccgatccgcgaactcccatacgggctcgcggcactcatcatcgccgcatcagaagccggacagatggcagcatccgaccaggtgtcagacaaacccaaaaatcgcttgcgctccggggggcgtccacaga

SEQ ID NO: 3627 - DNA, 1534 bp, unidentified
  source 1..1534: mol_type = unassigned DNA; note = element_5606247
  misc_feature 1: note = core
  misc_feature 2..272: note = LE
  misc_feature 273..1430: note = CDS
  misc_feature 1431..1534: note = RE
  misc_feature 16..261: note = bridgeRNA
ccattacggtccgagataagccatcgatgaacttcggcgacgagcattcggcgcattgcctacagtttggccaagccccgaggggccgccgatcgggcgtccccggatggccgtctgcccctgcccctcgagggcccggggggtgttgccaccgaggacgctcgccgctccgaacgactgataggaaactgccgggcccgggggccgcggccaggtaatgtgggtgtcgaggggagcgcttccgatcggcctgacgattggaggataccaccatgatgccgggaacgaggccgggaatcgtcatcggcttggacgtcgggaaggcctcgcactgggcgtgcgtggtcgcatgcgatggcgaaatcctcgccagcaggcccgtcgccaacagggaaagcgccgtcgatgaactgtattccgagtatccgggcgcgctggtcgtggtcgaccaggtgcgcaacataggcgcgctggcgctgtcgcgggcgaaggcggcaggcatgcccagggcgtacctgccgggcctggcggcccacggcgcgtcgaagctgttcgccggcgacgccaagaccgacgagcgcgacgcggcggtgatagcgaagaccgcgctcggcatacccgacgcgctgctgccggtgcccgagcggacgccggaaatcgaggcagcgaggcagctcgccgcgcagagggatttcctgacctgcgagaacacgagggcgaagaaccggctgcgcagcatactgctcgaatcgtgccccgagttcgaggctcgcgccgacctgtcggaccgggccacgctctcgctcatggccgcgctgggcgggccgtggtcgatggccgccgcctcgccgcgggcgataggcacccttgcccgcaagtgcggccgcgccaaagcggcggcgctgctggattccgtgacggcgtcgacggagccgtccgccgcggccgtcgcgtgcgaggaccgcgcggtgaggctgctcgcgcgcaggatatcggagaacgccgccgagatagaaggattgaccgcggcgatatcggccctgctgtcggcggacgagacctacagatgcctgctcacggttcccggcataggcccgagaaccgcctccgagctggtcatatccgtcgatattgaggacttcccgagccacgacaggctggcgtcgtattgcgggctcgcgccgcgcaaccggcaatcgggaacgtcgatatcgtcggtgtcggcgtcgcgccagggcaacaagcggctcaagaacctgctcatattctcgtgcaactgcctgacgcggtcccgcaaccgctggagcgagtactacgcgcgatgccgccgccgcggcatgtcccatggccaggcgctcaaggccgttgcgagaaagaggctcaaggtgatctacgcgatcatgagggacaaaaggccctacgtcgcctagtccccacgattaataaagcgaatcgcaaaggccgccaggccagcgtcagccttgccaaaaaccgagtccgcaaacgcagaaatcagttgacaaaactataggaa

SEQ ID NO: 3628 - DNA, 1338 bp, unidentified
  source 1..1338: mol_type = unassigned DNA; note = element_5612835
  misc_feature 1..2: note = core
  misc_feature 3..47: note = LE
  misc_feature 48..1085: note = CDS
  misc_feature 1086..1338: note = RE
  misc_feature 1083..1325: note = bridgeRNA
tgttggggtggacggcccccgacggcatcagtcgtgccaggctgtgaatgtatgcaacgcagccaagggagccgtcctatgacgattatcagaattggtctggatatcgcctctttcaggtgcacggcgtcgatgagaacgaacaaacggtggtccgccgtcagcttcggcgcagcgagatcgcgaagttcttcaacagactgccaccgacccggattgggctggaagcgtgtggtgcctcgcattattgggctcggctgttgcgcgggcttgggcacgaggtggttttgctgccgccgcaatacatcaagccttatctcaagcgcggcaagaatgatgcgaacgatgccgaggcgatctgcgaagcgatgagccgaccagggatgcgctttgtgccgatcaaaagcgccgagcgccaggcagagttaatgccgctgggggtgcgcgatctgctgatcaagcagcgcaccgccgtgatcaatgcaatccgcgggtatgccgcggagtttggtgtgatcgcggcaaagggcccggtgaaagtggccgagctgctgcaacaggcgcatgcggaagaggcgagcgtgccagctgtggcgctggacatgctcaggttgctcaccgctcagctcgatgcgctcgatgtcaaactcaagcaaatcgagacccggctggtggcagtccaccgggaaaacccgctgagccaatgtctggcgagccaacccggcatcgggccaatcggcgcggtgagctttgctctcaaggtgaccgatccgaagagtttccgttccgggcggcactttgctgcgtggcttggccttaccccgaaagacaattcctcgggcggcagacgccggcagggccgcatcagccggcagggcaatgaaactctgcgcaagctgctcgtactcggtgcgacggcggtgatccgcttcgccagaccgggccatgcctcgccctggttgctcaatctgctagcgcgcaagccgagaaaacttgcagcaatcgcgctggccaacaagatggctcggacgctctgggccatgatggtgagcggtgaggtttatcgccggccgcttccggcctaagctcgctcacctcattctgacctggcgcttgcaaggacagcagcaagatggcgatcggtcgaaccgaggatcggaataccccgggaaaccctttggggcatgtaccccgccgtgatgtttggggcccgatccgcgtaacccatctgggcccgcggtcaacacggccgcacatcaaggccggacacatgaccgcaatcgaccagacccgtccccagctgcaacaagtccttgcgaagcgggggccgtccacaca

SEQ ID NO: 3629 - DNA, 1485 bp, unidentified
  source 1..1485: mol_type = unassigned DNA; note = element_561755e
  misc_feature 1..2: note = core
  misc_feature 3..228: note = LE
  misc_feature 229..1464: note = CDS
  misc_feature 1465..1485: note = RE
  misc_feature 7..242: note = bridgeRNA
ctaatggggcttaccgggttggcttggaagggcagactcggttccggtagcgctcagcgggtgagcacttgctcagcctggcatccggtgcctgaacgtagaccgtgcccctgctggccgtgaggaggacaagaccgctgatggggtggcgtgcccgctgtttgctggcgtgagcactgatccattaggccgctggtgttcttctccgcgctgctgacagggtgccgagtgcgggaggtggcagtgctgttcgccggtgatgactggtcggaagatcatcatgatgtagaggtgcaggatgagtcgggccgggtgctgggacgggccaggctgggtgagggcgtggccgggatcgccaggtttcacgatctgatcgcccggttcgccgatccggacgcggggccggatcatgtggctgtcgggatcgagacggaccgggggccgtgggtggccgcgctgatcgccgcaggttacgtggtgtacgcggtcaacccgcggcaggcggcccggtaccgggagcggcacgggatgtcaggggccaagagcgatgccggggatgcgcatgtcctggccgacacggtccgcactgactctcatcagctgcgggtggtggcgggggatagcggccaggcgcaggcggtgaaggtggtggcccgtgcccatcaggcgctgatctgggagcggacccggaacgtgctgcggctgcggtcggcgctgcgggagttcttccccggcgccctggaggctttcgatgacctgaccgcccccgacgcccttgagctgctggccagggcaccggacccggcgggtgccgcccggctgaccgtcacgcagatcaccgcggcgctgaagcgtgcccgccgccgcggcggcgcggaaaaggcgaagcaggtccaggctgccctgcgcagccagcagctggcccagcccgaggttgtcgccgccgcttacgctgccacggtccgcgcggccgtcgcggtgatcagcgtcctgaacgagcagatcgccgtgatggaagcgcaggtggaggcccattttggccggcacccggacgctaagatcctcttgtcccagccgggcctggggaaggtcctcggtgcccgggtgctcgccgagttcggagacgacccggaccgttacgccgacgccaggagccggaagaactacgccggtaccagccccatcacccgtgcctccggcaagaagaaaaccgtcctcgcccggtacgtgcgcaaccgccacctcgccgacgccctgcaccagcaggccttctgctccctgaccgcctcaccgggcgcccgcgcctactacgaccagctccgcggccgcggcaccgagcaccacgccgccctgcgccagctcggcaaccggctcaccggaatcctgcacggatgcctcaagaccggcaccgtctacgacgaggccaccgcctggtcacaccgccagcagcagaccgccgcttgacaacctaaggccatggggtgt

SEQ ID NO: 3630 - DNA, 1483 bp, unidentified
  source 1..1483: mol_type = unassigned DNA; note = element_5617723
  misc_feature 1..2: note = core
  misc_feature 3..78: note = LE
  misc_feature 79..1212: note = CDS
  misc_feature 1213..1483: note = RE
  misc_feature 1212..1470: note = bridgeRNA
tgttggggtggacggcccctcgacggcatcgctgtgccagaatgaggtcgtgcagatctcaaacaaagggagccgtccgtgaacgatcttatccgcattggcatcgacacgtccaagagtgtttttgtgttgcatggggtgaatgcggccgagcagccgattttgcgcaagaggctgcggcggcggcaggtagtggattatctggggaagttgccaccgatgcggattggtattgaagcctgcggtgcggcgcattattgggggcgcgagctgaccgccttggggcataaggtgtgtctgctggcgccgcaacacgtgaagccctatgtgaggcggaacaagaacgatgaggctgatgcggaggcgatctgcgaggcgatgagccggccgcggacgcggtttgtaccgatcaagacggccgagcaacaggcggcgctgatgcttgccggcgtgcgcgaccagctggttcgtcgccgcacccaactcagcaactcgatccgcggctatgcggcggagttcggcctggtggccgctcgggggctggacaagatcgagccgctgttggcgcggattgcggcggacgaaacgctgcccgcactggcgcgagagctgttcgccgagcaggctgaggactatgccgagctcacgcgcaagcttcgcaggatcgacgccaagctgctggcatggcaccggcagaacgcgttgagccggcggctggccgagatacctgccattggtccgatcggtgcctcgttgctcgccatgaaggtccccgatcctgctgctttcaagacgggccgcgacttcgcggcttggctgggcctgaccccaaaggatcattcgactgccggcaagacgcgcctgggcaccatcacgcgcgccggcgatgagagcctgcgccgcgtgctggtggtcggcgctaccgctctgatccaacaggtccgcaagggacgcggacacccttcgccctggctgatcgcgctgctcaagcgtaaaccgcccaagctcgcggcggtcgcgctcgccaacaagacagcacgcatcgcctggaagctgatggtcagcggcggtcactatgaccgcaaccgcgccgccgcttcgagggcggagcgctgcgctccgcttgttgggggcttcgctgcgcgccccgccctcgaagcgcacaccatgccgcgccgcaaagttgcgccggcggcaatgcccaaggcttaatatcttcaccagcagggcctgcttgtcctgttgtgaggccggaagcttgctcgagaaggaacagatggcgtgatcgatcgatcccaagacgcgagacactccgtgggacccagtggcacgctcaaagccgctgctctgtttggagctcgcgtcgcggaccccatcttggccagcggtcatctgcgaccgcgtcaacaggccggacatatgatcgcaagcgatccgacccgccacgctgctcacctcttgcaagccgggggccgtccacata

SEQ ID NO: 3631 - DNA, 1368 bp, unidentified
  source 1..1368: mol_type = unassigned DNA; note = element_5618365
  misc_feature 1..2: note = core
  misc_feature 3..89: note = LE
  misc_feature 90..1112: note = CDS
  misc_feature 1113..1368: note = RE
  misc_feature 1135..1354: note = bridgeRNA
gatggtgtggatggctcctgctccaccggcgtcgcgatgcgccatactgcagttgtcattaatgactgcaaacgagaggaaccagccacatgcaagttaccacaatcggcctggatctggccaagaacatctttcacattcacggcgtcacagccgacggcaatgttgctttcaaccgagcgcttcggcggggtcaggttgtgccgttctttgccaagctggcgccgtgccttattggcatggaggcgtgcggcacgagccatttctgggcgcgtgagctgaccaagctcgggcatagggtgcgcctcatgccgccgatttatgtaaaaccatatgtcaagcgcggcaagacggatgccgcagatgccgaagcgatttgcgaggcggtgacacggccgaccatgcggttcgtggccatcaaatcgtccgagcaacaagcactgctgtgccaacatcgtgcgcgacagctcatgatcggtcagcgcacccagctctcgaacatgatccgggggctgcttggcgagttcggttgcatcgtggccaaggggttgacccacatcaccgcactcgccgaagtgatcgagatgggcgacggtccagccctgccggagacagctcaaggcgtcatcacctgtttatgcaaacaattgttaggccttgatcacaggatcaagacgcttgagaagaagatcttcacggcatcccggaaagacgcgcgcgtcaggctgctcgaaacgatccccggcatcggtcccgtcaccgcctcggcgatcgtcgcgactgtcggcacgccggatcagttcagcagcggtcgagagttcgccgcctggcttgggcttaccccgctcaaccgatcaagtggcggaaaggaacgcctcgggaggatctccaagatgggcgatcgatatttgcgccaattgcttgtcgtcggtatgacatcgcgggtcagagcggcgcggtcgaggccggatcgggttgagccctggctcgcctcgctgctcgagagaaaacccgtgcgcctggcgaccgtcgctatggcgaacaagaccgcgcggatcgtttgggccgtgctaacgcgcggccaaccttataaacaacccgtcgccgtttaaccggtgctcgaaaggaaggataccaagcttgcaaggaccatgagaagtgatggcgatccgggtcagaccggggatcgagcaaacccgccttatgtccaggacatcaaatgtccgcaaagcagaatgggactcgatccgcggaaaccatcagggccagcggccttcacgccgcgacaacaggccggacacaagactgtacctgacctcatgctgaaacttcaaaaaaacccttgcaccgcaagagccatccacacag

SEQ ID NO: 3632 - DNA, 1363 bp, unidentified
  source 1..1363: mol_type = unassigned DNA; note = element_561aa9d
  misc_feature 1..2: note = core
  misc_feature 3..74: note = LE
  misc_feature 75..1106: note = CDS
  misc_feature 1107..1363: note = RE
  misc_feature 1079..1351: note = bridgeRNA
tgatggggtggacgccccccgacggcatcgatgtgccatagtggaggtgttgaacaccacttgaggaggcgtccgtgtcggaagttaccacaatcggtttggatatcgccaagaatgttttccatgcgcatggtgcggatgcgcgtgggcgagcgttgttcagtcgcaaaatcagccgcaccaagctgctggaattctttgcccagcatccgcggtgcacggtggcgctcgaggcttgcggaggcgcgcatcactggggccgcgaactcacggggctagggcatgacgtgaagctcattgcgccaacttacgtgaagccgttcgtgaagcggcataaaaatgatgcgatagatgccgaggcgatctgcgaggcggcacagcggccaaacatgcggtttgtggcgatcaaaagcgaagagcaacaggcatccgggctggtgttccggacccgcgatttgctggtgcgtcagcgtacgcaactgatcaatgcgatccgagggcacctcactgagtatggctgggtggcgccaaaggggccgtcgcacgttgcgatgcttggtgacctgctcgaagacgagattggctcttcgcttcctgaggcagccaaggcgatgtttcgcacgatgctagatcttttggaggaactgaacgacaggatcggtgatctcgacaaagagatcgcacggcgagcacgcgaggatgcgatcgcgcgacagctcatgacgatccctggcgtgggcccgatcacggccaccgctatcgcggcgctggccccgccggccgagacctttgcaaaggggcgcgactttgccgcctggctcggtctcgcacctcggcaattgtcgacgggaggcaaacagaagctgggctcgatcacgaagatgggcgagcgaacactcaggcggctactcatcatcggtagcagcgctgtcgtgctacaggcgagcaaacgaggcgctccggcaggatcatggctcgaacagatgctggccaggaagccgcgcatgttggtgaccgtcgcgcttgccaacaagactgcgcggatcatctgggcgttgctcatgagcgaagaggattacagagttccggtcgcaactgcggcgtaagccacagcggaccaggggtcgtcggaggacgtagtcggtcgaaggagggtatggcacaacagtcggcgagacggggctggaagaaccagtgctaaccaccgtgccacatgcacgcttagggtgaagtggttccagtccgcgaactcccatacgggcccgcagcctccggtgctgcatcagaggccggacagatggcagcatccgactacgtgcctattctcccgaataccgcttgcgttcgtgcgggcgtccacaga

SEQ ID NO: 3633 - DNA, 1519 bp, unidentified
  source 1..1519: mol_type = unassigned DNA; note = element_561f942
  misc_feature 1..2: note = core
  misc_feature 3..239: note = LE
  misc_feature 240..1433: note = CDS
  misc_feature 1434..1519: note = RE
  misc_feature 9..259: note = bridgeRNA
ttcgtacaatataagagtagagattaatacctctattcttatttttttgttatgatgagtatgattggctgacgcaatctcagttgggataccacgcccgtgatctaaacctgtcagccagctctcattatcatgcattcgatttagcaggttgggacatagcgcccgtgtaactaacgaacatgaaaagatactagagaagttggaaccaatcacaatacccacaaaggaggaataccatgattgctgtaggcgtcgatgtatcaaagcacaaaagcacagttgctgctcttagctctgatggtgaaatcatgatgaaaccaactgacttccatcatgaccaaccaacactcaaacaacttgtttctaagttgctcagcttccaagataatattaaaatcgttatggaagctacagggcattatcataagcccattctaaaaatctttcttgaatctaatttatttgtgtctgtcgtcaatccttacgtgattaaaaaatactctgaaaatgacatccgcaaaggtaagacagataaaaaagatgctatgcgtattgcatggtacgttttagaaaaacagcactccatcgttccatataatgcaactaatcaaaaatatgatgacttaaaatatctttcaagacaatacggacaatgtgtttctatgcgtgtcaaagctcgtgtgcagttttacaacttacttgataatataatgcccggaatacaatccataattaactctcgtacagccgatccagatgataactttttatacaaatttgtaaaaaaatacgaaagttatgataagattaaatctatgtctgaatcacggtttattaacagctatttaaaactggcatataaaagtggggcaagatgccctgagtctaaggccttaaagatttatgaaaaagcgaaaaaaagtattgtaatacgtcctcttgacaccagtactcgtattatcacacgtgaatacatagacttattaaaacagacagaactctctagtaacgccattatgcatcagatgcggtccattgcctgtacactcccagaatatgaaactgttcttgctatgggtggcgtaggctttaaacttgcccctatcattataggtgagatcgaagatgttcgtcgctttacaaatgcccgcgctctaaatgcttttgccggaaatgatgcacctccctttcaatccggacaatatgaaagccaaaatcggcacatatctaaaagaggctctgctccactcagaaaagcttgttatgaggtcacccaatgtcttaaaatgcatcaaatgattgatgatcctgtttatcaattcattctgaagaaagaggcagagggtaaaccaaaaaacgttgctaaaatggcaggcgtaaataaatttcttcacatctattacgcacgagtaatggaactctataactgataattcatgttgattcatacagctttatttagtgcgctcattttttaaaaaaatccttaaaatctgcttgacttttattagcaggg

SEQ ID NO: 3634 - DNA, 1370 bp, unidentified
  source 1..1370: mol_type = unassigned DNA; note = element_5625ffa
  misc_feature 1: note = core
  misc_feature 2..77: note = LE
  misc_feature 78..1109: note = CDS
  misc_feature 1110..1370: note = RE
  misc_feature 1140..1361: note = bridgeRNA
tactgagatggtccgccgcttgaacttcacgttagggtggagggatcttgtaggcaggttcaaggaggatcatcgacatgcagattcgttccgttggcattgatcttggcaagacgacttttcacctggtggcgcttggcgataacggcaaggtgctgatgaagaagaagttcacgcagaagcagttgattaacttcacggtgaacatgcagacgtctctgatcgggatggaggcatgttctggagcccacttcctgggccgtgcactgcgagcacagggacacgacgttaagctgattccggctcagttcgtgaagcctttcgtgaagtcgaataaaaacgacttcattgatgctgaagcgatcgccgaagctgtcgatcgccggaacatgcggttcgttccgatcaagacggacgaccagctggacctgcaagcgctgcatcgggtgcgggaccgactgatggtgcgaagaacatctgtgatcaatcagcttcgtgcttttctgttggagcgcgggatggtctttgccaagagccccattcggttgagggaagccatacctgaggtgcttgagaacgccaacgagaacctccctccgaggctacggaacctggttgcgatgctgtggagcgagtggaagcatgtggagctccagattcaggagatgaacgaggaaatagaacggatcgcttcaagcgatgctggctgttgcagactgcggcagatcccaggcatcggaccgttggtggcaacggcgatcgtagcatcgatcggcaacggtgcggccttccacaagggacgagagttcgcggcgtggatgggtctggtgccgaagcagcactcaaccggaggcaaggcgaagctgtatgggatcagcaaacgcggaaaccgctacctccgcaagattctggttcatggggcgcgcgctgtcgtgttgcgatcgaagagagatcggatcgcgatgggcccatggttgacatccctcgagatgagagtaccacggaacgtgttgatcatcgctatggcgaacaaactggcgcggatcgcatgggcagtgctctcaagcggtcaggattacagagcgattcccggtgctataccggcataaacaggcgtaacaaaagatcgacctctgattccctcaccaagtctgcatcggcgagtgaagatgaaagaacagtcagaacggcgtgcctgaaacctgtttaccgaatgggcccttacatggccgaggggtttctgaggacaaccacgcggcgtatctcatcatggccaggagaagcaactctccacaaaaaggccggatacattgacgcagactttcttcttctaaacacttttcccttgcagtccgacggcggaccataca

SEQ ID NO: 3635 - DNA, 1452 bp, unidentified
  source 1..1452: mol_type = unassigned DNA; note = element_562d51c
  misc_feature 1: note = core
  misc_feature 2..226: note = LE
  misc_feature 227..1438: note = CDS
  misc_feature 1439..1452: note = RE
  misc_feature 13..241: note = bridgeRNA
ctactagagactcgctgcagggccggtgtctggccagactcggtccaggtgcccggcaggttcgctctcttttgggctgcccactcgcgtgcgggtgtggctcacttccggtctgcagcccgtcgggcaccgctgacgaggtgtggctcaagaggggactgccctgctcgtagtagcactgcccacctcgccgtccctatcggtacgagaacagcgggagcagcacatgcagcagatcatcatcggggtcgatccccacaagctgtcggccacgatcgagctcgtcgacgaccgcgagaggttcctcggctcgggtcggttcacgaccgatcaggccggctacacggcgatgttgaggtacgcgaaggcgtggcctgagcgggtctgggcggttgagggcgccaacggcgctggtcgacccttggcccaacggctgctcgaggcgggcgagagcgtcgtcgacgtcccggccaagctcgctgcccgggtccgactcttcgacaccgggcacaaccgcaagaccgacgctcttgatgcgcactcgatcgcgatcgttgctgtccgaaccgagggactgcgtgtcctgaaggtcgatggggagctcgaggcgctgcggatgcgcaccgaccgccgcgaggccctgacccggcggcgtgttcagaccgtcaaccggctccaggccctgctcgccgaactgctgcctggtcaggccaaacgcgacatcaccacgttgcaggccaaggcgatgctcgccagcgtccgtcctcgcgacatcgccggcaagacccgccgctgcatcgcggtcgaggagctggccgagctggtcgcggtcgaggccaagatcaagaaggcaaccgccgaactcaaggccatcgtcctggcccgcgactcacacctgatggacatccacggcgtcgggccggtggtggctgcccgggtcctggccgatgtcggtgacgtggccaggttcgctgaccgtaaccggttcgcatcctggaccggcaccgcacccttggacgcctcctcgggcgagcagaaccgccaccggctctcccgagcggggaaccgacgaatgaaccacatgatccacatcgccgcagtcacccagatccgtctcgacaccgagggccgggcctactaccgacgcaagcgggccgagggcaagaagcccctcgaggcgatgaggtgtctcaagcgcaggatctccgacgccctctaccgccagctgctcgccgaccaacagcgtgtggccggtgcggagcctggagcgggcccgggagggcactgcggggcgtctcaagaatccagcgcggtcgacctacccccgcacatcgacacttcggatcagccacttcccggaccggcagagccgacgctacgcccggcaccgacgtcccggaagaccgaccgcgggaggaacctagaagcgaccggttgacaacagaggggagc

SEQ ID NO: 3636 - DNA, 1435 bp, unidentified
  source 1..1435: mol_type = unassigned DNA; note = element_5631403
  misc_feature 1: note = core
  misc_feature 2..70: note = LE
  misc_feature 71..1108: note = CDS
  misc_feature 1109..1435: note = RE
  misc_feature 1213..1429: note = bridgeRNA
taatgggatggtccgccgcctttacccagccagcagttgaggtataaggaacgtacggaggaggtgtcccatggaactacacacgatcggcattgatcttggcaagacagtttttcatctggttggcctcaacctgcgtggtgaggccgtggtgcgcaagaagttgtcgcgcaggcaactgctacagttcaccgcgaacctgcacgtcgacttgattggcatggaggcttgcggcggtgcgcatttcctcggccgcgcactgcgcgcacaagggcacgaagtgcgattgatgccggctcagtatgtgaagccgtatgtaaagacgaacaagaacgactacatcgatgccgaagcaatcgcggaggccgtggcaagaccaacaatgcgtttcgtgccgatcaagaccgatgaccagctggatatgcagtcgctgcaccgggtgcgtgaacgctgggtcatgcgtcgcacggctatcgtcaaccagatacgtggcttgctgctcgaacgcggcatcactctgcggaaggggcgacggtatgtagacgcagctttgcccggcattttggaagatgccgactcgaagctatccggtgcattgcgtgtgttgcttgcacaactgaagctggaactcgatcagatggcgatacggatcgacgatgcagatgctgtactcaacaagacggctcatgagaatgaagcctgccaacgacttgtcgagatacccggcatcggcccggtcactgcaactgcactgatcgctgccatcggcaacggggcggccttccgtaagggacgggagttcgcggcctggatgggagtggttccacgggagcactcaaccggcggcaagcagaaactgcttgggatcagcaaacacgggaattcctacttgcgaagactgttcatacaaggtgctcgcgccgtcttgcaacaacgcacaaagcagaccccggccctgagtgtctggctagcccaacttacgatccgtgctcaccaaaatgttgttgcagtggccttagccaacaaactggcccgaatcgcttgggcggtgctcgcaaaggaggaacaataccaacctcaagccctgaccagcctggaagcagcctgactggccagcagatgacgcctggctaaagccaggcttggaaatcgcatgcgcgattcccacatctacagcccagcgactacggctgcggagtttttgattttctaccaggtctgctggcgaacaatgagatggctcaacggtcgaacccggcgctctcgaaacctgtggagcaaaacagtcttcacaagactgcctatttgataaggaacagagcgcagcgcattccatcatggcccggaggaacctctccaacaaaggccgaatacatttgcgcagaccaacctgccaccttcacttttcgcttgcggaatggcggcggaccataca

SEQ ID NO: 3637 - DNA, 1366 bp, unidentified
  source 1..1366: mol_type = unassigned DNA; note = element_5637a67
  misc_feature 1..2: note = core
  misc_feature 3..236: note = LE
  misc_feature 237..1103: note = CDS
  misc_feature 1104..1366: note = RE
  misc_feature 1134..1365: note = bridgeRNA
ataatggtatggacccactcctctttctaattggccgtttaaggtccaaaatggattgaaaattcatttaacatgaggtgcttcgcgatgaatatcacaacattaggtttagatatagccaagtcagtatttcatctttatatagttactaaaactggtcggtttattaaaaaaagaagttaagcagaaaacagctcttaccgtttatagcaaagctcgaaccttgcttaatagctatggaagcttgtggtggtgccaattactgggcgagaacatttatagccatggggcatgaggtaaaattaatagccccccaatatgttaagccctatgttaaaggtaataaaaacgatttcaatgatgctgaagcaattaccgaagcggctcagcgtccttcaatgagatttgtatcgataaagtcaattgaacggcaagatattcaaaactaccaccgccaaagagagttaataaaaaaggagcgcaaagcgctggcaagtcaaatcagagggcttttagctgaatacggaattgttataaaaaaaggcacttataacctgcgtatggagcttcctcgtatattagaaaatgcagataatgaactttcctttcttagtcgtgagctattttctgaattatatgaagcattgcaaattattgaacagaggtttaaaaaatgcgagaagcgcattatcaggttaaacaaagataatgatgtatgtaagcgtttggatgaaatattaggtattggcccaattatagcgagtgcaacatatgccgctgcaggtgatggtaaagacttcgtcaatggccggcatttttctgcttggttaggcctggttctaggccaatgttcaacaggaggtgtacctaaattattaggaatcacgaaacgtggtaatgcatatttgagaactcaatttattcatggcgccagatcggttttaaaaagcagtgcggggaagagtgataaatttagtttatgggcacaagcgttaatgttacgccgagggcataataaagcgtgtgtcgcgatagctaataaaatggcacgaatggcgtgggttatcatggcaaaaggagaaacctataaacctgatctttgataaaataatcgatgaataactaaaacgacctgttacttcagttgcaaaagataaattaatcggatgataagacaagtcagactggcttacccaaaacctgccatttcgccttggctataataagccgtagggatgatgaggagggtaagcgcaaataatcatcggggccaggcaacatagatgccacaacaggccggatatatgagagcaatgatacactcttataactgattaaatatcttgcaaacggagtgggtccatat

SEQ ID NO: 3638 - DNA, 1651 bp, unidentified
  source 1..1651: mol_type = unassigned DNA; note = element_563d4d0
  misc_feature 1..2: note = core
  misc_feature 3..295: note = LE
  misc_feature 296..1486: note = CDS
  misc_feature 1487..1651: note = RE
  misc_feature 60..276: note = bridgeRNA
ctggtatattgtaaaagactcatctaaacagtgaatctaacaatatacaactcctttctttcaacctgataaccgaggttgatcacggtgttagttatttgtaaactatgaatatgtgaatgtggatttgtaaattttcctgtagctttgactactttagaaaggatctcaccacaccttattcccaaatactgattagttagatgagtctttgaattcgtattttgcaccaggttttatggcctaaggcttgtggatccgtacacatcacagaatagaaagaaggatataccctatgattcatgtcggcattgacgttggtaaacttaaacactgtttctgtatccttgattacagcactggtgaagaactggttaaacccacattcttcgaaaataaccaagctggtttcgaccttttaactcacgccttggaagcttactcaagagatgatgagcttctgattggcatggaagataccggccactatcactttgctttactccgatacctgttagaccacaacttttctgtcgctttgatgaacccgaccactacggatttcgaacggaagaggcagggcagctgcacgaagaacgataaactggacacgatcaccatttgtgacgtattggcttccaacactcacagaaagaagctttatcgtcttgtgactcccaataactttaagttttatgaaatgaagcagctgacccgtcagcaccataacttaaaagaacagaaaaatgtttattctaaccgtcttcagcgagcgattgatctgactttccctgagtttaatcagctctttaaatcaaaatacggtactgtctatatgacggtattaaagaattttggcagtgctgataaaatcgctaaggctgatcttagatccctgcgcaagtgctttgatgtcaaaggcagaggcagtcgtatcgctctgactgcggagaagctcaaagaagccgctaaagcttccgtaggctttagctccatcgcagaagagttaaacataaagcatcttgcggcccagattgaactcatcaatgaacaaatcgcagaaatcgataaaaaaatagaagagttcagcctcgaaaccaactctcctatcctcagtatgccaggaatttctcatttctcaggcacttccattttagctgaattaggagagattcgcaactacgataaagtatcaaaagtgattaaaatggccggtgtggctccgcgagaatatgaatccagtcaatatcgtgccgaacatatggcgattacgaagaaaggctccacatacttgaggaagacactttaccaaatcatcaccccggtcattaggtataatcccgtttttaaacgattttatgacctgaaacgctctcaaggtaaagggcatcgctgcgctcaaggccattgtgtcagaaagcttctccgcgttatctatcatctgttgatcaccaatcaacagtttgatcccgcacttctgaaataacagctggctgagttcctaatttttaaaatcaggcctttacggttgttttcagtgtgctcttttttacaaatccattcacatttcaaagaacaaatgacgctaactacatttctgttctcattttcatactttttcatcagatactcttgatttttatatagttag

SEQ ID NO: 3639 - DNA, 1389 bp, unidentified
  source 1..1389: mol_type = unassigned DNA; note = element_5642ec3
  misc_feature 1..3: note = core
  misc_feature 4..95: note = LE
  misc_feature 96..1136: note = CDS
  misc_feature 1137..1389: note = RE
  misc_feature 1132..1376: note = bridgeRNA
tgatgggatggacggcgcccgcaacggcatcatcctcgtgagaggcgtgccaagatggctactgtcgcagcactcatctggaaggagcaccgtccatgggcaatattaccaccgatctgagcgccgtcgttaccgttggcctcgatctggccaagcacgtattccaggttcacgcgatcgacgccaccggccgtgtcgtcacgacccgcgcgctgcggcggaaggatgttttggcattcttcgaatccctgccatgctgccttgttggcttggaagcgtgtggctcggcccatcactgggctcgcgaactcatgaagttcggccatgacgtccggctgatgccgccagcctatgtgaaggcttacgtgcgtcgtcagaagaacgacgctgctgatgcagcagctatctgcgaggcggtgacgcgcccgtcaatgcgttttgtgccggtgcgatcggtcgagaaccaggcggcgctcatgcatcacaaggtgcgcgaacttctggtggcccagcgcactcagctgctcaatgcccttcgcagccatatggccgaaatcgggatcatcgccgcccagggaccgaacaatgcgcgtgccttggccatcctcgtcatcgagggcaacgacatgatcccggcgaccgtgcgttcggcactattgccgttggtgcgccaactgagcgaactcgataccgagatcaggcagagcgatcaggccattctggccctcgccaaggctgatgaaacggcacgccgtctgatgaccgttcccggcatcggccctattaccgcctccgcgcttgcggcgagcgtccaggatatcacggctttctcaggcccacgcgagttcgctgccttccttggactcacaccaaggcaaaactcgtcaggcggaaaggaacggctggggcgcgtatccaagatgggaaaccgatatctgcgcaagctgcttgtggtgggtgctcatgccgttctgttccatcgcaagcgttccggggatatgttgagaaactgggcggatcgcctgatggacaccaagcccttcaagcttgtcgccgtagcgaccgccaacaaactcgcccgtattgccttcgcactcatgcgcgatgagacacattatgtcggcacaccggcgtaacaggagcatcggctaaggccgccagccggaatcgagggtgacaatgacgtgatgggaacagacgaggatagatcctgaaagcctgcagcatagtcggagcctcgagctcgctctcttgatcaggccaaaggatcagcggataccatcagggccagcggtcataaaaccgcagcaacaggccggagacatgaccgcacccgcgaccatcccatcgctgaaaataaccccttgatgagcgggcgccgtccagaca

SEQ ID NO: 3640 - DNA, 1428 bp, unidentified
  source 1..1428: mol_type = unassigned DNA; note = element_564820c
  misc_feature 1..4: note = core
  misc_feature 5..211: note = LE
  misc_feature 212..1414: note = CDS
  misc_feature 1415..1428: note = RE
  misc_feature 6..182: note = bridgeRNA
ttccgtaagactgaagccttggcccgagaaggtcgggtgtggcttagatcgccttgcgtgatgtcgcttactgggaatgtccgcccgaccttcttgggacaccttggctgctgattgagatgtgcgcttggtcgctggttacggatgtgtcagcggggtgttccgcagggtctgcttgaacaaattgccccctcaacgactggagatgtgcgtgacgactcgaacgaccgcttgggctgggatagacatcggcaaaacccaccattggatctgtgccgtcgacgccggcggcgcggcagtggtgtcggtgaaggtggccaacgtcgaagccgacctcatggccgcgctcgcgacggtgaccgatctggctgaccaggtggtgtgggcggtcgacatcgtcggcgcgccgtcggcgctgatcttggcattgctggctcgagcgggaagcccggtgttctacgcctccgggcgggtggtgaatacgatgagcgccgcttacaccggcgagggcaagacggatgcgaaggatgcctatgtgatcgccgaaaccgtccgtctgcgccgcgacctgccgatggtcgatgcggtgaccgatctgatccgtgaactggctttgttgaccgcgcaccgcagcgacctgatcgccgaccgggtccggatgatcaaccggctgcgcgacgtcatgaccagcgtctttcccaccctggaacaacaattcgactactcctcccacaaaggcgcgctgatcttgctcaccgagtacgccagcccgaaacggttgcgccggctcggcgaaacccggctgacccaatggctgcgccgccggcaggtgcgagacgccgcccgtgtcgccgcccgggctctggccgccgcccgcggtcaagacatcgaactgccgggccagcaagtcgcggagatgatcatcgccgagctcgccgggagccttcttcatctcgaccagcgcatccaaggcctcgaccagcagatcgctgcgacgttccgtcgccaccatcaggccatcaccatcgagtcgatgcccggtttcgggcccatcctgggcgcccagctgctcgtcgccgccggcgacgtccgcgcctaccccagcgccggccacctggccgccgcagccggcctggtgccggtccccaacgactccggccgacgatccggcaacctgcacaaaccgcgccgttacagtcgaccgttgcggcatgtgttctatctgtccgcgcagaccagcatgatgcgggccggtcccaaccgtgcctactacctcaagaaacgcgctggcggtcacacccacgcccaagccgtcatcaccatcgcccgccgccgcatcgacgtcctctgggccctcctacgagacgaccgcaccttcagcatcgacccgcccaccctcgccgccgcggcttgacaacatcattgaga

SEQ ID NO: 3641 - DNA, 1218 bp, unidentified
  source 1..1218: mol_type = unassigned DNA; note = element_5661329
  misc_feature 1: note = core
  misc_feature 2..247: note = LE
  misc_feature 248..1180: note = CDS
  misc_feature 1181..1218: note = RE
  misc_feature 6..221: note = bridgeRNA
tcgtaatataagtttaaccagtttttactggttgaactttttttaattggttttattatagcggtagtcggagtagaacgtagcgcccgtgggactcgatcccgtccgcaaaactgttcactccctacttgtataagcatgtttcaggctggttgggacacagatcccgtttaacaagcgaacctatgatagtacaagcagctctagggacaaccgactaatcttattttctaaggaggagatgatcatgaatccagtagtaggtctggatgtttctaaaggagaaagtcaggtacaagcattcttggataagagtcaaccttttcgtaaaagttttagtgtaaagcatactgttgagggttttgagtatctattaggattcttaaaagagattgaaagagtagctgatggtaagaaaccttcggttatcttagaatcaacagggcattaccactctcctgttattcaatttttggaggaacaacaatatgtttatattattgtgaacccccttatctctcatcgagcacggagtacaagtttaagaaaagtaaaaacagacgctgtcgatgcctatcatctatgcgaactattctataaagaagaagttgagccgtataagaaaagagggcttcaacttttaaaccttcgtaatcttacaagacaacaagagataattacgggtatctctacacaaaccaaggtacaacttctaacagtgctagatcaggtatttcctgaatttagaggtgtctttggtgatttatattcaaaagtatctttacagactctttccttatttcctacttctgaacatgtactaaatactaccgaatctgtattaaccaacaagattgcatcgttatgtactagacgttctgaaaagtgggcaaaagaaaaagcacaaaagcttattgaagcagcattacgaaatccatttcaaaataacttgtatgaaagtcatatttttaacctaaagatgttaattaccatcgttcttcaatatcaagagcatctatcacaactagaagcagaaatagatacccttgctaaagaaattgaagaatataagattatccaatctattcctggtatcggagaaaagattgcggcaacaatcatttccgaaataggagaaatagatcggtttaatcaccctagtatatcatctatattttaattttttcattgaaaaatgttgacaactattagctggtt

SEQ ID NO: 3642 - DNA, 1380 bp, unidentified
  source 1..1380: mol_type = unassigned DNA; note = element_566b971
  misc_feature 1..3: note = core
  misc_feature 4..89: note = LE
  misc_feature 90..1118: note = CDS
  misc_feature 1119..1380: note = RE
  misc_feature 1141..1367: note = bridgeRNA
tgatggggtggacggcccccgacccagcggcatcgcaatgtgccaagatggcgttgtcaaaggaccatcagagggaaggaaccgtccgcatgcaagttatcacgatcggattggatatcgccaagaacgtctttcaagttcacggcgtcgataatgcaggaaacgcggtgctccgtcgaaaagttcggcgcgatcagcttattccgttgcttcgcgatatgcagccgtgcctcatcggcatggaggcctgcgcgacggcgcaccattgggcgcgggagctgattgcactcgggcatgtggtcaagttgatgccgccggcttacgtaaaggcctacgtcaagcgcaacaagaacgatgcggccgacgcggaagcgatctgcgaggcggtgacgcgaccgacaatgcggttcgtggctgtcaaatcggcggatgcccagagcattctgatgcttcatcgggctcgccacctcttggttcggcagcgcacagcgcaaatcagcgcgatgcgggcgcatctggccgagtatggcgtcgtcgcaccgaagggccgggcccatgtccgtggtctaatcgaagctcttgacaagggcgaggggccgctccccgcgatggcgcgacaggttcttatcctcctcgcccgaacgatcgaagggcttggcgcacaaatccggaagatcgagatcgagcttctggcgtggtatcgcacgaaccaggtctgccggcggctttcaaccattcccggaatcggcttcatcacggcgaccgccctcgctgccaccgtcgtcgacgcaaaagtcttccgctccggtcgtcaattcgctgcttggctcggccttgttccaaaacaacattcctccggtggcaaagacagaatgggaggaatctcgaagatgggagatcgctatttacggcatctcctcgtcgtcggcgccacggcggtcatccgatacacgcggcgaaaagcgacgaccgtcagtacctgggcgaaccagttgctcgagcgtaagccggcacggctggtcacagtcgctgtcgccaacaaggtagcgcggatcgcctgggcggtgatggcgcgtgaggaaaactaccgcgcgacgccgtcaatggctcgagggtaacgacggtcgcgcgaaatgacatccagtttgggcaggagagaacgacatcagtgatgcagatccggtcaagccggggatcgggagaacctgagtgattcaacgcgcatcgcagcgcggcagcttgatgagggcccgatccaccgacaccatcatggccagcggcctgaggccgcacaaaaacaggccgaacacatgaatgaacctgaccgcttcagtattgccattgtcagaatcttcttgctcaacgggggccgtccacaca

SEQ ID NO: 3643 - DNA, 1379 bp, unidentified
  source 1..1379: mol_type = unassigned DNA; note = element_566fe07
  misc_feature 1..2: note = core
  misc_feature 3..51: note = LE
  misc_feature 52..1113: note = CDS
  misc_feature 1114..1379: note = RE
  misc_feature 1087..1366: note = bridgeRNA
tgatggggtggatgcccccgcccgacggcatcgcgatgtgccaggatggtgatgctgaagtcaccacaaagggaggaggcatccatagatgaggttagcattgttggcgtcgacctggcaaagcaggtgtttcaattgcatggcgcggggccagatggatgcgcgatcttccgcaagaagctgtcgcgggcgcagtttgcacgcttcatggcggcgcttccgccctgcattgtcgcgatggaggcctgcggatcagcgcattactggggacgggagatggcgcgtcatggccatgatgtacgcttgattccaccgatctatgtgaagcccttcgtgaagcgccagaaaaacgacatggctgacgcagaggcgattgccgaagcggctctacggccgacaatgcgcacggtgccggtgaagaccgccgagcagcaatcccgggccatgctgttccggacgcgcgaacttcgggtcgcacaacgcacccaactggtgaatgcgctgcggggccatctggccgaacacggggtcattgtggccaaaggcttgggcaatatcgaacggctcgccgccgtcatccgtgacgaagccagcgccgtgcccgacctcgtccgagatttgggggcggtctatcttggccagatagaagaggtatcagggcagattgcggcgttggaacgcaggattgcggtagctgcccgcgacagcgacgtggtgcgcaggctgcagaaaatgccttgcatcggcccgatctgcgcaatggcggtagagaccttcgcccctgccatgcagacgttccaaagggggcgtgactttgccgcctggttaggtctggtgccgcgccaacattccagcggcggcaagcaaaggctcggacggacctcaaagatgggccagcgagatatccaccggttactgatcgtgggagccatgtcggtcgtccattggaaaggacgcggcggcgggcggccggggtcatggctggcgcgcatgttggcgaagaagtcaaagatgctggtcgccattgccttggccaacaagatggcgcggacgatctgggcgctactggtgcgagatgaagactacagagatccgaagggggcggtctgctgaaagggcaacggccactggctggagcgtcggggatgtgaggaggacaatgacccgcatgggcaaatgatcgatcagatcggggttgggaaaaccaggggcgtccaaagagccatgagctcggaattttgatctggacccaacccgcgcatcaccataccggcccgcggcatgtgaaaagccgcaccacgaggcctgacacatgaacgcacccgatcacatgctcagaaggtcagaaaaatccttgcatcaatcggggcatccacaca

SEQ ID NO: 3644 - DNA, 1482 bp, unidentified
  source 1..1482: mol_type = unassigned DNA; note = element_56777ce
  misc_feature 1..2: note = core
  misc_feature 3..234: note = LE
  misc_feature 235..1461: note = CDS
  misc_feature 1462..1482: note = RE
  misc_feature 7..229: note = bridgeRNA
ctaatgggtctcgcctggtcttcgtgagaggctgggtcctgagcggctttcgggtgagcacatctctcgcctgcatcggttgagtgctgcggtcagaccgtgcccccgaaggcttcttgggaaggtccgcgaacagcaggtgggatgacgtgccattgcgagcaccagatccattaggtcgctgcacggtcctccttgctcacgccgtcgtcgtcgaccaggaggtatgggacggtgcagttgttcgtgggtgtcgattgggctgaggaccatcacgacgtgtgcgtgatggacaccgacggccaggtgcgatccaagggtcgggtctccaacgacctggccgggatcgccaagatccatgacctgatcggtcgggcgatccccgccgagttcgatgacgatcccgaggtgatcgtcgggatcgagaccgacaggggcctactcgtgcgggccctggtcgcggtcggctaccgggtgttggcggtgaacccgctgggcgtcgatcgctaccgggaccgctcgcgggtgtcgggcgccaagtcggaccctggcgacgcgcgggtgctcgctgacatggtgcgcaccgacgcccaccagcaccgggccgtcgccgccgattccgatctggccgaagcgatcaagctcgtggcgcgctcacaccagtccgcgatctggtcgcggcgccgtctggccaaccaggtgcgctccgcgttgcgggagttctacccggccgctcagctggccttcgaggacctgacccatagcgacgccgtgtcggtgttggccatcgcccccacccctgagctcggaaaggggctgtcgttgtcgaagatcgcctccgcgctgcgtcgcgggggccgccagctcaacgtcgacaagaaggccgctgcggtccaggcggcgttgcggaccgaccagctcacccagcccccggtggtcgctgacgcctacggggcgatcgtggcatcacttgccaaggtgatcgccgcgcacaacacccagatcgccgagctcgaagaggtcctcgaggcccatttcagccagcaccctgacgctgacatcctccgcagcaggcccggcctcggagtcgtcaccggcgcccgggtgctcggagagttcggtgacgaccccaaccgctacgacacagccaagggccgacggaactacgccggcacgagcccgctcaccgtcgcatcaggcaccagacgcgtcgtccgggcacgccacatccgcaaccggcgactggccgacgccttgtactggtgggcgttcaacgccatcaaccggtcacccggagcacgcgccctctatgaccaccgccgggctctcggcgacacccacagcggcgccctacgcgtcgtgagcaaccggctcgtcgccatcctccacggctgcctccgccaccgcaccctctacgacgagcacaccgcctgggcccaccgcaacgacatcgccgcttgacacctcccgcacgtgggatgt

SEQ ID NO: 3645 - DNA, 1522 bp, unidentified
  source 1..1522: mol_type = unassigned DNA; note = element_5680752
  misc_feature 1..3: note = core
  misc_feature 4..491: note = LE
  misc_feature 492..1376: note = CDS
  misc_feature 1377..1522: note = RE
  misc_feature 3..220: note = bridgeRNA
cttatattatatttagcgcagttagctactgccaaagcccaagtggtatacttggaataagccactgtggattagtttattccctccaatcgcttgacgatttccgaaaggctctaaccacagttttttgtttcaattggtaatgagtttgataacgcatagacgttttatctcgtctaaggtaacaaggcaaaaagttcgtggataaccaagtagacttgaaatactatatctggaggtactcccatgctttatgtgggcattgatgtcgctaaaaataaacacgatgttacagccttgaatgtttcaggaaaactgttcttaaaccactcactttttcaaataataaagctggttttgaactcttagatctgtctcttcgacaactcaaccaagactgtctcatcgctcttgaaaataccggacattatgcctttaatctactgaacttcctgcatgaacaaggatataaagtttacacctacaatcctttgctcatcaaggaatttgccaaatcattatcacttcgcaagactaaaacggataagaaagacgctcatggcatcgctcttaaacttctttctgaccccaatcgtgaacaatttcaacacgataatcggcaagtagaactaaaaatactggctagacatattcatcgtctcaagaaaaaacagtctgattggaaagtacaatacactcgttgtcttgatatcatctttcctgagttggataaaatcgttggaaagcattcagaatatacctaccaactcttgacacgctaccctaatcctcagaaaaggcttgaggcaggatttgataagctgatagaaattaagcgattgaccgcttctaaaattcaggatatcctctcagtcgcacctcgttctatcggaacaacatctcctgctcgtgaattcgaaatcatcgaaatcatcaaacattacaagaggctcattgacaaggcggaaacatgtgtcaatgacttgatggctgagttcaactcggtcatcacgacggttactgggattgggggtcgtttaggggcggtcattttagccgagattcgaaatattcatgcctttgataatcctgctcaattacaagctttcgctggactggattcttctatttatcagtcaggtcagattgatttagctggaagaatgatcaaacggggttcccctcatctgcggtgggcactcatacaagctgccaaagcatgcgctcgcttttcacctgcttttaaggtctatcttaagactaagttagaacaaggaaaacattacaatgtagccatcatccaccttgcaaaaaaacttatccgaaccctgttttatatcctaaaaaagagctgccatttgacgaacaaaaagtgatgtaatttctgaaattaacacaggattacctttgaaaaaatggactttttcaagggctttttgccgtgctctaaaatcatcgccaaatcatcaaattgaaataagaaatagtttagataaaactattgacttttcttatagtttgt

SEQ ID NO: 3646 - DNA, 1430 bp, unidentified
  source 1..1430: mol_type = unassigned DNA; note = element_56844da
  misc_feature 1: note = core
  misc_feature 2..139: note = LE
  misc_feature 140..1168: note = CDS
  misc_feature 1169..1430: note = RE
  misc_feature 1197..1428: note = bridgeRNA
atgtaatggatgcctcctcctatggtaggacggacacagcggggagtgctcctagaaaagggagtcctcgcttgaaccggacggcatcgaagtgccaaggtggacatttcatccacgaataggtcaaggaggactcaccatggattctacaatttacggtttggatttggcaaagcgggtgatgcaactacactgggtggacatgggtaccggtgaaatccaccgcaagcaattacagcggcgggcgctcctggagttttttgccaaccgggaacctggcatcgttgctatggaagcctgcggcagtgcgcaccactgggcccgggagctgcgcaagctggggcacgaggtccgcttgatcgccgcgcagtttgtgcggcccttcgtcaagaccaacaaaaccgacgcggcggacgcggcggcgatctgggaggcagcccagcggccagacatgcgcttcgtgaccgtcaagagcgtagagcagcaatccgtcttggccctgcaccgaatgcgggagcagttggtcaagatccgcaccatgcagatcaacgcgattcggggacttttgtacgagttcggtgccgatattccccaagggcgccagaagggggaacagacgattccccaggtcttggagcaactggaagagcaaatctccaagatgacgttggacgcgatgcgcgggcagctggagcgactgaaagcgctggatcagaatattgccgacattgagaaatcgctgaccttctggaaaaaggatcaggaagctgtatcccgactgatggccatccccggcgtgggcttgctgacggcaacggcgattgtggctaccgtgggcgacatgaagacctttcgttctggtcgggagtttgcgtccttcctgggcttggtccctcgacagagtggcacaggtggccgggtccggttactagggatcagcaaacggggagacacctatcttcggtccttgctgacccatggggcgcgggcggtagtgaatcgacagatccataaccgcaatccctggatcgaccggttactcagtcgccggccgcacaatgtggccgttgtggctctggccaacaagatggcccgaacgatctgggcattgctgaccagggaccggagctacgatcctctgcaccagaggagcgtaacagccgcctgatcccagaggggtagtagcagagttccgcagtaaagagttgcgcaggcagaaagacgattgatggcagaataggtcagaccggggaagggagaacctggcaaactccagtcctttaaggacgcgacagagatgaggacccttccagcggatttcatcaaggccagcagagataatctgcgctacaggccggatataaggcagtaactcgacctcaaccgccaacgatcaaaagtcggcttgcacaaacgggggcatccatata

SEQ ID NO: 3647 - DNA, 1462 bp, unidentified
  source 1..1462: mol_type = unassigned DNA; note = element_5689413
  misc_feature 1..2: note = core
  misc_feature 3..238: note = LE
  misc_feature 239..1276: note = CDS
  misc_feature 1277..1462: note = RE
  misc_feature 12..184: note = bridgeRNA
cttgtatgttggagagcagggacgtgaagatggattcacgtttcggcggtaaggccgattgccctttaggccatctgttgttgagcctgtttgaaagataggccaccgcccctctggttgcacgccgtggagaatcgaaggcctcaagagcctgcatgttcaaggtcggcgaaaacagcaagtccgtttgcgcggacaggagcggcagccgagaccatcctagcgcggaggaaggcccatgaacaagctgaaagcctcatcgacagacctggcgttttgcggcatcgacgtcagcgcagctactgtttcggtagctgtgatcaagcccgaccagcatcttgccgaacgcgaattttccaacaccgcatccggtcaccgttcgctgttgacctggctcggccagtgcggcgtggtggtgcgcatttcgctggaagccactggcgtctactcgctggatctgaccctggcgctggatgcggccgcgcattgcgaggtagcagtgttgaatccgaagctggtcaaccgttttgcgcagacgctggttcgcaacaagaccgattcggccgacgccgtagtgctggccgagtacagccggcgcatgccttttacggcatggtcgaggccgagcgtggagcagcttcagctgcgcgcactgggccgttacatcgagtcgctggcggctgatttgaccggcgtcaagaatcggctgcacgctgccgaaagatcgactgggatgccgcgtgccgtgctgcatgatctgaaacaggcgcaagcagcgctggtgcggcggctggccaggatgcgccagcaagccaggaaactggtggaggccgacaagctgctcgcgcggcgttttgacctgctgaggaatatgccggggatcgccgagacaagcgcactctctatcttgtgcgaactggtgatgctgccgccggagatgaccgtgcggcagtgggtagccatgagcggtctggatccgtcgcatcgggagtccggcacaagcgtgcataagcccgcgcggatcagccgcgccggcaaccggcatctgcgccgtgcgctgtatatgccagccttgtcggcggcgcgccacgatccccacctgcgcgcgttttaccgggcgctgcgcgagcggcataaaactgcactgcaggccctggtggcggtggctcgcaagatgctgcacgccatctacggaatcttcaaaagcgaaaagccctatgacggccaacggctgtttccgcaactccaactggaggtaaaatcaatcgccgggtgaaacgaaagcaggctctgctgggaagcaaccatgccgagggataacccggcgggctcatcccgacgatgaggcgacgggcaggcgctaaacgcccgcccgtcggctaactcatcagagggaaagacccccatgcctcggaaaatccaatgcacatacggaaaatcggcttgatcttgaacagagaat

SEQ ID NO: 3648 - DNA, 1438 bp, unidentified
  source 1..1438: mol_type = unassigned DNA; note = element_56c74a2
  misc_feature 1: note = core
  misc_feature 2..92: note = LE
  misc_feature 93..1136: note = CDS
  misc_feature 1137..1438: note = RE
  misc_feature 1203..1430: note = bridgeRNA
caatgggatggactcctcctcacctaaccggcatctaagtgccaaaatggaaggtgaaccatcaaccatcgtgaagatgaggagaagtccagatgaacattatccgcgtcggtgttgatattgccaagtcagtgtttcacgttcacggtgtcgaccgtcacgatcagatccaatggcagggtaagtactctcggaataagtggctggatgcactaagccgaaaagtgcccgccggcgcagagatcggcatggaagcctgtgcttcatctcatcattgggcacgggagcttcaaaaacgggggtatcaggtccggctaattgcggctcagtttgtcaaaccttacgttaaaagcaataagaatgatcgggtggatgcggaagcaatctgtgaagcgatgagtcgtcccaatatgcgctttgttgcccccaagaccgttgtccagcaagacattcaggcggcacaccgcatccgtgaggagctggtaagccaacgaaccgctaaagccaaccaaattcggggactggtaggcgagtatgggattatcgcgcccgttggcattctgcaactgcgccgagcgttacctcgctggttggaagatgcagagaacgggctcactgatagctttcgcattttgctcaatggcttggctgaggatctccagtatctagatgatcgaatcgtagcactcgacgagagaattactgaaagcgtgaaacaagatcccgtcgcacggcgcttaatgacgttaagaggtgttgggccactcactgccagtgctctatccggtgcgctgggagacggcaaggcattcaagagaggtcgtgattttgccgcctctcttggactgacaccccgtcaacacagcacagggggaaaagaccgccttttaggcattagcaaacgcggtgatagctatctgcgtaaactacttattcatggagcacgggccgttttacgccatgcagatcgcagggatgacggtctgagccattggcttaaaggtctggtgtccagaaaacatatcaatgttgcgacggtggcattggctaataaaactgcccgaattgcctgggcgctggtaagtaatgaaacagcttatgacgacaatcttgctgcggcgagtgtcggcgtttaagtgagttagttgagggtggcgcacgccttctaaatagtcggtatcgaaaattctgctggagaccttccacaccgcgattgcatggcattttgattgatggcgaacaggacgaaccggcgctgggaaacccctaaggaacatggagccacgagctcgtttaagcgattgggagccagtgcgcggatagcccattagggttcgatgctaaaaaatggcatcattaaagagaccggatacacgtaggcagtcgtaccttagtcacgatcaaacaaagtgcttgcaatagaggaggagtccataca

SEQ ID NO: 3649 - DNA, 1377 bp, unidentified
  source 1..1377: mol_type = unassigned DNA; note = element_56cb02e
  misc_feature 1: note = core
  misc_feature 2..92: note = LE
  misc_feature 93..1124: note = CDS
  misc_feature 1125..1377: note = RE
  misc_feature 1144..1369: note = bridgeRNA
caatgggatggactcctcctctccttaccggcatctaaagtgccagactggaaagcgttacgaaccagtcacagtgagagaaggagtccaccatgaagcttagtcacgtaggcgtagatttggcaaagaatgtttttcaactgcacggcgtggatcgtcacggcaagactatctggcaacgccggcttcggcgtcatcaatggctggaagttttgctggccacgattgactcggattgcatcgtcgggatggaagcttgtggcggtgcgcatcattgggcacgtcaactccaggcgcggggcattaccgtgaggttgatcgcgccccagttcgtcaaaccatatgtgaaaagcaacaagaacgatcgcaacgacgcggaagcgatatgcgaggcgatgatgcgcccgagcatgcggttcgtggcggtgaaaacggtcgagcagcaggacatccaggcgatacatcgcgtgcgcgctacggtgatgagtcagcggattgccaaagcgaatcagatccggggtctggtgactgagtatggcttggtagcaccgctgcagatagttcacctgcggcgagcggttcctgtttggctggaagatgccgagaacggtctgaccgattgctttcgcgctctgctgaacgaattgtgggtcgatctactacaattcgaggagcgtctaaaggcgttggataaacagatcgaagcaatagcccggacgaacccggtgacccaacgcttgcagcaactgcgcggtgttggtccgttgatcgctaccgcattggttgcgactgtcggcgacgggagtcattttgacaagggccggcagatggccgccgccataggtctcacgccgaggcaacacagtacgggcgataaacaccgtttactcggcatcagcaagcgcggtgatgcctacctcaggacgatgttgatccacggggcccgggcggtggtctctcaggccaaacatcgcgacgactctctcagtcggtgggtcaccgacatcgccaagcgcagccatacgaatgtggcggcggttgccctggctaacaagacggcgcgtatcgcctggacgatgctgcgagaacaatcggattatgaccccgcgcgcgccgtggcctgagctggatcacgaagacgtttccaaccacgattgctaagcaaattgattgatggtgaacaggtcgaaccggcgtcagttaaacccgggaatgtccgagggcctcgagtccgtactttcgattgggagctgacgcgcggatagcccattatggcccggcatcaacgtatgccgacttaagaggccgaatatacgtgcgcagtcgtacctcaatcctttaatcaggttgcttgcaaaacgaggaggagtccatata

SEQ ID NO: 3650 - DNA, 1552 bp, unidentified
  source 1..1552: mol_type = unassigned DNA; note = element_56ce748
  misc_feature 1..2: note = core
  misc_feature 3..347: note = LE
  misc_feature 348..1526: note = CDS
  misc_feature 1527..1552: note = RE
  misc_feature 111..324: note = bridgeRNA
ctactataataaagtgtgtaactacgcaaaccttcgcaagaggagcaaaccgatttggaaggcgaaggagcgtagcgactgagccttccaaagcgcgcggcgcgcgccgcctcctttgggtatcgaaatccgcttcggattttgatataatagtctcgtgcggacagaggatcacgcaagcctccatgtggttgctgtccacttcaacaagagtgtaacctctgtccctgcgggatttcagttatgagccggatgtcgcggcagctctgccgtcttctcatttcgcagtaggttatgacccgcatcgcaaagagggctgtccgcaacatcttttcgaggtgattttcatgtttatcgtcggtatcgatattgccaagcgcttccatgaagcctctgtcatcgctcaagatggcagtctcgtccgcaaggctttgcgcttcgccaactctcaggcgggctacaacaagctcatgaacatggttcgcggcctgaacgagcccgtcgtcttcggcatggaagccactggtcactattggttgactctgttcacgcatctgcgcaacgatgggtttaccgttcacgtcatcaatcccattcaatccgatgcgctgcgcggcatgtacatccgcaaaaccaagaacgatgccattgacagcatgattatcgccgatgtcatacgcttcggccgctactgcgaaacttccgtgcaacccggcgacctgcaggccatgcgggaactgtgccgccagcggttttacgtcatcgacatggtctccgatctcaaacgcaaggttcttgcactgctcgaccaggttttccccgagtacgaaaagctcttctccgatacctttggcgcttcgtccatggaacttctgtcccagtacaccacgccagaagagatgctttccgtcagcaccgaaaaacttgccgagcttcttgagaccgccagccgtggacgtcttggcctggccaaggcggaggaaattcaagaggcagcgaagaattcctttggcattgttcttgcttccggcagctttgcgctcatcatccggcagtatatcgaacaaatccgttctttggaatcctcgatcgctgtctttgatacggaaatcgcgcgtctgctcgcgggatttgacacgcagctcaccaccattacgggcattgggaccaccctggccgccgtcattctttcggaaatcggcggtgatatcaagcgcttctcttctcccgcaaagctggctgcctacgcgggcgttgatccgaccgtgaaacagtccggcgattttacaggcacgcgaatgaagatgtctaaacgtggttcgccataccttcgccgcgccatctggcttgcttctaccgtcgccgctttcaaagaccctgccattcatgccctctacgagcgaaaacgctctgagggcaaggaccatatgaccgttatcggccatgtttgccgcaagatggtttccatcatcttcgcggtccttcgcgacaacaccccctactccccggctgtcatttcggattaattccctcttgactttttatagccggt

SEQ ID NO: 3651 - DNA, 1306 bp, unidentified
  source 1..1306: mol_type = unassigned DNA; note = element_56d754c
  misc_feature 1: note = core
  misc_feature 2..239: note = LE
  misc_feature 240..1091: note = CDS
  misc_feature 1092..1306: note = RE
  misc_feature 1091..1301: note = bridgeRNA
gaatgaaagggacttccccgtgttgggcggggcgagtgccaagattgaatgggctcatcttcaatcgtattttgttcaggaggctatatggagcaggttactaccgtgggcattgacctggcaaagcgggtgttcgcgcttcatggtgtagacgccgccggccgagttgtcttgcgacgtaccgtgaagcgggaggatttggtcgagctggtggctagcttatcgtccgtctgatcgcaatggaggcaggcagcggcgcgcacgagtgggcgcgtcgcttccaagcattcggccataccgttcgcctgatggcggcgaagttcgtgacgccataccggcgcagcgggaagaacgacggcaacgacgccgaggcaatatgcgaggcggtgaccaggccgggcatgcgcttcgtccccatcaagagcgctgagcagcaagcggtcctgacggtccaccgggtgcgccaaggttttgtagaggaacgcacctcgaccatcaatcggatccggggattgctggcggaatttggggtcgtgctgccactgcgcagcgtgacgatccgccggcaagctcgagaggcggctgagactctgccgcatatcgcccgccgggcgatcgaggacctctgcgctcacctgcgcgagctcgatgctcgagtgctcgcctacgatcgggagatcggccagcaagcgcgccaatcggagcctgcgcgccggctgatgaggatccgtggtgtgggtccactgagcgcactggccatcgtcgctaccgtagaatctgcgcgcgatttccgcagtgggcggcagttcgcggcatggctgggactgacgccgaagcaacactcctcgggaggcagaagccgcctgggcagtatcaccaagcgcggcgatgcttatttacgaacgttgctggtgctcggcgcccgatcagtcttacacacggcaatgcgacacaaggatcgaatctcgcgttgggtcctctcattgcaagcccgtcgcggctatcaccgcgcgctagtcgcgatcgcgaacaagaacgcccgaatcgcatgggcgctcctcagccgtaaccaggagctcagaaccgcttaagcaatcaagagacgcaaccgttgatgtgaatcggtcagaccggcgtccggcaactctgaactatttcagggcagtttccttgcgactaacgtgcgagaaccggacgcgcggctttcatcagggccagagcaaatcgctcataaacaggccggttatagtgaagcagtccgacctcttcacctcatcgcgttgcctctcgaggagaagtccttata

SEQ ID NO: 3652 - DNA, 1145 bp, unidentified
  source 1..1145: mol_type = unassigned DNA; note = element_56d75c1
  misc_feature 1..2: note = core
  misc_feature 3..179: note = LE
  misc_feature 180..1130: note = CDS
  misc_feature 1131..1145: note = RE
  misc_feature 12..178: note = bridgeRNA
cttgtatcttggaattgtggtacatgagacccatggaactggacagatcgatacgcctccggtccaaagagaccgtggccgagccgggtcgtcacattctccaccacccaagcccgaacagttgccggggccactgagcccgcatcgggacaaggacgggcttcaccaaggaagaggcgatgcagacaccattggtttttgtcggggttgatgtctcgaaagcccggctggatgtggccgtgcggccgtccggcgagctgagcagcgtaacgtatgacgccaacgggatcacgacggtgctcgcgcagctgcgccaggtgcgtccggcgctcatcgtgatggaagccaccggcggcttggaacagcctctgctgcgggcgctgttggacgccgccttgcccgtgatcgtggtgaatccgcgccaggtccgggactttgccaaggcgccgggccagttggccaagacggacacgctcgatgcgcaggtgttggcgcgctttgcagaggtcatccgaccggccctgcgggtgatccccgatgcaccgacccaggagttggcggccttgctggcgcgccggcgccaggtgctggcgatgcagcaggccgagcagaaccgccttgatcgggctttcgatcgagtgcgaaaacggattgccgcgcatgtgcactggttgagcgacgaacgggctcggctcgatgaggaactggatgacatgatccagcggagtccggtgtggcgagcgcgggaagaactgttgcagagtgtgcccggcattgggcccgtgatgagccgcacggtgttggccgagctgccggagttgggtttgctgaatcgcaaacagatggcggccttggtgggcgtggccaccttcaaccgcgatagtgggcggctacgcgggcaccggaccatctggggcgggcgggcctccgtccgcacagtcttgtacatggcgactttggtggcgacgcgctggaacccggtcatccggccgttctaccagcgcctgcgcgccgccggcaaagcgccgaaggtcgccctcgtggccgcgatgcgcaagctgctgacgcttcttaatgcgatggtccatgatggcactccgtggcggccggttgcggcaccggacgtgtgaccgtcaaaacagttg

SEQ ID NO: 3653 - DNA, 1429 bp, unidentified
  source 1..1429: mol_type = unassigned DNA; note = element_56dd9cf
  misc_feature 1..2: note = core
  misc_feature 3..121: note = LE
  misc_feature 122..1147: note = CDS
  misc_feature 1148..1429: note = RE
  misc_feature 1182..1382: note = bridgeRNA
agatggggtaatcggccggcccagcttgtgaatagctgaagattttgggtgctgcgcttcaggctgatggtgaaacgaggtccgtggtaacggcctcaagcatcagaaggagaagcgcagcatggaccattttgctggattggacgtgtcggtcaaggagacaagcatctgcattgtggatgacacaggcaggatcgtgagggaagtaagggtcgcaagcgagccggaagctctgctgcaggtggacccggcttaccgccttaagcgggtcggactagaagccgggccgctgtcgcaatggctttttagcgggcttgccgaagcaggcttgccggtgatctgtgtcgagacgcggcacatgcgggcggtgccgaaggcgcagatcaacaagaccgaccgcaacgatgcgcgcggcatggcccagatgatgcgggcggggctttatcgcccggtgcatgtgaagacgctacgtagtcagaaactacgaatgctgctgacccatcgcaagttgctccagtccaaggccatcgccatcgataacgacctgcgcgggactttgcgcaacttcggcctcaaggtgggcgtggtgggaacggtgaagttcgaggcgcgcatcaaggagcttgtggaaaacctcccggatcttgctgagttagtcgaaccactgctgattgtccggcggacgcttcgcgagcagatcggaattcttcatcgtcgcttgctggccatcgttcggaatgatgatgtgtgccggcgcctgatgaccatcccgggtgttggtcccgttgtggcgctgacctatcgcgcgactgtcgacgtgcccgcccgcttccgaaactccgaggcggtcggggcggtgtttgggctcacgccttccaggtatcaatcaggcgagatcgaccgacccggcgccatatcaaggtgcggtgacgagatgatgcgggcaatgctgtacgaagcggctcatatcatgctggtgcgtttggcgaagtggtcctggctcaaggcctgggccatgaagatcgccaggcaccgcgggatgaagaaggcgatcgtggcgctggcgcgccggttagcggtgatcatgcaccgcatctgggttgacggtaccgagttccggtggacccgggaagttacagcggcgtgaggaccattaggattaaacgcgacaggagaacactcgagctccaccgagcggtggaatgatgtccctcgcgggacgatggatgaggtgagttcgtatgtcggcttggacctactgtctgtaagacggcaaggccgccccaaagattgttccgcctcgtcctcgaatcccatactggaagggccttggtgccgattccgaagagaagcacgagcccgtgggcgacaccaacaccgcaaagatggatagtctgaaagtgcttgaccccaaacggccgattagaga

SEQ ID NO: 3654 - DNA, 1380 bp, unidentified
  source 1..1380: mol_type = unassigned DNA; note = element_56ea31a
  misc_feature 1..2: note = core
  misc_feature 3..83: note = LE
  misc_feature 84..1118: note = CDS
  misc_feature 1119..1380: note = RE
  misc_feature 1141..1368: note = bridgeRNA
tgatgctgtggacggctcctccgccggcatcgcgatgtgccatatttgcggtgttgttaggaaccgcatgggaggagccatccatggaagagattaccacgattggactcgatatcgctaagtcggtgttccaggtgcacgctatttccgcaaccggcacggtcgtcgtccgtcgacagctaaagcgccgctatgttcttcagtttttcgcgaaccttaggccctgtcttgttggtatcgaagcctgcgcaaccgcacatcactggggtcttgagctggagaaactcgggcaccgagtgcagcttatgccgccgcgctatgtgaagccctatctcaagcgcaacaaaaacgatgcggcggatgctgaggctatatgcgaagcagtgacacggccgaacatgcgcttcgttccgatcaaaacattggatcagcaatcaatcctgatgcttcatcggacccggatgctgtttattcgccagcgtacgatgaccatcaacgcggtccgtgcccatctcgccgagttcggaatggttgcggggatcggtcgtaacgggctgattgagcttctacatctcattcggaagggtgagaaacctgagataccagccgaagcgtgtttatgtcttgccgccttggccgaccaggtcgatctcttgaagcagcgaatactggagctggatcggcagatcatgaagtggcaccgcgcccatgatctcagccgtaagctcgaaggaattccaggtgttggtccattggtagcaacagcactggctgccagcgtccccgaccccggcgtcttccgttccggtcgtgatctgagtgcctggattggcttagtcccgaaacagaactctagcggcggcaaggaaaaactccgcgggattagcaaggccgggaaccgatatctacggcagttattggtggtcggcgcgatggcggtgatcaagcgagccaagctattgggctatacccgccatccttggctggtcgcattgatggagcgccggtcgacgaaagtcgctgctgtagcgctcgccaataaaatggcacgggtcgcctgggcaatcatgagccggaacgaaccctacagaatactgccggtcgccgccgggaattgatacacggcccatgcgccgtgaacgtcgttggtaagagcaggagacttatacgcacctacgccagtcggcccatggaaagggacaacccactttgcgccaggcgcttcgagcgcgagcttgtgaccgggacccgatccgcggagagcattacggccagcggccacgatctgtgccgcatccaaaggccggacacatggcagctccgaccagcaatgtgcaagaaagtcgacaaaactcttgccaaaccggagccgtccacaca

SEQ ID NO: 3655 - DNA, 1564 bp, unidentified
  source 1..1564: mol_type = unassigned DNA; note = element_57001da
  misc_feature 1..2: note = core
  misc_feature 3..248: note = LE
  misc_feature 249..1421: note = CDS
  misc_feature 1422..1564: note = RE
  misc_feature 3..227: note = bridgeRNA
ctcgtattatagtgtcatagccttttctttaccttttctacaggttgggctatgctgttaaagatgctgtggattggttacatacctcctaccgctcagacggtttcgagtaggctccaaccacagcctctttgtctcaatgttaatcagttagataccgcatgacggtttatgttgaacgaggttacatccggcagagagctctgtggatcagcaacagcatcaatacatttaaggaggatcactttatgatctatgttggcattgatgtagccaaagataagcatgactgctgtatccttggttccgatggcgagatactattctctccgtttactttccaaaacaacttaatcggctttgatgagttgtatgagaagatctggtcacttacctctgacctgactgaaataaaagtaggtcttgaagctaccggtcactatcatctcaatcttcttcgctcgctccttgataacggcctagccagctttgttatcaatccgttacacacaaatctcttcagaaaaggtcaaagccttagaaagacaaaaacggataaagtcgacgctgcttcaattgctatgatgttgttgactgatagaacactcaagccctactcagatacatcataccataacgaagaactaaagtctctcacaagataccgcttcaataaagttcaagaacgtgcacagttgaaaacctctgtttccaggcttgttagtatcctttttccagaattggaacagcttgtaccaactctccatatggcttctgtttatgctctgctgtccgagttccctggtgcttcttttttggcttctgcacatctgacacacttgaagcacctgcttcatgaggcttccaaaggccactacggaagagatatggcagtctctattcgcaaagcggctacttcttcaataggatctgtcctgccagccaaatctctggaactgaagcacacgatccacctcatcgaagtcctgtctgctgagattgctgagattgaagctgccatcaatgcgattatggctacgctaaattctccgatcaccacaatccctggactcaagaatcggatgggcgccatgattcttgctgagattggggatttttctcgttttgacaaccctgatcagatcttggcctatgctggtcttgcaccatccacatatcaatcaggacaactaatctcatcttatgctcgaatggaaaaacgtggttcccgctatctgcgctatgcgctgtttaatgcaacgatatatgtctgtatctgggatccgacttttaaagcatatctggccaagaaacgagcagaaggaaagcactactatgttgcaatttcccacgcctgcaagaaacttattcgagttatctatcggatgcaattgactggagaaccttaccgggcatcctgatcttttcaataatctgttctgatagagcacccttttgaggatgctctgtttgtcatgcagttttcaaagttcaaacatatcttaaatgcatttaaacaatgcatttaaaaatttcattttagacttgacttttaatagttagt

SEQ ID NO: 3656 - DNA, 1542 bp, unidentified
  source 1..1542: mol_type = unassigned DNA; note = element_57013ea
  misc_feature 1..2: note = core
  misc_feature 3..240: note = LE
  misc_feature 241..1422: note = CDS
  misc_feature 1423..1542: note = RE
  misc_feature 3..220: note = bridgeRNA
cttgtattatagagtagtagttttttgagaccctctccaaggtctttatgctacactgtagaggatgctgtggattggtttcgttctcctaccgcatgacggttcttgaaaggctccaaccacagtcctttacagtattgttaatcagttagataccgccagacggtttatgtggaacaaggttacaagagtaaagtgtcctgtggatccagcatcaaataaaatatcggaggtatcatcatgatttgcgtaggtattgacgttgccaaggacaagcatgactgcttcatcctcagctcggaaggagaagttcttgcagatgtcttcaccattccaaacaacgcagaaggctttgacaccctgctacaagccattcgccgctgtgtccatccggcagacaaaataaaagtaggacttgaggctaccggacactacagctacaacattctcggatatctgctcgacaaaggcctgccaacctatgtcatcaatccgctgcacaccaacctttaccgaaaaagcctcagtctccgtaaaacgaagacagaccgtgtcgatgcgcgaaccattgcaactatgctcatgtcagatgtggacctcaagtcctacacagacacagcatatcacaacgaagaattaaaatcactaaccagatataggtttgacaaggtcagggaacgagccaagctgaagcaatccatttcacgtctggtgaccattctgttcccagaactggaaaaaatggttccatcccttcatatggcctctgtttatgcgctcctcagtgaattccctggcgccagacagattgctgaagctcatttaactcacttaaaaacactcttgaacgacgcttctaaaggccgctacggccgggacatggcaacggaacttcgggatactgccagaaattccgttggttccgtcatgcctgccaagtctcttgaattgcagcatacgatccgtctgatccgtgagttagatgcagagattgatgacatcgaagccgcgattcaggatatgatggatgaaatccagtctcctattactacaatcccaggaatcggtgtccgcatgggcgctatgatcctggctgaaatcggtgacttctcgcgttttgactcgccggacaaaatccttgcctatgccggtatgtctccgtccacctaccaatccggacaactctcattgtctggtgcatattcgcacatggaaaaacgaggctccagatatttacggtacgctctttacaacgcaaccaagtatgtttgtctttgggatccaacctttgcagcctacctggcgaagaaacgtgccgagggcaagcactataacgtcgcactctctcatgccgcaaagaaattagttcggctgatctactcaatggagaagtccaggcagccgtacaacagcgccgcataagattcacgttcataagttgagtaggcgtccggagggacgtcagctttgctataccctttttgagccgtccacgttttcttgccaatccattcatttcaggcttgacttctaatagttagt

SEQ ID NO: 3657 - DNA, 1550 bp, unidentified
  source 1..1550: mol_type = unassigned DNA; note = element_5703fee
  misc_feature 1: note = core
  misc_feature 2..275: note = LE
  misc_feature 276..1442: note = CDS
  misc_feature 1443..1550: note = RE
  misc_feature 1..252: note = bridgeRNA
tgtatgataaatatataaaaatatttatctatacaacctccttccatattattttttatttaattttgttatataattttattaatgaaactgtggactttttatctttattcttattgaactcttaagttactttttaaaggagactattgccactgttttttctcaaatacttatagttggttagaatttttattcttaatgtttgcaagaatgtattgattaaaactttgtggacgcacagtttctaatttttattttaaggatgtgattttatgttattactaggtattgatatcgctaaattaaaccatgtggcttctcttgttgattctacttctggagaacttatcttctctaattttaaatttcaaaataattttataggattttcttctttacttgaaaaaatatctaagtttcctgtcactgaaattattattgggttagaatcaactggacattatggagaaaattttatcaattttttctttcaaaaaggttttaaaattgctgttatcaatcctttacaaacttcacatctacgcaaagcaaatattagagattctaaaaatgatagattagactctattaatattgctaaaactttattatttaacgaacatagatatgttactcaaaaaaatcttactaattttgcgctaaaaaaattaactcgttttaggaaaaatttaattaaacaaaaaacaaaatttaaaattcaacttgtttctctacttgatattatttttcctgagttacaatatttttttaaatctggtattcattcaaatgctgtttatactcttttaaaaaagtatccttctacagaaaaaatagccgccttaagagaaaaaacattattctctattttaaacaaagcttcaaaggggcactacaaagaagaacacgctttgcaattaaaaagtctagctaaatcttctgtaggtattaaagatacttctgtctctatgcatatacctcaattgataaaattaattgaggtgttggacagccaaattaattctgttgaggaagaaatccaatcttccattgataaagaatctgttgtactctctattcctggtataaatcttgtagctgctgcttcaattcttggagaaattaatgacattgataactttgattcaacgtcaaaattgttagccttttcaggactagatccaaaagtaagacaatctggaaacttcaatgcttcgtcttgtagaatgtctaaaaaaggctctccctatctacgttatgctctaataattacttcctggaatcttgtcagaaatagtgaaactttcaataaatactatttaagtaaaagagcccaaggaaaatcacattatagcgcattagggcatacagctcataaattagtaagaataatttataccttgttaaagaaaaatattttatatcaagagattaagtaatctctatcaagtgaatacagtttaaagagttttatgaactctaattttgtaatgcagaaaaatcaaagattaaatttttttaaatttatcttgacttttcatagttgg

SEQ ID NO: 3658 - DNA, 1397 bp, unidentified
  source 1..1397: mol_type = unassigned DNA; note = element_5716796
  misc_feature 1..2: note = core
  misc_feature 3..89: note = LE
  misc_feature 90..1124: note = CDS
  misc_feature 1125..1397: note = RE
  misc_feature 1165..1383: note = bridgeRNA
gatgaggtggatggctcccgctcacggcatctaggtgccaaggtgtgaatgccatcaggcattcacgagcaaaatgggagccacccgtcatggatattactacgatcggcctcgatttggctaagagcatttttcaggttcacggcgttgatgcgaacggtcgggtcgttatccgcaagtcgcttcgacgagcgcagatgctgccattcttcgccaggttgccttcgtgcctggtcggcatggaagcatgcggcacctcgcattattgggcgcgtgagctaatcaagctcggccatgaggtgcgcctgatgccgccggcttacgttaagccgtatgtgaagcgcagtaagaccgacgctgccgatgcggaagcggtttgcgaagcggtgacgcggccgacgatgcggttcgtgccggtgaagtcacccgagcagcaggcggcgctgtcgatgcaccgggcacgcgatctactggtcaagcagcgcacgcagctggtcaacatgatccgcggcctgctcgccgagtttggcatcaacatccccaagggtctcgaacgggcactgctgatggcgcgacggatcgtcgatgatgaagcgccagacgttccgattgaagctgcgaagatcgtcggcacactgtcacagcaggcactcgatatccatgttcggcttcgccaaatcgatcgcgatctgctcgtttggcaacgtggcaacgatgtcgcgcgtcgtctcatgaccattcccggtatcggaccggtcggtgcgacggcacttgccgcgtcggtcaccgacccgcaccagttccgctcagggcgacagttcgccgcctggttgggactgacgccacttcagaagtcgagtggtggtaaagagcggctcggacgtatcaccaagatgggcgacaagtacttgcgcaagctgctcatcgtcggcatgacttcactcgttcgacgcgcaaaggacaatcctccgacgatcgatccacggctagccaatctactcgtgcgaaagcccgtgagggtcgcaaccgtcgcgatggcaaacaagacagcacggataatctgggcaatcatgacacgtggcgagacctatcgtgccagccaccagccggcactggccgcataacagcgatgatacacgcttagctgaagaggagatcagcttcacgaagttgcgagagcgatgcgatgtgatggcaaaccggtcagaccgggaacagggacaacccacttgatgtccaaggcgtcatagcctgaataacagaatgggacctcgttcgcggactccatcagggccagcagtctcaactgactgcatcaacaggccggacagaagactgcacccgaccaacgtcaccacgtcaaattatctcttgcaacgcgggggccatccacagag

SEQ ID NO: 3659 - DNA, 1621 bp, unidentified
  source 1..1621: mol_type = unassigned DNA; note = element_572406a
  misc_feature 1..2: note = core
  misc_feature 3..286: note = LE
  misc_feature 287..1498: note = CDS
  misc_feature 1499..1621: note = RE
  misc_feature 14..312: note = bridgeRNA
ctactacaatatatttatggtttataagacctgatgaacaggttcttttatccagctcgttgtttaagctgttataatgaggaggcaatcgggtatatcgactttctttcttggacttagcgtccgtaatttagactgataacccgcacctcatttgcagcgttcgttttatgcaggttgaactgctgtcctacagtacgttcgtgtcacaccccagtagattgaataggcaatgagtcaaacgggtctttatccattgcaatttttttaaaggagtgacgaatttatgaatcgaaacgctgtaggtattgacgtcgctaagggtaaaagcatggtagctattcttcgcccctttggagaagtggtttcttccccctttgaagttcaccacacctccgatgagatccgttctttaattgaacagattcaatccgttccaggagaaacgcgtatcgttctggaacatacagggcgttatcatgaacccctcgtccacgagctttcccaagcccacctctttatcagccccgttaatcctaaactgatcaaagattttcgaaccccctctcttcgtaaagtaaagtcagacaagaccgatgcattaaagatcgcccgctatgctcttgacagttggccagaattgaaacagtatggacctatgaacgaaatacggaatcaattaaaaaccatgaaccgacagtttgacttttatatgaagcataaaaccgctatgaaaaacaacttgattggggtcctcgatcaaacctatccaggagccaacgcctactttagtagtcctgctcgcaataacggacaccagaagtgggtagattttgtcacgacttactggcatgtggactgcgttcgtcaaaagacgctcccggcttttatcgaccattaccaaaattggtgtcaacgcaagaagtacaacttcaatccaacaaaagcgaaagaaatttatgaaggcgctaagaagcttgttcctgtacttcctaaagaccctttgactcaccaattagtaaagcaggcggtcgaacaattaaacacggcttccatcaccgtagagggactccgaaccttgatgaatgaaacggcagccaagctcccagagtacacgatcgtcatggccatgaaaggcgtcggcccttctctcggtcctcagttgatggctgaaatcggagatgtgacacgatttactcataaaagcgccatcacggcatttgcgggcgttgatccaggtgtgaatcaatcgggagcctatgaacaaaagggagtccgtgcttctaagagaggctcttccaccttacgtaaaacgttgtttcaagtcatggacgtattgatcaagacacaaccccaagaagatgccgtctatcaatttctggataaaaagcgagcccaagggaagccctattatgtttacatgacggcaggggcgaataagttccttcgcatttactacggaagagtcaaagaatatttaaatgctctttcccagtaatttttttcacatacctcctcttttcaaaccagcaaaatcgatggttctatttgtgctgcttaattttctgcacaaaactttttgcctaaaagtctaatttcctattgactttttatttgcagg

SEQ ID NO: 3660 - DNA, 1357 bp, unidentified
  source 1..1357: mol_type = unassigned DNA; note = element_572be28
  misc_feature 1..2: note = core
  misc_feature 3..228: note = LE
  misc_feature 229..1101: note = CDS
  misc_feature 1102..1357: note = RE
  misc_feature 1077..1345: note = bridgeRNA
tgatggggtggacgccccccgacggcatctgcgtgccaaggtgacggtgtcgagctgtcactgaaggaggcgtccacggagcaggttactacgatcgggttggacatcgcgaagcacgtcttccaggcacgtggagctgacgctgccgggcatgtactattccgcaagcgcgtcacacgcccgaagcttcttgggttcttggcggcgcaagcgccctgtatcatcgccatggaagcctgtgcaggcgcgcactattgggcccgcgaggttggcaagctgggccatagtgtgcgcttgatcccgccggtctacgtcaagccgttcgtgaagcggcagaagaacgacgcggcagatgccgaagccatctgtgaagcggcgcagcgaccgagcatgcgcttcgttccggtgaagactgaagagcagcaggcgaacggcgttgtgttccgagcccgggatctcctggtgcatcagcgcacgcagtgcgtaaacgctctacgcgggcacctggttgaatacggctacgtctttccgaagggcatcaggcatgtttcaaccctggttgctcacgtcgaggacccacaatcctctctaccggagagtgcgcgtatcattctaaaggtgctcgtcgacaccttcaccgcgctggaggcgcagatcaccgaactggatgccaacatcaaccagcgctcgaaggcagatcccacggcacgccggctgatgacgattccaggcgtgggtccgattgcctcgacggcaattaccgcgctggtgccggccgcggagggctttcggaccgggcgcgacttcgcggcctggctcgggctgacgccgctgcagaaatcgacgggcggcaagcaaaaactcggcgccatctcgaagcgcggcgaacggaccatccgacgtctgcttatccttggcgcaagtgccgtggttcgccaggccagccggcgcggggcgcccacgggctcgtggcttgcgcagatgctgactcgcaagccgaggatgctggtcaccgtagctcttgccaacaagatggcccgcgtcgtgggggctctgctagtcaaaggcggcgtttacagaactccggtcgcggcggcgtaagctggtcacgatcgcgagggcgtagggcaagcggaaggaaagtatggcgcaacagtcggcgagacggggctgggagaaccagggctttccacagtgcttcgagcacgctttgggtgagatcgacccggtccgcgaactcccatacaggccagcggcggctcaacgccgcatcacaggccggacagatggcagcatccgactacgcgcaataaatgatccagacgttttcccttgcctggaggggggcgtccacaga

SEQ ID NO: 3661 - DNA, 1429 bp, unidentified
  source 1..1429: mol_type = unassigned DNA; note = element_5730e39
  misc_feature 1: note = core
  misc_feature 2..282: note = LE
  misc_feature 283..1122: note = CDS
  misc_feature 1123..1429: note = RE
  misc_feature 1206..1423: note = bridgeRNA
taatgggatggtccgccgcctgaacctcagcggaggtataaggggtgaacaggaggcgtccccaagaagattcatacgattggcatcgatctggctaagacggtctttcacttggttgggctaaatgcgcaaggtgaagttgtggtgcagaggaagtgttcgcgcagtcagctgcttcgcttcacctcgaaccttccagcgtgcttgatcggcatggaggcttgcggaggagctcattttctaggacgggctcttcgcgatcaagggcatgatgtacgcctgatgcctgcgcagtacgtgaagccatacgtaaagacgaacaagaacgactacatcgatgcggaagcgatcgccgaggcagtcggtcggcccaggatgcgtttcgtgccgatcaagacggatgatcagttggatctgcagtcattgcaccggattcgcgagcggtgggtggttcggcgcaccgctgtgatcaaccagatccggggattgctgctggagcgcggcatcaccatccgcaaggggcgactgtatatcgaagcttcgctgcccgcgattttgaaagacgccgacaacaagctctcgggcatattgcgagtgctgctcacgcaactgcagctggagatgcagtatctgggaagacagatcgatgagtccgataagctgatcggcgaaatcgccaagagtatggactcctgccgtcggctgctcgcgatccccggaatcgggccgctcactgcaacagccacgatcgccgcgatcggtaacggagcggctttcaagaagggccgcgggttcgcagcgtggttgggagtcgttcccggcgagcattcgaccggcggcaagcagaagctgaccggcaccagcaagcgcgggaacaaatatctgcgcaaactgttcgtgcagggagcgcacacggtcctgctgcagaagactaagcaatcgagtggcctgagtatatggctggctgatctcacagcgcgtaaacgcaagcaggtagcgacagtcgcgatggccaacaagatggctcgcatggtctgggcggtgttgaccaaaggagaagcctatcgcccgccgctgctgctccaaccagccggaaatggcttgcagatgacgcctgcctaacggcaggcttggaaatcgcaacgcgattcccacatccgcaaaccatcgactacggctgactgatctgattttccaagttcctgccaggtttgctgacgaaccatgagatggcacaacggtcgatcccggcgctctcgaaacctgtacccgtcaaaagccttcaaaggccgtgtaactaaataggacgagggcgcagcgcattccatccaggccaggaggtcatcctctaatcaaaggccgtatacatgtgcgcagaccatttacgccaacctcattcttcgcttgcaaaacggcggcggaccataca

SEQ ID NO: 3662 - DNA, 1166 bp, unidentified
  source 1..1166: mol_type = unassigned DNA; note = element_573a51f
  misc_feature 1..3: note = core
  misc_feature 4..203: note = LE
  misc_feature 204..1154: note = CDS
  misc_feature 1155..1166: note = RE
  misc_feature 11..212: note = bridgeRNA
cttgtcttagagattcctggtcttctggttagaaaagaaccgctggtggggactgcgcaatttccccgccggcgtagaggaacggatcgtgcctgcgctggctgagtaagtgccgttgggaagtttgatcgtcctcttcatttccatgcgacctgaacggatacgagggcatctaggcccgtacgacaagcaaaggatctggaatgtccatcgaaccagttcgccagcatatcggcgtcgatatttcaaagagcactctggatgcgcacatgtatcctgagggcaggaccataactgtcccgaatgataaaaaaggattcaggcaattgctgacctggatggcaggatgtcatcttgaacagctactctatgaaccgaccgggcagtatcatcttgccttcgagaagttcttcctgaaagccgaaatacctctcggcaaggtcaatccacggcaggctcgacgatttgcggacgcattgggtgtgtcggcgaaaacagacacgatcgatgccgggcttatcgcaaaatacggggcgatgatttctgtgcgccgcgtcagcgacagaacgatcaagttcaatgaaatgaaagagctacaatcggctcggcgcgctctggtgaaagacaggacacgcgcgtccaaccggtcttccgcccggatagctcccttgttgcggcgccaggcacgggaaaggattgagcagatcgaccgtcacatgaaagcaatcgacgcggctcttcgtttgctggtccgtgatgatgaattcctgaaagccagattcgacattctacagactattcctggcattggagaaacaaccgcgatcatgcttctgaccgagatgcccgaactcggcttcatcgatcacaaggcggccgccagtcttgcaggacttgctccgatcgctcgggacagcggcacgtttcgaggcaagcgatacatacaaggtggaagagcacatttgcgacaggcgctctatatgcccaccctcgttagcataaagcataatccggaattcagcgcgaaataccagatgatggtcgccaccggaaaagcgccaaaactggccatcacagccataatgagaaagcttatcgtcctggcgaacagtctgcttcgcgatagccgaaactgggttccaagccggacttgacgaagacggata

SEQ ID NO: 3663 - DNA, 1274 bp, unidentified
  source 1..1274: mol_type = unassigned DNA; note = element_57484a1
  misc_feature 1..2: note = core
  misc_feature 3..68: note = LE
  misc_feature 69..1019: note = CDS
  misc_feature 1020..1274: note = RE
  misc_feature 1041..1272: note = bridgeRNA
ttaatgagatggtcactccctccttcccggtactatgctgaggacaggctttcattcggagaactatcatggaaaacattgcgctcattggtatcgatctgggtaaaaactctttccatattcattgccaggatcgtcgcgggaaggctgtttaccgtaaaaaatttacccggccaaagttgatcgaatttttggcgacatgccccgctacaaccatcgcaatgggcctgtggcggttctcactttatggatcgcacgttgtaagtgttggggcattcccaaagctgatatcaccgcaatttgtccgcccattcgttaaaagcaacaaaaatgacttcgttgatgctgaagctatctgtgaagcagcatcacgtccatctatgcgtttcgtgcagcccagaaccgaatctcagcaggcaatgcgggctctgcatcgtgtccgtgaatccctggttcaggataaggtaaaaacaaccaatcaaatgcatgcttttctgctggaatttggcattagcgttccccgaggagctgccgttattagccgactgagtaccattcttgaggataatagtttgcctctttacctcagccagttattgctgaaattacaacagcattatcactatcttgttgagcagattaaagatttggaatcccagttgaaacgaaagttggacgaagatgaggttggacagcgcttgctgagcattccctgcgtcggaacactgacagcgagtactatttcaactgagattggcgacgggaggcagtacagcacgggaggtaggacgacattgctgggaattagtaagcgaggtaataaaaagatccgaactttgttggttcaatgtgccagggtattcatacaaaaactggaacaccagtctggcaaattggccgattgggtcagggatttactgtgccggaaaagcaactttgtcgtcacttgtgctctggcaaacaagctggccagaatagcctgggccctaacggcacgacagcaaacttatgtagcataacggcagaaatacaccggtttaaagaattactgatctggttttgcgaatactgatattgatgatactaacggcccaccggcctgttgaggaacctgtaaaacggaaaggctcattgaagccgtatattttctggaggttcatcaggcgcggaactcatcaaggcgcgggaataaaatcccattcagacgccggatagattcaagcaagccaacttgtcgtcaaaatcggtgttgcaaaaacgggagtgaccataga

SEQ ID NO: 3664 - DNA, 1359 bp, unidentified
  source 1..1359: mol_type = unassigned DNA; note = element_574f79a
  misc_feature 1..4: note = core
  misc_feature 5..78: note = LE
  misc_feature 79..1098: note = CDS
  misc_feature 1099..1359: note = RE
  misc_feature 1101..1347: note = bridgeRNA
atgatggggtggatggccccctgccggcatctatgtgccaaagttgggtatggaaacaccaaccaaggggagccatccatgaagcagattatcacgattgggctggatatagccaagcaggtctttgaggtgcacggggtcgatgggcaaggagctgttgtagtgcggcgcagtcttcggcgggggcaactgattgggtggtttgccaagttggcaccgtgtttggtcggcattgaggcgtgtgccacggcccaccactgggcgcgcgagctgggcgagctgggccatagtgtgaagctgatcccgcctgcttatgccaaggcctatgtgcggcggaacaagaatgacgcggcggatgcggcggcgatctgtgaagcggtgagccggccgtcgatgcggtttgtggcgataaaaagcaaggaacagcaggcggcggcgggcatccacagggtacgcgaactcctgatgaagcagcgcaccatgacgctgaataccgtgcgcagcctgatggcggagttcggcatcgtggttagggaaggaccgcgccacgtcgtcgagctggaggcgatcctggccgacccgcaggacgagcgcgttcccgaacccctgcatgggggccttttgaagctggtcgagatcctgcgcggtctggagagccgcatcgcggtgatcgacaaagcgatcgtcaccgcaggaagagacaatgccatcttcaggcatctgatcacgatccccggctacggtccgatcctgtcgagcgccatggcggcgatggtgatcgatcccaaagcctttaagaacggccgccacttcgctgcttcgctcggtttggtgccgcgccaggaaggcaccggcggcaaggtcaagctgggaccgatctcaaaacgcggcaatggctatctgcggcggcttctggtcaatggggcgatggcgatcttggccaccaagcgcgccaaacaggacccctggctggccaggctgcttgccaccaagaagcgcaagctcgtggcggtggcgcttgccaacaagatggcccgtatcggatgggccttgatgacgcgccagcaggatttctgcgccttgccggcggcggcttagcaagacaaagccgccaagacggggccacaaaggcattgcgagggtgaacaaaggtgatggcattgtcggttcatcgacagatcgagaaaaacttgccaattgtcatggggcatcgcgaccccgcggccatgatcaggcctcgatcctcggttcccatcagggccagcggtcacaggccgcgccaacaggccggacacatgaccgcaaccaaccgccatccttcacccaaatttgtccttgcaatcagggggccatccacac

SEQ ID NO: 3665 - DNA, 1607 bp, unidentified
  source 1..1607: mol_type = unassigned DNA; note = element_575950e
  misc_feature 1..2: note = core
  misc_feature 3..279: note = LE
  misc_feature 280..1239: note = CDS
  misc_feature 1240..1607: note = RE
  misc_feature 16..302: note = bridgeRNA
ctcctaatatataagtgtaaggttcaagcacccaacagccagttgggacttatccttctcattgtttaagctgtataatggttaggcattggtctgactgatcactccttggaccccaacataggcgtccgtaagaaagcccgtcaaccagccatcatttgcagccgttcgatttatgcaggttgaactgccatgtgtacgttcgtttgatacccaggagattgaataagcaatgagataagctggaaccatgcaaattcaatttcggaggtacatagaatgtacaacgcagtaggtattgatgtttcaaaaggcaagagcaccatcgcagtcctgcagcctggtggggcgactattcgtaaaccctttgatgtgtctcatacatccgcagcgatgaatgaactctccaaatatcttggcaccctagaaggcgacactaagattgttatggagtgtactggcagatatcacgagcctatagcaaatactttgcatgaagctggattcttcgttacagtggtaaaccctcaccacattaaaaacttcggcaacaactcactacgtaaggttaaatctgatcctgctgatgccaagaaaatcgcacgctatactcttgacaactgggctgaattacggcaatattcgagtatggataatatacgtactcagttaaaaactttaaattcgcaattcagcttctttatgaggcaaaaagttggcgcaaaatcaaatctgattgcactattggacaatacatatcccgatgtgaacaaactctttaacagccctgtccgtgagaacggaagcgaaaaatgggtggattatgtatcctccttctggcatgtggactgtgtccgcaaaatcggcttaaaggcctttacagagcgttacagagctttctgcaagaagaatcagtataactttcagccttcaaaaccggagatactatttaaggcctccaaagaacttgttgccgttttcccgaaagagaaaacgtacaagctgttgatccaacaaagtattcagcaattaaaccttgcttcacaacatatcgagcagcttcgcaaagaaatggatagccttgccagctctttgcctgagtatacaaccgtcatgagtatttatggtgtaggtaaaacttatggtcctcagctcattgccgagattggtgacgtatcaagattcacccgcagagaagccttaacagcctttgctggcgttgatcctggtgtaaattaatctggtcaacacaataagaagagcaacagagcttccaaggtaggctctgcaaagcttcgcaaaacactgttccaggtcatgaccaccttgctccagaatgcgcctgaagatgatcctgtataccttttccttaacaagaaacgggcagaaggtaaaccttactatgtctacatgactgctggagctaataagttcctccgcatctactatggtaaggtcaaagagtgtctgcgtaatttagagcagaacaactaatttctctccatatctcctcctttttacaaaccggcttttcaggcggttttagtgttgtgcccaaaaatcaatctgaaatattttcaaaaaacacttgactttttattagcagg

SEQ ID NO: 3666 - DNA, 1462 bp, unidentified
  source 1..1462: mol_type = unassigned DNA; note = element_5771ff0
  misc_feature 1..2: note = core
  misc_feature 3..238: note = LE
  misc_feature 239..1276: note = CDS
  misc_feature 1277..1462: note = RE
  misc_feature 17..183: note = bridgeRNA
cttgtatgttgcgttcagaggcgtgaggatgatttcacgtttcggcggtcaggccgtaagccccttaggccagcatctgttgagcctgtcccttagatcggccaccgcccctctgcttgtacgccgtggagaatcgaaggccttttgagcctgcatgttcaaggtcggcgcgcgcagtaagtccgttagcagcggatagggacggcagccgagaccatcctattcctgaaggaggtctatgaacaagcaggttttcgccccgcaagcgactgtgttttgcgggatcgatgtcagcgctgcttctttggcggtagccctgatcgcgccggatggaagtttggcgcggcgcgagttttccaataacgcaagcggccatgaagcgctttcggtctggttgaaaaagcgcgatagcccagtacgtgtctcgttggaggctaccggcatttactcgttggatcttgccttggcgctcgacgctgaagcctgcgtcgagctgatggttctgaacccgaagctggtgaaccgatttcagcagaccgtgtgccggtccaagaccgatgcagccgacgccatggttctggccgagtatagccagcgcatgccgttctgccgctggcagcggcctgcggcgagccacctggcgctgcgcaccgtgagccgttacatcgggtcgctggtggtggagcaggcggccttgaagaaccgtctctgcagcgctgagagcacggccaccactccgcgcgcggtgcgggtcgatctcaagcggtccctggccgcgattgaacggcgggtgaagagactgcgcgtagaggctctcaagatggtcgaggccgaggctgagttgcgtcagcgctaccagctactgatcacggtgccgggcatcggggcaatcaacgcgctggcgatcctcagcgaactgatcttgctggcgccggcaatgaccgtgcgccagtgggtggcatccagcggcctggacccggtgcatcgacagtccggcaccagcctgaacaagccgtcgcgcattagtcgcgccggcaatcggcgcctgcgcgccgcgctctacatgtcggccttgtcggcatcccgttacgaccggcatctggcagccttctaccgggcgctgcgtgcacggcacaagaccggcatgcaggcgctgatggcggtggcgcgcaagatgctgcacgccatctatggcatcttcaaaagcggcacgcccttcgatggccaacgactgttcccgaatatccagacagaggtagaatcaagcgccgggtgaaacggaagcgggctctgctgggaagcaaccatgccgagggataacctggcgggctcatcctgacgatgaaccggcgggcgagcagcaagcgctcgcccgcgccccaaatcatcggagggatagaccccgatgccttgaaaatccaatcccaacagcacaaaaaactgttgacttcgaacagagaat

SEQ ID NO: 3667 - DNA, 1363 bp, unidentified
  source 1..1363: mol_type = unassigned DNA; note = element_57728b8
  misc_feature 1: note = core
  misc_feature 2..78: note = LE
  misc_feature 79..1104: note = CDS
  misc_feature 1105..1363: note = RE
  misc_feature 1127..1359: note = bridgeRNA
taatgagatggtcaccatccacatccacaagcggttacgctggcgcgatctttttgtttaacaagcgaggagactatcatgcaggaagtcacactgatcgggattgacttggggaagcattctttccacatccatgggcaggatgccgccggcaaagggatattccgcaagaaatgcacccgcaaacagctcatcaccttcctggccacgttccacccttgcaccgtcgtgatggaagcctgtgccggagctcaccatatggcgcgctttctgatgtcctttgggcatgcagtgaagctcattaatccacaattcgtccggcccttcgtcaagggcaataagaacgatttcatcgatgccgaagccatttgcgaagctgcctcccgcccgactatgcgcttcgtcactcccaagacagaagctcagcaactcgtaagcgcattgcatcgcgtaagggagtctttggtgtgcgatcgcgtcaagacctccaaccagatccacggcattcttttggagtttggtattagcttgcccatcggccgtacgatcattagacacttgccttccgcactggcagaaacggccctgccagcacggctgattgccatcctcgagcgcttgcatgcgcattacaagtacctggatgaacagattgctgaagtggagaaggaattggtgcaacaactcaatgtggacgacctcggccagcgtctactgaaagtgccgggcgttggccccattaccgcaagcctgctgtcggctgaacttggagacggcaagcagtacggctgtgggcgcgacttcgcagcgtcggtgggtttggtgccacgccagtacagtacgggcggccatgccaaccttctcggcatcagtaaacgcggcgataagaatctgcgacgactcctcgtacagtgtgctagggcgttcatgcagcgcctggacaagcacaagggaatacttgcggactgggttcgctcgatgctgacacggcggcactccaatgtcgtagcttgtgcactggcgaataagctggcccgtattgtatgggcacttgctgctcgacacaccgaatatcacgctgctccggtgcctgtggggacctgagaagcactgttctggctgtaccaaatcacctacctggttttgcgactgtagaaattggatgacgtaaacggcataacggcccggcagataacctgatgaaaaaatcggctctcgaggccgagtgactttttaggactaccgggcgcgactctcatcgtggcgcgaagatcagactcttcacatcgacgccggatagattaaagcaagccaactacaaaacccaaaatctctgattgcaaaaaggagggtgaccatagat

SEQ ID NO: 3668 - DNA, 1562 bp, unidentified
  source 1..1562: mol_type = unassigned DNA; note = element_5775e8b
  misc_feature 1..2: note = core
  misc_feature 3..265: note = LE
  misc_feature 266..1432: note = CDS
  misc_feature 1433..1562: note = RE
  misc_feature 1..241: note = bridgeRNA
gtatgatgtttatagaaacaaaaacatcatatttcctttcttttttgatctgtggtttaatacattcagatactatggacttttgatttttacctgtagctctgactactcaacaggagtgtattgccgctacctttatctgaattgtttataagctggatgttgccagagtgttttctctgagtacttatttcaatcaagtctacgatgataatcgctggtggatatcacagtatcagactttatgaaagggaggtacaacctcatgatttatcttggcattgatattgctaaactcaaccatttcgcttctgcaatctcttcagatggcgaaatactcatcgagccgttcaaattcacaaacgactatgatggattctatctactgctttctaaactggcaccactggaccagaacagtatcatcataggtcttgagtcaacggcacactacggtgacaaccttgttcgttttcttatcagcaatgattttaatgtgtgtgttcttaatcctattcagacttcatctatgcgtaagaataatatccgcaaaacgaagactgataaagtcgacacctttattattgctaaaaccctcatgatgcaagactctccaaggttccttaccttagaggatcttgacttcatcgaattgaaagaactcggcagattccgtcaaaagaccgttaagcagcgtacccgtttgaaaatacagctgacttcttatttagatcaggtctttcctgaattgcagtacttctttaaatccggtattcatcagaactctgtctatgctctccttaaggaggctccgacacctaatgcaatcgcttccatgcatatgactcatcttgcaagtctccttaccaagacttctcatggtcatttcaataaagagactgccagaaatttaagagttctcgcacaaaagtctgtcggtatcaacgacagtgccctatctattcagataactcagaccattgcacagattgagttattggatagccagttgttccacacagagcttgaaaaagcaaatctagtcacctgcttacactctgtgatcatgaccattcctggcattggttccactaatggcggaatgatcctcggtgagatcggcgatatccatcgcttttctacacctaataaactagttgcattcgctggacttgatccttctgttcatcagtctggtaattttcaggctcaacggactcgaatgtctaaacggggatcacgcgtgttacgctttgccctcatgaatgcagctcataacgttgtcaaaaacaatcttacattcaaaacttattatgacaagaaacgtgccgaaggccgttcccattacaacgcccttgggcattgtgccggtaaacttgtcagagttatctggaagatgctgactgacaatgtagaatttaatctcaattaaagagatctgtatactaatatcgatagatttgaaaagcacctttagggagctttcttaaagttaccctttttttaccatcgatacaaaaaaagaaattttcacctaatttatacttgacttttcatagctg

SEQ ID NO: 3669 - DNA, 1615 bp, unidentified
  source 1..1615: mol_type = unassigned DNA; note = element_5777705
  misc_feature 1: note = core
  misc_feature 2..276: note = LE
  misc_feature 277..1341: note = CDS
  misc_feature 1342..1615: note = RE
  misc_feature 16..296: note = bridgeRNA
tcctgctacaatgtatttatggttaataccccttacagccagtaaggaattatccatcttgttgcttaagctgttagaatgagtgatgcagatggtctggcagatccctcctggaactttacgtccgtacggaagtcagccaaccagccctcattcgcagcattcgttttacgcaggttgaatccaaagacgttcatgtgatacccagtagattgaacaggcaatgagtaaatctggtattgaccattgctactacatggtaaaggagtatctgttatgaacgctgttggtattgatgtttccaaaggtaagagtaccgtcacaatccgaagaccaggtgatattgtcttgatgcctccccgcgacattccgcatacacagtcttcaatcaatgaactaattgagattatcagaagccttgacggggaaacaaaagtctgcatggagcacactggaaggtactatgaaccggttgccacatggctttccgatgccggtatttttgtcagtgctgtaaacccggttctgatcaaagacttcggggatgattccctgcgcgcgccaaaaactgataaggctgattccaaaaagattgcgcgttatacccttgaccgatgggcaaaactgaagcaatatggaaacatggataaaacacgtaaccagctaaagaacatgaatcggcagttcggcttttatatgtctcagaagactgccatgaagaacaacctcattgccctgctcgaccagacttatccgggtgcgaacggcttctttgacagtcctgcacgcagcgatggcagccagaaatgggtagatttcgtctatacctactggcatgtggactgtgtacgctccaagtcaccggatgcttttacacaacactatcagaattggtgtaaacgcaaaggctataacttcagtgctgataaagcagagaagaactatcagctctcatctgacctgaacgccgtattcccgaaggacgacagcacgaagctgctgatacggcaggctgtggcaatgctgaatactgcttctgaaatagtggaatctctccgtctgaaaatggacgaaactgctgcaacactgcctgaataccctgttgtcatggcaatgaacggtgtcggatcgacccttggtccacaactcatggctgagataggggatgttacacgtttcacacaccgcggagctttgactgccttcgctggtgttgaccctggaaagaacgattccgggcagcgcatccagaaaagcgtcctacaaccaagaaggggtcgccaagcctgcgcaagactatcttccagatcatggatgggcttatcaggcgttccctgttgacgatgccgtttatgctttcatggataaaaagcgaacgcaaggtaagccttactatgtctacatgactgcaggtgcaaacaagttcctccgcatttattacgggcgggttaaagaatatctttccacgctttcagaaaccgaagaatcataaacaaatgtcttctttttttatcaggccggcgctttgcggtggcctttttgtaatactcatttttcaacctgtttaaaattttcaaagttctctaatttctgcttgactttttatttgcagact

SEQ ID NO: 3670 - DNA, 1335 bp, unidentified
  source 1..1335: mol_type = unassigned DNA; note = element_578684c
  misc_feature 1..2: note = core
  misc_feature 3..82: note = LE
  misc_feature 83..1120: note = CDS
  misc_feature 1121..1335: note = RE
  misc_feature 1095..1320: note = bridgeRNA
agataattggactccctcaccccatccaggatgaggtaatataaaagttaccacacaaatatattagagagagagtcctaaaatgcatagtacaagagttggtgttgatttagcaaaagatgttattcaggtttgtgtttataaacgcaaaaaggtgcagtcaaatattgaaatgacaccggaagagttcctttgctggctcaataccaataaaccggtcagtattatttttgaagcatgcagtacctctaattactggaaacaaaaagcaattcaagcaggtcatgatgctcgattgatatctgctaaattagtctcagttgttagacaaaatcaaaaaacagataagaatgatgcgttagcgatagtgcaagccgcgttattgccagatgtcacttttattggtggtaaaacggttgagcagcaacaattgcaatgtataaagcgtctcagagagttagccattaaacatcgtgatgcgtctcaaaatcagatagtcgctttattgtcagaattaaacctgcgcatttcaaagagtagaggtagtattgttcgttctctagaagggatccttgaagatgctagcaacggattaagtttggagtgtagagctgcgatttccaccgcaaaagaacagtttagttcgcttgttgatgccgttaaacgctatgatgactgtttagaaaaaacagcctcaatgcacccagactgcaaaaagctgttaaagcttgaaggagttggtacgctaaacgcaattaatctttatttagcacttggttgtgcagaaattggggcatttagtaaaggcaaagatgcctctgcatgcattggtttaacaccggtgcaacgctcgtcaggtggcgtagtaaaacttggctctattggtaaatttagtcggaatagtgcgctcaggagtcagttagtctgtggagcaatggctgcggtaatacagatagctaaacgagaggctaaaacccaaaaagaggtttggctcaaggcgctcgttgaacgtagaggcaagaagtgtgctgcagttgcattagcaaacaaaacagtgagaacagcatatgctcttcttacacaaggtacagaatataaagcggagttacttactgcttaaaagcattccaacaacaaaagtgcaaatacaaaggtaaaaaccaactggtttagtcagtagccaacgtagagcgttatagctcgctaaacagatttgacaatcagttcgcgtaaatatcaaagagccagagatagcttctcaatgagagctcgtacataagttcgcatttatttctttgtgttgatcattgttgttgacaagagggagtccacata

SEQ ID NO: 3671 - DNA, 1168 bp, unidentified
  source 1..1168: mol_type = unassigned DNA; note = element_578cab9
  misc_feature 1..2: note = core
  misc_feature 3..202: note = LE
  misc_feature 203..1165: note = CDS
  misc_feature 1166..1168: note = RE
  misc_feature 3..178: note = bridgeRNA
cttgtatgtttagacttgaaggggtgggtgggactaaaagcccgattctgactctaaccagtacagaccgtgggagacttcgtcccaccccttctacccaaaagcgccaataaggaattcatcggcaaggccgacgatagagacaagtcagcgcaacggtagaccccaacaagctcttaaaccctagctccgaggattcgtcatgacaatccttacttcgcaaacggtcgtgggtgttgatgtggccaaggctgaggtgctcgtctatcgtgccgatctgcaaaccacacaagccatccccaataatcgaacagcactcaaacgctggctcaagacgctgcccgcccaaagtggcattgccgtcgaggccaccaatatttaccacttggacacggttgagttggcccatgagttgggccatcaggtctacgtcgtggacggttatcgcttgagtcattaccgtcgcggtgtcggccaacgagctaaaaatgatccgtgcgatgctcgtcttctagctcggtatctggcgcacgaacagggtgggttacgcgcttggagcccgccacccaaggcttacaaggccctgcaaagtctgcttcatcgacgggcagcactgatcaaggcgcgcgtcagtctggctcagagctgggccgatgagccgcgcctggaagaggagctgaaatgtctgatggagacgtttaagcactcggatttggctattcaaaaaaagctgcgcgacctgagcaaagaggctggagtcgccgaaaatattgagcgttgcaaggctattgaaggcgtcggagtactgacggcaaccggatttgcgacggcttttttgcgtggcgagtttaaggatagcaatgccttcatcgcttttttgggcatggacttgagggtcaatgactcgggaaaaaagacggggagtcgcagtctgaccaagaaaggggatccggaaatacggcgtctggcccacaactcggccatggctgcctgtcgttcagcgacctggaaaccattttatgaagggtacctggccagaggattcaagaagactcaggccctggtaatccttgcccgaaaactcgcacgggtggcgttcgccctgatgaaaaaccagagcgaataccaaccgaatcggccgttgcagggttgtcctgcaacatagaat

SEQ ID NO: 3672 - DNA, 1397 bp, unidentified
  source 1..1397: mol_type = unassigned DNA; note = element_57917dd
  misc_feature 1..2: note = core
  misc_feature 3..162: note = LE
  misc_feature 163..1158: note = CDS
  misc_feature 1159..1397: note = RE
  misc_feature 1177..1358: note = bridgeRNA
acatggggtaatcgcgggagcgagtcgccctgaccagcacagttatggaagcaggtggctgttccccgataagatggagatacgggctctcgacctgacgccgggcccaagcatcaaacggagaacagccatggaagggaatatatcggcctcgacgtgtcgatgaaagagaccgcggtttccattcgacgttcaggcaagcgcatctggcgcgggaagtgcgcttccgatccgaagctcattgcctcccttatccagaaacgcgcaccatcggtcaaacgtgtggtgttcgagaccggccccttatccgtgtggttctatcatgcgctccacgcagagggattgcccgcgatctgcatcgatgctcgccatgccaaagcagcgctcgacatggccgcgaacaagaccgacgcgaatgatgcggacggtttagcccatcttgcggaggtggggttctttcgtgaagtgcgcgtgaaaggcttcgacagcatgctgacgcgcacgctcgttgcggcacgcactaggctggtcaggatcacgaccgagctctcaaaccagatccggggtgtcatgaagacattcggactgcttgttcccgccggcaaaggaagcacgttcgagaagaatgtccgcaatctccttgtcgcccagaacgggctctctcctatcgtgctgccgatgctggaagcctggcgcagcatgcgcgttcgggccgctgaactcgggcgtcagcttgtcgctggtgcgcgtcaaagccgagcgtgtcagatcctcatgtcgatccccggtgtcggcgcgatcaccgcaacttccttcgtaaccgccattgaggagccggacaacttcaagaaatcccgctccgtcggcgcctggcttggcctgacaacccaacgataccaatcgggaaaggtcgactatgatggccacatatcccgacggggcgatcgtcatttgcgagggcttctctacgaagctgcgacggtcattctgacccgcagttcggctgatagcggcctgcgaacttggggtctaaaactcagggagagggtcggcttcaaacgagccgccgttgccgtagcgcgcaaactggcagcgacaatgcatgcgatgctgaaggccggcgagttcttcgatcggaacgcaggagccacagcatgagattttgcggatcgcgttcaagatctgagcgcctgagacgtccctgccgggacgtgggcagagccattccgcttgatggggtgcaccgctggttcagcagagtgcgtcgtccacatttgaaggctcctcccgcgaggctccatcatgcggcgactgatgtcgaccgcgaagacaaccctgcacccggcacacgcgtctcagaagtgcaagatgcttgacgtcaccaccgcgattagaca

SEQ ID NO: 3673 - DNA, 1419 bp, unidentified
  source 1..1419: mol_type = unassigned DNA; note = element_579d650
  misc_feature 1: note = core
  misc_feature 2..60: note = LE
  misc_feature 61..1116: note = CDS
  misc_feature 1117..1419: note = RE
  misc_feature 1199..1413: note = bridgeRNA
taatgggatggtccgccgcctttggccgaggcaagtataaggatggcaaggagacttctcatggcactgcacagcatcgggattgatttgggcaagaccgtctttcacctcgtagggcttaaccatgcaggagaagtggaggtgcggaagaagttttcgcgtacccagcttcttcgcttcacggccaacgtgcaagttgatctgattgggatggaagcctgcgccggctctcatttcctgggcaaggctcttgtcgagcaggggcatacggtgcgcctgatgccggcgcagtatgtaaaaccgtttgtgaagaccaacaagaacgacttcatcgatgcagaagccatcgccgaagctgtgggccggccaacgatgcgctttgttccgatcaagaccgatgagcagttagatatgcagtccctgcaccgggtgcgggaacgctggatcatgcgacgtacggcagtggtgaaccagatccggggtctactgctggagcggggtatcacggtgcggacgggaagatgccatctggaagcggccttggccgggatcctggaggatgggtcgagctccctgtcgggagcactccgtttcctgctggtcgaactgaagcgggaactggaacagctggccggccacgtcgagcaagctgagacgctgattcagggagccgcacagcagagcgaagcctgccggcgcctggactcgatcccaggcatcggaccgcttacagcgaccgctctgatcgctgccatcggcaacggcggagcctttcgcaagggtcgcgagtttgcagcgtgggtgggattggttccacgccaatactccaccggaggcaaacagaagctgctcggcatcagcaagcgcggtaactgttatctgcgaaagttgttcgttcagggtgcacgtgcggttctgaaatatagagaaaggcagtgcaccggcttgaggcactggctggcagagctgtcatcacgaagccactacaacgtagttggtgtggcgctggccaataagctggcgcgaatggcttgggccgtccttgccagaggcgaagcttatcggccaccggttctggccgacagcttcgctggtctgcagatgccggctgtctagcgacagccttggaaatcgcttcgcgattcccacatccgcaaaccagcgacgactacgagatttagaaccctttagaaccctgccaggtctgctggcgaactatgagatggcacaacggtcgaacccggcgctcctcaaacccgaacccggaagaagtcctcgagactgcgtaactaatggggaacggagcgcagcgcattccatcctggcccggagcctcggctccaacaaaggccgaatacatttgcgcagaccaaaccgtcactctcacttttcgcttgcaacacggcggcggaccataca

SEQ ID NO: 3674 - DNA, 1422 bp, unidentified
  source 1..1422: mol_type = unassigned DNA; note = element_57ae9df
  misc_feature 1..2: note = core
  misc_feature 3..123: note = LE
  misc_feature 124..1143: note = CDS
  misc_feature 1144..1422: note = RE
  misc_feature 1182..1422: note = bridgeRNA
gaatgatatgaacgcccccacccagtcggtccgtgtgagcgatccaccgctatgcggaatttcgaccggattgagaagtggttgatcatactcatctgctcaaccgaacagaggggatctgtcatggcacatatgatcgtgggtgtggacatcgcaatgaatgtaatgcaggttcactgggtggatcccgaaagcggcgaaatcgtgaaccggtccatcaagcgagcggcgtttctcgaatactttgccaatcgcaaaccgtgccttgtcggcatggagtcgtgcagcggatcacagcattgggcccgacggttgatcgaaatggggcatcgggtaaagcttatgccggcgaagttcgtcaaggcgttcaacatccgcaacaagaacgatgcggccgacgcgcgggcaatctggatggccacccagatggattgcagggaagttgccgtaaaaagcgaagcgcagcaggccatccttgcactgcatcgtatgcgtcaacaactggtgaagtttcgcacgatgcaaaccaatagtcttcgcggattgatcagcgagtacggcgaggtgatgggagtagggagggcggcgttggacaaggcaatggtgggagttctggaaagattgtcaggacgcttgcctgcgatactgatcgatacgctgcgagagcaatggaaaggtctggatgacgtggaccgtcagatcggccagatcgagcgccggatgcgggagtggatgaaaggtgatcaggcggtcaaggcaatcgcagcaatcccaggcgtggggctgcttaccgcaacagctgccgtggcaacgatggggcatgccaaagccttcaaatctggccgcgagtttgcggcctggctcggacttgtgccgggacagaccggatcgggcggcacgatcaagctacagggaatcagcaagcgaggtgacacgtatctcagaactctactggttcacggcgcgcggagcatcatctatcgcgcgaaagagccagatctctgggtcgaacagatgaaacagcggcgcccgttgaatgtcgtcatcgtcgcaatggccaacaagcttgcgcgaataatctgggcggtgctggcgcatcaacagccctatcggaaggattacgtcagtacgaggccagcctgatctcaccggtctgctggaaggtttcctgtttcaagggatggaacgtcaaaagttgcggcggcattcgagtgtaatgacaaatcgggcgggacccgggattcaccaaacctgcttttatgtctgagcttcacaagcgcgcgatttgaatgaggcgtgagtcagcggatttcataggggccggcagcgaagcggaagctgcaaagaggccggatgtagagctgcagcccatcctattcgtcaagacctcgaacatctggcgcaaacgggggcgttcatgta

SEQ ID NO: 3675 - DNA, 1513 bp, unidentified
  source 1..1513: mol_type = unassigned DNA; note = element_57b3785
  misc_feature 1..2: note = core
  misc_feature 3..274: note = LE
  misc_feature 275..1492: note = CDS
  misc_feature 1493..1513: note = RE
  misc_feature 7..248: note = bridgeRNA
ctaatgggggtggatcggcgtcctgcaggggatgctggtttgtgtgagccttcccggccggtgaccactccgagaccctgaaacggtgtcggatttctacacgaagaccgtggcccggccgggtaaggatcacccgctagaacgcttctgggatgtcgtgccccctgaaccatgtggggtgagcactgatccattaggccgcgtcaagggtgatcaccccaaggttcacaccgacgatcgatcgagacgaccgaagacgaggtgaacgaccgacatgatctgtgtgggcaacgactgggcgtcggatcatcacgacgtgtgcgtgatggatgaacacggcaccaccctggccacccgccgactacccgagaacgcggccggcgtgacggcgatgcatgacctgctcgcccggttcgcccacgacccgactgaggtggtggtggggatcgaaaccgatcacggcatgtgggtcgccgccctggtcgccgcgggctatcaggtgtatgcgatcaacccgttgtcggtgtcgcggtaccgcgaccgccaccatgtcgggggcaccaaatccgataaggctgacgcgaaaacgctggctgatctggtgcggaccgaccggcacaatcatcgattggtcgccgccgacaccgtcgaggtcaaggcgatcacggtgatggcccgtacgcatcagaatctggtgtgggcgcgctcagcacaacagaacgtgttgcgcgctcaactgggcgcctactatccggccgcggtcgatgccttcggcggcgacctcgcccacaaagactgcctggcggtgttgcgtcgcgctcccaccccacgacagggagcggcactgacggtcgcggcgatccgatcagctctgaaaaagggtggccgccaacgcaataccgatacccgtgcccgcgagatccagcaggccctgcgtgggggcggtcatctgagcgcaccggaggcacttaccgcagcgtatgcggcgaccgtgaccgtgacggtgaacatgctgacgacgctcaacacccaaattgatcaactggaaaccagtatggcccagtcttttagagcgcatccggacgccgagatctacctgtccatgcccggagtcggtgacatcaccggcgcccggatgcttggcgagttcggggacgaccccgaacgctatgccaccgccaagtctcgcagaaactatgccggcacctcaccacggaccatcgcctcaggcaaagggcacgtcgtgctggcccgccatatccgcaacacccgcctcaacgccgccgccatggcgatggcgcaaagcgcgctgaccggcagtcccggcgcccgcgtctactacgacagcctgcgagatcagaagaagtcccacccccaagccttgcgtgcgctcgccaaccggctcatcggcatcctccacggctgcctcaaacaccgcaccctctacaacgaacacaccgcctggaaccaccgcgccaacctcgccgcttgacaccttgcacccctgggatgt

SEQ ID NO: 3676 - DNA, 1459 bp, unidentified
  source 1..1459: mol_type = unassigned DNA; note = element_57b5ea8
  misc_feature 1..2: note = core
  misc_feature 3..224: note = LE
  misc_feature 225..1439: note = CDS
  misc_feature 1440..1459: note = RE
  misc_feature 6..221: note = bridgeRNA
ctaatgggaccggaaagttgatcgtgagagagacttgccaccgagccgctgactggtgagcactgaatgggacagaacgtcgagttctaaacatagatcgtgccccagccagtcggtgaggtcaacggagaaggctgaaggggtgtcgtgccaggagcactgatccattagggcgccgccgttgcctcgaggctcgagttccatcgaccactggaggtgaccacatgatcttcgttggagtggattgggccgaggcccaccacgacatctgcgtcctcgacactgcgggtgaggttcttgctcgcaagaggatccccgacacactcgttggagtgcgagagctgcacgagctgcttagtgagcacgctgacgagccagaacaggtcgtcgttggaattgagaaggaccgaggtctgatcgtgacgtccatgctcggctcgggctatcgcgtcttcgccgtgaaccccctgtcagtcgcccgctaccgcgagcgccacgtgacctcgggctcaaagaacgatgccctcgacgccaaggtgctggccgagctcgtgcgcaccgaccgccagaaccaccgtgaggcagtcagtgactccgaggccgccgacgccaccaaggtattggcgagagcgcaccagagcgccatctggtcgtgtcagcgagaggtcaacgctctccgcaacgccctaaaggactactacccaggagccctattggcctttgggaatagcctcgccgagcgcgacgcggtcgcgattctgtccgtcgctcccacgccctctctcggcgcacagctcagccagtccaagatcatctcggcgttaaagcgcgccggcaggcagcgcaacctggagaagcgggcaaaggagatccaagacgccctgcgcgaagagcaactgcacgaacgcccgaaggtcgaacgtgcttacggggtaatcaccaagtctcacgtggcaatgatccgtgccttcaacaccgagattgaagagctcgagaagtcactcaccgcgggttttagtgagcacccggacgcgaagatcatcctgtctcttccagggctagggatgatcctcggcgcccgggtgttgggcgagttcggggacgccccgaaccgctaccacgacgccaagtctcgcaggaactacgccggcacgtcaccggtgacccggtcatccggcaagagcttggtggtgctttcgcgtcacgcgaggaatcgccgactttccgacgccgcggaccggtgggccttctgctcactcaaacaatcgcccggtgctcgcgcttattacgacaagttacgggcacgcaacaaaactcatcaccaagcccttcgacaactcgcaaaccggtgggtcgggatcctgcacgcgtgccttgactaccaggtcgtctacgacgaggcactcgcctggaagagccgagaagcactaaccgcttgacagatccagtgaaggggtgt

SEQ ID NO: 3677 - DNA, 1173 bp, unidentified
  source 1..1173: mol_type = unassigned DNA; note = element_57c04c2
  misc_feature 1..3: note = core
  misc_feature 4..212: note = LE
  misc_feature 213..1142: note = CDS
  misc_feature 1143..1173: note = RE
  misc_feature 1..173: note = bridgeRNA
gcttgtgtctttagggcagataaaatcagaagtgagagggtggatggcaagctgataatccgcggtgccctggagcacgtgtgggagcctagctgccgtccactcttctcactctggttccaagctcgaacagttgactgagtccaacctcgaacaacaagcgtgagccagaccagagtgacctctcacccttaagcctaggaggtttactcatgactgcctatgccggaattgatgtttccaaggccaccctggaaatcgcgttgtttccaccgtccaacaatttcaccttgcccaactctgccgaggggctggccacggcagtgaatcacctcaaagcttgccaggtcgaacgtgtcctggtcgaagctaccggtggctacgagaaactctcggtaaaactgctggctaatgctggcttcaaggtccagcgcatcaaccccagccgagcccgccactttgcacaagccatgggcaagaaggcgaagactgatccgatcgacgcacaaatgctggccatgttcgcctcggctctggaggaaaagaacctggtcatgcccgatgaggcccgtgagcaactggccgaactggtcaatcagcgagcagtgctcgtccaccagcgcgatgacaaccgccgacgtattcagcaggcacagtcgcctgaggtgctgaacacgtaccaagagctgaacgccatactgcagatgttgatcaacaaggcagacaggcaaattgccgaaaaaacccgccatattgatgcagagctaatggagcgactgcacgcagtcaaaggcattggacctgtgaccatcgccagtttgttctgctatctccccgaactgggcgatctgaaccgggcgcaggtggctgccctggctggagtagcgccctacaacaatgacagcggtgccaaacgtggcaaaagacgtatctatggtggtcgtgccaaagtgcggcgtgcggcttacatgtgtacgctggtgatggtgcgtcataacgaagatttcaaagcacggtatgcccggctgcgtgcggcaggaaagtgcgcgaaggtagccttggtggcctgtatgcgggtgctgctagtacgtctgaacgccatggtgcgcgatggcacaccgtggcgtgaccagcctgtttgaccgctcatcagcaaggagccaaagacagttg

SEQ ID NO: 3678 - DNA, 1436 bp, unidentified
  source 1..1436: mol_type = unassigned DNA; note = element_57c2b4f
  misc_feature 1..2: note = core
  misc_feature 3..41: note = LE
  misc_feature 42..1181: note = CDS
  misc_feature 1182..1436: note = RE
  misc_feature 1189..1434: note = bridgeRNA
agatgagatgaacgccgcccgtcctttggcaggagggcgagatggaagtgaagaaggaggatcccccgtccctacggcatcgatgtgccagagtggagatgttgcgtaaccactcacagaacaggggatccgacatgcaagttacgacgtatggcgtggatttggcaaagcaggtgtttcaggtgcactgggttgagccggatagcggcgaggtgaagcgcaagatgctgacgcggggacagtttagggagttctttgcacgccggtcggcagggcttgtggcgatggaggcgtgcggttcggcgcaccattggggtcgcgcgctgggcgccctagggcatcgggtgcgactgatctcggcgcagtttgtgcgccccttcgtcaagagcaacaagaccgacgcggccgatgcacaggcgatctgggaggcggcacagcggccagagatgcgctttgtagcgctgaagagcgaagctcaacaggccgtgctgggactgcaccgggtgcgagcgcagctggtgaagatgcgcacgatgcaggccaaccaagttcgcggattgctttacgagttcggtgttgtgctaccaaagagctggcgggcactactgaagcaggccggtccgattttgaccgactcaagccgtgatgaggttcccgaactgatccgcggcgagctacaacagcagctacagggattgcgggagctgacccagcgcatcgagcagctggagcggtcgatcggcagctaccgagcgcaggatgagcaatgccggcgcatcgaggcgattcctggggtgggccctttaagctcaactgcggtgttggccagtgtgggcgatgtacggacgtttcgctctggacgcgagtttgcggcctttcttggtctagtgccgcgccaatcgggcaccggcgggcgcatcaagctgttaggcattagcaagaggggcgatccttacttgcgcactctgctgatccatggtgcacgaacggtgctgaaccacgccagccggcccggacgcactttgccgttgtggctgcaggggctgctatcgcgacgaccgaagaacgtggccatcgtcgcgctggcaaacaagattgcacgaacgatctgggcgctgctggcccacgatcgaatatttgatccgaggtggggacagacaatgtctgtccccgtggtttaacttactggaggaacagccaagcgaattgagcgggtgcaaacactcgtgatggcaaaataggtcggaccgtggggaagtaaacctgaatagcttcttggacttcgagtcctttaaggagatgagggcttcctcagcggattttcatcagggccacgtagagccaagctctacttcagtaggccggatataagactgcatccgcaccttgatgcctaacgatcacagcatctgcccaatacgggcggcgttcatata

SEQ ID NO: 3679 - DNA, 1366 bp, unidentified
  source 1..1366: mol_type = unassigned DNA; note = element_57d136d
  misc_feature 1: note = core
  misc_feature 2..82: note = LE
  misc_feature 83..844: note = CDS
  misc_feature 845..1366: note = RE
  misc_feature 1129..1318: note = bridgeRNA
gaatagaagggacttcccctggatatgcacctgattaactcttgtgcaatcatggggtaaacatagcccggagggattcgttatgaccatcactactgtcggtatcgatcttgctaaaaatgtgttcgctgttcatggggttgaccaaaatggcaaaaccgttctggtgaaatccagagtaacccgcgcagctcttcccgggctgattgcaagtttaccgccctgtgttatcgggagggaggcgtgctccggggctcattactgggcaagactgtttctgcaatatggtcatgagccgcgtctgatggccgctaaatttgtatctccataccgcatggccggtaaatcagggaaaaatgatgcagctgatgctcaggctatctgcgaagcggttcgtcgcccacatatgcggtttgttccagttaaggacgagagccagcaggcgatgcagtgtctgcatcgtacccgacagggttttatcgaagagaaaacagcaacatataatcgtcttcgagggttgatatcagaattcggcgtcattgccccacaaagtacagatgctctgcggcacatggtttctgcgcagaagagctctttacctcttcaggttcagcaatgtgtagatgatttactggaacacgttgatcgcattgaagctaacatcactgaatatgaccgaactttgtcccgcatagccaaaacagatcaccgcagtcagcggctgatgaagctaaaaggagttggtcccacaactgcctgtgctctggttgcctgtatcggtaatgcacatgattttaaaaatggacggcaactggcggcctggctggggttgactccatcataatacagtagcggcggaaagtcgaagttaggcatgataacaaaagccggtgattcgtatctgcgaacgcttctggtacagggggctcgttcagtactgattggcgctgagaaaaggactgactcattcagtcgttgggtctgttcactggtcgaacgcagaggatactggcgtgctgttgtggccatcgccgccaaaaatgcaaggctgtgctgggcatcattgcattacggtgatgatttcaggctgtattcagccagctaaagcaggaagaaaccgtatgaccatctgatctgcaactcgttgatgataaagggttagaccccgtgaggtatatctgattattgtacaggatatacgtatccgcttaacgaacaagagcctcacgcgcgtctttcatcagggttcgaatcgatagcgattcattatggccgtttatagtaccgcagtctctcccctttatttttaactgtagtgcagacaaaccataaataccgaccttgactgttcggggaagcccttata

SEQ ID NO: 3680 - DNA, 1648 bp, unidentified
  source 1..1648: mol_type = unassigned DNA; note = element_57d230e
  misc_feature 1..3: note = core
  misc_feature 4..474: note = LE
  misc_feature 475..1554: note = CDS
  misc_feature 1555..1648: note = RE
taatctccattccgccgcctttggctggcggcacaaatagtgatgaaagttttgactacctctacttttctgatagaatagtctccagaagctatcctacaaagcacggtaggaggagtcgtaaaaactttctcgttttagacagcatggtaatcagtgtaagttccgcctttcaagcacaaataagtggttctataagaccgtacactaaaaattgttttaacacttagttaaatgtgtggtggaacagtcaatggcttctttatcttatgatgaaaggagttttttgactatgaaagttatttatcagaactgttgcggcgtcgatgttcacaaatcttttttcgttgcacaattatcaaaacctcttctggagttgaaccttcctatcaaaagaagcgcttctccgcctttaacaattcaattctgcaattcaaagaatggttgattgaaaatcaatgccttgatatctgcatggaatctactggtaaatattgggtccctgtgtttaaccttctggaagacgatatcaatgtcaccatcgccaaccccaaatgggttaaggctgtgaaaggaaacaaggatgataccaaagattctaaatggattggggatttatttcgattaggactggttcctggcagctttattccctgtaaagcaattcgtattctaagggaatacaccagataccgctataagctgacttcttgtaaatcaagcgagaagaatcgttatcagaatgcgcttactgtctgtaatgtcgcattggattctgttgtttccgatgtctttgggaaatcagctacatctattattgattacctaatcgagcaatccgaaaattccatcaaccacgaagaaatatcttccagactgcttcgttcgttaaagaagaagtctgacagtgtcattgattccatcgaaggttaccagatgactgattcccaaaaagaccggatgcgcctcgtccgcgcacatatggatgatatcacatccaccatcaatgatatagacacaatgattgattccttggttgctccttatgaaaatgctgtccagttactgtgtaccattccaggtgtcaaacgtaatagtgcgatcactattatctctgaaattggtactgatatgacccgattttcttccacaaaacgtttatgctgctggactggattgactcctggcagcaacgaatcagctggtaagaagaaatccgttcggatcacacgtgccggagtctacctaaaacctgcattagtacagtgtgcccacgcagccgtaacatccgaaaagtctccttactacaaacaaaagtatgagcgtattatgaaacgccgcggcaagaaaagagccattattgcaatcgctcgaatgatcctcactgccatttatcagatgctatcaaatggcgaggaatggaatccgatcgatttatacaaaattgatatgccggagcctctcaaagaaaagcaaagagctaaggcaatcaaacaagcgttgaaacttcttaaaagcgaaggaataattcccgagtcgctggaagcttcgtaatttcaaatctaactttactctttttcaaaagctaccttctggatagcttgtttaagtgcgccactttttggctgacatctactttctttcacac

SEQ ID NO: 3681 - DNA, 1389 bp, unidentified
  source 1..1389: mol_type = unassigned DNA; note = element_57d8f28
  misc_feature 1..2: note = core
  misc_feature 3..77: note = LE
  misc_feature 78..1124: note = CDS
  misc_feature 1125..1389: note = RE
  misc_feature 1126..1376: note = bridgeRNA
tgttggggtggacggcccccgatcggcatctgtgtgccaagatgaggttgtcgaaacaccatctgaggaggccgtccatggatcaggttatacgcattgggttggatacgtcgaagcgtctttttcaactgcacggggtcgacgcggcggagcgagtggtgctgaagcgcaagctgagccggtcggcgatggaggcgttcttcgcccgtcttccgccgacgttggtggtcctggaggcgtgcggggcctcgcatcactgggccagggtgctgacggcgatgggtcacgatgtgcggctgatcgcgccgcagctcgccaagccctatgtgaagcgtggcaagaacgacgcggccgatgcggaggccttgtgcgaggcggccgggcggccgagcatgcgcttcgtgccgatgaagagcgccgggcagcaggccgacctgatgttggccgggatgcgggaacggctggggcggcggcggacgcagctcgccaacacgatccggggctatggggccgagttcggccatgtgggagccaaaggcgccgcgcatgtgcgcccgctcctggagacggtgcaggacgatccggagatcccgcccctggcccgagagatgttcgccgagctcgccctcgaactcgccgagctcgaagagcgcctttgtgccatcgaggtgcggctgaaggcctggcatcttgcgaacgaggcctcgcgccggctggccgaggtgccggggatcggcccgatcatcgccaccacgctcgtgatgaagacgccccatcccgaagccttccggtcggggcgggatttcgcggcctggatcggactgacgccgaaggaccactcgaccgccggcaaaacccgcctcggccggatcacgcgggccggcgacgagaccttgcgcagcctcctcgtggtcggcgcgacggcggtcgtctggcaggtgcggcgcggcaaggcccggcggccgatgccctggctcacgagcctgctcgcccgcaagccacccaagctcgccgcgatcgcactcgccaacaagctcgcccgcatcgcctgggccctcctggcgaggggcggacgctatcgcacgagcgacgcgcggccagaggcctgcccggccgctgcctgaccgagatcccggcgcggacaccaacctccgccgcgccggcgagccgagcttgcaagacaaggagcagatggtgggatcggtcgatcctcgacgagggcgatgccgcgcaatccagtggccgtcacaggtcgctatcctgtttggctccctcgccgcggaaaccatcttggccagcggaaaccccgcacaaacaggccggacacatgaccgcaagcgaccagaccaaccacagcttccatcttgcaaataaggggccgtccacaca

SEQ ID NO: 3682 - DNA, 1388 bp, unidentified
  source 1..1388: mol_type = unassigned DNA; note = element_57d93df
  misc_feature 1..2: note = core
  misc_feature 3..87: note = LE
  misc_feature 88..1116: note = CDS
  misc_feature 1117..1388: note = RE
  misc_feature 1090..1373: note = bridgeRNA
gatggggtggatgccagccttctccgacggcatcgcaatgtgccaagtttgtggtgttagcgccacgcaaaggagaggcaggcatccatggaaaaggttaccatcattggggtcgatctggcaaagaacgtctttcagctgcacggggcggcagctgatggatcggttgtgttccgcaagaagctgtcgcgcctgcagttttgcaagttcatggcgagtcaaccggcatgtgtcgtggcgatggaagcgtgcggcagctcccactactgggcccgtcagatggctcggcttggccatgagccaagactgattgccccggcctatgtcaaaccgttcgtcaagcggcagaagaacgacgtcgcagatgcggaggcgatcgtcgaagcagcgcaacgaccgacaatgcgctttgtcgaaccgaagaccaaggagcagcagtcccgggccatcgtgtttcgcaccagagagcagttcgtgaatcagagaaccgaattggtgaatgcgctgcgcgcgcacctctatgagttcggttatgttgctccgcaaggcatcggccacctgccacgtctggcagagatcgtcgaggacgagagcgcagacctgccggatctagtccgtgacatctgcagcgctctccttgaccagatcgaccagttgagcagccggctcgcggcattgaagaagacgatcgacacgctgtccaagcaagctgcaacatctcggcgcttgcaaaccatgcccggtgtcggccctatcgctgcccttgccattgaaacctttgcgccaccgatggaagcctttaagtgcggtcgcgatttcgccgcctggctcgggctggtccctcggcagaagtcgagcggcggcaagcaacgactagggaaggtatcgaagatgggccagcgcgatattcggcggttgctcatcatcggcgccatggccgtggttcgatgggcatctcggaggcgcgcacccgacggttcctggcttgcccgcttgatgttgaagaaaccgcgcatgctggtggcaatcgcgctggccaacaagatggcgcgtggcatctgggccatgctgacgaaacaggaggactaccgagatccggcgacggtgcttgcgtgatttgcaacaacgcacctgagaccgggacgtcggggatgtgaggaaggcatgaactgcatgggcaaatgatcgatcagatcggggtcaggaaaaccagagtcaagttgagagcccacgcaagctcgctttgctgatttggacctgatccgcgcatcaccataccggcccgcggcatatggaacggccgcaaattaaggcctgacacatgaccgcactcgatcacatgtccatacttcaggttcttccttgcaaaacggctggcatccacacag

SEQ ID NO: 3683 - DNA, 1615 bp, unidentified
  source 1..1615: mol_type = unassigned DNA; note = element_57e341a
  misc_feature 1..2: note = core
  misc_feature 3..240: note = LE
  misc_feature 241..1281: note = CDS
  misc_feature 1282..1615: note = RE
  misc_feature 14..302: note = bridgeRNA
ctactacaatagttttatggttatagtacatgacaaccagccgtgtctatacccatcttgttgcttaactgttagaatgaatggagcagtgggtctggcggctaaattcttggacttcgcgtccgtaaattagaatgtcagccggctcctcattcgcagtattcgttttatgcaggttgatctgctttcctacagtacgttcgagtcacaccacagtagattgaataagcaatgagagaaatggtattgatccattgtattaatccaaaggagaattattttatgaacgcagtaggtattgatgtttctaaaagcaaaagtgttatcgctatccttcgcccttatggggagattgtttctccgccatttgaaatcaaacacatttccggtaacatccaatctttgattgagcagattaaatctatcgacggtgaatcccgcatcgttatggagcatactggtcgctattacgagccattggctcatgagctttctcaggcaaatctttttgtaagtgacataaatccaaaactcattaaagatttcggagataattctctccgtaaagttaaatcagataaagcggatgctataaaaattgctcgctatgctcttgacagttggactgatctaaaacagtatggtcttatggataaaatacgaaatcagttaaaaactatgaaccgacaattcactttctacacaaaacataaaacatctatgaaaaacaaccttatcggtatcctggatcagacctacacaggtgcaaatacctactttgatagcatcgcccgcaatgacggtagtcagaaatgggttgatttcgctgctacatactggcacgtggactgtgtccgcaaaatgtctttaaatgcttttttagaccattatcaaaaatggtgtaaacgaaagaagtataacttcagcaaagccaaagctgaaaaaatctatggaacagccaaagagcttatccctgtacttccaaagaatgatttgacaaaacttcttatcaaacaggccatagaacaattaaatattgtatccaagactgtagaagaactccgatctctgatgaatgaaactgcatctaaactgcccgaatatcctgttgttatggcaaagaaaggcgttggcaaatccctaggccctcaattgatggctgaaatcggagatgtaacacgcttcacccacaaaggtgccatcactgctttcgcaggtgttgatcccggtatgaatcaatccggaacatatgatcaaaaaagtattcatgcttcaaaatgaggctcagcaacattacgtaagatattatttcaggttatgaatattcttcttaaatccatgcctcaagatgatgccgtttatcagttccttgataagaagcgtgcccaaggtaagccctattatgtctatatgactgccggtgctaataagtttttgcgtatctactatggccgtgtaaaagagtatttaacggtcttacgtaatccagaataatcacaaccattttggtattccatggaccagcgtaatgcggtggtctttttgtgatgtcaaaaaacactacataaaactttaataaatattctttcttttctattgactttttatttgcagg

SEQ ID NO: 3684 - DNA, 1319 bp, unidentified
  source 1..1319: mol_type = unassigned DNA; note = element_57e4153
  misc_feature 1: note = core
  misc_feature 2..68: note = LE
  misc_feature 69..1085: note = CDS
  misc_feature 1086..1319: note = RE
  misc_feature 1087..1313: note = bridgeRNA
taattagatggtacgccccacacctaaactaaactcagctatgtcgctgaacttcgggaggtgccatcatgtcgactatcaaaactatcggtgtagatctcggtaaatctacttttcatgttgttggtcatgattattctggtcgacagctttatcgacacaagttttcaagggcgaaacttcttcaatttgtatcaacccatgctcctgtagtaatagctatggaagcttgttgcggagcgcattggcttgcgaggcgatgccaggagtatggacaccaagttaagctaattccaccacaatatgtaaagccttatgtgaagagtcataaaaacgacttcattgatgcagatgcaattgccgaggctgcaactcgccctaggatgaggtttgtctccccaaaaacggaacatgcacaattgggagtggtgatccgcagaattaggactggatatattagagagcgcacagcaactatgaaccgtattggctctatcctcacggagtttggttttagctttccacgtggtcacgctaatatgaaacggcttttccaatggctagctgatacaaggcaagtagttcaccctttacttgtttttgagcttcgtaatcaactcgaccattacaatgagctgaatgacaaaatcaaagagcaagataagaaactcgagactctaaatggtgaaaatgaactattttccctcttgcaaacggtgcctggtgttggacctatgaccgctgcttgttgtctatcctcagtagccgaccctaaagatttccctaatggacgtaatttcgctgcttggctggggttagttccatttcaatattcgacaggcggtaagccaaggatgcttgggatatccaaacgagggaacaaagaactccgtgaactctttatacacgcagccagagcggtgatgtggagagatcaaacagcggaaaggtattttggtaaatggctgatagatctaaagtgtaggaaacctttcaatgttgctttagtagctctggctaataagcttgctaggattgcttggtctgttatggcaacgaaaaagccatttgaaatcagagtataaatcaagtttgcatatgaaaacgaaagatgacaaaacggttagaccaccagattgaagaccttgtggacaaaacagcaacttagagtgctttctcgcttttgaggacaatctggcgcggatctcatcgtagagctggggcttaagaagcaaagtctcaattagactctgaatacattagcgcaaaccaactccgttattttgggttttcacttgcaaaacggggcgtaccataca

SEQ ID NO: 3685 - DNA, 1291 bp, unidentified
  source 1..1291: mol_type = unassigned DNA; note = element_57e7a6e
  misc_feature 1..2: note = core
  misc_feature 3..188: note = LE
  misc_feature 189..1187: note = CDS
  misc_feature 1188..1291: note = RE
  misc_feature 32..201: note = bridgeRNA
cttgtgtccagaaaatctgacaagatgtgcaaacgggcggttctcgcaaaaccgcccgtcgctggatctgagcccgttcgtgctcaaaggccttgagcctgtcggggagcgagggacagatccggtgatcttcctcaacccgaacagttgcatgggcttcgagcccggacgagcaaggaagggactggatgatggcacaaaacgatctggttgtcgccggcatcgacgtggccaaagacaaggtggatgtgtgcattcgctcattgtggcaaagacaggcgttcccgagcagcccagaaggccggcgagcgctgatccgctggcttcgcaagcaaaaagtcggcaaggcagccatggaggcttccggcggctatgaacgggagtgggccaaggcgctacgcgaggctggtatcgaagccctggtggtggatccgaagcgggtgcgcaacttcgccagatcggccggacggcttgccaagaatgatccgattgatgcgcagatgattgcttggttcgccgagaccttcatcgagtcaaggggccaagcctacgatgcggcacgtgagaagctggtccagatcgtgagtgcgcgccaagctctgatcgacgtacagacgagcttgcaaaacagaagggagcattccacacctgacgtcgtggagaagatgcaggatcgcctgctgaaacagatcgccgccgagattgccaagctggaggcagcgatcgcagccctgatcaagaccacaccgcgttttgccgagctcgccgagatcatcgagagcgtaccgggtcttgcccagggcacgtccgccggactgatcggggcgatgccggaactcggccagatcagcagtaaagttgctgccgccttactgggtgctgcaccttacgatgacgacagcggcaaacgtcggggcacgcgccatatccagggcgggcgccgcaaagtccgcaatgtcttttacatggcttgcatgggagccgcgacacggcacaaccctgtgctcaaggcgttctacgatcgcctgatcgccaaaggcaaagaaccgaaggttgcgctcacagcctgcatgcgcaagctgatcgtgatcctcaacgtcatgatcgcgcgtggtgagaaatgggaccccaaccggtaccaagcaagcgactccgctcggcttctgccgagcgcatgcacagcctgaagaccggtgagcgggcggggtcaaggccgtcagccgccggaggcggtggcgcgcaagcgccagccttgaggccggccgatcgccgggctacttcaacacagttg

SEQ ID NO: 3686 - DNA, 1509 bp, unidentified
  source 1..1509: mol_type = unassigned DNA; note = element_57ea283
  misc_feature 1..4: note = core
  misc_feature 5..242: note = LE
  misc_feature 243..1493: note = CDS
  misc_feature 1494..1509: note = RE
gtcactagggcaccatgtttctcgtgggcaccgctacggtgctcgttgcagggactcggcgggagccggggtgacggcctagtccggtcgcccgtgaagggccggcatgacactgccgcccccggctttcgccggggctggagactggcagcagagggatgcgccgcagagcgccggttagtggccgcccgggagtcagcctcgccgccgccgggtcgtcgctgccaccgtgaggagtcgagttgccgcttgcgctgcctgaggcattgttctttaccgggatcgactgggccgccgtcacccatgccgtgtgcgtgatggacgcggccggcaagatcaccgctgagttcacgatcgggcactctgcggacgggatcgccacgctgatccgccgcctggcccgccacggcgatccggccggtatgccggtcgggatcgagcggccgaacgggcagctggctgacctgctgctggaggccgggcacccggtggtgccggtcagcccgaacgcgatcaggacctggcgggagggtgaggtgctgtccggggccaggcctgacgccggggacgccgcggtgatcgccgggtacctgcggctgcgctgccaccggctgcgggccgccgccccctactctgatgagacgaaggcggtgcgcgccgtcgtgcgcgcccgcgacgacctcgtggcgatgcgggtcgcggccaccagccagctcccggcgctgccggaggcgcactggcccggcgcaaaggccatcttcgccgacgtcggatcgccggtcagcctggcattcctcacccactacccgaccccggccgcagcccggcacctcggcgagaagcgcatcgccgcgttctgcgccagccacggctactccggcaggcggccagccgccgggctgctcgcgcggctgcgttccgccccggccggggcggccggcgaggccctcacccggtcgctgcgggacaccgtcctcgctctcgccggcgtgctgacggcactgaacgccgcgatcagggacctcagccggtcctgtgccgcccgacttgaggagcacccggacgggaagatcttcacgtcgctgccaaggccgggtcaggtcagcgccgcccagatgctcgccgagcggggcgactgccgtcaagcctgcgacggaccggacgctgtcgccgccctcgccgggtgcaccccggtcacccgccagtctggcaagcaccgggccgtgcagttccgatgggcctgcaacaagcgcttccgcaaggccatcaccaccttcgccgacaacagccggcacgccagcccctgggccgcgagaatctacaacgacgtccgcgccagcggcaaggaccacccgcacgccatccgcgttctcgcccgcgcctggatccgcgtcatctggccctgctggatcaacggcgtgccttacaacccagccagacacggtgccgcagcaacgctcgccaaacaggcaaccgaacaaattgccgcgtgaggttgacacagggggt

SEQ ID NO: 3687 - DNA, 1423 bp, unidentified
  source 1..1423: mol_type = unassigned DNA; note = element_57f0c59
  misc_feature 1: note = core
  misc_feature 2..78: note = LE
  misc_feature 79..990: note = CDS
  misc_feature 991..1423: note = RE
  misc_feature 1187..1414: note = bridgeRNA
taatgggatggtccggccgtgctcccgccccagcagcaagtgatgcttatgcggggcaccaaagacaaggagcacgccatggcagaagctctcaggatcgccttcgtcggcattgacatcggcaaaaactcgttccacgtcgtaggcctagatggacgcggcgccatcgtgctgcggcagaagtggtcgcgcggccaggtagaagctcggttcgcgaatataccgccttgtctgatcgggatggaggcctgcgtgggggcgcatcatcttagccgcaggctccagaggctcggccacgatgcccggttgatgccggcgcggtacgttcggccctattcgaagggacagaagaacgacttccgcgacgcggaggccattgcggaggcggtgcaacgcccgacgatgaagttcgtcgcgaccaagaccgccgaccagctcgacctgcaggggttgcaccgcgtaagggagcggctggtgagccagcgcaccggcatcatcaaccagatccgcgcctttctgctggaacgtggtgttgctgttcggcaaggattgcgcttcttgcgtgccgagttgccggacattctcgctgcgccctctgacgccctgtcgccacgcatggtgcgcatcattgaagatctggcaggagactggcgccggctcgacgagcgcgtcgagcgtttgtcgaaagagatcgaagccattgcgcgccgggacgcaggttgcgagcggctgatcagcgtacccggtatcgggcccatcatctccagcgcggtggtagcggcgatcggcgcaggcgatgtgttctccaagggccgcgacttcgccgcctggctgggcctggttcccaggcaaatctcgaccggcgaccgcaccatcctcggcaagatatcgaaacgcggcaaccgctacctacgggttcgtgcaggccgcgtgggtggtgctgatcaagccgaagagctgggagcgtcacgggctcaagtcctggattgaagccgcacggaagcggctgcaccgcaacgtgctcgcgattgcgctggccaacaaactggcccgcatcgcctggagcgttcttgcgcacggacgaagcttcgaggcgagcaaactcgccgcggcctccacctaatccgcctgatcgccaaaagcattgaaaggacaagcgatgacgtaatcccaaaccctacccgttacccgccgaggtctgcgagaggatacgaagagatggaggatcggtcttcccggcgcatgcgaacactggtgacccaactggcccattgaggtctgtccgacaatgagaccgcacgcgcgctgatatccatgatggtccggagcaaaacagctccaagcagagaccggatacattgatgcaagaccgctgaatgccagctcgacgaaaacctcttgcaacgcacggccggaccataca

SEQ ID NO: 3688 - DNA, 1811 bp, unidentified
  source 1..1811: mol_type = unassigned DNA; note = element_57f7216
  misc_feature 1..2: note = core
  misc_feature 3..372: note = LE
  misc_feature 373..1665: note = CDS
  misc_feature 1666..1811: note = RE
  misc_feature 127..310: note = bridgeRNA
ctggtatgatgtagtcatagaccaatagcagtcttctacatcattatttaatctatatcaaggttggtaggaggattctcctctgatttcattccaaccaaagatacgtgtataagttacatgtttttagtataattattcactcctagacttcgtctgttacataaggtattatattccattgaatagggaaaaggacgttcgcctcctagggagctggcttatgtccagcaatacccgtaactttagacagtcattccatcaatgaaaatttatgttttaggctggttgggagcaattaagctatacccgtatcacgtgccaggtagtgtattcattgtttttatggaaccctatcggaaggagcttacaatgtacaacaaaaactatatttccgtcggtatcgatgtcggttctgcctttagtttcatgaccatcgttgcacctgacggctctgtaatccaaaaaccttttaaaattacacacaataaaccggattctctggaaaaggccgtttctgccataaaaaaagcagaagagctacattccttagaaagtcgcacctttctggaatccactgggatctatcacttcccgctcttctgctaccttgttgattgtggttttcacgtctccataatcaatcctattattacacattctgcgaataatacaagtatcagaaaagtaaaaaatgataaagttgattccattggtattgcaaagctgggattatccggtgatatccctgtatctcaattcccagcaaagctggtccttgagattcgatcccttacacgcaagtattatgatctgaccgatgaacggtctgctcacatcaacaaacttaagggcgatctgcataccgtttttccacagtatctggacatcttttgtgatgtcactggcaaaacatctaccatgattctccgtcagtatggtactccggataaaatactccgtggtcataaaaagaccatgattgaaaaaatatcaaaagcctcaagaaaaggactttcaaaagctgccgagcgctatgaaaagctctgtgccgccgcaacagccgcaaaaactttcggatgccagattgatagtatctatttcaacatctctctgactcttgaccttatcgagaagcttgactctgccttggattctattttgcagcggatccatcagctggtaacgttcaataaatccgaaaagtttatccagcagattaaatggcttgataccattaaaggggttggatttcttactgctgtgaccatcatgtgcgaaatcggtgatttttcagcattccgcaatccaaaacagttattcgcttacttcggacttgatccggaagtaaatcagtctggtaagttcgttggcactgaaatgcatatgaccaaacgaggctccagaatcgcccgccgcgctgtcttcgcagtagcactggcatccatacgcactaaacgcaatggagaaggcattaacccatatcttcgtgaatactatgagaagaaatccgggcaaaaaccaaagatggtagctcttggtgcagtaatgcacaaagtgtgcaacatcatctttgctgttcttcgtgatgagaaagaattcgaattacggtctcccgaagaacactgcaggcagtatcaacgtcctgctttacaggctgcataaacattcatcctgtgctgtatataaccatcaacaaagcgaaaatccaaaggatttacgtttattaaagttactcatttttaggtttcaataatcaatagaaaaagttctattttttatcatttagggcttgactataactagctggt

SEQ ID NO: 3689 - DNA, 1499 bp, unidentified
  source 1..1499: mol_type = unassigned DNA; note = element_57fd237
  misc_feature 1..2: note = core
  misc_feature 3..243: note = LE
  misc_feature 244..1479: note = CDS
  misc_feature 1480..1499: note = RE
  misc_feature 15..236: note = bridgeRNA
ctaataagagttaacgggtccgccgtacagcagactcggagtgtggtggcctccggcaggtgagcactgtttcctcccgggcttcgagccctgctgaaagactgtgcccctgccggtgaccgggagagttgatcgctgctgggatgtcgtgcccgcctgctggcgtgagcactgtgttattaggtcgctgatggttctcccgctggctgctgacggaattcgacatcgttgacgggagcgccggtgcggttgttcgtgggtgatgactgggctgaggaccatcacgacgtggaggtgatggacgaggcggggaaggtgctggcgaagaggaggctgcccgagggcgtggccgggatgacccggctgcatgagctgaccggccggttcgtgcccgaggatgccgcggatgcggaggtggtgatcgggatcgagaccgaccgcggcccgtgggtcgcggcgctgatcgccgcaggttacacggtgtatccggtgaatccgctgcaggcctcccggtaccgggagcggcacggggtatccggcgccaagagcgacggcggggacgcgcacatgctcgcggacatggtgcgcaccgactcccaccagctgcgcccagccgccggggacagcccggcagccggggcgatcaaggtggtggcgcgcacccataagacgctgatctgggaccgcacccgggcggtgcagcggctgcggcaccagctgcgcgagtacttcccggccgcgctggaggcattcgaggacctggacgcccccgacgtgctggagctgctgggcaaggccccggagcctgcccgcgcggcgaagctgacccgcgcccagatcagcgcggcgctcaagcgcgcccgccgccggaacatcaaggacaagaccgatgtgatcctggccgcgctgcgcggcgagcacctcggcctgcccgccacgctgaccgcggcctacgccgccaccgcccggtcgctgatcgccgtcatcaccaccctgaacgagcaggtcaagatcctcgaagagcaggtgagggagttttttggccggcacccggacgctgagatctaccagtcccagcccggcctggcggccatcctcggcgcccgggtgctcggcgagttcggcgacgacaccggccggtacgccgacgcgaaggcccgcaagaactacggcggcaccagcccgatcacccgcgcctcgggcaagaagaaggtcgtcgccgcccggttcattcacaacgaccggctcatcgacgcgctcatggcctgggcgttcgcgtcgctgaacgcctcgcccggcgcccgcgcgttctacgaccagcagcgcgccaaaggactcgaacacaacgacgcactgcggcggctcgccaaccggctggtcggcatcctgcacggctgcctgaagacccgcacccgctacgacgaggccaccgcatggggacaccgggaaaacctccctcaatcttccatcgcggcttgacatttaagctcctgggatgt

SEQ ID NO: 3690 - DNA, 1565 bp, unidentified
  source 1..1565: mol_type = unassigned DNA; note = element_57fd394
  misc_feature 1..2: note = core
  misc_feature 3..77: note = LE
  misc_feature 78..1184: note = CDS
  misc_feature 1185..1565: note = RE
  misc_feature 1297..1552: note = bridgeRNA
tgttggggtggacggcccccgacggcatcgatgtgccagaatgaggtcggtaaagatctcagacaagggagccgtccatgaatgatattatccgaattggtgtggacacgtccaagagtgttttccagctgcatggggtggatgcagccgagcggccggtactgcgcaagaagctgcgccggcggaacttcctgagctttttcgcgcagctgccgccgacccaggtgggcttggaagcatgcggcgggtcgcactactgggcccgcgaactgacggcgctggggcacgagccgaagctgctgccagcgcagcacgtgaggccgtatgttcagcgcaacaagaacgaccagagagattccgatgcggtctgcgaggcaatgagccggccgcgcatgagcttcgtgaggatcaagagtgcgcaagagcaagcggcgcaaatgttgatgacgacgcgccagcggctgatcgactatcgcacgcagctcatcaacaccatccgcggccacgcggccgagttcgggctgacggccgccaaagggcctgcccatgtcgagccgctgctggcgcgtattgccgaagacggaacagtgcccgcgcttgccaaagagctgttcgccatccacggcgacgagtacggccggctgaaggtcgagctgcgtgagatcgaggcgaaactgaaggtctggcaccggcagaacgagatgagccggcggcttgccgaggtcgatgccatcggcccgatcggcggctgtttgctggcgatcaaagcacccgacccgcatgccttcggctgcggtcgcgacttcgcggcctggatggggttgactccgaaggatcattccaccgccggcaagatgcggctcggcgtcattacccgcgccggcgacgaggccttgcgccgcaccctggtggtgggcgccacctcggtcatccagcaggtcaacaagggcaaggctcatccctcgccctggctgcgcgatctggtggcgcgcaagccaccgaaactcgccgccgtggcgctcgccaacaaggtcgcgcgcatcgcctggaaactgatggtcagcggtgaacgctacgacccggcacgggccggcatcgtctccccgaggccaagggtagcgccgtgctcgccccgtcaaggccgctgcgcgccgcctgcggcggtggccttcggccagccgtgacgacgcttgcgcgcggcgctcgaaagctagccgccgtcggtgaaacgaaacctccggggcctcgccccaaaccacaaggtgatcacatgaccccacacccgacccgcagatcatcaacttcggcatgaggcccaagcctcacgccgcaggccgaagcttgctcgagaacggaagatggacctgatcgatcgatcacagtcacgaggcgacactccgtgggacccattggtgcaagacaccgccactatgtttggagctcgtgctgtggaccccatcttggcagcggtcgtgtgcgaccgcatcatcagaccggacatatggccgcaatcgcttcgatcaaaacctcatcccgcctcttgccagcagggggccgtccacata

SEQ ID NO: 3691 - DNA, 1461 bp, unidentified
  source 1..1461: mol_type = unassigned DNA; note = element_57fe71d
  misc_feature 1..2: note = core
  misc_feature 3..237: note = LE
  misc_feature 238..1275: note = CDS
  misc_feature 1276..1461: note = RE
  misc_feature 17..183: note = bridgeRNA
cttgtatgttgcgttcagaggcgtgaggatgatttcacgtttcggcggtcaggccgtccgtcccttaggccaacgcgagttgagcctgtcctgtagatcggccaccgcccctctgattgcacgccgtggagaatcgaaggccttttgagcctgcatgttcaaggtcggcgcaagcagtacgtccgttctggcggacaggggcggcagccgagaccatcctagcccggaaggtggtctatgaacaagctcgttcctactactcaggccacggcttattgtggcatcgacgtgagcgcccgttctctggcagtggctctgatccaggtggatcatactgtcactcatcgggagtttgccaacagcgccagtggtcatagggcgcttctaacctggctggcgaggtgcgacaccagggtgagagtttcgctggaggccaccggcatttactctctggatctggcgttggcgctggatgcggctgggacggtggaactggcggtgttgaacccgaagctggtgaaccgttttgcgcagacgcttcgccgctcgaagaccgatgccgccgacgcagtggtcttggccgagtacagccagcggatgccgttcagccgctggcagcggcccgcggccagccatctcgggctgcgaaccatgagccgttatatcgagtcgctggtggtggagcaggctgggttgaagaaccgtttgcgcagcgcggagagcacggcgacgactccgcgggcggtgctggccgacctgcggcgggccctggctgcggttgagcggcgtgtggagagaatgcgcggcgaggctctcaatctggtggagactgaggtggagttgcgggagcgttaccaactgctgaccacggtgccaggcatcgcctcggtgagtgcgcttcggatcctcagtgagctggttttgctggcgccggggatgacggtgcgccagtgggtggcatcgagcggcctggacccggtgcatcaacagtctggtacgagcctgcacaagccgtcgcggatcagccgcgccggcaaccggcacctgcgagccgcgctgtacatgtcggccttgtcagcatcccgctacgacccgcatctggcagccttctaccgagcgctacgcgcccggcacaaaaccggactccaggcgctgatggcggtggctcgcaaactgctgcacgccatctatggcatcttcaaaagcggcacgccctacgatggccgacggctgtttccaaatatccaggcagaggtagaattaatcgccgggtgaaacggaagcgggctctgctgggaagcaaccatgccgagggatagcttggcgggctcatcctgacgatgaaccaacgggcgggcggcaagcgctcgcccgtgctcgagaatcatcggagggatagaccccgatgccttgaaaatccaatgcctccccgccgaaaatgcttgacttccaacagagaat

SEQ ID NO: 3692 - DNA, 1638 bp, unidentified
  source 1..1638: mol_type = unassigned DNA; note = element_580294d
  misc_feature 1: note = core
  misc_feature 2..270: note = LE
  misc_feature 271..1491: note = CDS
  misc_feature 1492..1638: note = RE
  misc_feature 33..243: note = bridgeRNA
cctcatatattgttcttgccacttctcgcgcagtggccgcgctcttttcttgtacacgcgaatatgagataagggatgcgcatggggcggagggcgcttgccgcacccccaaggggttcggctctttaaaaaaggctggcgcctccggcccgcaggtggacgcgaattcggcaggatggcccccggggccgtatatccaatgaggttgcgcctgcggttgccagaggaaggcctctgcctcacggttaagcgagagaccggagggacgcaatgatctacatcggaatcgacatcgtcaagaggggccacgtcgccagcgccgttggcgaagacggaaaggccgtcgtcgaatcgttcaggttcaacaacactgccggcggcttctccaagttcctcgccaagctcaagaaggccggcgcggacgccgaacgcagcctgatcggcatggaggccacggggcactactggatcgcgctgttcgacttcctcggcgcgcacggctacgacgccgccgtgatcaacccgatccagacggacgccttccgcgacgtgtggacggtccgcaaggtcaagaccgacgcgatagacgcggcgatgatcgccgacctcgtgcgctacaagcggtacagcccgtcggccctaggagacgaggccaccgaagagcttcgcagcttggctcgctacaggatgtcgctcgtcgaccgctcaacggcgctcaagaacagggctacggccgtgctcgaccgcgtgttccccgagctcgcgggcctgttcggcgatgcctactgtccgacgcaccgggagcttctgcagcactgcgccacgcccgaccaggtgctcgcgaccgacgtgcggacgctcgcgagaatcctgagagaggcatcgcggggaaaatgcggccgcgagaaggccgaggagctgaaaaaggcggccaaggagtccgtcggcgtcagcttcggctcgagagccctcgccctagaggtcaggctcctcatggaagagctcgacttcgtgaaggaccagatcaaggaggtcgaggccgagctcgcggttctgctggacagaaccagcggcaaatggctgctcacgattcccggcatcgacgtcgccctcgcctcggtcatcgcgggcgagatcggcgaccccgaccgcttcgacggcccgcacaagctcatgggctatgcggggatggaccccacgaggagcgagtcgggcgacaccgtgtcatccgacggccacatgtcgaagcgcgggccggggaccctgaggtgggccctcatgatggctgccgactgcgccaggaagcgcgatccctacttcggggactactacagcgccaaaaagggaacgggcaagaagcaccactacgtggcactctccggagtcgcccgcaagctgatgggcgtgtgcttggcggtgatgaaagaggggcggccctacgagccgacgcccccgaagaaccaccggcccggccatctcaaggatgcctgacctcgctcttcgccaaaacggagtcaagcgcgatcgccagcgatcccatgcggaaccgaccttcggtgcgcgccctttatctcgtattcgcttttcaaggttcctattgaaaaatctcaggttcccccttgactcctaatagcaggt

SEQ ID NO: 3693 - DNA, 1419 bp, unidentified
  source 1..1419: mol_type = unassigned DNA; note = element_5807b0f
  misc_feature 1: note = core
  misc_feature 2..260: note = LE
  misc_feature 261..1406: note = CDS
  misc_feature 1407..1419: note = RE
  misc_feature 14..241: note = bridgeRNA
ctgcttgtttcattgcgggtagggccgatcctggcaaggctcggtccaggcgcccggcccgtcgctctcatttcggcttctcacgctggtcgtgtggctctcatttgacctgcgcgggtcgggcgtcgccagggccaggagaggctcaagaggggtttgcccagctctaggcagcgttgccctccgggctcgacaacccaacatggtgcgagcaacggaggaaagcgacgagcacgtcaactgaccgtgtcgtgatcggcatggacccgcacaagcgttcggtcacgatcgaggtgatggccgccgacgagacgatcctcggcggtggccgcttcgacaccgatgccgcgggttaccgatccctggttcgctacgcgaggcagtggccggagcggatctgggcgatcgagggctgccagggcattggcaagcacgtcgcgatgcgcctactggccgatgaagaggccgtggtcgatgtcccgccgaagatgtctgcccgggcacgggtgttcgccaccgggcatggccgcaagaccgacgcgaccgacgcccactccgttgccttggtcgggacccgcatgtcggggctgcggccggtcatcaacgacgagcagctcgcgatcctgcggatcctggtcgaccggcgacggtcgcttggtgaggaccacacccggatggtgtcccagctgcatcagctgctgctggagctcatcccgggtggggcgaagaaggacctctccgccgcccaggccaaggcactcctggccaaggtccggccccgcgatgtcgcgggcaagacccggcggcgggtcgccgcggaactgatcgccgacctggagcggatctacgcccggaagaaggccgcgaacaaggagctcacggcgctggtcgaagcgaccggcaccagcctgttggacctgcacggcataggcccctccggcgcggccagactgctggtcgaggtcggcgacatcacccggttcccgaacaaggcccacttcgcctcctggaacggcaccgcacccatcgatccctcctccggcgaccaggtccgccaccggctgtcccgcaaggggaaccgccagatcaaccgggtcctgcacatcatggccaccgtgcagctgcgtcacgacaccgaaggccgcgcctacttcgaccgccgaaaggcggccggcaagacctccaacgaggccatgcgcagcctcaaacgaaggttgtcggacatcgtctaccggtacatggttgacgacgcggccaagcatgcggtgacgggcccgggaggacacataggcaacgtctctgactccagcgcgaccggctcacagcccagcaccggctcttcggatcagtcacttcccggacccgccaccacaaagcctaagcccgcgcccccagctgcgtcttgacacagaggggtgc

SEQ ID NO: 3694 - DNA, 1364 bp, unidentified
  source 1..1364: mol_type = unassigned DNA; note = element_581f3b7
  misc_feature 1..2: note = core
  misc_feature 3..310: note = LE
  misc_feature 311..1108: note = CDS
  misc_feature 1109..1364: note = RE
  misc_feature 1081..1352: note = bridgeRNA
tgatggggttgacgccccccgacggcatcgctgtgccagaatggcggtgttgcaaccgttggagggaggcgtccgtgcctgacgttaccacgatcgggctggatatcgcgaagaatgttttccgtgcacacggtgcagacgagcgcggccgcgccgttttcagcaagaagctcagccgggggaaggtgttggactttttcgccgcccagcccgcctgcaccgtcgccctggaagcttgtggcggtgcccatcactggggtcgcgaactgatggacatgggccatacggtccgctgatcccgccggcctacgtgaagcccttcgtgaagcgaaataagaacgatgccatcgatgcagaggcgatttgcgaggcggcgcagcgcccgaacatgcggttcgtcgccgtgaagcgcgaggaacagcaagcagcggcgctggtgttccggacccgcgatcttctggttcgccagcggacccaactgatcaacgcgatccgcggtcacctgacggaatatggctgggtcgcgcccaaaggaccttcctatgtggcgatgctggccgacctgctcgatgaggacgagatgggctcctcgttgccgccagccgcccttgcgttgatcaggctgatgttggacctcatggccgacctggacggcaggatcgccgaactcgacggcgaaatcgcgcggcgcgcccgcgaggacgcggtgtcgcggcggttgatgacgattcccggcgtcggccccatccctgcggccgcaatcgcggccctcgctccgccggccgagaccttcgcaaaggggcgcgacttcgccgcttggctcgggcttgccccgctgcagaagtcgacgggcggcaagcagaagctcggcgcgagctcaaaaatgggcgagcgcacgctcaggcgtctgctcatcatcggcagcatggcggtcataaaacaggcagcaaggcgcggcgcaccgaagggctcttggctggaacagatgctggcgcgcaaaccgcggatgctggtggcggtcgcgctcgccaacaagatggcacggatcgtttgggcgctgctcatgaagcaggagagttacaaggctccagccgcggtcacggcgtaagccgggccggtctgggggctgtcggagacgtggtcggtcgaaggagggtatggcacaacagtcggcgagacggggccggaaaaccagggctttccaccgtgcgcataagcacgcttcgggtgatatggatccggtccgcgaactcccatacgcgcccgcagcctttgcgctgcaccaagaggccggacagatggcagcatccgacaacgtgccgaccgccgaaaaaaccgcttgcgtcttgcggggcgtccacaga

SEQ ID NO: 3695 - DNA, 1392 bp, unidentified
  source 1..1392: mol_type = unassigned DNA; note = element_58202d3
  misc_feature 1..2: note = core
  misc_feature 3..89: note = LE
  misc_feature 90..1124: note = CDS
  misc_feature 1125..1392: note = RE
  misc_feature 1092..1379: note = bridgeRNA
agatggggtggttgccgccctccctgacggcatcgcgatgtgccaagaacagtgggtttgcaaacccagagatggaaaggacggcaactgtggcaatcgataagatgatcggaattgatctggcgaagcgtgtttttcagtttcacgttgcgacaatgaccggtgaggttttgcttcgacgcaagctatctcgggacaaagttcacgaattcatggcgacgcatgagcctgccattgttgtgatggaggcttgtggcagcgcacattaccgggctcgcgagttccgccagatgggccatgtggtcaaactgatcgctgcacagtatgtgcgtccgttcgtgaagcggcagaagaacgatgctgccgatgcagaagccatcgtcattgcggcccagcgacccgagatgcgcttcattgaaccgaagacggaagagcaacaggcgaaagccgtgctcttccgaacacgggagcggctcgttcaccagcgcaccgaaatcatcaatggcttgcgggcggcactctatgaatttgggtacgtcgttcctcagcggatcgtgcacctgcgcctcatccgagagattatcgaaggccccaactgcgatcttcccgagctggttcgcacagagtgcgaggacatgctggatcagatcgatggcctgaatgtccggatcgacgcgaaggctgcagcgatcagatctccagccctcaaaacggatgtttcgcgtcgactcgaatcaatgccaggcgtcgggccgatgacggcattggcaatcgaggcatatgcaccaccgatggaggtgttccaaaatggtcgcgcgttcgcggcttggctcggcctcgtgccacgccagcattcttctggcggtaaagagaagctcggccgaatgtccaaggccggacaagccgacattcgaaaactactcgttatcggagcgatgtcccgactgacatggttgggtcgcaaagccatccaacctggttcttggctcgaccggatgctcgccagaaaacccttgatgctggtcgcgatcgcattggcgaacaagatggcgcgccagatctggtcgatgctcatgaagggtgaggattatcggaatccgacgtcgttcgcgctggcacggtaagcgtgctggcgccgacacggcggtgatgggagtgtaagaaggcatcgacctgaatgggcaaaacgatcgaaacgatctggatcgggaaaacctgccgacccgctctgagcgaaacaactcgatgagtagagattaggacccgatccgcagatcaccataccggccagcggcttctgaaatgccgcaagacaggcctgacagaagaccgcactcgatcactcataccatacgggaagaaacttcttgcatcacgggcggcaaccacaga

SEQ ID NO: 3696 - DNA, 1426 bp, unidentified
  source 1..1426: mol_type = unassigned DNA; note = element_5823292
  misc_feature 1..4: note = core
  misc_feature 5..206: note = LE
  misc_feature 207..1412: note = CDS
  misc_feature 1413..1426: note = RE
  misc_feature 1..192: note = bridgeRNA
ttccgtaagactgtgcgcggcccaggagggccgggtgtggctgaggtcgccttgcgttgtggtcgctaattgggaatgtccgcccggctctccggggcgccctggccgctaattgagatctgcgctcggtcgctggttacggatgcgtcggcggggtgttccacgggccgcagccatcaccttgaccaacggagggagacgcgcgcgtggcggcacaacgagagatggcctgggccggcatcgatgtcggcaagactcaccattgggcgtgcgtggtgaacgccgacggaaagccgctgctgtcggtcaagatccctaacgacgagactgagatcgtcgcgttcctcgccaacgcgggtgcgctggcgagtcacttggtctgggcggtcgacatcatcggcgcgccctcggcgctgctgctcgcgttgctggcccgagccggtcagtcggtgcgttacgcgtcgggtcgggtggtcgcggcgatgagcgccgcgtacgtcggcgaaggcaagaccgatgccaaggatgcctacgtgatcgccgagaccgcccgcctgcgtggtgacctggcggtcatcgacgccgacaccgacctggttcgcaaccttgccgtgctgaccgcccaccgggcggatctgattgcggaccgggtgcgaatgatcaaccggctacgggacctgatgaccagcgtgtttccgagtctggagcgggcgttcgactactcctcgcacaagggcgcgctggtgctgctgaccggatacgccagccccgaccggatccgccgcgtcggccagacccgcctggccggctggctgcggaatcggaacgtgcgccgctccgccgacgtggccgcccgcgcgatcactgcggccaaggcgcagtcgattgtgctgcccggtcaagaactgacggcgagcatcatcgccgagctggccggcggcatcctcgccctcgacgagcgactgaaagccctcgatgcccagatcgcggaaaccttcgccgaacacccgcaggcggcgatcgttcagtccatgcccggcttcggcccgttcctgggcgcctcgctgctggtcggcactggtgacctgcgcgcattctccagcgccggccatctcgccgccgcggccggactggtgccggtcccgaatgactccggtcggcgcaccggcaacttgcaccgaccgctgcgttacagccgtccgctgcggcacgtgttctacctctcggcgcagacgagcatgatgcgtgccggacccaaccgcgactactacctcaagaaacgcgcccgaggcgccacccacagccaagccatcatcgccctcgcccgccgtcgcgtcgacgtcttgtgggccctgctccgcgagaaccgaacctggacaacaacaccgcccgcgctcgctcaagcaacttgacaacaccattgaga

SEQ ID NO: 3697 - DNA, 1377 bp, unidentified
  source 1..1377: mol_type = unassigned DNA; note = element_5827f70
  misc_feature 1..2: note = core
  misc_feature 3..223: note = LE
  misc_feature 224..1219: note = CDS
  misc_feature 1220..1377: note = RE
  misc_feature 6..211: note = bridgeRNA
catttacatttgcagtattaaatatcacaataaaaatataagtgtatatttgaaaagaagagttgcagtgaactaactttgacactagtcttaaatgactatgagctgaatcagactgcaactctcttaataggagaacctagccagttagaattgtaggctcacgacctaataaatgtattagctgtttctccttcatgtttaatactgtaaatacaaagttatgaattattctcattttgtaggtcttgatgtagggaaaaaaactttcgatgcatcattaatgtctgcagacgaaaaagagttgtctcacaagtcttttgataacacatcagaagggatccaatctttattagattggatagcaggttatcatctccctttatcccaactcttgttctgtgctgagaacatgggaagttatgtcacagagttatctgtttccagtgtctccatgggattttccctagctttggtttgcccgttgaccatcaagaagtccatgggcctacaacgaggcaaaaacgaccgtattgacgccaaaagaatagcgaactatgcggtattacactatcgaaaactagagttatacaaattgcctgacaaagacttggtgagactgcggggatggattattatacgtgacaatttggtcaagcaaaaagtatcaagcataaagttattggaaacattctcccagatggctaagttggctgatgtgacagaattcatttcttttttggaagagcagctcaagtcgataaaagaaaagatcctggaagtggaagaggatatggagcaactaatagccgccagtacatcgctttacacaaactacttgctattaagaaatataaaaggaataggaattatcaatgccattgtattactgtgtgttactaacaattttcaaagatttgacaacccaaggaggtttgcttgttattgcggggttgctccctttgaacatacttcgggtatttccatacgaggaaaaacgcagacttcttcattggctaacaaagaagtaaaagtgtaccttacccgggcagctattactgccatatcttgggatccgcagatgaaagcatattataaaaggaaaatagcggaggggaaacataaagcatctgtaatcaatgctgtaagagccaaaatcatagcaaggtcttttgctgtgatacgaagacagactccatttgtaacattagtcgtataataaaaaggtccttaacttcgaaaacatattaggtttaggaagtagctatacacttctgaagagttgttatgtctatatacgaacttacccaaggatacgttaatgttcgtaaacttgggtaagatttgagagatattgtttggagaggacttagaatt

SEQ ID NO: 3698 - DNA, 1437 bp, unidentified
  source 1..1437: mol_type = unassigned DNA; note = element_582d8b4
  misc_feature 1..2: note = core
  misc_feature 3..122: note = LE
  misc_feature 123..1157: note = CDS
  misc_feature 1158..1437: note = RE
  misc_feature 1193..1390: note = bridgeRNA
agatggggtaatcggcccggcccagcttgtggatagctgaagattttgggtgctgcgcttcaggctgatggtgaaacgaggtccgtggtgacggcctcaagcatcagaaggagaagcgcagcatggactattttgccggactagacgtatcggtcaaggagacgagtgtctgcattttggatgatgcgggcaggatcgtgaaggaagtgaaggtggcgagcgagcctcaagcacttctgaaggttctggggaatcccacctaccacttcaagcgaatcggactggaagccgggccgttatcgcaatggctattcagcgctctcgccgatgccgagttacccgtgatctgtgtcgagacgcggcacatgcaggcggtgctgaaagcgcagatcaacaagaccgaccgcaatgacgcgcgcggcatcgctcagatgatgcgggtgggaatgtaccgcccggtgcatgtcaagacgctgcgtagccagaaactgcggatgctgctgacccatcgcaagctattgcagtcgaaggccatcgacatggagaacgatctgcgagggactttgcgtaacttcggcctcaaggtgggcttggtgggggctgccaggttcgaggcgcgcatcagggagcttgtggagggcctgcccgatctggcggtgctggttgaaccgttgctggttgtccggcaagtgctgcgccagcagctcgctgtcctgcatcgccgcatgttagccgtggttcgcgacgacgaggtatgccggcgcctaatgacgacgcccggcgtcgggccgctggtagcgctgacctatcggaccaccgtcgacgtgccagcccgattccaaaaatccaagtcagtcggggcggtgtttgggctgacgtgctccaggtatcaatcgggcgagatcgattggagcggcaggatatcgcgctgcggggatgagatgatgcgtgtgatgctctacgaagccgcccagactcttctgacgcgttcgacacgatggtcatggctcaaggcttgggcgatacaggtcgccaggcgtcgcgggaaaaagaaggccatcgtcgccctggcgcgacggttagccgtgatcctgcaccgcatctgggttgacggcaccgaattccgctggacccgagaggccggacctgcagcatgaaagccgtgacagatcagtcccagtaggaggaagctcgagctccacgcaaccgtggaatggtgtccctcgcgggacgatggatgaggtgagtccgctaggtcgcttggacctgccaacggcaacgcaaggccgcccgaaagattgttccacctcgtcctcggatcccatgatggaagggccctggtgccgattccgaagagaagcgcgagcccgtgagcgacatcgacattgcagtggcggatagtctgaaagtgcttgacctcaaacggccgattagaga

SEQ ID NO: 3699 - DNA, 1395 bp, unidentified
  source 1..1395: mol_type = unassigned DNA; note = element_582ee2d
  misc_feature 1..3: note = core
  misc_feature 4..89: note = LE
  misc_feature 90..1121: note = CDS
  misc_feature 1122..1395: note = RE
  misc_feature 1092..1382: note = bridgeRNA
agatggggtggttgctgccctccccagacggcatcgcaatgtgccaaataagtggtgtttacagccacaaagcagaaaggacggcaaccgtgacgaagagtattatgattggggtggatctggcaaagaatgttttccaattacacgcagcatcgttggcggggcaggtgcagttccgcaagaagctgtcgcggcggacttttttcaagttcatggccgagcagcctcctgcagtggtcgttatggaagcctgtggcagcgcgcattattgggcccgggagatgatccggcttggccatgaggtgaaactgatcgcgccgcattacgtgaagccgttcgtgaagcgccaaaaaaacgatgcggcggatgccgaggccatcgtaatcgctgcccagcggcccgagatgcgcttcgtcgagccgaagtcagcggagcaacaaggcagggctatcctgtttcgcgcgcgcgaacggctcgtccatcagcgcaccgaactggtcaatgcgctcagagcctgcctctatgaattcggtcatgtagttgcgcagggtgttcgccagatcaaacggatcgaagctattgtggaagagccgcacagcgaattgcccgagttgatgcgcgaggaatgccgcgaccttctggatcagatcgccgccctgacgacgcggatcaaggccaaaaccgccaaggtccaagccgtgtcggctgagcgtgacgtggcgcggcggctgcagacgatgcccggtgtaggtccgctgaccgctctggcgatcgaggcctttgcgcccccgatggagaatttccgctgcgggcgtgacttcgccgcctggcttggcctcgtcccgcgccagttctcatcgggcggcaaggaacggctcggacgtatttccaaagcagggcaggccgatatccgcaagcttctgattatcggggcaatgtcgcgtcttaactggctgggcagaaagtcgatcccggaaagctcgtggctggcgcgcataacggcgcgaaagccgaggatgctcgtggcgatcgccttggccaacaagatggcgcggaccatctgggccatgttgacgaaggatgaagattaccgggatccggcgcaggccgtggcggcatgaccggcatgccgtaaaacctgcctgaggtcggataagggggtgtgagaaggcgacgacccgaatgggcgaaatgatcgaacagatctggaccaggaaaaccagttaagagtcgtgagcattcaagctcgagagtcagatttggacctgatccgcagatcaccataccggccagcggcttctggaaacgccgcatttaaaggccttacagaagaccgcactcgatcacacgcactttggattcgaaacctattgcattacgggcagcaaccacaga

SEQ ID NO: 3700 - DNA, 1508 bp, unidentified
  source 1..1508: mol_type = unassigned DNA; note = element_5830d23
  misc_feature 1..4: note = core
  misc_feature 5..253: note = LE
  misc_feature 254..1498: note = CDS
  misc_feature 1499..1508: note = RE
ctcactggaggaccctcgacgggccggtgactggctgacagggttgctggcgcaccccgggtctccaccggatcactgccgctgccgcttgctggaggtcacagccagactgagttctgcaggatccggtggcccgggacgtgccgactggcgacagggctgagcgcctcgagcgccgatcagtgagcgaccggcgtgcacgtcccgagaccaccgggtgcttccccgctgctgcaacagccaggaggcacacatgcacgattccaccgtcatggccgtcccgacaggggcggtgttcgccggcgtggactgggccagcgccgagcacgccgtctgcgtcatcgacgccaccggcgcggtcctatggcgtcataccgtggcccacagccgggcgggcctggcccggctgaccacgcgactcggtgagctcgtcgtcgaccgggtcggcatcgagcgaccggacgggccggtcgtggaggcgctgctcgacgccgggctgcgggtggcggtggtgccaccccggcaggtgaagaacctgcgctcccgttaccgcggggcaggcaaggacgaccggttcgacgcctatctgctggccgacacgatgcgcaccgatgggcaccgctacgccgacctgacccgcgacaccggcgccacgaccgggctgcgggcgctggtccgagcccggcaggacctggtcgagatccgagtcggcctggtcaaccagctgcgacacaccctggagctggcctttcccggcgcggtcgggttgttcttcgagctgcacagccccattgcccgggcgtttctgcgtcgctttccgaccgcggtcgaggccgccgtcctcgacgaaggcgcgatggccgcctggctggccgcggagggctactccgggcgcaccccggccgcggtcttcctcgaccggctgcgcaccgccccggccgggctgaccggcaccgaggccgacgcccgccggcacatcaccctggccctgctggccgccatcgacgcgatcgaggaccaggccgccgagctcacccggcggatcaaggaagccttggccgtgcacccggacgcaccgatcttcaccagcctgccccgcgccggacaggttcgggccgccgcactgctggccgagatcggtgacgcccgcgggcgctatcccaccgccgacgcgctcgccgcggccgccggggtctgcccggtcaccttcgagtccggcaaacaccgcggcgtcggcttccgctacgccgccgacagcaagctccgccgagcactcaccgacttcgccgacgactcccgtcacgccaacccctgggccgccgacatctacacccgcgcccgcggccgcggcatgcgccacccacacgccgttcgagttctcgcccgcgcctggacctcagtcgtctggcgctgctggcaagagcacaccacctacgaccccgcccgccacggcgccctcaaccgccacctccaccaagacaccgcggcggcggcttgacacagggcta

SEQ ID NO: 3701 - DNA, 1357 bp, unidentified
  source 1..1357: mol_type = unassigned DNA; note = element_5848edc
  misc_feature 1: note = core
  misc_feature 2..285: note = LE
  misc_feature 286..1317: note = CDS
  misc_feature 1318..1357: note = RE
ctctaactttgcagtgtcaatgagattggtgagtactcgttagagaaatctccatgaaaaggtttgacaattcgaggaaagtccgtacctttgtccgtagaaaggaagactgacctcctggagagggaaactatcgttggctagatgtcatcagagactattacccgcaacagtcctctccaggcaagctgcaaaggcaagataaattgccaggcataagagcctaattagagtatgagccatcacagcttgtggccagccaattaaaaaacgcgctgcaaaattatgaaaaaaatcgcaatcggcatcgactttgccaaggaaaaattcgacgtgacagtgaaaaacgtgacaaacggcacatccatctacggccagttccccaacacgccggctggcggtcgcaacatggtgcgcatggtcaggaagttcgcaaagggcactactggcgaggactggatcttctgcggcgaggacacgggctactacagccagaccatcgcccgctacctcaccgagaaggggtacttcgtatggcttcagaacccatactgcataaaacactccgagggtagcattaagcgtggcaagaatgacaaggccgactctgtgtccattgccgagtatgctcaccgctatgaggacaaggcacgcagatacgagttgccatcgaaggtgtcggaagagctgcacatgctgctcacccgccgcgatgcctatgtgagagccaagcgcgtcattctgagcggcgcgatggagatccccaagcgcgacaagcagggggagagcatcacgctcatcaagtcgtcagccaagaggctgctcagggagattgacgaggaaatagatctgttggaggcacagatggagaaacttgtggaagaacaggaggatacgaagaagaactacgagatcctgcgttcgttcaaaggcatcggcatagtcaatgccatgtgcttcatcgcctacaccgacaatttcaagaaattcgacctcaaggcacgcaagattgccacgtactggggggtggcgcccttcgggaaggactctggcaagaccatacatgtagacccgcacgtgagcgacttctgcaaccattggctaaaggccatactcagcaacgcggcaaactcagcaattctatgcaacccactaatcataccctatcacgaaagactgaaaaagacagggaagtgtgacgggatctgcaaaaacaatgtgaagaacaaaatcatccagattgtaactgctatgataagaaaaggagagaaatttgacgctgaatacaaatttacaaacaaagaggccgacgcatagtgttaaaagtgttaattcgcttggtttttactataaattg

SEQ ID NO: 3702 - DNA, 1804 bp, unidentified
  source 1..1804: mol_type = unassigned DNA; note = element_58508ff
  misc_feature 1..2: note = core
  misc_feature 3..477: note = LE
  misc_feature 478..1695: note = CDS
  misc_feature 1696..1804: note = RE
  misc_feature 218..500: note = bridgeRNA
ctcctattatggttttgtaaggagattgctgttctccccacagttacaaagtgaccccgtatgagtttatagccatccaaaatatcaaagggagatataggggtggggtgcgggggtgcgcgaagcgcagggccgcacttgactatgcgcaacgccgactgtgccagacaagcaagccaatggatcagtttggttcattgtccgggagacagtatcccatggtggtcagatacctctctgccagaaaggactgaccgttccattgcccaagctgtataatggacgggcattggcatgacgaagcgttacttggaccatttggtgtccgctgaacagccagtcagccagccttccattcgcagctgttcggtttaagcaggttggactgccttaagtatgtccgtatgacatccaggagattgaataagcaatggaaaaccgctggctccatgcaattcataaccgggaggtaaacttatgtacaacgcagtcggtattgatgcttcaaagggaaagagcaccgtgacggtccttcagccgggtggcagagtagtcaggaaaccttttgatgtgactcattcttcaagcgagttaaaaaaactcacagattacatcctttccctggatggagacactaaagtggtgatggaatctacaggccgatatcacgagccgttactgcgtaccttgtccgatcaagggatctttgtcagcgttgtaaacgcacatctaatcaaaaatttcgggaacaacaccatccggaaagtcaagtccgatcctgcggactccagaaagatcgccaggtatacgcttgacaactgggcggacctgcgacagtattccagtatggatactacacgtgaacaattaaaaacccttaattcgcagatgtctttcttcaccaggcagaaggtcgctgcgaaaaacaacctgatctcactgctggatatgacatatccgggcgtaaacacactgtttgacagccagacgcgcagtgatggcagtgagaaatgggtcgattatgccgcttctttctggcatgtggactgtgtccgcaagatcggccttaaatcattcacagagcgttaccgcgctttttgcaaacggcatggctattgtttcaaggaaggaaagcctgaagaactcttcaatgcgtctctggatcttgttgctgttttcccgaaggaaaaggcatataaggatatgatccagatgtccattaagcagctgaatatcatttcggccaacgtggaacatatccgtcaggaaatggaccgtcttgcatccaccctgcctgaatacaatacagtcatgggcatgcggggcgtcggccctacattcggcccccagctgatcgctgagataggtgatatcaccagattcagccatcgggaagctctgacagcatatgccggtgtggatcctggagtaaatgaatccggcagttttaagagtaagagcaatagtgcatctaaatgcggtcctgcccgtctcagaaaaactctgtatctcattatggcttctcttcttcagtcaaagccattggatgatccagtatatcgttttttagataaaaaacgaatggaggggaagccgtatcatgtttatatgacagccggagccaataaatttctcagaatctactatggcactgtaaaagcttattttagatccctggaaaaacctgagatctgagcaatttgaatccataaaggagttatcagcccaacaatgggtttatttgttgtacccaaaatcaatttggataatttcttgaatttccacttgactttttattagcagg

SEQ ID NO: 3703 - DNA, 1415 bp, unidentified
  source 1..1415: mol_type = unassigned DNA; note = element_58544fc
  misc_feature 1..2: note = core
  misc_feature 3..138: note = LE
  misc_feature 139..1158: note = CDS
  misc_feature 1159..1415: note = RE
  misc_feature 1179..1370: note = bridgeRNA
acatggggtaatcgcgggcgcgatctacccggaggctgtgctttttaagaggacggcagacaggtggttgttccccgataggatggacaagcgggcccattactggcgccggacccaggcatcgtgcggagaacaaccatgggcgagtatatcggcctcgacgtatcgttgaaagagacggccgtttccattcggcattcgggcaagcggatctggcgcggcaaatgtgcatcggatccgcaggcactggccgagttgatccgcaagcgcgcgccagatgcggagcgggtcgtgttcgagaccgggccgctgtcggtgtggttctatcacgagctgaccgcactgggtgtgccggcgatctgcatcgatgcacgccacgcgaaggcagcgctcgatatggcggccaacaaaacggacgcgaacgacgctgatggtctgccgcatcttgcggaggtcggattctttcgggaggtgcgcgtcaaaggctatgacagcatgttgatgcgcacgctggtggcaggtcgcagcaagctggttcgggttgcgaccggcctctccaaccagattcgcgggctgatgaagacattcggcctggtcgtgcccgccggtcagggtggcgtgttcgagaagaacgtccgccggttgctcgatggtgaagaggcgctggctcgcatcgtccttccgatcctggaagcctggcgggccatgcgcatccatgccgccgaactcgggcgtcagctcaccgcagccgcccgacatagccagtcatgccaattgctgatgtcgatccctggcgtaggcgtggtgaccgcgaccgccttcaccaccgccatcgaagacccggcgaacttcgcaaagtcacgatccgtcggcgcatggattggactgacgacccggcgatatcagtcgggcgaagtcgactatgacggacacatatccaggcgtggcgatgcgaacctgcgctcgctgctctacgaagccgcgacgacgattctgacacgcgtgcacgccgacagcgatctgcgaacgtgggggccgaaacttcgcgaaaggctcggcttccggcgggcggccgttgccgtcgcgcgcaagctggccgtcatcatgcacgccatgctgcgatccggcgaactgttcaaccgaacggctgccgcatgatcccgtaacgagcttggacgcgctgctcgcagcgcccagaggcgtccctgccgggacgtgagccggaccattccgaggagcaggcattgcaccaccctgaccagcgcagggcatgtgcgcccaaaacataggaagctccgctccgtggacacccattatgcggcgacacctatcgaccgcgaagacgaccgtgccccggcatacgatctatccagcgaaccgcagaaagaacttgctctatgaccagcgattagacg

SEQ ID NO: 3704 - DNA, 1118 bp, unidentified
  source 1..1118: mol_type = unassigned DNA; note = element_5855b0d
  misc_feature 1..2: note = core
  misc_feature 3..191: note = LE
  misc_feature 192..1094: note = CDS
  misc_feature 1095..1118: note = RE
  misc_feature 1..167: note = bridgeRNA
cctgtgtgtttgatctgtgtcatgatttgtgcgggcgggaagccgttggattcctggtggcaaacaccgtgacccggccaggctcccgcccgcgttccaagaccccatcctgaacagttgaccgaggccgcttgcaccggacctcgcagcacagggacaggccccatgatcatacacccctgcttcatcggatgcgatatcgcaaacaccatctcgacctgttcgatgaggcgagtggcacaagtcttcgtatcgccaatacgagcccggccatcgcggcctggctgtcggggctggccgatccggccggtagcctcatcgccttcgaggccaccggcccctacgatgcaaccctgcgccgtgcgctggaacaggccggcttgcgtttcgtgcgcctcaatccggcgcgcgcgcgtgacttcgcccgcgccacggggcgcctggccaagaccgatgcgatcgacgcccgcatgctcgccgccatggcccgcagcctcgcgctggaacccgacgcacctgtcgagcccgctcgcaacgctttggcccaactgcacaaacgccgcgaccagctcgtcgcgatccgtgccgccgagcgcgtccgtctcagcgagggacaggaccaaggcggcagcctggcgcgccatcttgcctggctcgacgacgagatcgacacgctcgagcgcctcatcagcgatgccttgtgcgcaaacgaggccctggcccgcacacaggctctgttgcgttcggcgccgggcgtcggacacgtcaccgcaaccaccctgatcgcgctgatgccagaactcggacatgtctcgccaaaggcgatagcagccttggcggggctggcccccttcaacaacgacagcggccgccaccgcggcaagcgcagcatcaggggcgggcgcagccgcgtccggagcgccctctacatggcggcactggcagccaagcgaacctgccagcgcttcaaggccttctacgacgccatcctcgaacgaagtgccgcagcaaaagtcgccctgatcgccgtcgccagaaaactcctcacaatcctcaacgccatgatcaagacaaacacagccttccagccatgatcaggatgcgcaacgacacagttg

SEQ ID NO: 3705 - DNA, 1485 bp, unidentified
  source 1..1485: mol_type = unassigned DNA; note = element_5867cb8
  misc_feature 1..2: note = core
  misc_feature 3..286: note = LE
  misc_feature 287..1465: note = CDS
  misc_feature 1466..1485: note = RE
  misc_feature 7..237: note = bridgeRNA
ctaatgggggttaccgggccgagaggatgacaggctcggtgcctggtagccgccgatggatgagcactctttctgacctggactttgagtcctagtcccagatcgtgcctccatcggtggtcgggaaggcgaaccgctgatgggatgtcgtgcccgccgtcttggcgtgagcacttgaccattaggtcgcgggttttcctgcaggctgctggccgggtagttgagtgaagtggaggacgtcagattgttgttcgtcggagatgactgggctgaggaccatcatgatgtggaggttcaggacgagaccgggcggcgacttgccaaagcccgcctaccggaaggcatttcagggatagccaggctgcacgccctggtcgggaggttcctgcctgaggacggcaacgccgccgcggtgaagatcggcatcgagaccgaccgtggcccgtgggtcgccgcgctcgtcgcctccgggtaccaggtgtacgcggtcaacccgctgcagtccgctcgtgcccgccagggcaacggtgtctcgggagccaagagcgatgccggcgatgcgcatgtcctggccgacctggtccggaccggttgccaccagctgcgtaccgtcgccggggacagcgcgcaggccggcgcggtgaaggtcctgacccggatgcaccagagcctgatctgggaccgcacccgccaggtgttacggctgcgttccagcctgcgggagttcttcccagccgcccttgaggcctacgagaacctcgcttcccccgatgtcctggagctgttgaccaaggcacccgagcccagccgtgcggccgccctgacgcgggcgcagatcacctccgccctgaagcgtgcccatcggcgcgaccgggaagcaaagaccaccgtgatcatggccgcgctacgaagtgagcacctcacccagccaccgcttatcgcggccgcctacggcgcgactgtccgtgccctggctgccatgatcacgacctccaatgagcagatcaccgccctggaagggccggtcgaggcctgttttggtcagcacccggacgctgagatctacctcagccagcccggactggggcccatcctgggcgcccgggtgctcgcagagttcggcgacgaccccacccgctacgacggggcccgagcccgcaagaactacgccggtaccagccccatcacccgagcctcgggcaagaagaaagtcgtcctggcccgatacgtgcgcaacaagcgcctggccgatgccctacaccggcaggcgttctgcgccctcaggagatcaccgggagcccgcgcatactacgacgcactcagagaccgcgacatcggctacaacgcagccctgcgccagctcggcaaccgcctcgtcggcatccttcatggctgcctcaaaacgcacaccctctacgacgaggcggttgcctggaacgagctcgcccaacaagtggcagcttgacacctaagcacatgggatgt

SEQ ID NO: 3706 - DNA, 1420 bp, unidentified
  source 1..1420: mol_type = unassigned DNA; note = element_586d6e1
  misc_feature 1..2: note = core
  misc_feature 3..117: note = LE
  misc_feature 118..1155: note = CDS
  misc_feature 1156..1420: note = RE
  misc_feature 1174..1374: note = bridgeRNA
agatggggtaatcggcttagagccccagcttccggcgaaaaaaggtgctgcgcttctagccgatgataaaacgtggtctgaaccaccagccacaagcatcaggaaaggaagcgcagcatgaaatattatgccggtctcgatgtttccgtaaaggagacttctgtttgtattgttgacgaacgagggacaattatccgggaacgcaaggcggtgagccaccccgccgacctggtggcacttctgagtgatccgcagttgcatcttgagcgggttggccttgaagcagggccactatctcaatggctctacgaggggatggccaaggctgggctgcccgtgatctgcatcgagacacgacacaccaaggcgtttctcaaggcccatacgccgaacaagagcgatcgaaacgatgcacgaggcatcgcgcagatgatgcgcgtcaatctgttccgccctgtgcatgtgaagacgctgaccagtcagaagcgccgtgccttgctgaccgcgcgcaagatgcttcaggaaaaagccatcgccattgagaacgatgttcgtggccttctgcgcaacttcggcctcaaagttggggcggtcggcacacttaaattcgaggagcgtatccgtgagcttgtcgaagatgcccccgatctggctgcaatcatggaaccgctactcgcaggaaggagaaagctgcgggaagagttcgcaaaactggaccgccaggttctgaaagaagccaaatacgatccagtgtgcaaaaggctgatgacggtccccggtgtcggtccgatcgttgcgttggcttatacgtcaacgatcgacattccggctcgctttcgaaactcacgttccgtcggagccgtattagggctgacgccggttctcaatcaatcgggagaaagtcaccgaataggccacgtgtcgcgatgcggtgacgcaatgatgcgcgggcttctttacgaagctgcgcaagtccttctcacacgcgtggcgaagtggtcatggctgaaagcgtgggcgatggatgttgccaaacgacgtggtgtcaggaaagccatcgttgcgctggcacgaaggctcggagtgatcttgcatcggatgtggtgcgacgaatctgatttccgctggacacgggaaacgttgcccgctgcataatggatctaccgcaataaagagttccgtctgagggcggaagacgtccttcgcggacgatggatgatgtgagttcgctttctctcttattccggtgatgccgtgcatcatcaggttgcgtcagagcttggaccacaccattcttctggtcccatggtgggagggccttagtggccgatcccggagagaagcgcgggccgcgaaaagacgtcgaacgcctcaatatttgaaagctataagtgcttgacctcaacacgccgattagaga

SEQ ID NO: 3707 - DNA, 1400 bp, unidentified
  source 1..1400: mol_type = unassigned DNA; note = element_5874f0c
  misc_feature 1: note = core
  misc_feature 2..298: note = LE
  misc_feature 299..1102: note = CDS
  misc_feature 1103..1400: note = RE
  misc_feature 1161..1395: note = bridgeRNA
caatgaaatggactcctccctcctacggcgtcagtgcgccagactggaggtgttaccaaccggtcccagagggaggagtcgagatgaaacttaaacgaattggcgtcgatctggcaaagcaggtttttcaggttcacggcgtagacagtcatgagcaggtcgtctgccgcaagcaaatcaagcgtgcaaggctgcttgatttcttcaggcagctggagccttgcctggtggtgatggaggcctgcggggaagtcattactgggcgcggcagttccgcgcgctgggtcatgaggtgcgcttgatcgctccgcagttcgtcaaaccctacgtcaagggtggcaagaacgacgccaacgatgctgaggcgatttgcgaggccggtagccgtccgacgatgcgctatgtgccggtcaagagcgaggagcagcaggctgccctgtctgtgcaccggatcagaagccgggcgatcagggcgagaacggcactggccaacgaggttcggggtttgctgggagagttcggcctgatcgcggcccgcaagggtgtgccggctactcgcgcactgctggctgaggtgctggaagaagacagcagcctgccggttgccatgcgcgggctgatgagtgagctgcaggatgaactgcaggagaaagacaaacgcatcgcccatctggatcgcctgattcagcagcaggcgcgtcaggatgagcgagtacaacgcctgatgcagatcgagggccttggccctatcagcgccacggcgatggtggcggcggtaggcgatgcgagccagttcaagtcggggcgccagttggccgcttggctgggcttggtgcccaaccaacattcaagcggcggcaaggagcgcctgggcagcatcagcaagcgaggtgatacgtacttgcgcaccttgctgatccatggcgcccggtctgccctcaacgcgagtgcgaaaaagaccgacccacgcagtatctggatcaatgaggtcaaatccaggcgcaacacgaacatcgccacagtggccctggcgaacaagaatgcccggatcatctgggcgctcttgagcaagggcgagagctatcacaacgctgcgtgttgaacgcagcaaccgagcaacaggcaacaccgcagcaagcgcaacaccgtagaagatccaccacgattgcacagtgacagacagtgatgacgaaccggtcgaaccggcatgtgtgaaggcttagagacccggaggcccgctgtataaaaaaggccgctaatccgatcagctgcacatgagcgactacttcatcaaggctcgaagtgacaaaccacttcagtagaagccggatatacggtagcagtcgtaccttggttcaaaagcactgttttttactggcaaaccgggaggagtccatata

SEQ ID NO: 3708 - DNA, 1666 bp, unidentified
  source 1..1666: mol_type = unassigned DNA; note = element_5882110
  misc_feature 1..2: note = core
  misc_feature 3..243: note = LE
  misc_feature 244..1419: note = CDS
  misc_feature 1420..1666: note = RE
  misc_feature 3..222: note = bridgeRNA
ctcgtattatagagtagtagtttataagctcctctccaagagcttgtgctacactgttggggatgctgtggattggtttgattctcctaccgcgagacggtttcagaaaggctccaaccacagccccttgtcggtttgttaatcagttagataccgggcagacggttgatgtagaacgaggttacaagggcaagcggtactgtggtccccagcagcatcaataatacgcaggaggttttacccatgatctacgtcggcattgatgtttccaaggataagcatgactgcaccattgtttcctcagagggagaagtcctggcggatgtgttcactgtccagaacaacctggatggcttcaagctacttttccaaagaatcaaatccgtagcacctgatttgagcaaagtaaaagtaggactcgaggcaaccggtcattacagctacaacatcctcggatttctccttgacaaaggcctgccaacctacgtcattaacccgctccacactaatctgttccgtaaatctaccagtcttcgccggaccaaaacagaccgtgtcgatgcgcgtaccattgcagctatgatgatgtccggtgtagtccttaagtcctacacggctatatcataccacaatgaggaactaaagtcactatccagatacagatttgacaaggttcgggaacgtgccaagctgaaacagtctgtttcccgtctggtcaatatcctcttcccagagttggaaacacttgtcccaactctgcacatggtctccgtttactccctgttggcagaactgcccggtgcgaagcaggtcgcctcctgccatctcacacatctgaccaaccttctctcaaccgcttccaaaggtcattatgatcgctccaaagctgctgagtttcggaatgctgcccagcgatctattggctctgttatgcccgccaagtctcttgaactccagcacaccattcgtctgatccgcgaactggatactgagatcgatgacattgaggctgccctcaaacagatgatggatgaaatcgcttctcccatcctctccatcccaggtatcagctatcgcatgggtgccatgatcctcgctgagattggcgacttctcccgattttcttctccagacaagctgttggcttatgcagggctatctccatctacatatcagtcaggcaagttggacaacgcttatgctcacatggaaaagaggggttctcgttaccttcgttacgctctcttcaatgccacaaggtacgtttgccattgggataattcctttgctgattacctcgctaaaaagcgctctgagggcaaacactacaacgtcgctatctctcatgctgccaagaaactcgttcgcctgatttttgccttgcaacgttccggcgaaccatatgtcccagcatcgtagcccagctattctcttcggagcctgagcatttcgatacgcactgagccggcgaagcgtacccttgacaaaccgaagcattcaaatgctatcctgtcctggcgaggcggcctccgtctgctttgctattccctccgtcgccctcgctgcctctgcctcagcatttgaatgctgtttgtcaagggcggcggcgtttcaatagaaaattcctcattttctcttctttccctcttgacatttaatagttagt

SEQ ID NO: 3709 - DNA, 1431 bp, unidentified
  source 1..1431: mol_type = unassigned DNA; note = element_58838bf
  misc_feature 1: note = core
  misc_feature 2..70: note = LE
  misc_feature 71..1108: note = CDS
  misc_feature 1109..1431: note = RE
  misc_feature 1210..1425: note = bridgeRNA
taatgggatggtccgccgccttttcccagccagcagctggggtataagaggtgaacggaggaggcatcccatggaactacacacgatcggcattgatctcggcaagacagtgtttcatctggttgggctcaacctgcgcggcgaagttgtggtgcacaagaagttttcgcggaagcaactgctgcacttcacggcgaacttgaaggtcgaattgattggcatggaagcctgcggaggagcccattttctagggcgggctctgcgagaacagggtcatgaggtacggctaatgccggcacagtacgtcaagccgtacgtgaagaccaacaagagcgactacattgacgccgaggcgatcgctgaagcagtcgggcggccgaagatgcgcttcgtaccgatcaagagcgatgaccaactggatctacagtccctgcatcgggtacgtgagcgttgggtgatgcgtcgcacagcagtcatcaatcagattcgcggcttgctgctcgaacgtgggatcactttgcgcaagggacgatgccatgtcgatgcggcattgccggggatcctggaagacgccagcgccaagctatcaggtgcattgcgcgtcctgctggcgcaactgaagctggaactcaatcacttgcaaatgcggatcgacgaagccgatgcggtgatcaagaagaccgctggcgacaatgaagcctgccgacgccttgtggcgatccctggcatcggaccgattacggcgaccgcaatcatcgctgcgatcggcaacggagcagctttcaaaaaggggcgagagttctccgcgtggctcggaatcgtcccgggcgaatataccaccggtggcaagcaaaagctgctggggattagcaaacgcgggaactcgtacttgcgaagactcttcgtgcaaggggctcgcgctgtcctgcaacagagcgcgaagcaatcttccggtctgagtgcgtggctggcccaactcacagcgcgcgcccaccacaacgtcgttgccgtggcgttggcgaataagctggcccgcatggcctgggccgtgctcgcgaagaatgaatcctatcggcctcccgtgttggtcgatgtggctgcagcctgactggcctgcagatgacgcctggctgaggccaggcttggaaatcgccttcgcgattcccacatctccagaccagcggctactacggagttaatgattttctgccaggtctgctggcgaaccatgagatggcacaacggtcgaacccgacgctctcgaaacctgtaaccggaagaagtcttccaagactgcctaactaaataggaagagagcgcagcgcattccatcatggccaggagccttgggctccaacaaaggccgaatacatttgcgcagaccaacctgttacctcatttttcgcttgcgacaaagcggcggaccataca

SEQ ID NO: 3710 - DNA, 1227 bp, unidentified
  source 1..1227: mol_type = unassigned DNA; note = element_5885b45
  misc_feature 1: note = core
  misc_feature 2..224: note = LE
  misc_feature 225..1196: note = CDS
  misc_feature 1197..1227: note = RE
  misc_feature 44..213: note = bridgeRNA
tcttaagttagcattttaataaaaacactatatttaatttataatccgaaagaacaaaagagaggaataaggttaatatatacgcagaagcttaagacttcgtcaacattgaaaaccccctctcttttactacacagatttcgtacagttctatgaggctattagacctcgattttaagtcgttgaaactcgcgtagtggtcctttcaaaaatcattttcttatatgaataaagatataaaatattttggaatagatattagtcatttagtttttgatgttactgattctgaagggaattattaccagtttaaaaacactatttcgggctttaaaaagcttgtaaaattgttagatgttaatagtcattgcgtgatggaagctacaggttattatcactatcagttggcctattatttattagagtctgggataaaggtttctgtagaaaatccattagcagttaagcgctttatccaaatgaagctgtcaaaaattaagaccgataaaagtgactctaaactgatttgcgcatatgcaaaacaagtagaattaaagctttggaaaggtaactcaaaacatcaaacagagtgtcttcaaatgaccagactcctttctgtgtatacaaaacagagcacaatgctaaaaaacaaaatacatggtgaagctgttttaggaaatccaagtaaagtagtagtgagttctctaaaccgcagtttaaaacaagtacaaaaagaattaaaaatcttggaagataaacttttgatattggttaaagaagtacatcaagatctgttgacccgtgtgaaaacgatacctggaattggagcgaaaacttccctaatgctagtggttcttactgatggatttgagcgctttacaagcggcagtgaattgtgtagttatgctggattaactcctgtgattcgcaagagtggaagcagtgtaaatggacgtagtcgaatcagtaaaataggaaatcaaaagcttcgaaatttattgtttatgtgcagttttaatgcttgtaaatacaaccaagcttgcaaagcactttatgatagattagtggccaaagggaagagtaaaaaactagccttaattgctgtctgtaataaactcttaaaacaggcttttgctattgcaaaatcaggactaacctatgataataattatagaagtactttagtgaaaaattaatgcctttttacttgttttttaccacagtact

SEQ ID NO: 3711 - DNA, 1940 bp, unidentified
  source 1..1940: mol_type = unassigned DNA; note = element_58881d8
  misc_feature 1..4: note = core
  misc_feature 5..134: note = LE
  misc_feature 135..1421: note = CDS
  misc_feature 1422..1940: note = RE
  misc_feature 1606..1878: note = bridgeRNA
aggagcttcctgtataattaaaaatatagagaatcccaagaaagaaggttgagaaaaaaatacctcagtgtaaaataagattactgactttgcacggttagtaaaaaatcttattaaacagagaggtatctaatatgaagtataacacacaaaacagtaaaattgcatcaataacagaaaaaactttgattgttggtatcgatgtcggcagtcagacacactatgcaagagcatttgattggcgtaattacgagtattcaaggaaaccatttgcattcagtaatgatgaagaaggttttatggcgtttaaaaactggatgagcggaattgctgaaaaacatggcaaagaggtagtccttccgggcatggagcctacagggcactactggtttggattgggaatgtttctgcagaacttagggatgcgcccggtgcatgtgaatccacatcacgtaaaaaaatcaaaggaattggatgacaataatccgaataaaaatgacaaaaaagatcctaagacgattgcggcattggtgaatgaaggaagattttcatatccatatattccatcaggaatatatgctgagattcgcaacctttccaatttaagatttcagacccaggaacagattacacgaatcaagaaccgaattgcccgctggtttagtatttattttccagaatacaaggatgtgtacggaaaactagatgcattaagtggaatgatgattcttaaagaggctccgttgccgggtgatattgtgaagcttggagtggatggagtaaataaggtatggcgaaatgcgaagctgcgagcagtgggacttaagagggcgaggaccctggtaaacaaggcagagcatagcattggtagtcaggcggcaccagaggcagcaagaatggaacttgaaattttaattcatgattatgaaatgtataatcagcgaatggaagaattgatgcagacaatagaagaaaaactgtatgagattccctatatagataaactcatggagataaaaggaatcggaatgataacgatttgtggatttattgcagaggttggagatataagacgttttgacaatccgaagcagttacagaagttggcgggttatgcgattgtgagcaataattcaggaaagcataacggagaaagccgaattagttatcgtggaagaaagagactgcgttatgtcttatatgaagcagcaatatcgctgatagggaagaatgcggaatttaaggaaatccatcattattatcgaacgagagaaaggaatccgttgaagaaaatgcagtcagtaatagcagttgcgtgtaaggtgatacgtatattttatgcgatattaaccaaaggcgttgcgtatgacggaggaaaaatgcttgaggatatcaagcggccggtagtagcaatgaattaaagaaacacagaaagcaaagcttgttatcgcggttgaacaaagcgattaggaaatgattgttttgttcagccacgataagggctgacaagaaagaagctgagtaatcggcaaatgtggaagtgagagggaaacgtccaccgaaaggtgctttcatggaaacagtcagtaacaaaaatttacaaagtatgagccagtagtcggcaggaatattttccagagggcaagaccctgtataggagctaagctgacaccctggttgtggataggtggaacgaaggaagtgaggactctcagaaaagcgagatgatcctggtagacacgggaggtacatcaccatagagggacgggtatacacaaggccatttaagacgaagaggaagagacgttttaattcgtgtaccccaaaatcgctatttttgcaccagatgcagagaaatatccatgatgaaggctcattctgctgagaaacaattaaaaaaatcccttatattaagggaaaaaagacttgattatttaggg

SEQ ID NO: 3712 - DNA, 1367 bp, unidentified
  source 1..1367: mol_type = unassigned DNA; note = element_5893f8e
  misc_feature 1..3: note = core
  misc_feature 4..84: note = LE
  misc_feature 85..1074: note = CDS
  misc_feature 1075..1367: note = RE
  misc_feature 1082..1354: note = bridgeRNA
tgatgggttggatgcccctcccaccggcatcgcagtgtgccaagatggtgatgcgttacgtcacccacagaggaggaggcatccatggaggaagttagcatcgtcggcgtcgaccttgcaaagcaggttttccaggttcacggcgcagcatcggatggccgggttttgtttcgtaagaagctctcgcgtcttcagtttccaaaattcatggcgacactgcccccttgcgtagtcgcgatggaggcctgcggcacagcccattattgggggcgcgagttggcagggctcggccatgacgttcggctgatcccgccggtttatgtaaaggctttcgtcaagcgccagaagaacgatgctgccgatgctgaggctgttgcagaagctgcgatgcggccgaccatgcggacggtcgctgtgaagacgtcaaatcagcaagctcgggcaatgctattccgaactcgcgatcttcttgtcggccaacgaacgcagatggtgaacgctctgcgcggacatcttgcggaacatggtgtcattgtgggcaaaggactggggaatgtggagcgcctttcaaccctagtcacatcggacaatctacccgagctggtacagagcatgagccgactttaccttagccagatcgcccaattgaacgaagaaattgatcagatcgatcgtcgcattgccgcagaggcgaggcaaagcgatgtagtccggcggctccagaaggtgccgggcatcgggccaatctgcgccatggcaatcacggccttcgcgccgtcgatggaggaattccggcgcggtcgcgattttgctgcctggcttggccttgtcccccgacagcactcgagtggaggcaagcaaaagcttggccgcacttcgaagatgggacaacgagatatcagaaggcttctgatcataggtgcgatgtcggtcgtgcattggaagggccgcggcggcggaagacccggatcttggctctcgaatatgctcgcccgaaagccgcgtatgttggtggcgatcgcgatggcaaacaagattggcgcgggtggtttgggctatgctcgtacgcaatgaagactacagagatccgactggagcggtctgctgacggcgaccgtttcagtcggagtgccggcgatgtgaggaggacatgatccgcatgggcaaatgatcgaacagatcggggttggataaaccagtagttctcagggagccctcagctcgttgcactgatatggaatccaatccgcgtatcaccataccggcccgcggcatgtcatggccgcaacatgaggtctgaaacatgtacgcacccgatcactcgctcagcggtaaaaagtccttgcatcgaaaggggcatccaaaca

SEQ ID NO: 3713 - DNA, 1581 bp, unidentified
  source 1..1581: mol_type = unassigned DNA; note = element_5899135
  misc_feature 1..3: note = core
  misc_feature 4..248: note = LE
  misc_feature 249..1451: note = CDS
  misc_feature 1452..1581: note = RE
  misc_feature 8..225: note = bridgeRNA
tttcgtattataaggttagccagatttttctggttgacctatttttattaggttttatgattacagtagccagggtagaacgtagctgccattgggacattgatctcgtcaactaaactgttctccctctacttatagaaacatgtttgaggttggttgggacctagatctcgtataacaagcgaagctatgaaactataagaagagctagaggttactggtgaaaattaaattaaggagtgaaataaatgaatccagtaattggtctggatgtttcaaaaggagaaagtgaagtacaagcctttttaaataaaggtattccttacggaaaaagctttaaaatttatcacactagtgaaggattaatttcttttttacattttctaaatgatttagaaaacaagagcttagttaaacctactgtcattcgtgaatcaacaggacattatcaagcacctatcatacaattcttagagaaatacaattacttgtatatcgttattaacccaatcctgtcacatcagtctaaaaaaacaagcttaagaaaagtaaaaactgatgccatggatgcctttcacctatgcgaattgttttataaagaagaattagagccctataaaaaacgaggtattaatctcttaaatcttcgccatttaacaagacaacacgaggctataactggtctgtatgttcaagctaaactacaatttcacacaatgttagatcaaatattccctgaatatagacatgtatttggtgatttattttcaaaggtttctttaaatctattaaatgaatttcctacttctgaaacagttttagaagtaagtgaagtaactttagctgataagattcattctctatgcaaaactcgttcataccaatgggcattaaaaaaagcagcaaaattaaatgaagctgccaaaaataatccatttgagaatattgtgtatcaaagccatttagttagtttaaaaatgtttattaaaatgcttcttcaatatcaagagcatctatcaatcttagacgaacaaatagatactctcgctagagacattgaagaatatgagataatccagtctattccaggaatcggagaaaaaatcgctgcaacgattatctccgaaatcggtgaaatagaacggtttaatcatcctaaaaaattagtagcctacgccggtatagatcctagtgtgcatcagtctggcaaatttacagccactattaatcgtattaccaaaagagggtcaagtagacttcgtcacgtcctatacatggctgttctttgtggtataagaagttcaagaaataaacgattaaaggaattttacgatagaaaacgtgaagaaggaaaaccttcaaaagtcgcaataatcgcttgtgtaaacaaattacttcattggatatataccctaatgaaaagaaaagaaactttccttgatttaagctaaataccaaaattacgaagtaataacacaaccttccaattaggtgatggaaggctatttggtatgcacatttttagtatagcatgtgactattaagttgtttattgaaaaatattgacatcctattagctgg

SEQ ID NO: 3714 - DNA, 1375 bp, unidentified
  source 1..1375: mol_type = unassigned DNA; note = element_589e8c8
  misc_feature 1..3: note = core
  misc_feature 4..82: note = LE
  misc_feature 83..1111: note = CDS
  misc_feature 1112..1375: note = RE
  misc_feature 1085..1362: note = bridgeRNA
tgatggggtggataccccctcccgacggcatcgcaatatgccaaggtgatgtgggtcacatcacggagaggaggaagtatccatggctgaagttaccattgttggtctggatttggcaaagcgggttttccaagttcatggtgccacagcggatggcggcgtcgcgtttcgcaagaaactgtcacggggtcaggtgttggcatttttcgcagatctgccgccctgcgtggttgcgatggaggcctgcgctacggcccattattgggcacgtgagatcagtgctctggggcataccgtcaggttgatcccgcctgcctacgtcaagcctttcgtcaagcgtcaaaagaacgatgcggctgacgcggaggctatagctgaagcagccagccgcccgaccatgagattcgtcgagccgaagtccccccgacagcagggacgcgccatgatctttcgaacccgcgatctgtttgtgcgccagaggacacaaaccatcaatgcgctacgggcccatttggccgagcatggcctcattgtccctcaggggctgtcgaacctcgcaggtatccagcggcttgttgaaaagagagtgacagatttggaacctttggtggccgagactgcccgtatctaccttgagcagatcaatgatctgaccggtcgcatcgcaaagatggagacgacattgaagcaggaagtcgctcgatctgatgcctcgtcacggatgatgacaatgccgggtctcgggccgatcaccgcgatggcaatcgaagccttcgcttctgccctgtcagtgttcaagcgcagcagggatttcgcggcctggctgggcttggtgccacgacaacattctaccgggggcaagcaaatcttgggccgaacatcgaagatggggcaacgcgatatccggcggctgcttatcatcggcgcaatgtcggtgatccgctgggccacacggaaaggaacgatccagggaacctggctccatgccatgctgctgcgcaagccgcgcaaggtggtcgcaatcgccttggccaacaagatggcccggacgctctgggcgatggaaaagcggaaagaagattatcgggatccacgactggcagcagcctgacagtgtcagatagccaagagtgggacgtcggcgtgtgaggaggtcatggaaagtaaggacaaaagatcggtgacgatggttctggaaacgcatccgggtcaaggggccatgagcccgcagaattgattttgcaccagagccgcgcagctccataccggccagcggtcatgttcttgccgcgcaacaggcctgatacatgaccgcacccgatcacacgtcaatgctgctcaaaagccaacttgcgcgaaggggggtatccataca

SEQ ID NO: 3715 - DNA, 1435 bp, unidentified
  source 1..1435: mol_type = unassigned DNA; note = element_58a2ba2
  misc_feature 1..2: note = core
  misc_feature 3..222: note = LE
  misc_feature 223..1425: note = CDS
  misc_feature 1426..1435: note = RE
ctcctaccatcaattcgtagtataagtctatatggaatctattaaccatggaaaggcaggagggctcatttcttcctggatcttagaatccttatttcagtctgtcccctgcctccctgagccatgataggttgattgggtcatagaacccttgtcacgatggaggattggtggggaggcaattcttgcttttaccatgccatgattggaggaggaattgacatggacgaaagacagcggttcaaatggtttcttggtatcgatgtttccaaggagacattcgatgcgtcctgtatcaacacgaagggggaaaggcttttcaatctatcagcatctatggatagaaaagggttcgaggagctgatgaagcgattttctaccttgtctattcccaaagagtctgtgctggtaggcatggagtcaacagcatgttaccatatcaacctttattctttccttgtctctttaggttataccgtcatggttattaatcctctgctcatttctaatttcgtcaagcttcagctgcgcaagaccaagacagacaagaaagatgcctatgtgattgcacagtttcttcttctgaaccgagattccctttcccaaaccatcctatcttctgacatctcagatctcagagatctctccaggcaacgagagagtctggtggaccagatgagttcgatcaagagtgagatcaagcggttactgaccatgacctttcctgaattggaacatatttcgggcatttttactaaatccatgctccgtctgctctgccaatatccttctgctgcttccataaagcaggccaagcgctccaagatagccaaggtactgataccgggatcgtacgggaaacaaaccgatgtatcggtggaccgaattgtaaaggctgcacaggtatctgtagggacgtcaagcgccacgaaggagatcattctcagacagaaagtatccttactgatccagctggaagaacatctccaagagcttacggatatgctcatcgaactctgccaagggaagattcagggagatatggatatccttacctctatgaaaggaatcggggagaagaccgcagtgaattttctgatcgagataggtggagatataaaacagtttgaaagtcataaaaagctgattgctatggcagggctcgatccggctctctaccaatcagggaaaatcgataggaaagggaggatctccaagcgaggcaatagacatctcagacgggtgatctggcttatgacaacgaaggtcatccaatttaatgaaagattcaaacaatactacttgaagcgaagaaaggatggactaccttataaaaaggctgtgctggcaactgcccataagctcatcagagtgatgtttgcaatgttgaggaacaaaacattattcgatgcaaggatgaattgatgatagttga

SEQ ID NO: 3716 - DNA, 1583 bp, unidentified
  source 1..1583: mol_type = unassigned DNA; note = element_58ac9f6
  misc_feature 1..4: note = core
  misc_feature 5..288: note = LE
  misc_feature 289..1458: note = CDS
  misc_feature 1459..1583: note = RE
  misc_feature 36..265: note = bridgeRNA
tcacgtataatccaattatctcgatttggggtgattggattatttctcctttcctttccatctaggttgtaccgtcagatcgtttctggcgatataatatttctgcactgtggatttgtatctatattaatacagctttgactgttatgaggtgactcagaccacagtttcccgtcttaattggtaatcagttagttaacgcttgacgtttttatttacgtgatgacaaggccggaactcttgtggaaaacaaacagtgcatcattatcaacacaaggaggtgttctcatgtactttgtcggtatcgatatctcaaagtacaagcatgactgcttcattgctacggaagcaggcgaaatcatccgtcagaaccttaccatccaaaataatcaggaaggttttacactcttgcttcaagtccttgattccctggatcattcccaagaaatacggatagggtttgaagcaaccggacattatggtcttaacctgaagctgttccttgaaaaagcccactacagctttatggaaatcaatccggtacttctaagtaaattccttaaaagccagtccctcaggaaaaccaaaaccgacgcaatagattcgcggtctatcgcatactggttaatgtcggttgagtacaaaccccatccaaaggaattctatcacatgtactccctcaagtcattaaccaggctcagggattctttagtaaaacaacgaagcctctatcttgtcaagatgaccaatgtcctggatcatatcttccctgaattcaaaccattcttcaaggatcgcttttccctgacagccctctacatactggacaaatatcattctcccaaggcaattgctcgaatgcgatccagctcttacgatgagctccgaagaatgtcccgtggcaagtttaccctgaaccagttttttcagcttaaggatctggctgcaagcagcgtaggagaatccaatgaaattttggaatcccagctcatatcacttttgaagctttacttctcccttgatgaggagattcaaaagcttgaatctcagatcactcagttagtggccgtccttgatagccccataatgtccattgtaggcgtcggacctctttcggctgccgttattctgtctgaattcggcgacatctcaagatttggctctcctgctcagatgctttcctttgcagggttagagccgggatattatcaatccggcacctcggaacacagcggcaggatggtcaaacgaggttcttctcatttacggttcactttgatgaatgtctgcatccccttggttcggttcaacattgttttcgccgagtattaccgcaaaaaacgcagtgagggaaaacctcacagagttgcgatgtctcatgtagctaagaaactggtacggattatttacactctggaaaccagaaatattttatttgatcctgcccagcttcgttaattgcagtagcggcagttaacttcaatactgattctcggcctcttgactttttatgtctcataaaaggtctattggctatgcctttaattcttgtttttaaaaatctcttgacttttaatagttag

SEQ ID NO: 3717 - DNA, 1474 bp, unidentified
  source 1..1474: mol_type = unassigned DNA; note = element_58b00ff
  misc_feature 1..3: note = core
  misc_feature 4..122: note = LE
  misc_feature 123..959: note = CDS
  misc_feature 960..1474: note = RE
  misc_feature 1176..1354: note = bridgeRNA
aacatggagtaatcgcggcgcgaccgtctctggcttttggcttgtgagggtggttgcccccgataggatggaaaaacgggctctcgattggaaccgggcccaaacatcggatggaggcaaccgtgaaccaatatattggccttgatgtttcattgaaagacaccgcaatttcgatccgggaagatgggaaacggatctggcgggggaaatgtccttcagatcccaaacttctcgtgcagataatccgcaaaaaagctcctcgcgcgcagcgcatcgtattcgaaacgggaccgctgtcgacgtggttctatcacgcgctgacgggcgaggggttgccggcgatctgcattgaagcgcggcacgcgcagaaggtattgaacgaaacgctcaacaagaccgatgccaacgatgcggatggtttagcgcaactcgctgaagcaggcttttacaaagcggttcgcgtcaagtcgtttgatgctatgagggcccgcacattggtggctgcccgggaacagctcttgtacatctcaacgcaacttggcaatcaaatccgcggcctgatgaagaccttcggtctgatcatcccgaaagcgaagggtcgagtgtttgatggcgatgtgcggaagcttttggatgggaacagcgagcttgcgaagattatcttgcctcttttggaggcgtggcacgatatccgcaaacgcgcagccgatcttagtcgccagttgctgatagcggcacgtgcgagccaagccgcgaagctcttgatgacaattccgggagtcggcgcggtcacagcggtgtcctacgttacggcaattgaaaatccggaaaactttcgaacgtcgcgctcggttggcgcctggcttgggctgacaacgcggcgatatcaatcaggcgaggtcgactatgacggccatatctcgcgaaggggacaatcgtttacgggggctgctttatgaagcggcgacggtgcttttgacgagaaccagtgccaggaccgagagcagtctcaagagctggggacttaaactggcggagcgccttggcttcaagcgcgccgcggtggcggttgcccgaaagcttgcggtcatcatgcacagcatgctcaggacgggagaagtgttcaacgcatcgactggcgcgaccatataggcgacgccttcatccctcagcgcgccatctaactttggtgctgagcgtccctgctgcggacgtgggttggatcattccgcttctggtggctgcagctcgttgagactgcgcctcgaacattaggaagatccacctgcgaaaaccatagtgcggcgacatttgtcgaccgcggagacaaccctgctcccagcactggatagctctgaagaacatggccggtgagggcagatccatccaatcagttcagccgggttgcctgtcgcgcaagccggcagggtcgctgaatgctcaaacccgcttgacggctggaatgcgattagac

SEQ ID NO: 3718 - DNA, 1336 bp, unidentified
  source 1..1336: mol_type = unassigned DNA; note = element_58b85cc
  misc_feature 1..2: note = core
  misc_feature 3..79: note = LE
  misc_feature 80..1117: note = CDS
  misc_feature 1118..1336: note = RE
  misc_feature 1092..1320: note = bridgeRNA
agataattggactcccctcacttcctaagaagtgagctaatatgtttgttctcacacaaaacataaaggagtccaagggatgaagaatacaatagctggtgttgatttagcaaaagaagtcattcaagtttgtctgtgtacgaacaacaaagtgcattcaaatattgagatgcctcatcacgaatttctaacctggttgtttacgtcgaagccaatgagcataatttttgaggcctgcggtacctcaaactactggaaacagagagcgattgaagcaggccatgatgctcaacttatttcagccaaattggtagcgtctatcaggcaaaaccaaaaaacggataaaaacgatgctctggcgattgttcaagcctcgcaattaactgacatacagtttgttaagggaaaaagtgtcgaacagcagcaattgcagtcaatgatgcgtttgcgagagctcgccatcaagcaaaagacagcgtccagtaaccagattaaagctctattgctggagtttaatattcgagtatcgcccaagaaaggcggtttgaaaggggttatcgaatcgcttttggaagatgctgaaaacggcttttcctttgagtttaggcacgcattaaatacagcctgggggcttcatttaggattgctcgattcaattcgtgtttatgaccgctgcctggaaacatcgattgatgagcatgacgactgtaagcgtttgcttaaactggaaggggtcggcactttaaatgctatcaatctatatatcgcgcttggttgtgctgatctaggggtctttaacaaaggaaaagatgcatctgcctgtattggtttaactccgttgcagcattcttctggcggcgttacaaagctcggtcatatcaggaaaaatgctagaagcagcacccttcgaagccaactgataacgggagcaatggcagtggtcaatcaaataatgaagcgaaccgctgtgacgaaaaaggaagcctggatacaaggtttagtggcacgtagagggaaaaagtgtgcagcagtagccctggctaataagaccgtgagaactgcttatgtgatgctcacgcaagggacagaatataaagcggagttagtagctgcttaataatgggtttgacaataaaaatgcacaatcgaagataaaaatcggcgtgtcaattcagagagttaactagagcttcgagctcgctgacaagatttgaacacacgtttgcgtaaatatcctggagccagagttagctactcaattagagctcgtacataagtatgcattttatttctttgaatgagcaatttgattgttgacaaggggggagtccacata

SEQ ID NO: 3719 - DNA, 1463 bp, unidentified
  source 1..1463: mol_type = unassigned DNA; note = element_58bf367
  misc_feature 1: note = core
  misc_feature 2..109: note = LE
  misc_feature 110..1126: note = CDS
  misc_feature 1127..1463: note = RE
  misc_feature 1152..1405: note = bridgeRNA
gaatgaaagggacttccccgtcccgagctagccgcgtattgcggcgaacggcatcgaagtgccacgatggggttgcgaatctcatcaactcactcggaaggggaagtccatggccattattgcgattgggatcgatctcgccaagaacgtgtttgcggtgcacggggtggatgcagcgggcaaggcggtgctggtgcgtccggcggtgcggcgagatgcgctgctggagctgatggccaaactgccgccgtgcctgatcggcatggaggcgtgctcgggggcgcaccactgggcgaggcagtttcagcagttcgggcaccaggtgcgcatcatggcggcaaagtttgtggcgccgtatcggctcagcgggcggcgaggcaagaacgacgcggcagacgcgcaggcgatctgcgaagcggtgcagcgcccgcagattcggttcgtgccgatcaagagcgaagacgcgcaaggccgcttgagcatccaccgcgtgcgccaagggttcatcgaacagcgcaccgccacgatcaaccgcatccgaggtttgctcagcgagtacggtcacgtacttccgcagcgcgccgaggtggttcggcgcgaagcaggccaatgcctggaagacctgccgggctgggcgaacacggcgattggcgatttgctcagcgagctgcaccggctggatgaacgcattgccgagtacgaccggcacatcgagacgatggccaaggccgacgaccgctgccgcaggctgatgtccatacccggtgtgggcgacaagacggccaccgccctgatggccagcatcggcagcgcgcatgacttcaagtgcggcaagcagctggcggcgtggttgggcctggtccccagccagtacagctctgggggcaaacagcgtctggggcgaatcaccaaagccggtgacggttacctgcgcatgctgctgatattgggcgcgcgagcggtggtggccaatgcgaataagaaggacgaccggctcagtcgctgggtggcagacctggctgagcgacgtgggtactggaaagcggtggtggcggtggcggccaagaatgcgcgcatggcctgggcgatgctcagcaaaggcgaagcgttcaagccattgacctgacgactgcctgagagtgcccgtgtaccgattcatggcgtgatgccgcgttgatgaaccaaggttggacctgcgcggggaaggctcggttaacttgtgaaggcgccacgtggcgaccttgactaacgaatggagcccccgcgtgcgtctttcatcagggtccgcagcacagtgatgctgctttgaagaccggttgtagtgttgccgtccttatcccttggttgacctttgcgcgactgatccctgggttggtgttttgatggtttgcaggttccaggtgaatcgccttcggcgaatcacccggggatggttttgcttgacagatggggaagcccttgta

SEQ ID NO: 3720 - DNA, 1370 bp, unidentified
  source 1..1370: mol_type = unassigned DNA; note = element_58c202f
  misc_feature 1..2: note = core
  misc_feature 3..83: note = LE
  misc_feature 84..1106: note = CDS
  misc_feature 1107..1370: note = RE
  misc_feature 1130..1365: note = bridgeRNA
cgatgtaatggacacctcccaccttacggcatcaatgtgccagactgaggtgttaacttcagttcccagggggaggtgtccacatgaatattaaacgtattggcctcgatctcgcaaaacaggtttttcagcttcatgcggttgatcaccaggaacgtattgtgcttcgcaaaaccctgcatcgcgcccggatgctcacctttttcacccggctcgaaccctgtcttattggtatcgaagcatgcggctcctcgcattactgggcacgcgagctgacacgactcggtcacacggttcgcattattccgcctcagttcgttaagccttatctgaagggcaataaaaatgatgccaatgatgccgaagcgatctgcgaggccgtcagccggccggggatgcgctatgttgccattaagtctgaagcacagcagagcatgcaggctgaacaccgggttcgtgcccgcctgatccacgacagaacagcgctcagcaacgaaatacgcgggatgctgggtgaatttggctttgttcttcccgctgggttgtccgctctccgtaaagcactgccggaaatattttctcagcaggaaaaatgggataaccgctttatccgtctgctgagtgagttaacagaagaacttcaggcacttgatgagcgactgaatcgttatgaccgccggcttaaacagctggcgcaggaagatgagcgtatcagacgacttcaggagatcagcgggattggtccggtaaccgccagcgccctggtcgccgcagtgggtgatgcaaaacagtttaagagcgggcgggagatggcagcctggctgggactggtgccccggcaacattcgagcggcggaaaaacaaaaatgggtcacatcagcaaaaggggcgacagctacctgcgaacgctgctgatccacggtgcccgtgcggtgctgaatgcgtgtgatcacaaggaggaccggcgaagccggtggcttcagtcggtggcagaaagacgtaacaggaatatcgcaacggtcgccatggcgaacaaaaatgcacgtatagcctggtcggtactgagccgggggggaagagtatcgtgtgatgtgatacagacctgactgaatgtcagagaagcgtcatcctgtcgagagattgcggagtcattaagcagtgatgtgtaacaggtaagaccgacacctgaaaactccggtttacccgaaggctccctgcgaagcaaagccgttaggccgaatggaaccaggtgtgcagataacatcatggccgggtacgacggtaccgaaagagaggccggatatacgaaagcatcttactcccgtaacacaaaatgcagaatggcttgcataacgggaggtgtccatata

SEQ ID NO: 3721 - DNA, 1365 bp, unidentified
  source 1..1365: mol_type = unassigned DNA; note = element_58c5521
  misc_feature 1..2: note = core
  misc_feature 3..83: note = LE
  misc_feature 84..1109: note = CDS
  misc_feature 1110..1365: note = RE
  misc_feature 1086..1352: note = bridgeRNA
tgatggtgtggatgccccaccccggaaccggcatcaaactgtgccatagtggtgatgttgaaagcaccaaactggaggcaaccatgaatgaagttacaatgatcggcgtcgacttggcaaagtccgttttccaagcgcacggcgcgacggctgtcggcgaacctgtgttccgcaagaagctgtcgcgggggcaatttttgaagtttttaagtgagcagcagccttgcgtggtagcgatggaggcttgtgcctcttcgcattattggggtcgcgagatcctgaagctgggccacgatgttcgtctgatcccgccgatctacgtgaagccattcgtcaagcgtcagaagaatgacgccaatgatgcagaggctattgccgaagcggcagtccgaccgaccatgcggtttgtgcctgttaaatcagctgaacagcaatcccgttcgatgatcttcaagacacgggatttgtttgttcggcaacgtaactccatcatcaatgcgctacgcggccatttgatggagtatggcatcatcgcccctcccggtcggaactttgtgaagaaactagcagaacagatagaaagcccggattgtgacctgccttcaatcgttattgaactcagccgtgtccatctggatcagcttaatgtgctcaccgacaaagtcgttacgatagagcggcgtctaaaagaggaatcgaagtccgacccagagacgattcgactacagaccgcgcccggtattggtcctgtgagtgcaatggcgatcaaggcattctctccgccgttggaaggcttcaaacgcggccgggattttgcggcatggcttggtctggtcccggttcagaaatcgacaggtgggcgccaagtgttagggcgaacatcaaagatggggcagcgcgacattcggcgactgctgataattggggccatgacacggatcagatgggcgattaaaaatggtccacccaaaggctcatggcttgagcaaatgttagagcgtaagcctcgcatgctggtagccatcgcgctcgccaacaaaacggcgcgcatcatttgggcgatgatgacgaaacacgaagattatcgagatccgatcgcggtagcctaaaggctgcatcgctcggtatgatgtgagaaggacattgagacagtaaggacaaatgatcgactagatcgaggttaggaaaaccaggccttcccagagagcttagcgctcgtgtcattgatatggacctgaccttcgcatcgccataccggcccgcggcatgtgaaacgccgcaatctgaggcctgacacatgaccgtacccgatcacatgttcaaaccgttgataatatttcttgcatcaaagcgggcatccacaca

SEQ ID NO: 3722 - DNA, 1460 bp, unidentified
  source 1..1460: mol_type = unassigned DNA; note = element_58c85a7
  misc_feature 1..3: note = core
  misc_feature 4..222: note = LE
  misc_feature 223..1440: note = CDS
  misc_feature 1441..1460: note = RE
  misc_feature 7..220: note = bridgeRNA
ctaatagggttggaacaaggtccgtcaatcggatagtgttccaccgagccaccggtgggtgagcactgccgagccctgggcagcgagccctatgcctagacagtgcccccatcggccggcgaggggatgagacggctagtgggatgacgtgccttgagcactgaactattaggtcgacgcgagtctcctccggctccattcatattcgactggaggtgcagtttggggatctatgtcggcatcgattgggcggaggcgcaccacgacatctgcgtgctggacgagacgggcacgctcctcgccaagcgacggatcgcggaaggcctcgagggggtgggtcagctccacgcgctgctggccgaccatgcgcaggagcccgaccaggtcgtggtgggcatcgagaccgaccgcggcctgctggtgggcgcgttgctggccgcgggctaccaggtctatgcgatcaacccgttggccgccagccgctaccgcgaacgccacgtgacgtcgggcgccaaatcggatccgggcgacgccaaggtgctggccgacctggtgcggaccgatcgccacaaccaccggccggtggcgggcgactcggagctcgccgcgtcgctgcaagtgctggcccgcgcccagcagaacctgatctggagccggcaacggctcgtcaaccagctgcgcaacaatctgcgcgagtactacccggcggcgctcgtcgcgttcgggacggagcttgctcaccccgtggccctgggcgtgctcgacgccgccccgacgcccgcgaggggccgcacgctctcgcgggccaagctggcggcgattttgcgccggggtggacgcgaacgtggggtggacgaaaaggccgctgcgattcaggcccagctgcgcgcgccgcaactggccgcgcccgccctgatcggcgaggcctatggcaaaagtgtcgcgtcgaccgtccgcatcctgcgcggaatgaatgcggagctggcccgcctcgagacggagctcacccccagttttgagaagcacccggacgccgagatctaccgcagtcttcccggacttggcatcgtcctcggcgcccgggttttgtcggagttcggcgacgaccgaacccgcttcactcatcctaaggcgcgaaagaactatgcgggcagttcgcccatcaccaagacgtccggcaagagccgggtggtcctggcccgtatggcgtgcaatcggcggctcgccgatgcctgccaccaatgggccttttgcgcactgaccccctccgccggcgcgcgcgactactaccaccggctccggcagcgcggcaagacgcatcatcaagcgcttcgcgccctggccaatcgactcgtcgggatcctgcatggttgcttggatcaccgtcagatctaccgcgaagaaatcgcctggccgggctcgctgacggttgccgcttgacttttacaaccgtgggatgt

SEQ ID NO: 3723 - DNA, 1362 bp, unidentified
  source 1..1362: mol_type = unassigned DNA; note = element_58cb5ee
  misc_feature 1: note = core
  misc_feature 2..69: note = LE
  misc_feature 70..1095: note = CDS
  misc_feature 1096..1362: note = RE
  misc_feature 1131..1358: note = bridgeRNA
taatgagatggtcccctccaccttacgagcggtacgctttgtagcgtactttcactcctggagaccatcatggagaacgtggcgctgatagggatcgacctgggcaaacattcgtttcaccttcacggccaggacaggcatggcaaggccgtcttccgcaagaagatggggcgcaagcagatgctcgagtttttcgccacgctccatgcttgtagcgtcgtcatggaagcctgtgcgggtgcccattacatggcccgcaagcttgcgggcttcggccatatggtcaaacttatttcgccgcagttcgtgaagccgttcgtcaagagcaataaaaacgacttcgtcgatgccgaagcaatctgtgaagctgcttcgcgaccatcgatgcgcttcgttacgccgaagagcgaatctcagcagacgctgtcggcactgcatcgtacgcgggaatcgttggtgcgcgaccgaaccaagacaatcaatcagatccacggcttcctactcgagttcggcattaacttgcctgttggacaggcggtcatgacacgcctaccggcggtactggccgagcactcgctgccacctaggctagttagcacgcttgaacgactgcacgagcatttcaagtatctcagcgggcagatcgcggacctcgagaaagagatcaagcaccagcttgccgaagacgacctcggtcagcgtctaatgagtatccctggcgtcggccccatcacggccagcgtgctgaccaccgagatgggggacggcaagcaatacggatgtagtcgagatttcgccgcgtcggtcggactcgtgccacgccagtacagtaccgggggtagaagcaacctgctcgggattagcaagcgagggaacaagaacttgcggcgcttgctggtgcagtgcgcgagatcttatatgcgaaggctggagcgacagaacggcctgctcgccgactgggtacggcgcatgctcacacgacggcacgcgaacgtggtggcctgcgcactggccaacaagcttgcccgtaccgcatgggcgctcgctacgcatcacaccactttcaatgcaggtgaagcggccacgccttcctgacttgcatatcgtttcccccgctggatgtactttgacgacgtgcctacctggttttgcgacgactgatttgatgacgtgaacggcaatccgacctgacgaacaacctgaacacacgataggctgaaaggccgagtaatttcttaggggcgttgggtgcgactctcatcgtggcgcggggatatttccctttcaacgacgccgaatagattcgagcaagccgaccacaacatcacgattagggttgcaaaaacggaggggaccatagat

SEQ ID NO: 3724 - DNA, 1473 bp, unidentified
  source 1..1473: mol_type = unassigned DNA; note = element_58cd4f7
  misc_feature 1: note = core
  misc_feature 2..228: note = LE
  misc_feature 229..1338: note = CDS
  misc_feature 1339..1473: note = RE
  misc_feature 8..231: note = bridgeRNA
cgttaccttgtgagtgcccccgatgggcgggggtctggtcgctcgaccgggtatggttttgttggcctgctatcaatggtccgggggtgttgccgcccggtcgagagacacgcgttgaccgctgatagggacacggcccagcactgctgaggtctcttcgtaacgtgggtgccggcatcgggtgtcaggactgcgaccagcagtgatgcgtcaaaggaggacgacatcatgaactcccagtacccggtggtcatcggtctggatgtcggaaagaccggacaccacgcctgcgctctggaccccgacggcagcaagctcttcgacaagcccctcccacaacacgaggcaaagctgcgtgagctcttcatgggcctgcagaagcttggcgacgtgctgatgatcgtggaccagcccaacaccatcggggcgctgccgatcgcggtcgccagagactgcggctgcgcggtcgcctatgtgcccgggctcacgatacgcaaggccgcagacctctatcccggcaggtcaaagacagacgcgcgcgacgcgttcatcatcgccgacaccgcccgcaccatgccccacacgctcagacaggtcgaccgtgacagcgaagtcctctccgctgtgaaggtcctcgccggcttcgacgaggacctcgcccacgagaccacccgggcgttgaaccgaatccggtcgctgctgacgcagatccatcccgcactcgagcgggtatttaccggcggcagcctttccaccgcactggtgttggatctgttagagaagtttggcggccccaccaggttgaaaaccgctggtcgaggcaaagttctgaggttcgccaggtcccactctcgccgcgatccagaaccgctggtcgatcgaatcttcaccgcactgggcgagcagaccgtcatcgttcctgcgaccgccgcagtggagttggtaatccccagagtcgctggtcaaatcaaggaactcaaagcgcagcaagcgacggtggccaggaaggtcgaggggatgctggaggacttccctctcgcggcggtcatgaggagcgtgccagggatcggcctcaagaccgccgcgcagatcctcttggccatcggtgacggctccgcattccagactcccggacacctcgcagcctatgcaggcatcacgccggtcacgcgaagatccgggacttcgatccgcagcgagttccccgcccgatcaggcaacaaacgcctaaaaacgccctgttctactctgcctgggtcgcctcgaaccacgacccgatctcgaaggcctactacgaccacaaacgcaccgagggcaagcgccacaacgccgccgtgatctgcctcgcccgccgccgccgcaacgtcatcttcgccatgctccgcgacggcacctactaccaaccacccgcatcagcaccaacccccgaaccagccgctctcgcagcttgactcacaacatagggacaccccc

SEQ ID NO: 3725 - DNA, 1616 bp, unidentified
  source 1..1616: mol_type = unassigned DNA; note = element_58cf69c
  misc_feature 1..3: note = core
  misc_feature 4..251: note = LE
  misc_feature 252..1487: note = CDS
  misc_feature 1488..1616: note = RE
  misc_feature 8..226: note = bridgeRNA
gttcgtattatgtggttagccagtaatactggttgaccattttttatttggtcttaatataaacatagtagccggggtagaacgtaagcccccgtgggattagatcccgtcaactaaacagttcgccccctacttgtagaaacatgtttgtggctggttgggacaatgatctcgtataacaagcgaagctatgacactacaagaaggattaggggtatccggcaaataaagaaattaggaggagatctagtatggatccagtcgtaggtctggatgtctcaaaaggggaaagtgaagttcaagggtttttagagaaaggaaagccttatggtaagagctttagtattaaacacgatatagaagggttagagatgttacttgattttctgaaagagattaaagaggtcactggtcaacaacctccggtagttttagaatctacaggacactatcataaaccagttgttcagtatttagatgagcgtttttatttattaatcattgttaaccctcttatttcacataaggcgaaagcttctagtttacgtaaagtaaagacagatgcagttgatgcttaccgtctatgtgaactttactataaagaggatttagagccctataaaaaacgtggaataagactattaaaccttcgtaatcttactaggcagcattcaaatataaccgagatgtttgttcaaactaagttgcaatttcaggcggtgcttgatcaggtatttcctgaatatagaggagtctttggtgacctatattcaatcgcatccttagctatcctacatgaatatccttcctcagaagatattttaatggttagtgaagaaaagttaggcacaaggcttaaggaattatataagaaggggtcaaaaaaatggatagatgaaaaggtccaacttcttaaagaagcggcaactcgtaatccatttcaaaagaatttatatcagagccacctattaagtttggatatgtacattaatatgcttcttcaatataaagagcatctatcaaagttagaagcagagatagataccctcgcaaaagatattgaagaatataaaatcatccaatctatacccggaatcggagagaaaatcgccgccacgataatttccgaaattggtgaaatagaccggtttgataaccctaaacaactagttgcatttgcaggcatagatcctgaagtgtttgaatacggaaaatttaaagctactctagtccgcattacaaaacgaggttcaagtaggttgaggcatgccttgtacatggcagtccggtctgggattcgagactcacgtaaaaagaagactactgacgaaataatccctagaaacaagagattaagagagttttacgataagaaacgtagtgaaggtaaactctttaaagtagctgtaattgcttgtgcaaacaaacttttacaatggatatttgccctattaaagaacaaaaccactttccaagatgatgcatagttcctaaacttatcaaagcaatgaaaaaccttccaaaatcatgatagaggaaggttatttggcatgcctattagtatatcatgctagattttaagttttcattgaaaaatgttgacaaactattagctg

SEQ ID NO: 3726 - DNA, 1273 bp, unidentified
  source 1..1273: mol_type = unassigned DNA; note = element_58d9ed7
  misc_feature 1: note = core
  misc_feature 2..203: note = LE
  misc_feature 204..1253: note = CDS
  misc_feature 1254..1273: note = RE
  misc_feature 2..203: note = bridgeRNA
ctcactgtgatgctggtgtggtcgtcggatggattgacccataggctgcgcggcgctcgtgctgcccttcacgcgaagagtcgtccctccggcgacgtcggcgtcgagcgatctgacctgataggagccggtcccctgacccaagtgaggcgcgtcgttcctcgacgccgaccgcgagccgtgcttccagaaggaggacgagcgtgatctggatcggggtcgacgcgcacaagcgcatccatcaggcggtggcgatcgacgagcggggcgtgcagggcgagcgacgcatcgccaacaccgcggcggcctgggccgagctcttctcgtgggcccagcggtggcccgagcggatctgggcggtcgagggggcctggtacctcgggcgcggtctggcgcagtatctcgccggccgcggcgagcgcgtgcacgaggtgagcggacggatcaccgcgcaccgccgcggcggcatggtgcgccgcggcaagaacgaccgccttgacgcccacgcggtggcgacggtgctgcgcgaggaggctgagcgcctgccgcgggtgttcgccgaggatgaggggaccgccgcggtgcagctgtggagtcgcacccaggccgaggtgaccaaggacctcacgcgtctgatcaaccgcctgcacgacctgctgctggtatgcgatccggagtacggggccaagctgccggcgctcaccaccaaggccgccatcgcgcagctgcgcacgtacaccgcacccggggacaccacgctcgcgcgcgagcgcgagcaggtcatccgtcagagcgccgagcagctcgcgctgctggacgcccaggaccgcctgctgcgacgcaagctggagcacgcgagccaaggcacctttcgacccttaagagaggtcgagggcatcggcgcgctcatcgcctgtggcctcgtggccgaggtcggccggccccggccgggttttgccgaggagcagctcgcggcgcttgcgggtgtctcgccgctggaggcctccagcgccggtgccacacgccatcgcctcaaccgcggcggcaaccgccggctcaacatgctcctgcaccagatcgtgctcacccaggggcgtatgtacgcacccgcgcaggcctatctcgcgcgtcgacggaccgaggggctgagtgatcgcgaggcacgccgcgcgctgaagcggctcatcgtccgtcgcgtgtaccgtgcgctctgcagctgctttgaccgatcactcgagagggtcgccgcatgaccctcttgacataggagctt

SEQ ID NO: 3727 - DNA, 1499 bp, unidentified
  source 1..1499: mol_type = unassigned DNA; note = element_58dac5b
  misc_feature 1..2: note = core
  misc_feature 3..245: note = LE
  misc_feature 246..1478: note = CDS
  misc_feature 1479..1499: note = RE
  misc_feature 7..239: note = bridgeRNA
ctaatggggctgcatccggtcggtagtgcagcaggatcgggtgtccgagccgccggcgggtgagcactgtgtgtcccgggtccgatcctcgaggcccaccttcagaccgtgcccccgccggttggtgaggaggagcggatggccggtgggatggcgtgcctcgagcactgatccattaggtcgccacagccttctcctccagggtcggatgctgctgatgccgatccggaggaggccagtgcgtggtgttgttcctcggcaatgactgggctgaggcccatcacgacatcgagctcgtcgacgactccggccgccgactggcccgccgacgactgcccgaaggcgtggaggggctgcccgcgctgcactccctgatcgtcgaccacctggccgaggacgccgagcctggccaggtcatcgtcgggatcgagaccgatcgcgggccgtgggtgcaggcgctggtcgccgccggctacacggtctatgcaatcaatccccggcaagtggcccgctatcgggaacggcacggcaccgccggcgccaagagcgaccccggcgacgcacacgtactggccgagctggtgcgcctggaccgggcgcatcaccggccggtggccggggactcggcgctggccgagcacgtcaaggtgctcacccgcacccaccagtcactgatctggtctaggcagcggcagaccaacgcgctgcgctcgatgctgcgcgagttctatccggccgcattgaccgccttcggcgaagacctggccagccgggaggcgctggcgatcctcgcgctggctccctcacccgagaccggccgccgactctcacagagcaagatcgccgccgcgctgcgccgcgcgggacgacaacgcggcatcgacgcttcggccgagcggatccaggccgcgctccgcacgccgcagctgcaggcccatcctggcgtggtgagcgcctacgccgccgccgtgcgctcactggtcgccgtgatcgacgccctggtgacccaggttgaagtcctgcgcggggaggtggaggcgggttttggccggcacccggacgctgagatctacctgagccagcccgggctcgggccggtcctgggcgcccgggtgctggccgagttcggagatgacccgacccgctatgccgatgccaaggggcgcaagaactactccggcatggccccgatcacccgcgcctccggcctccggcggatggtgctggcccgccctgctcgcaaccggcgcctggccaacgccctctacttccaggccttcgccgcgctgagcagctcaccgggagcgagggcctactacgacgcccagcgcgcccgcggcgctacccaccaccaagcgctgcgcgccctggccaaccgcctggtcggcatcctgcacggctgcctgcgccaccacatcgcctacgacgaagccatcgcctggcaccgcgaatctcagtcgcaaggaaccgccgcttgacggcttaacaccgtgggatgt

SEQ ID NO: 3728 - DNA, 1404 bp, unidentified
  source 1..1404: mol_type = unassigned DNA; note = element_58ef10b
  misc_feature 1: note = core
  misc_feature 2..95: note = LE
  misc_feature 96..1118: note = CDS
  misc_feature 1119..1404: note = RE
  misc_feature 1164..1399: note = bridgeRNA
taatggaatggactccaccctctcctaatcggcatcgtgatgtgccaaagtggagattcgaataaaccacttaaacgaagaggggggagtccgagatgaatattacgacgattgggttggatatcgcaaagaatgtgtttcaggtgcgtggtgtggatgggcatggcaagggtgtgctatgcaagaagctgtcgcgggggaaggtgttggagtttttcgtcaatcttccgccctgcctgatcggcctggaggcctgtccgggagcgcactactgggcgcgggagttgatcaagctcggccacacggtgaagctcatgcccgcccagtatgtgaaggcctatctcaaaggcaacaagaatgacggcaattatgccgaggccatttgcgaggctgtcagccggccggggatgcgctttgtggcgatcaacaccgaggcccagcaggatatccagatgttacaccggatccggagtcgtctggtggccgatcgtaccgcgctcatcaaccagatccgggggcttttgggtgaatacgggatcgtctttgggcaggggccaggccaggtgcgccggggcgtggcggtgttattaaagcgggaggatccgcgcttgtcgggaatggcacgcgagctcctcgaggacctgcgcgcgcagctcagtgagctcgaccagcggagtgatgtgcgcgtccgagaggcttgtagagtggatggatgcagcgtgaagctcgccgcgcttcctggcattggcccgctcacggccacggcgctcgtggcggcggtcaatgatggcaagcagttccaaaacggccggcagatggcggccaacctcgggctgactccgcgcgagcactcgagcggtgggaaacagcgattgatgggcatcagcaaacgcggcaacacctatctgcgtaccttgctcatccacggagcgcgcacggtgttacgtcacgcggcgggtaagaccgaccggctctcgtgctgggcagtgacgattcaagccagacgcggcgccaatgtcgccgccgtggcactggccaacaaactcgcgcgcatcgcttgggcggtgctggcccgcgatcggatataccgggcggattgggtggagcaatcggtgtgacggcggcccggaaggtttgagtcacagcccgtattcggttaacaacacaccacagattgcgaaggtgaagaaatacctgatggcacaacaggtgagaccggcgttccgcgattccgccaatcgtagtggccttttgaggccgtcaggctataaggaaccagaacgcgcagattccatcatggccagagtccgataccgtgctcacgaacaggccgaatatatacgtgcagtcttccttacaagccatcatcaatcctcaccttgcaaaccgggtggagtccatata

SEQ ID NO: 3729 - DNA, 1230 bp, unidentified
  source 1..1230: mol_type = unassigned DNA; note = element_58f2f01
  misc_feature 1..2: note = core
  misc_feature 3..207: note = LE
  misc_feature 208..1215: note = CDS
  misc_feature 1216..1230: note = RE
  misc_feature 6..212: note = bridgeRNA
cttgtatctggacatagcgcccctagggcgttatgtcttccgactgatcatcggaggaggtgcgggaagtccagtcgctcctgaagcttcgagcttgtgctgtagatcggctcccgccctccctttgctggcccacgatgtccgtacggtatccagagtccgccgctggcgtgaactcgcatccacaaggcaggaccgggcgcagcgatgatcgtgttcaccccacgatggaggaatcgctcatgtccccagtcgtcggcatcgacgtcgccaatacgcagtttcgacctggccatcgacctggccaacggcaagtaccgcaccaaggccaagctccccaacgatccgaagggctttcaggtcctgcagacgtggctgcaaacccatgcgcaggcggacagctggatcgtgatggaagccaccggcacctaccacgaggccctggccgagttcgtgtatgggttgggctaccgcgtgtgcgtgctcaatccggcgcagatggcgctgtatgcacgcagccagctaacccgggtcaagaccgaccccagcgatgccaagctgatcgccagctacggccagcgccatgcggcccagctgcggccctggcagcccgatccgccggcgctcaagcggctcaaggcgctggtgcggcgccgggacgacctgttgcagatgctgcagatggagcgcaaccgcttagacgtcgcagcgctggtggtgcgcgactcgctcctggagaacatcggccagttgcaggcgcgcatcgcgcagatcgaacgggccatcgacgaccagatcgaccaggatcccaccttgcgtgggcagcgcgaactgctggtgagcatcgacgggatcgccagcaccagcgcggcgttgatgctggcggaactgggcaatgtggagcgcttcgcccacgcctcggcagtgaccgcctttgccgggctcaacccccggctgcaggagtccggcaagcgtcagggccaggtctgcatctcccgcaccggctccccgcgcctgcgcgccggcttgttcctgccggccttggtcgctatgacccacaacccagtcgtccgtgcgctgaagctgcgcatgcgcgagcgtggcaaggccaacaagcagatcatctgcgccgccatgcgcaagctgctgcacatcgcctacggcgtgctcaaatcacgcacgcccttcgatcctcaaaagacccttgcctgttaggggggaagacggtat

SEQ ID NO: 3730 - DNA, 1821 bp, unidentified
  source 1..1821: mol_type = unassigned DNA; note = element_59014ff
  misc_feature 1..2: note = core
  misc_feature 3..70: note = LE
  misc_feature 71..1231: note = CDS
  misc_feature 1232..1821: note = RE
  misc_feature 1284..1501: note = bridgeRNA
agattctatggggcaggcggcgagggtgtggcaccatcgttgctgtgagcatcaactgatggagtgtcccatggaacggaacgatttaagccgatccctcgtcgcctttgatcaaaatagcacgcttgtggcggtggttgaactgagccttaagagctggctggtggcgggtcttgtgcccggcctgacgcgccagccgctgaagaagcagggtgccgatgcggctgtgcttttgggcctgctttatcgctggcgggacgaggcggccaaggctggcggtgtcatcaagcggattgtggtggcgttcgaggcgggccgcgacggcttctggctggcgcggtggctgcgggcgcgcggcatcgaggcctatgtgatccaccccagcagcattccggtatcgcgcgaacatcgccgggcgaagacggaccggcttgacaccgggttgttgttgcgcgccgttctgggctggctgcgcggcgagccgaagcattgcagcatggtggcgatcccgacgcttgaggaggaagacgccaagcgtccgagccgcgagcatgagagcctggtcggcgagcgcacccgtctggtgaaccggatgaaggcgacgctgatgcggctgggcatccgcggcttcaacgtcaagcggcgcaaggctgcggacggccttgcggagctgcgcacgccggaaggggtagcgctgccgcccaacacgctggcggagctgcgccacgacatggcacggttgcgcgtgatcggtgagcagctcaaggagatcgagcgcacccggctggagcgattgcgcaaggcgcctcgggaagggacgcatcccatgatgctgatgttggccaaagtcaagagtatcgggatcgagacggcggatatgttggtgcatgaggttctttcgcgcggcctacgtgatcaaagggcggtggcacgttatggcggcattacgggcgcgccggacgagagtggcagcaagcgccgggaaaaggggctggccaaggcgggtaatgcacgcgtgcgtcgcggcatgttgcagctggcgtggcgctgggtcatgttccagaagcaaagcgttctggcgcagtggtttcgagagcgcaccgaaaatgccggcggtcgccatatccgcaagaccatgatcgtggcgctggcccgcaagctgctgatcgcgctgtggcgctatgtgacgactggcgaagtgccggccggcgccatcctgcgcgcggcgtgaaccgtttggtcgaaacaatttaggagccatcacaggtttggcgttgatcggccccgtccggtgccaatgccaagacgatccgaggtggcggtgacccgccccgacccatggccctcgtgccgcgggagagaatgggcccgcctcccggagcctcgccaccgatgcgtatgactgcatcatggttcggatccctcgtggatccaccgaatacaaggttgtggtgcgcgttgatccgccctccacgacggcaggctcgcctcagattgtcttgctttgaaccacggtttgtcgacagactccgaacagagagactcccgaactgagaggttgaaaaaagagtgcgtgtggcgcggtcccgaccacctcagcgtgacgccgtgctcgccaccgtcaaggcgtggcctggcgacggcggagcttgtggaaccaccagcgcgacggccatccttgacggcgtttgcgcgcggcgtcatcgaaccatggcaggtcgggacgaagaaacggctctcggtcgaaccaagaaacgggaccaaaaggttgaaaaaaacatgagctccaaaaaatgggcttgacaaaaggagccccataca

SEQ ID NO: 3731 - DNA, 1227 bp, unidentified
  source 1..1227: mol_type = unassigned DNA; note = element_5913cba
  misc_feature 1: note = core
  misc_feature 2..205: note = LE
  misc_feature 206..1177: note = CDS
  misc_feature 1178..1227: note = RE
  misc_feature 32..196: note = bridgeRNA
tgtcgtacatttgcactcttgttataaatataaataactttgaatagacatggatcaagaccgaagagccagaggttcaagaagccgttttagacgttccgtccccatgtctttacatctgaaatctggatagttcgttgggagttttgatcccgagttagcgacgataggttacaggatgtattcaacacaaaaaaaagacgttatgacttacattggaatcgacatcggcaagagcagttttgtagccgcttatccgaccgtatcgggatatcgaacccgtacttaccccaacaccgtaaaagggatcaggagttttatcggatcgctttgtgtatccgagcatcattgtgtgatggaagccaccggaaactacggttttcttctcctttacttgcttgaccggcagggaatagccgccagtatggtgaaccctaaacaaatcaagcacttctctcgcatgatgatgaccgtcacaaagaccgacaccaaagacgcctgcctgatcgccatgtatggggtgaagatgaatcctcccgcttacaagatgccttccgaatccctcatgctcctgaaacagaagaagacgatcataaggcagttgaagaaacaactcacggcaagcaggaatctgaaatgctctcttgtagtactcccttttcaagacaggaatgggatgaaagctctggacaagaccatttcttttttggccgctcaaataaaggccttggaatccgagcttgcagatctggcttcgtccgagtttgacagacagctcagactcctcacatccatcaaagggatcgggatcaccttggctacggccctgatagtggcaaccggcgcttttgcctgttttgacaatgccaagcaggtttcccgtttcatcgggatatgccccacctaccagcaatcaggaacgtccgtgtacgtcaaaggggggataaaccgcaatggtgacgcgaacttgcgatctttgctttatgtggcctcgtggtcggcgttgcgtggaaactccgcatgtaaagagtgctacgaacgattgaaggcaaacggaaaaccctctaaggtggctctcatagccgttgccaacaagctcgtcagacaggctttcgctgtaatcaaatccgatactccttatgtagacggatttatatcttcccatcaattaaaatgaggttgggtgaaagttttgtcctctttttaattgtatatttatatagttcg

SEQ ID NO: 3732 - DNA, 1384 bp, unidentified
  source 1..1384: mol_type = unassigned DNA; note = element_591543f
  misc_feature 1..2: note = core
  misc_feature 3..87: note = LE
  misc_feature 88..1116: note = CDS
  misc_feature 1117..1384: note = RE
  misc_feature 1090..1368: note = bridgeRNA
agatggggtggatgccgctctccccagacggcatcgcaatgtgccacacttgcggtgttgaaagcacaagtgaaagagagggcatccatggaagaagttagcatcatcggcgtcgatctggcaaaaaacgtgttccaattgcacggtgcttctgcagacggatcggtcgtgtaccgcaagaagttgtcacggccgcaatttgcgcggttcatggcggaccatccggcttgcaaggtcgcgatggaggcgtgccccagcgcccatcattgggcgcgggaattgaccaggaacggtcaccgggtccgactgatcgcgccgcactacgtcaagccgttcctcaaaaggcagaagaatgacgcggccgatgcggaggcgattgtcgaagcagcgctgcgaccgacgatgcggttcgtggaacccaagaccgtagaacagcaggcccgtgccgtcgcgttccggacgcgcgagcagctcgtgaagcaacgcaccgaagccgtgaatgcgctccggtcccatctgtacgagtttggctacattgcgcccgttgggatcggctatatcccgcgtctggcgcaggtcgtcgcagatcctgacgccggcattccggatctggcgcgcgatatctgccgcatgctcctcgagcagatcgcgcaactgaccgaccggatcaacacgctgaaggcaaggatcgccgccatgtcgaacgaggccgagatgccacggcggttgcagaccatgccgggcgtcggaccaatcactgcacttgcggtcgagaccttcgcaccaccgatggagcagttccgccggggtcgtgacttcgccgcctggctcggtctggtgccgcggcagcattcctctggcggcaagcagaagctggggaagacctcgaagatggggcagcgcgatatccggcgattgctggtcatcggggcgaccgcggtgatccgctgggcctcacggcggggtgctcccacgggctcctggctggcgcggatgctggagcgaaagccgataccggtcgtggccgtcgcgctggccaacaagatggcgcggggcatctgggcgatgctgtcgcgagatgaggactatcgtggcccggttttaatcggcgcctgatccggcgcagcacagacatccgggctaccgagttgtgaggaaggcatgatccgaatgggcacatgatcgatatgatccgggtcgggaaaaccagaaaccttctccgagcctcgagctcgctgttggagatctggacccgctccgcgcatcaccatcccggccagcggcgccatgtcagctgcacgaacaggcctgacaaaagtacgcactcgatcacatgtcctgaagatcagaaattccttgcaaaccgagcggcatccacaaaaga

SEQ ID NO: 3733 - DNA, 1259 bp, unidentified
  source 1..1259: mol_type = unassigned DNA; note = element_59175f7
  misc_feature 1..2: note = core
  misc_feature 3..251: note = LE
  misc_feature 252..1244: note = CDS
  misc_feature 1245..1259: note = RE
  misc_feature 13..190: note = bridgeRNA
cttgtatgttgtccgcgtctggtctgatagggttttgggccgggcaccggggaggccgtcccatcctggaggcagcgttggtctgacctcgttcgtagagcggctccccgcctcattgccgacttcgaggagtatccaaaagccagccaggctggactttgcatcacaaggtcgaagctgcaagaagtgcgaggtcggggaaccggtgtctattgtgactcaaccagcccccgaatgggaaaggacagatgatgactgtggtaggtatcgatatctcggcccaatccttcgacctggtcagccgccgcgatgggcgtaacgccaaggcgcagcgcttcgaacagagcccccagggccatgcccgtgccatcagccacctcaaggggctcaagcctgagtgcatcgtcatggaggccaccggggtctattacctggacctggcggtcgctctgcatgaggccgatttgccagtgtgtgtgatcaacccgcgcagctttcgccactttgccgagatccatctcacgggcaccaagaccgatgccatcgatgccgcgctgcttgccgagtacggcgaacgcatgacgccccggcgctggacgccgccgccgaagcactgcctggggttgcgcgatattggacggcaaatcaatcgcttgatacatgcccgcacccaggccaagaaccgcctgcacgcgctcagcgccaagacgagcacgcctgagctgctcatcgaggacgagcaagacggcatcgcccagctggatcggcgcattgaacgactcaaacaggcagccctggagttgatcgctcagtccgagacactctcgagccacttcgagcacataagcacggcccgaggcatgggccaagccagcagcgtggcggtgcttgccgaactgtgtaccctgccgagcgatctcaaggccgcgcaggtcagccgccatgccggactcgatgtacggctcacgcagtcggggagcagtgtcaacagcccgggacgcctgagtaaggccggtaacgcctatctgagggccgcgctctacatgcccgccatggtggccatccgccatgaacccagggccaaggccttctatgaggcgctggtggcacgcgggaagaaaaagattcaggccctgtgcgccgtgatgcgcaagtacctcaccggattgtgggcctgcatcaaaactcgaacccccttcgatgccgcggcgctgttcagcgatcaacacctcaacaaggcttgaccgggaacggagtat

SEQ ID NO: 3734 - DNA, 1415 bp, unidentified
  source 1..1415: mol_type = unassigned DNA; note = element_5918153
  misc_feature 1..2: note = core
  misc_feature 3..292: note = LE
  misc_feature 293..1399: note = CDS
  misc_feature 1400..1415: note = RE
  misc_feature 1..285: note = bridgeRNA
atagtgagactgtttgtgccggtgttttcggatttcctgaccgttaacgcatggagacgagagaatgctggtgccgggagttcccagtgttcctgacccgcactccgatcgacgatcgtatgtctttccttggatttgtcggttcctgggaacccccggtgaggcgctacgcctcaccgtcggggtgacctgaggagagcctgcaccaccaggtgctcatcactgtcttgtccgccggttcggtcgatgcgcggcgccgccttgctcatcggtcaacggagaggaaagcgacatgacaaggatgcctgacaaagccgatctcgatcaagaccgggaagtgttcgccggagtcgatacccacaaagaactgcacgtcgccgcggtgatcgataccgacgacaacgtcctcggaactcgcagttttccgaccacccgaaacgggtatcgaaccatgctgacctggatcggcgagtacggcaatctgatccggatcggtattgagggcactggctcctacggagctgggctgacccgccacctcgcgaaagccggcgtgacggtactcgaggtggaccgccccgatcgctcggaccgccgccgtaagggcaaaaacgacgacctcgatgccattaacgcagcgcgtgcagccaaaaccaaccggcgcaccaccaccccgaaatcgaaagacggtgccgtcgagtcacttcgtgtgttgagggtgacccgagcccattcggtacgagagcggcgcagtgcgctgcaactattgcggatgacgatcatctccgctcccgacgagctgcgcgagcaggtccgcgatctgacgcggatgcagctgatacgcctcctcgccgcgtggcggccggatgtctcgaacgctaccgatcctgtgaccgcctaccgggtttcgctgaaatccctggctcgccgctatctcgaattgaccgacgagatcgccgatctcgacgaactgatcaacccgatcgtgaaagccctcgcacctcaactactcgagcgcgtcggaatcggtatcgaagtcgccggacaaatgcttgtcaccgccggcgacaattccgatcgaatgaaatccgaagccgcgttcgcgatgctatgcggtgtcgcgccgctacccgcatcttctggcatgacccaacgccaccgcctcaatcgcggcggtgaccgccaagccaaccgagccttgcatctggccgtcatcggccgcattcgactcgacccgaaaacccaggcctacgtagagaagaaaaccagcgaaggccactcgaaactggaaaccattcggtgcctgaaacgctacctggctcgcgaggtctactacctcctcaaccctggaccgcagaccatcaccccgaacacccgacaccatcgaaaagcagcttgactctcaggagagcatc

SEQ ID NO: 3735 - DNA, 1367 bp, unidentified
  source 1..1367: mol_type = unassigned DNA; note = element_591c089
  misc_feature 1..2: note = core
  misc_feature 3..197: note = LE
  misc_feature 198..1106: note = CDS
  misc_feature 1107..1367: note = RE
  misc_feature 1079..1355: note = bridgeRNA
tgatggggtggacgccccccgacggcatcgatgtgccaaagtggaggtgttgaacaccacttgagggaggtgtccgtgtcagaggttatcacgatcggtctggatatagcgaaggctgtttttcacgcgcacggcgctgatgcgagcggcagacaggtgttcagccggcggcttagccgggcaagctgctggagttcatgggtcagcagccaagctgcctgatcgcgatggaggcgtgtagcggggcgcatcactgggcacgcgagtttgcggcgatcggtcacgaggtccggttgatcccgcctgcttatgtgaaaccgtttgtaaagcgtcagaagaacgatgccgccgacgccgaggcgatttgcgaggccgcgcagcgcccgaacatgcgctttgtcgcggtcaagagcgaggagcaacaggcggcgggcatggtgttccgcacgcgcgacctgctggtcaggcagcgcacgcaactggtcaatgcgatccgaggacacctgagtgaatatggctgggtcgcgccgaagggccgcgcctacgtcacgatgctcggcgacctgctcgacgaggagctcggcgcggcattgccgccagcggccaaggcgatgctggaagtaatgaccgacatgctcaggcacctcgatgacaagatcgccgatctcgacaaggagatcgaccggcgcgcgagtgctgacgccgtgtgtcgtcggctgatgacgatcccgggcatcggtccgatcgcggcgaccgcgctggtggcgctcgcgccgccggccgagacgttccgccgtggtcgcgacttcgcggcgtggctcggcctcacacccgtgcagcgatcaaccggcgggaagaccaggctggggcgcacgtcgaagatgggtgagcgaacgctgcgacgcttgctcatcatcggcagcagctcatgcgtgctcgcagccagcaaacgcggcgcgcccgccggttcgtggctcgagggcatgatggcgcgcaagccgcggatgctcaccgtcgtcgccaacgccaacaagatggcgaggatcgtttgggcactgctcacgcgcgaagagaattacaaagctccggctccggccatggcataacgccaggtcgggccagaggcgtcggaggatgtaggcggagcgaaggagggtatggcacaacggtcgggaagaccgggctggaagaaccagggactggcgaagcgctacccaagcgcgcaaagctgatgtagttccagcctgcgaactcccatacgggccagcggcatattgtccgcatcgaaaggccggacagatgaccgcatccgactacgtgccaacaggccccaatttatcgcttgcatccgaaggggcgtccacaga

SEQ ID NO: 3736 - DNA, 1508 bp, unidentified
  source 1..1508: mol_type = unassigned DNA; note = element_5921852
  misc_feature 1..2: note = core
  misc_feature 3..246: note = LE
  misc_feature 247..1488: note = CDS
  misc_feature 1489..1508: note = RE
  misc_feature 15..240: note = bridgeRNA
ctaatgagtgttagcgagtcggccatccggcagactcggggctggtagccaccggcaggtgagcactctgggctcctggacgttgagtcctgatgagagaccgtgcccctgccggctggccgggagagtggatcgctgatgggatgtcgtgcccgtcctggtgtggcgtgagcactgattcattaggtcgctgatggttctcccgcaggctgctgaccgtgaccgatcgcgagggcaggagacacattgcggctgttcgcaggggatgactgggccgaggaccatcacgacatcgagctgatggacgtggcgggccggcggctggcgaaggcccggctgcccgagggcgtggcgggcatcgcccggttgcacgcgatggtcggcgagcaactcggcgaggacgccggcgaggacgatcccgggcaggtcgcggtcgggatcgagaccgaccggggcccgtgggtggccgcgctgatcgcggccgggtacacggtgttcgcgatcaacccgctgcaggcgtcccggtaccgggaacgccatggcgtgtcggaggccaagagcgacgccggggatgctcatgtcctggcggatatggtgcgcaccgactctcaccagctgcgggcggtggccggtgacagcgcgcaggccgcggcggtcaaggtggtgacgcgcacgcataagacgctgatctgggaacgcacccggcacacgcagcggctgcggcacgcgttgcgggattacttccccgccgcgctggaggcgttcgaggacctggacgcgccggacaccctggaactgctggcgcgggcccctgacccggccagcgcggcgaggctgacgaccgcgcagatcagcgcggccctcaagcgcgcccgccgccgtgatatcgctgggaaggctcagcggatccaggccgtgctgcgctccgcccacctgggccagcccgccgtcgtgaccgcggcctacgccgcgtcgtcccgcgccctgatcgcggtcctggtcacgctggacgagcaggtcaagatcctgcaagggcaggtggaagcctattttgggcggcacccggacgctgagatcatcacctcccagcccgggctgggactggtcctcggtgcccgggtgctcgcagaatccggtgacgaccccgcccgctacgcctccgccaaggcccgcaagaactactccgccaccagccccatcacccgggcctccggcaagaagaaagctgtcgtcgcccggtacgtgcacaacgaccggctcatcgacgccctcaggaccaaggccttcgccgccctgaacgcctcccccggggcacgcgcctactacgactgccagcgcgcccgcggctccgcgcacaacccagccctgcgccagctcgccaaccgcctcgtcggcatcctgcacggctgcctcaaaacccgcaccctctacgacgagccgaccgcctggccgcaacacgtggcggctacggagaagactgcggcttgacatttaagctcctgggatgt

SEQ ID NO: 3737 - DNA, 1170 bp, unidentified
  source 1..1170: mol_type = unassigned DNA; note = element_5923fc1
  misc_feature 1..2: note = core
  misc_feature 3..216: note = LE
  misc_feature 217..1161: note = CDS
  misc_feature 1162..1170: note = RE
  misc_feature 10..192: note = bridgeRNA
cttgtatggcgtagggtaggaccctgtcgggggtggagggaccaagccagcttctgcaagtcagacggtaggagacttctcccacccacgcgctcacgacaagcgccgataaggaatccctcggaaattgagtgaccgctcaaaccgacaataccggcaagcctgcgccaatgtgagccccgacaggttgttccatcttcatcgtcggagcgtgtcatgacaagccaagccttagttatcgggatcgatgtcgccaaagagtcgttgagcctgtgccatgcgcagtctggcgaggtgttcgaactacccaatgacgcccgctcgctcaaggcctggctcaagaccctgccgccctgttgcgccatcgccatcgaagccaccggcatctaccacgtggaggtggcaaccttggcgcatgcgcgagggcatcggatctacgtcatcaatggctatcgcctgagcaactatcgcaagggcatcggtgggcggaacaaggatgatcgcagcgacgcccagttgctggcccgctatctggcccacgagcaggctcagctggagccctggcagcccccctgcaagacttacagtcgtctgcagtcgctactgcaccgccgggcgtccgtggtgaaaagccgcacggccttgcgccagagtttttcccaggatcgcctgctgaagaaagagctggatcccattctccggcgcatggccaaacttgagcagaagttggaagagaacatccagcagatgctgctggatgccgggctgggcgagcaaagtaaacgttgccagaaagtcgaaggcatcggcccgctgacggctgccgctttgaacctggccttcctgcgaggctgtttccgcaacagcgacgccttcatcgccttcctgggactggatgtacggctcaaggagtccgggcgctactgcggacggcgcaagctgagcaagcaaggtgatccggaaatccgccggttgctgcacaacgcggcaatggcggcgagtcgcacttcacgctggcagaagctctatcaaggttacttggctcgcggcctgaaacgcaccgaagcgctgaccatcctggcacgtaaactcgcccgcatcgccttcgctctgatgacaacccaacagccgtattggccggccaccaatacggaggggtagacatagaat

SEQ ID NO: 3738 - DNA, 1522 bp, unidentified
  source 1..1522: mol_type = unassigned DNA; note = element_592b03a
  misc_feature 1..3: note = core
  misc_feature 4..491: note = LE
  misc_feature 492..1274: note = CDS
  misc_feature 1275..1522: note = RE
  misc_feature 3..220: note = bridgeRNA
cttatattatatttaacgcagttagctactgccaaagcccaagtggtatacttgcaataagccactgtggattagttcatttcctccaatcgcttgacgatttccgaaagggtctaaccacagctttttgtttcaattggtaatgagtttgataacgcatagacgttttatctcgtctaaggtaacaaggcaaaaagttcgtggataaccaagtagacttgaaatactatatctggaggtactcccatgctttatgtgggcattgatgtcgctaaaaataaacacgatgttacagccttgaatgttcgaggaaaactgttcttaaaccactcactttttcaaataataaagctggttttgaacttttagatctgtctcttcgacagctcaaccaagactatctcatcgctcttgaagataccggacattatgcctttaatctactgaacttcctgcatgaacaagaatataaagtttacacctacaatcctttgctcatcaagaaatttgccaaatcattatcacttcgcaagactaaaacggataagaaagacgctcatggcatcgctcttaaacttctttctgaccccaatcgtgaacaatttcaacacgataatcggctagtagaactaaaaatactggctagacatattcatcgtctcaagaaaaaacagtctgattggaaagtacaatacactcgttgtcttgatatcatctttcctgagttggataaaatcgttggaaagcattcagaatatacctaccaactcttgacatgctaccctaatcctcagaaaaggcttgaggcaggatttgataagctgatagaaattaagcgattgaccgcttctaaaattcaggatatcctctcagttgcacctcgttctatcggaacaacatctcctgctcgtgaattcgaaatcatcgaaatcatcaaacattacaagaggctcattgacaaggcggaaacatgtgtcaatgacttgatggctgagttcaactcggtcatcacgacggtcactgggattgggggtcgtttaggggcggtcattttagccgagattcgaaatattcatgcctttgataatcctgctcaattacaagttttcgctggactggattcttctatttatcagtcaggtcagattgatttagctggaagaatgataaaacggggttcccctcatctgcggtgggcactcatacaagctgccaaagcatgcgctcgcttttcacctgcttttaaggcctatcttaagactaagttagaataaggaaaacattacaatgtagccatcatccaccttgcaaaaaaacttatccgaaccctgttttatatcctaaaaaagagctgccatttgacgaataaaaagtgatgtaatttctgaaattaacacaggattacctttgaaaaaatggactttttcaagggctttttgccgtgctctaaaatcatcgccaaatcatcaaattgaaataagaaatagtttagataaaactattgacttttcttatagtttgt

SEQ ID NO: 3739 - DNA, 1196 bp, unidentified
  source 1..1196: mol_type = unassigned DNA; note = element_5930e2f
  misc_feature 1..2: note = core
  misc_feature 3..234: note = LE
  misc_feature 235..1041: note = CDS
  misc_feature 1042..1196: note = RE
  misc_feature 27..210: note = bridgeRNA
cttgtatgttggcgtggcaagtcgatagtaggcagagagacttgtcggggtggcgggacctaggcagcttctgaccccttcgggtacagaccgtgggagaaatgaccccaccccgcacctacaagcgccgataaggaatccatcaggctgagcgcccctcagaccgacgatatgagcaagcctgcgtttggtgcgccccgacaagccctttcacactaacgagagggcaacaccatggcaatgcacgttatccccaaccggatcggtgtcgacgtcgccaaagacgagttggtcctttatgacccaacgaccgatcagatcttcgcccttcccaacaccaaaaccgccatccggcgctggctcaaggggcttcctcagaatacccacatagcgctggaggccactgggatttatcacctggaactggccgaacaggcccatgccgcgggccacaccgtctttatcatcaacggctaccagttgaaccattaccgggaaagtatgggaagacgggccaaaaccgatgccaacgatgcccgactgttgtcggactatctggaagcaaaccaacgacgattgcagccctggacgcccccgccaaaggcctattgcaccttacaacgcctcttacgccgacgcgccaccttggtccaggcccgcgttgcgctgcagcaaagctggaaggatgagggctccctgaaagccctgatcaaaccggtgctggcgcatatggaccgccttgatcaggccctccagaaacgactacggctggcccttcgcgaggccgggttgcaagcggagcgggcccgctgccaagccctggaaggggtgggcgagctaaccgccaccgcgctggtcatggccttccagcgcggcgacttcagaaccagtgatgccttcatcgccttcctgggactggatctgagggtgcgtcaatcctccaagcgagaacagcgacgacggttgaccaaacggggcgatgccgaggtccgaaggctcctgcacaatgccgccatggccgcctgtcatagcccgcgatagcatcgagtctacgaggctatctgcagcgagggctgaagaaaacccaggccctggtcattctcgcccgcaaactcgctcgcatcgccttcgccctgatgaagcacaaaaccacctaccaatcggagacccaaatcgcttgatctccaacatagaat

SEQ ID NO: 3740 - DNA, 1232 bp, unidentified
  source 1..1232: mol_type = unassigned DNA; note = element_593e611
  misc_feature 1..2: note = core
  misc_feature 3..242: note = LE
  misc_feature 243..1217: note = CDS
  misc_feature 1218..1232: note = RE
  misc_feature 6..212: note = bridgeRNA
cttgtatctcgccagttgttcagtcagaacgacaggtcccgaccgatcatcgggcggtgagtcggcaagccgcgaacaaccttaggccgtgagcctgctcagtagatcgtgcaccgactcgccaacacgcgctcatgacagctaggacggtatctggagcccatttgtttggaagctcgcatggacaaggttgagccgagcgccgtgatgatcgccgattcaaggtttaaaggagcgccatcatggcttgtgttgttggaattgatatcgccaaaaagacgttcgacgttgctacgcgtcagggcaatggcacgtatcgcacgcgttctcagctcgctaatgatgcgagtggtttcaaggcattacggacgtggttaacaaaatatgccgagccgcgcgcctggatcgttatcgaggccaccggccattatcaccagcaactggcagccgagctgcacgagcacggttaccaagtaagtgtcgtcaatccggcctgtatcgcgtattacgccaagagccagttgcagcggatcaagacggacaaagcggatgcgaaattaatcgcacgttacggcgaatgccatagcgacacgctccgcatgtggcaaccggcaccgtgggcccagcgcaagctgtgtaccttgctgaggcgtatcgaagatctccagaaactggagcgcatggagcacaatcgcctggatgttgcgaccgacgcaagcgaacaggcctcgatcgagtgtgtccttgagcagctgcagacccaaatcaccgagttgctggccgcggtcgaagaccatatcgcgcacgatgccagcctgaggcacaagcgtaatcttttgaccagcattggcggtatcagcaacaaaacagccgctttactactggctgaactcggcgatccgctactgttcgacgacgcgcgcgagatcgtggctttcgccggtctgaatcccaaactggcggagtctggtcagcagaaaggcacggtccgcatctcacgcacgggctcagcgcgtctccgagccggcctctatatgccggccatcgtagcgatgacccacaaccccgcgatcaaggcgctcaaagaacgtctccgaacacggggcaaggcgggcaaacaaatcgtctgcgctgctatgcgtaaactgttgcacctcgtctatggcgtactcaaatcggggcaaccgttcgatccagcgttagctattgcacattgaagcgcaagacggtat

SEQ ID NO: 3741 - DNA, 1470 bp, unidentified
  source 1..1470: mol_type = unassigned DNA; note = element_594021b
  misc_feature 1: note = core
  misc_feature 2..255: note = LE
  misc_feature 256..1455: note = CDS
  misc_feature 1456..1470: note = RE
  misc_feature 45..221: note = bridgeRNA
ccgttacctttttcgtagccccttcttcgggagaggatgtgggtgtgctggcctgacggccccggcatgattcctgcccccagtcgaccatgatccggggggtgatgtcaccggggcccgaaggtgccagggatatcgctgataggggccgggcagaaagtattcgaggccgttcgtaacgtggatgccgagctctgacaccgcagccaagccagcacatatggacactgtttgctactgctgggagggaactgcgtgatcaagaaccatgccgaggtcgatgttttcctcggagtcgatgtcggcaagggagaacaccacgccgtagcgctggaccgagccggcaggaagctctacgacaaggcgctgccgaacgacgaagcaaagatgcaggccgtcatcgagaagttggccaagcacggcgcgatcctgttcattgtggatcagccagcgactatcggcgccctgcccgtcgcggttgcacaggccgccggcgtgcccgtcggttacctgcccggcctggcgatgcgccgcatcgccgacctgcaccccggtgaagccaagaccgacgcccgggacgcttacatcatcgccgaagccgcccgcaccatgccgcacacgctgcgctcgatccaggtggctgatgagcaggtcgccgagctctccatgctctgcggcttcgacgacgacctggccaaacagatcaccgcgacctccaaccggctgcgcggcctgctcacccagatccaccccgccctcgaacgggtcctcgggccgcgcctggatcacccggcagtgcttgacctgcttcgtacgtggcccaccccggaagccctgaaaacggctggccgcaagcgggtcgccgccaggctgaaacggctcgctccgcggatgtatgctcgcctgaccgaggagatcttcgacgccctcgaccagcagaccgtgaccgtgatcggtaccaacgccgcggccgtcgtggtgccacagctggccagcatgctcggggacctgcgcgcctcccgtgagaccctccacgcccaggtcgaggccctcgtggaggcccaccctcttcactcggtcctgagctcgatcccggcggtcgggatcaggaccgaagcccgaatcctcaccgaaatcgtcggcaaggaattcgccaccgccggacacctggcttcctacgccggcctgtccccagtgacctggcgctccggctcctcaattcgcggtgaccattcctcacgccgcggcaacaagatccttaaacgagcgctcttcctctccgccttcgccgcgctgaaggacccgctgtccagggcctactacgaccgaaaacgcgcgcaaggcaagaaacacaaccaagccctcatcgccctcgcccgccgacgctgcgacgtcatcttcgccatgctccgcgacggcaccctctacgaagcccaaaaaccagccgccgcttgacgaagaacatagggg

SEQ ID NO: 3742 - DNA, 1384 bp, unidentified
  source 1..1384: mol_type = unassigned DNA; note = element_5942356
  misc_feature 1..2: note = core
  misc_feature 3..87: note = LE
  misc_feature 88..1119: note = CDS
  misc_feature 1120..1384: note = RE
  misc_feature 1090..1371: note = bridgeRNA
agatggggtggttgccgccctccctgacggcatcacgatgtgccagcataattttggttcaagctacgcacagagaggacggcaaccatgagtatcgatacgatgattggtgtggacctggcgaagtctgttttccagattcacggggcgtcgatgaacggcgagatactgtttcaacgcaagctgtcgcggcaggcctttagcgtgttcatggctcaacactcagctgccgtggtcgtcatggaggcgtgcggtagtgcccattactgggcccgtttgttgagcggatttggtcacgaggtcaggctgatcgcgccacgctatgtgcggccatttgtgaagcggcagaagaacgacgcagccgatgccgaagcgattgtggtggcggctcaacggcccgagatgcgctttgtcgaacccaagagcgtggctcagcagagcgcggcgatcctgtatcgatcacgccagcgccttgtacgtcagcggacagagacagtgaacgccttgcgggcagccttgtatgagttcgggcatatcgttcctcagggcattcagcacgtcagccgcattggcgcgatcctggaggcgcccaatagtgatttgccgactttgatgcgcgaggagtgcctcgcgatgctcgatcaggtcgcggcgctcagtggttggattgatacaaagaccgcaaagatcaaggaactcgcagccaccacgccgatatcgaagcgattgcaaaccatgcctggcgtcggtccgctagtggcgatggcagtggagacctttgcgcctgaaatggcgacctttaacaatggccgcgactttgcggcctggcttggattggtcccgcgacagttttcatcaggcggtaaggaacggcttgggcggatcaccaaggctggccagagcgacatccggcaaatgctgatcattggcgcgatgtcgcgattgaattggatgggacgcaagtcgatcccggaaagctcatggcttgcacgcatgatggcccgcaagccgcgcatgctggtcgccatcgcattggccaacaaaatggcacgccagatctgggccatgctgaccaagaatgaagattacaggaatccgacgccggtcatggctgcctgataaggcaaacctaggcaggttggatgaaaggggtgtgagaaggcaacgacccgaatgggcaaaatgatcgaacagatctggatcaggaaaaccagttcaggactctgagtgataagctcgccaatgagatttggacctgatccgctgatcaccataccggccagcggccttcgaaagcgccgtaatcaaggcctgacagaagaccgcactcgatcaccagttcagaaggtcaaaaccctcttgcatcacgggcggcaaccacaga

SEQ ID NO: 3743 - DNA, 1488 bp, unidentified
  source 1..1488: mol_type = unassigned DNA; note = element_594f45c
  misc_feature 1..2: note = core
  misc_feature 3..232: note = LE
  misc_feature 233..1468: note = CDS
  misc_feature 1469..1488: note = RE
  misc_feature 6..230: note = bridgeRNA
ctaataggttttgtcagcctgcgggtgcaggatggctccggtagcggccgacgggtcagcactccactcttccgaccctgttgaggtctcgcggcagaccgtgcgcccgttggtcgtgaggaggcgggacagctgatgagatgacgtgccccgcgtggtgagcacttgactattagatcgctggcgtctcctccggctgctaccaggcaggttgtcggaacgggggtgcgagatgatctggatcggtgacgactgggccgagggccaccatgacgtcgagttggtcgacgagtgcgggagtcggcttgcccgggcccggctgcccgaaggcctcgatggcatcaccaggctgcacgcgctgatcgcggaacacacgccagactgcggggccgagctcgatccggcgcaggcgtccgggcaggtggggatcggtatcgagaccgatcggggcatgtgggtgcaagcgctgctcgcggccagctaccgggtatatgcgatcaacccgatgtcggtggcccggtatcgggaacggcactcgacctcgggcgcgaagtccgatcagggcgatgcacacgtactggcggagatggcccgtttggatcatgcgcatcatcggcaggtcgctggggacagcccactggcggagtcggtgaaactgctggcccgcgcgcatcagagcctggtctgggaccgcacccgccaggtgctccggttgcgcagcacgctgcgggagttcttccccgccgcgttgcaggcgttcgacgacctggccgccagtgatgcccttgaactcttggaccgggctccggacccggatcaggctgcccggctggcccggttgacgatcgttgccgtgctgcgccgggccggccggcgtgacctcgaaggtaaagccacccggatccagcagatcttgaaggcggaacagctgcgtcagccgcggcccgtccaggtcgcctacgccgcgatcgtgtccagccaggtccagctgatcaacagcctgaacatcgagatctctgaactcgggcaggtgatggccgaccattttggccgacaccgggacgctgagcgctacctgagcctgcccggcctcgggccggtgctcggcgcccggatcctcggcgagttcggcgacgacccgcatcgctacaccgatgcgaaagcacgccgcaactacgccggcacctcaccgatcaccagggcctccggccgtcgccgggtcgtactggcccgctacgcccgcaaccgacgtctcgccgacgcggtccaccaatgggccttctgcgccatgcgcggctcacccggcgcccgcgcctactatcaggcactccgcgaacgcggcgccggtcaccaggccgccctgcgccaactcagcaaccgcctcgtcggcatcctgcatggctgcctcaaaaccaaaaccttctacgacgaagccaccgcctgggcccatttacagcccaccacttgacaacaaaaaacatgggatgt

SEQ ID NO: 3744 - DNA, 1344 bp, unidentified
  source 1..1344: mol_type = unassigned DNA; note = element_5952163
  misc_feature 1: note = core
  misc_feature 2..63: note = LE
  misc_feature 64..1095: note = CDS
  misc_feature 1096..1344: note = RE
  misc_feature 1118..1335: note = bridgeRNA
taatgggatggtccgccgcagagagtctcgaagtgtgtacagtgcggggccaggaggcatcccatgaaaatacagacgctcggcatcgatttaggtaagaccgtttttcacctggtggggctggattcaaccggcaaagtagtgatccgcaagagatgttcacgaaaacagttgctggccttcaccgcgaatttgcaagtgcagttgattggcatggagtcctgcagtggctcacactttctgggacgagctctgcgggagcaagggcacgaggtgcgcttgatgccggcgcagtacgtgaagccgtatgtgcagaccaacaaaagcgactacctggatgcggaagccattgccgaagcggtgcaacggccgcggatgcgctttgtacccatcaagtcggaggagcaactggacctgcaagccttgcatcgagtgcgggagcgttgggtgatgcgacgcacggcggtggtcaaccagatccgcagccttctcctagaacgtggattgacgctacccaaaggccgacgttatgtggaggaggcgcttccccggattttagaagacgccgagttgccgctgtctggtttgttccggctgctgttggctcaactgaagctggaactcgagcaactcacagcacgcattgaacagctggatgtggtcatcctgcaaagagccaaagaggatgaaggctgccagcgactcacggcgattccgggagtcggcccggtgactgcgacggccctgattgcggcgatcgggaacggagccgcctttcgcaaagggcgacacctggcagcctggatcgggatggttccacgcgagtgttccaccggcggtaagcagaagctcctgggcatcagtaaacggggcaacacctacttacgacgactcttcgtacaaggcgcacgcagcgtcctgcagcagcgacaccggcaggctccgggtctcagttcctggttggcgcaattgttggcgcgcaaacaccaaaacgtggtcatcgtggccttagccaacaagttagtccggatggcctgggcggtgttgtacaagagcgagcgttatcgcgcccccgctctggctctatctacctaaaaactcggtttagagaaacagttcctgtccggtttgctggcggaaaatagagatggcaatgggtcgatcccacgctttcgaaacctgctttcggaaaaggtcgtgaccagaccgtccagtttatagggacgaaggcgagcggatgtccatcatggcccggagtcactgactccatcaaaggccgaatacattggcgcagaccaactgccaccctcatttaccgcttgcaactcggcggcggaccataca

SEQ ID NO: 3745 - DNA, 1388 bp, unidentified
  source 1..1388: mol_type = unassigned DNA; note = element_59569c3
  misc_feature 1..3: note = core
  misc_feature 4..85: note = LE
  misc_feature 86..1117: note = CDS
  misc_feature 1118..1388: note = RE
  misc_feature 1126..1375: note = bridgeRNA
tgatggagtggacgacgcccgctcccggcatcgaagtgccatagtgtgatcgtttcaaagcgagtcacctgagggggtcgtccacatgcagattagcaccatcggcgtcgatctagccaagaacgtcttccaaattcacggcgtggacagtgcgggcaaggttgttctcaccaagcaattgcgtcgccccaagatgctcgagttctttggcaatctcgcgccgtacctaatcgggatggaggcctgcgcgacggcccaccattgggcccgcgagttgagaaagttagggcacgaggtgaagttgataccgccaagctatgtgaaggcttacgtcaaacggcagaagaatgatgcagccgacgccgcggccatctgcgaggctttgacacgtccgtcgatgcgtttcgttcctgtgaagaccgttgagcagcaggccgcgctgtccgtgcatcggatccgagccctgctgatcaaccagcgaacccaactcactaatgctttgagggcacatctcgccgagctcggcctcgtcgccgaccacggccgtgatggcctcgccaggctcatcgcgatgctcagagaggagaacacattacagttgctgccgtttgcaatgttaggggcccttcgtgcgctcatttcccaactcgggtcagtgcagcagcagatcggcgagttcgaccgctgcatccatgatcagcatcgcgccagcgccgtcagccggcggctcgagagcatcccgggcgtcggcgtgattggcgccacggcgctagcggccacagtcactgacccgagctcgttcaaatcggggcgagacctcgcggcctggatcggccttgttccacgccagtattcgactggcgggaaggaaaggcttggtggaatatcaaagcagggagatcgctatttgcgaaggctgctggtagccggggcgatggctgtcgtgcagcacgcccgtcggcaccccgacaagcggccccgggtcaccaagctgctggccaggaagccggccaaggtggtggcgatcgcgatagccaacaaaacggcccgcatcgcttgggctatcatggtcaatggcggaacctatcgggcgccggcaatcacagcaagcgcatgaaagagttcgccgacggaagcgtgaggccgggctgaccgatgacattcgaattgcgagggtgatgatggtgtgatgcgaggcgatcgatccgtcgaccgggacactccgctactgggtcacgggtgttgagcccacgcttttgataggagccgatccgcggactacatcagggccagcggtcatgcgccgcgacaacaggccggacgcatgacttggagccgaccgcagctgagcaccaaaatcctcttgcaacgcgggcgtcgtccacaca

SEQ ID NO: 3746 - DNA, 1390 bp, unidentified
  source 1..1390: mol_type = unassigned DNA; note = element_5957028
  misc_feature 1: note = core
  misc_feature 2..90: note = LE
  misc_feature 91..1116: note = CDS
  misc_feature 1117..1390: note = RE
  misc_feature 1159..1382: note = bridgeRNA
caatggaatggacgcccccaactgtattcggcatcgatgtgccagagtggaggtgttgctcaccactcacaacagaagagggcgtccaccatgaagattataaccattggcatcgatttggctaaaaacgtgttccaggtgcatggcgtcgacgagcgtggccaggtagcgctgcagaagcagctcaagcgtgcgcagtttgctctgttcttctcgaacctcccgccttgcctcatcggcatggaggcctgcggcggcgcccatcactgggcacgcaagctgcaggcgttcggacacacggtgaagctcatctctccgcaattcgtaaaaccgttcgtcaagaccaacaagaacgaccgcgccgatgcggaggcgatctgcgaggccgtcagccggcccagcatgcggttcgtggcagtgaagacgatcgagcagcaggcggtgctgtccctgcaccgggcccgccaggggttcgtgaaggcgcgtaccgcccaggccaaccagatccgggggctcttagccgagtacggcctagtcatccccaaaggtatcagccaagtcacccgacaggtgccgctgatcctggaagacgcggagaacgagctgccaggggtgttccggcagctcattgccggtcttttggttcacttccgcgagctgcaccggctagtctccgagctcgagaccgagatcaaagactggcaccgtaataacgacgcgagccgcaagctcgccgagatccccggcatcgggcccttgggtgcgaccgccctcgtggcctccatcggcgatgccagaacattcaagaacggacggcagctcgccgcctggctggggctcgtgccccgacatcactccaccggcggcaagcccaccctgctgggcatcagtaagcggggagacgtgtacctgcgaacgctgctgatccacggggcgcgctcggccatcctcgcggcccagcggcgtgaagagaacaccggttggctcgcgaagttgctggagcggcgccatccgaacgtggcggcagcggctttggccaacaagaatgcccgggtggtgtgggcgctcctggcctacgaccgggactatcagcccgcctacgctagggcggcgtaacgacttcaacgacagttaatcgaacagcgtaaggagacccacccagcgattgctcaggcactcacgcagtgatggcaagacaggtaagaccgtggttggccaaacccagaacggctgcggcactttgaaagtgcgacaaagcgatcgggcgtcgaccagcgcattccatcagggacagcggcgaagccgcaccaaaagtccggatgtacggctgcaatctctaccttcaatgctgtcacgaactgggggcttggcaaatgggggcgtccatgta

SEQ ID NO: 3747 - DNA, 1365 bp, unidentified
  source 1..1365: mol_type = unassigned DNA; note = element_595a5ac
  misc_feature 1: note = core
  misc_feature 2..84: note = LE
  misc_feature 85..1119: note = CDS
  misc_feature 1120..1365: note = RE
  misc_feature 1133..1354: note = bridgeRNA
caatgggatggactcctctccgtctacggcatcgagtgccagactggaagcgatgaaccagtcgcgaacgaggaggagtccaccatgaacgagcttacgcgcattggagtcgacgtggccaagcaggtgttccaggtccacggggtcgaccggcacgaacaaccggtgtggcgtcgccgtttgtcgcgagaacggtggctcagggccgtcatggaggcggcgccgccgggttgtgagatcggcatggaggcgtgcggcggcgcgcatcattgggcccggcaactgcaggcgcgcggattccgcgtaaagctgatcgcgccgcagttcgtgaagccgtacgtgaagagcaacaagaacgacgccaacgacgccgaagcgatctgcgaggcgatgagccggcccagcatgcgcttcgtatcggtgaagtcggtggaacagcaggacattcaagccgctcaccgcattcgcgcaggattggttgagcagcgcacggccaaggcgaaccagatccggggcctggtcgcggagtacggcctggtctccccgaaggagttgtcgttcctgcgccgcgcgattccgtgctggctggaggatgccgacaacggcctgacggatcgcttccgccatctgctcgatggcctgtggcaggacattcgcgccctcgatgcccgcgtgaccgaactcgatgtcgacatcgccgccatcgcccagagcgatcccgatgcggtgcgcctgcagcagctgcgcggcgttggcccaatcactgccacggcgctggtcgccgccgtgggtgacgcccgccagttcgcccacggtcgtcagctatcggcgtcgctcggcctgacaccgcgccagcacagttccggcggcaaggagcggttgctgggcattagcaaacgtggcgacgcctatctgcgcacgctgctggtgcatggtgcgcgcgccacgttgcgaaccgccaagggcaaggaggaccggctgagccgatgggtctgtcggctggccgcacgatcgcaccccaacgtggcctgcgtggcgctggccaataagaccgcgcgcatggcctgggcgatgctgcgccacggcaccgactatcaacccgaactggccgctgcctgagtcctgaaggaaatcctggagattgcgaacccccctgcagatggcaaaccggtcggaccggcgtcggcaaacccctcaaatgtcctggtgcgtaagcacgtagaagcgattgggagccggcgcgcgaatagcccatcaaggcccagcatcgcgtagcgatgcattcagtccgaggccggatatacgtgcgcagtcgactcgggcgccgaacgccggagggttgcagtcagaggaggagtccatata

SEQ ID NO: 3748 - DNA, 1426 bp, unidentified
  source 1..1426: mol_type = unassigned DNA; note = element_595af69
  misc_feature 1: note = core
  misc_feature 2..136: note = LE
  misc_feature 137..1156: note = CDS
  misc_feature 1157..1426: note = RE
  misc_feature 1195..1425: note = bridgeRNA
gaatgtaatgaacgcatcccaactatttgagtatgaagccggggtcgacaggtaaggtgtggagcctcgcagatttccggcatcatagtgcccaatacgggatgcataagctccctcagactggagactccacagcatgaaatatacaccggttggcgttgatatagcaaagcatctgattcaggttcacttcattaatgagcacacaggtgaagtggtggataagcagcttcggagcaaggattttctgacattcttcagtaacagggaaccctgcctgattggcatggaggcctgtggaggctctcagcactgggcgcgtgagcttgcaaaactgggacatagggttcggctgcttcaggcccgattcgttaaggcattcgttatgggcaacaagaatgacgtgatggatgcgcgcgctatctggatggcggtacagcaacccggtaaggaaatagcggttaaaacagaagcgcagcagtcagtgctggttttgcaccgttcccgcatgcaactggtgaaattcagaaccgcgcagattaatgccctgcacgggacgttgctggaatttggcgaaaccatccacaagggccgggcagcgatggacagggagttcccggcagccctggaacggatgaaagcgagactgccacagtatctcattaccgtactggaagaccagtacaacaggctgaatgagctggactccctgatagatggcctggaaaaacagcttcacagtgtggcgcgtcaaaatgaagcctgtaaacggctgatggaaattcctggtgtggggcctctcatcgccacggcagcagtcgccaccatgggagaagcttctgcattcaaatccgggagggaatttgccgcttatgtcggtctggtaccgaaacaaactggctctggaggaaaagtccggctgctggggataagcaagcgtggtgatacctacctccggacattatttatccatggggcaagagcggctgcattggtggcaaaagagccaggctcatggataacagaactgaaaaaacggcgcccgaccagtgtggcaatcgtggccatggcgaacaaactggcgcgcacagtatgggcgatagcggcccatgaccgtaagtacgacaaaaatcatgtcagtatcaggccttattaatcgctgataccgataaacataaactctttacaaaagggtggatgctgaaaggttgcgtgggcagccgtagtgatgacaaagacaggtaagaccgggactcgctaaacctggattacgcgatgagcttaaagctcgccggaggaataaggcgcgagtcagcgtattacataggggcccgcagcactggctgcaacaaggccggatatagatctgcaacctaccgtcaatgtcaaaactacgaaagccttgcaaacgggatgcgttcatata

SEQ ID NO: 3749 - DNA, 1412 bp, unidentified
  source 1..1412: mol_type = unassigned DNA; note = element_59610c1
  misc_feature 1..2: note = core
  misc_feature 3..227: note = LE
  misc_feature 228..1412: note = CDS
ctcctaccattaattcctgtataactctctcataagcaggtaagctttgccccaaggaaggcagggggacttagtacttcctgggtcgccgaacccttattttcagtctgtcccctgcctcttggagccatgataagttgattgggccaaacgagcccttgtcacgatggaggattggccagaggcaattcctgcttttcttatactaccagtgggaggtgcatgtcatgagtttttttatcggggttgatgtatcgaaagaaaagtttgatgcctgcggtatagacgaacagggaggtaaggtcttctccctcgtctgttccatggatcgggggggatttgagaagcttgtcctgaagctacccatggacaaatcgtccttcctcctgggcatggaatccaccgcctcataccatcttcccctcttctcctatcttactgcacaaggctaccaggttgtcattatcaatccgcttctcatcaatcacttcgcaaagcgctcgttacgcaaaaccaagactgacaaaaaggatgccttcacgatagcccagtttcttctgcgggagaaggaggctttcgctccacagacaaccgatcaccgggcaacagaacttaaggatctggccagaagaagagaaaaactcgtcgatcacgtgacctccctcaagggcgatatgaagaggatcctctctgtcattttccccgagcttgaacacataacgggagtcttcacgaaggcaacccttcgtctcctgacagagtatccttctgcccatgcgatacgtgaagcaggtcataatgccattgctgaaatcttcatcaaccagtcccgcggtaatagaccccgtgccagtgtcaaaacgcttatagatgccgccgcatcatcggttggcgtggtgagttctgcaaaagagcttgccctcaaacaggaagcctcactgcttatgcacatacaggaacagataaaagagacggcaggattacttatgaatctcttaaacaagagaatgaagcatgatatggagcttttgtgttctatcaaggggatagcagaaaatacggcaatgaacttcttggttgagatgggaggggcagtagagatatacgaaaacgacaagaagctcatcgccgcttccggtctcgatccttcaacctatgaatccggaaaatacgcggggaagagcaggatcagcaagagaggaaaccggcacttgagaagggtaatctggctcatggcgacgagggtcattatcaataatgctttgtttaaggcatacttcaagaaacgaaggcaggacgggttgccttacaagaaagctgtcctggccacagcccataaactcattcgtatcatcttcgtcatgccgagtcgtaaaacatgttttgtggaaggaggaattaaatatagttga

SEQ ID NO: 3750 - DNA, 1650 bp, unidentified
  source 1..1650: mol_type = unassigned DNA; note = element_596165a
  misc_feature 1..2: note = core
  misc_feature 3..347: note = LE
  misc_feature 348..1559: note = CDS
  misc_feature 1560..1650: note = RE
ctggtataaagatcatattgatctaggttaaaggttagtcgtcgtagatttctttctttttgctactttttctttctttacaatcatgtggaattgtggaaatcttagcaccatgaacgggtcttcaagcagggttgacggtttgactcctccttatggccctgatctttcagggaccattcaccaaagactaccgcttcctgccggtctaactgggaatattcattcaggatgctatggctctcagttgacactgagggaccatttatctcccaggctatatgggttagaccctcgcagggaggccacctgcttaacccgttactccacccaaaggagaatgaaccatgtttaccctcggcattgacgtctcaaagaaatcttctcgctacgtcctgctcaacccagaaggtcgaaaagtaaaatctttctcgctggacaattcctatgaagccttccaggacctcttggagcgtttcaaggagttgtctatccccaaagaggaccttctggtcggcctggaagcttcaggagccttctgggaaaacctctactcccatctcaaagaaaatggtttctctgtcgtcctgctcaatccttaccacactaataagttccgggaagccctggccaaaaaagccaagactgatgatattgacgccctcatcattgctcaactcctgcgaaccggggaatatgtccaaagccaagtggccgaagaactcatccaatccctccgcgaactcacaaagcttcgttacgagctggtcaaggagcgtaaaaattaccagcgccaggtcttctccgtcctagccgttgtcttccccgaacatgaaaaaaccgccctcaaaaatcccttctccgtcgcttccctcgccatctttcaagcctttccgaccgcgcaggaccttgctcaggctaaggccaaacaaatcgagaagatcgttcgctccatcaaaggcaataatttcgacctcaaagaaatcgaaaccctcctccagacggccaaacgctccatctacgccggtcgggcaaggaaagccagaggaacctcccttagaatcctcctccgccatgttgaaaatctctcttcttccatcgaagaattggaaaatgaaattaagcagatcctctcccctcggcaatctgaagactccttcccaggagaaaaccttctgaccatcccaggagtcggagaaaaaaccgtggccgccgtcctctcttacttgggaaccaatggcgccaatttctccacttccaccaaggccgtgggatacattggattctttcccaagattcatcagtccggccaatcacaatgggacaatgttatctcaaaaagaggaccgactcttcttcgctgggccctttacatggccgccgtggcttgcttacgacataatcccgaaatgaaaagcctgtatcataaaaagctctcccaaggtaaaacagaaaaacaggccctcatctgcgtggcaaagaaactgctccagattatgctctcgatgcttaaatccggacagccctataacccttcgagagtctacgtcacctgttagattgtcaaagaacgctctttgaaaactgaatacgttgtggaaaacttttttacacagtgatcaatttccctcttgactccttataggatgt

SEQ ID NO: 3751 - DNA, 1281 bp, unidentified
  source 1..1281: mol_type = unassigned DNA; note = element_5963ef5
  misc_feature 1..2: note = core
  misc_feature 3..241: note = LE
  misc_feature 242..1267: note = CDS
  misc_feature 1268..1281: note = RE
  misc_feature 58..221: note = bridgeRNA
tccattagactattttattgaaaatatggtacaatgggacactcgttccttgagtaaatttaccgaatagagagctgaataagtctaacgccgttcaaaagtagaacttatattgcgaataagacccagctctctatgatgattaaagctagatagtgttatcgtcgctataaaagcgattattaatggagtaagctcatatcatcatttattcggtacaaagaaagaaaggagtcccattatgttaaagaacactttttttgtaggaattgatattgcttgtgatgattttgtagcaagcatatatcaatccccaaagcaatcaatactcaccaaagaaggcattgaaaatacctttgatggatttaatgtctttatttcatggctcaaagaacatcgtttaagtaaaacaaattcgattatctgtatggaagcaactggcgtctataatgaagccatcgctcactatttggtaagtcgaggctttagagtaagcattgagccgccccttaaggttaaacgtgcctttgatccagtaggtcataaaacagatcctgttgatagcaggcaaattgctgaatatgcctatagatacagtgatgaacttagattctggcaacctaaagatgaaatcatcgagaaaatcaagcaactcttaacagccagggagcaattcacaaagcaaagtactgctattcagaatgccatagcctcttaccgaagacatgttgtccaagtgcctttaatcgtaaaggcccatcaccagactctaaaagagctcaagaaacatattgccgagattgacaaagagctggatcggcttatacgtcaaaatccaataatctctcaaatgactcaccagctaaagagtatcccaggtgttggattattgttagcctctgacttaatagcaatcactggtgccttcaatgatatatctagctataaaactctatccgcattcttaggtatatgcccttatcaacatagaagcggaaaatcaatctataaagctgctcatatacgtaattttggaccaacatatgcccgtaagctacttatgcttgctgcccgctctgttgctactcataatatatcatttagaaagtactatgtccgcaagctcgctgagggcaaagctaaacagcttgtccttaataatatatcaaacaaacttattaaaatagcctgtgcattgataaagaataattcacaatatacagaaggctattattctgtaaatccattatgtcttaatttaacttgacaaagtcatagtgt

SEQ ID NO: 3752 - DNA, 1355 bp, unidentified
  source 1..1355: mol_type = unassigned DNA; note = element_596d7fc
  misc_feature 1..2: note = core
  misc_feature 3..68: note = LE
  misc_feature 69..1085: note = CDS
  misc_feature 1086..1355: note = RE
  misc_feature 1104..1345: note = bridgeRNA
ttatggatggcccgcccctcccgccggcgctgtagaatgccggcagtcaaaagaggaaggagcgaaccatgaatatcgtgatccttggaattgatctgggcaagaccacctgcagcgtcgtcggtctcgacgcggacggcaaggtcgtcgtgcggcgacggctacgtcgcgatggagtggtggcattcgccgccaagctggctccctgcgctatggccatggaggcgtgctgtggcgcccaccacatgggacgagcgctggcggcattgggccacgacgtccgtttgatgtcgccggaatatgtgcgtccctacgtcaaggcgcagaagaatgatgatcgcgacgccgaggcgatcgcagaagcggcgacgcggccgaccatgcgttttgtcgagctcaagagtgaggagcagctcgacgtccagacgctgcatcgcgtgcgtgatcgtctggtgggcgaacgcacctccctcacaaaccagatcagaagcttgcttttggagcgcggacacaccgtggcgcagggccatgctcgtctgcgcggcctactgtgcgagcttctggatgccgacacagatgcactaaacccgcgcatggcattcctgcttagggacatgcgcactcggtgggaggaactggaccgccgcatcgccgccttcgacacagagtttgcagccatggcccggaccgacgagcgcgctcgacgactgacagccatcccaggcatcggcgcgctgaacgccacagcgctagtcgccgcagtaggcaatgcagcaactttttcgaaggggcgcgatctggctgcgtggctgggtcttgttcctcgccaggtcacgaccggcggtaagccaaagctccttggcatcaccaagcgagggagccgctatctgcgaaagatgctcatccaaggcgcacgagctgccatgcccgtggtgtcacggaaagacaccgcaaccgggaaatggctgcgggcactcctagcccgcgcgcatccaaacgtcgccgttgtcgcgttggctgcgaagatggcgcgcatcgtctgggcgctgcttcatcacggacgcagctttcgggtcgtcttctgatagagcgttgaaatcattgaaccggtactcggcgtaagcattgccgggtgcctcgagctgcgagtggtgagaggaagatggcctaacagtcgaccggtgtcccgagaacctccggcgcaaaatggcccgacgaggccggcccctttatgaggatcgggacgcgcggatctccatcttggcagcggccgacgagccgacatgccggatacgtttgtgcagactgatcacaccatcacccaatcggcgcttgcacccggggcgggccatacg

SEQ ID NO: 3753 - DNA, 1386 bp, unidentified
  source 1..1386: mol_type = unassigned DNA; note = element_59799e3
  misc_feature 1: note = core
  misc_feature 2..87: note = LE
  misc_feature 88..1116: note = CDS
  misc_feature 1117..1386: note = RE
  misc_feature 1151..1381: note = bridgeRNA
taatgaaatggacgcccccttccggaagcggcatcgcggtgccacagtgaatttgcaaccaactcactaatcgaagggagcgtcaccatgaacattagaacgatcgggctggatctggccaagaacgtgttccaggtccacggcgtggatgcgcagggcaaggtggtgctacgcaagcaggtggctcgtgcgtcattggcggcgttctttgccaacctgccgccctgtctggtcggaatggaggcgtgtgccagcgcgcgcttctgggcccgcaagctggtggcacagggtcacgtcgtcaagctgatggcgccccagtttgtgaagccctatgtcaaaggcagcaagaccgatgtggccgatgccgaggcgatctgtgaagcggtgtcccgtcccaacatgcgctttgtgccggtgaagttacccgagcaacaagcgctgctggcggtgcaccgggcccgggccggtttcgtcaaagcccgcaccgcccaagccaaccagctgcgtggcttgctggctgaattcggcatcacgattccggtcgggttggcgtcgttacgacggcgcctgccgctgattctggaggacgtggagagcggcttgccgcgcatgatgcgcgaactggtagcccggctggcggagcatctacaggcattggatcagcaggtcgccgaactggagaaacagatccaactgtggcatcgccagagtgaaccctcgcagcggctagcggcgatcccgggcatgggtccgattaccgctaccgccttggtcgccagcattggcgatgcgcgtgcgttcagcaacgggcgccagctggccgcctggttggggctggtgccgcggcagcattccagcggcggcaagccggtcttgctcggaatcagcaaacggggggacgtctacctgcgcaccttgctgatccatggggcccgggccgtcatcagtcatgtcgaacaccgcggcgatcaagcggagagctggttgaaacgcctgcagggccgacgcaaccgcaatatctccgcagtggcgctggccaacaagaatgcccgagtcgtgtgggcgctgctggcccatgatcggcaatatggggaccccaccccgttggccccgtgagcgcctgagctaaccccgtcagcaacaagaaaggctttcctaccgattgcccaggcaatcacgacgtgatggcgagacaggtcagaccgtgacggagtaaacctgcgttatgcaaggcactgcgagtgcgcgctgttgttcaggactcagccagcggaatccatcaggggccgagacatcgtttctcaatacagcccgaatattatgactgcaatcgtccctgttcatcgtcattaactgaaagcttggcaagccggggacgtccatata

SEQ ID NO: 3754 - DNA, 1297 bp, unidentified
  source 1..1297: mol_type = unassigned DNA; note = element_597bede
  misc_feature 1: note = core
  misc_feature 2..66: note = LE
  misc_feature 67..1095: note = CDS
  misc_feature 1096..1297: note = RE
  misc_feature 1086..1284: note = bridgeRNA
taatgatatggacacttccacccaccgtctaaactcataggcggtaaacgaaacgaggaagagaccatgaacattgtaaccttaggtattgatttagctaaatcatcttttgctctgcacggagttgattcatcaggtaaggttcttctcaggaaaaacgtcagcagaaaaaagttgcctgagatgttgatcaatatgcctccttgccttgtcggtatggaagcctgctctagtgctcattattgggcaagattattcaagcagtttggtcatgacgtgaagcttatgcctccacagtttgttaagccctatgttaaatcaaataagaatgataccgctgatgctgaagcaatctgtgaagctgtgactagacccaacatgcgtttcgtgccgataaagtccattgagcagcaatcaatcctttctattcataaagctagagaaaggctggtttcaatgaaaactggccaaactaatcaattgcgtggattactggctgagtttggtattgttattcctaaaggcagtgcttcacttaacaagcagatccctctgattttagagaatgctggaaataatctgacttcatcagtacgcagattagtcgctcaattgaaagagctgattgatgatcttgttatacaaatctgtgtcttaaccaaagaaattgagcattggcacagtacgaatgttgactccaaaagaatcgcagagatcccaggtatcggtcctataacagccaccgcgcttgttgccagtatcggtgacccagcatcttttaacaatggacgacaggtgtctgcatggatcggactcgtacctaaacaattttcaacgggtggcaaacaggtgctgcttggtatcagcaagcgaggagatagctatttacgaaggttactagtccatggcgcaagggcggttctcgggcacttaaagcaacagcccaacacctatactcatcgctggttgaatgatttactgaaacgaaaacataagaatgtagcaatcgtagcattagcgaatcgtaatgctcgaattgcgtgggccttgctggctaatcaacaacagtacaaccctgaattactatctgcataaaattgcgcatgaagtgaaaatgaaaaaacaggtaagaccgtgagtatgtaactctgacttgatcaagggacattttagttcgtcttgttgataagagcatacttagcggaaatcattaagagtctttgaactcggatatatgtgtgcaatccaacgcctgatttcttcaattcactacttgccaataggaagtgtccatata

SEQ ID NO: 3755 - DNA, 1494 bp, unidentified
  source 1..1494: mol_type = unassigned DNA; note = element_597e712
  misc_feature 1..2: note = core
  misc_feature 3..244: note = LE
  misc_feature 245..1474: note = CDS
  misc_feature 1475..1494: note = RE
  misc_feature 7..243: note = bridgeRNA
ctaatgggttcttgccgggcctgggaggcttggttctggtagcggctggcgggtcagcactcatctcgtttctgaccccgtttggtaggtctggcggcagactgtgcgcccgttggtcgtgaggaggcggggatcgctgctgggatgacgtgcccctgaacggtgggtgagcacttgggccattagatcgccgagtcgtctcctccgcgctgccgtactgctggatcgagaccaggaggcaggcatgttgttcgttggtgatgactgggccgaggaccaccacgacgtcgagatcgtcgatgagaccggccggacgctggccaggcgaaggttccccgaggggctggcggggatcacgaggctgcacgctctgatcgccgagcaccttcccgaaccggcggggccggcagatccggcaccgcaggtggtggtggggattgagaccgaacgtggcccgtgggccgcggctctggtcgcggccggctaccgggtattcgcgatcaaccccatgtcgacggcgaggtatcgggaacggcattcgacgtcgggggcgaagtcggatgctgccgatgcgcacctccttgctgagatcgtccggctggatcgggcgcatcaccggcaggtggctggagacagcgcgttggcggaggcggtcaagcttgctgcccggacccaccagtcgctgatttgggaccggacccgtcagatcctgcggctgcggtcggccttgcgagagttcttccccgccgccctgaaggcctacaacgatttggatgcggccgacacgctgcagctgctgcggctggctcctgatccggaccaggcggcccggctcactaaacgccaggtcctggctgcgctggctcgtgcgaaccggcgcaaccccgaggtggtcgccgaacagatcatggccgtcctgcgggccggtgagttgcggcaggcgccgccggtgcaggccgcgttcgctgcgatcgtcgcagcccaggtcgaggtcatcaccaccctcaacaatcagatcgacacgcttggtgaggtggtggccgaccattttgggcgccacccggacgctgagctgatcaccagcctgcccgggctcggtgtgatcctcgccgcccgggtccttggcgagttcggtgacgaccccagccgctacgtcgacgcgaaagcccgcaaggcctacgccggcaccgccccgatcaccagggcatcaggcaccaagaaggtcgtgatggcccgctacgcccgcaacaaacgcctcggcgacgccctgcagcaatgggcgttctgttcgatgcgcggctcctccggcgccaaggcctactacaaggaactccggaccaggaagatcggccaccaagccgcgctgcgccagctcgccaaccgctgggtcggcatcctccatggctgcctgaagaccggccagccctacaacgaaacactcgcctggaaccaccacaccagcgccgccgcttgacatcgaaaaacctgggatgt

SEQ ID NO: 3756 - DNA, 1253 bp, unidentified
  source 1..1253: mol_type = unassigned DNA; note = element_5993b5b
  misc_feature 1..2: note = core
  misc_feature 3..208: note = LE
  misc_feature 209..1063: note = CDS
  misc_feature 1064..1253: note = RE
  misc_feature 12..185: note = bridgeRNA
cttatctgttcggaatgtggcagcgtaggtgtcgagagccggcgtgggctgccgtatgagcctggatctgagcgatcgccttggagcttggcacccacgccggaatctcccttgtttcgcccgaacagttgcccgaggtgacactcgaaacgataagactgggcaggcgagggagctctcgacatttccagcctagcggagatctcccatgagcggaatcgggatcgatgtgtgcaagaagtccctggatgcggctgtctttcaaggtgaggcccgccagttcagtaacacggcaagcgggcactgcaagctcgtccactggctgaggacactgccagttaggcaggtggtgctggaggcgaccggtggctacgagctggccgcgctggacgcgctgcatcaggcgggaatcccggtggcacgcgccaatgcgtctcgggcgcgtcacttggccaacggcttgggactggcaaaaaccgatcggctggacgcgggcatgctggcgtgtatggccgagaagatggagcttcatccctatgttccactgccgccgtggcagcgtcatctgggcgagcatgtccgcgcccgccgccagctcatcgatctgctgaagacggccaaacagcagctgttgcaggtggcggacaaaccgctacgcaagctgctgcaggccaacgtgaaccagctcgtgcgcagtgtggcgcggctggatgaactgatcgccgggcagctaaagacgctgctcatcgagcaaccgcacctggcggcgttgaagacgctcaaaggggtcggtccggtattgctggccgtgttggcgtgccggttgccggagcttgggacgctcaacggaaagcagatctcccgattggtgggggttgccccgctatcgcgcgacagtggcaagatgcgtgggaaacgagggatcggcggaggccgtgccgatatccggcaagcgctgtacatggcggcgatgtcctcggcgcgtcacgagcctcgcctgcgtgatttttatagagcgttgcggacacgcggcaagaaggcaaggtcgcgatcgtggcggtgatgcgcaagatgctggtcatcctcaatgcgcgcgtgcgcgatgaaagagccgccacgcagccagcctgagcatgctcgacggccatgagcagacgcaaaagcgtgccggccagcagccgccacctatggatgaacacgtctgaaggaaaccgatcagagctcgcggatcgagatcctgatcaacacagttg

SEQ ID NO: 3757 - DNA, 1380 bp, unidentified
  source 1..1380: mol_type = unassigned DNA; note = element_59b1605
  misc_feature 1: note = core
  misc_feature 2..66: note = LE
  misc_feature 67..1104: note = CDS
  misc_feature 1105..1380: note = RE
  misc_feature 1158..1374: note = bridgeRNA
taatgggatggtccgccgcctctgctcgccgttaggcgaggtatagaggaacgaaggaggccatccatggagctacacacaatcggcattgatctcggcaagacgagttttcatctggtcggtctgaacccgcgcggggaagtgatcgtgcgcaagaagttctcgcgcgcgcaactgctgcggttcacggcgaaccggcgcgtgcatctgatcgggatggaagcgtgcgggggcgcccatttcctgggccgggcactgcgcgagcagggccacgaggtgcggctgatcccggcgcagtatgtgaagccgttcgtgaagacaaataagagcgatttcatcgacgccgaggcgattgcggaggcggtgggccgcccgactatgcgtttcgtgccgatcaagagtgacgaccaactggacctgcagtcgctgcaccgggtgcgcgaacgctgggtgatgcgccgcacggcggtcatcaaccagatccgcggactgttgctcgagcgcggcacgacggtgcctaaggggcggcgtcatctggaggcggccttgcctgagattctggaagacgcggctgggaagctgtcggccacactgcacctgctgttggcgcaactgaagctggaactggaccagctggccacgcgcctggaagaggccgaggcgctgattcagctgaccgcgcaggagagcgaagcgtgccggcgtctggacgcgatccccggcatcgggccggtgaccgcgaccgcgctcatcgcggccatcggcaacggggcggcgttcagcaagggccgggagttcgcagcctggctcggcctggtgccgcgagaacactccaccggcggcaggcagaagctgctcggcatcagcaagcgcggcaacgcctacctgcggaggctgttcgtgcagggcgctcgcgcggtgctgcagcagcgcggcaaacaatcgacgggtctgtcggcgtggctggggcagctcgcggtgcgggctcatcgcaacgtcgtgtgcgtggcgttggcgaacaagctggcgcgcatcgcctgggccgttctcgccacaggccaggcctatcggcccccggcgatcactgctgttgcggcggcctgaccgaaacctgttgaagggaacacggcgcgccgtcgcggaatcaacgatttcttcccggtctgcgggcgaacaatgagatggcacaacggtcgaacccggcgctctcgaaacctgtttacggaaaaagtcttccaagactgccgagttagttaggaacagagcgcagcgcattccatcctggccaggagcacatcactccaacaaaggccgtatacatttgcgcagaccaacccgccaccttcacttttcgcttgcaacgaggcggcggaccataca

SEQ ID NO: 3758 - DNA, 1365 bp, unidentified
  source 1..1365: mol_type = unassigned DNA; note = element_59c3ca5
  misc_feature 1: note = core
  misc_feature 2..76: note = LE
  misc_feature 77..1111: note = CDS
  misc_feature 1112..1365: note = RE
  misc_feature 1143..1359: note = bridgeRNA
taatgagatggtccgccgcgagcaagtcaacccgagtcatcatggggttggcaagtgccagacggaggatcacaccatgcagattagatcgatcggcatcgatttaggcaagaccacctttcacctcatcgcactgggcagccgcgcccaggttgtcgcacgcaagaagttctctcgttcacagctactggcctacaccgcgaatctgccgtcggctttgatcagcatggaagccggagtgggatcgcattttctgggacgagcactacgggaacaaggccacgaggtgcggctgattccggcgcagttcgtgcgacccttcgtgaagtcgaacaagaacgactaccgcgatgcggaagcgattgccgaagccgtggagcgggagaacatgcggttcgtggcgatcaagacggaggatcagctcgatctgcaagctctgcatcgggtgcgtgaccggctggtggccagacgcaccagcgtgatcaatcagattcgcgctttcctgctggagcgtggcataagttttcgcaaagggccggccagcctgcggcggcagctgccggagattctggagaatggggaggagcagttgagcccgcgtatgcgcggcttgctggattttctctggcaagagtggaagggcttgcaggcacagatcgagagcctgaatgaggatctagaacggattgccagcaacgatccggcatgtgttcggctgcagcagattcccggtgtcggtccactcatagcgactgcggtggtttcggcgatcggcaacggggcggctttccacaaagggcgagagtttgccgcctggctggggttggtgccacgacagtggtcaaccggaggcaagcccaagctgctgggcatcagcaagagaggaaacccctatctgcgcaagatgttcattcatggagcgcgggccgcggtcttgcgcgtcaaacgcgagcggtcgagcttaggaaagtggatgggccagttagaaaccagaaccgctcgcaatgtggtgatcgtagctaccgccaacaagctagccagaatcagttgggcagtgttggctagtgggaacaactatcatccactgcctaaggcagctttttccaactagacgaagtggggccctgagatctttttcccagaagttctgcagaagaaaggaacgacgaaaacacagtcaaacgacgtgcctgagaacctgtgacgtaacaaggtctttcacgaccgtggcgattaaaaggacaggcacgtgcgcatcctcatcaagtgcccggagatcgatctccactaagaggccggatacattttcgcagactgttctcgtcgcacccaatttctccttgcagttcggcggcggaccataca

SEQ ID NO: 3759 - DNA, 1564 bp, unidentified
  source 1..1564: mol_type = unassigned DNA; note = element_59d06ac
  misc_feature 1..2: note = core
  misc_feature 3..248: note = LE
  misc_feature 249..1421: note = CDS
  misc_feature 1422..1564: note = RE
  misc_feature 3..225: note = bridgeRNA
ctcgtattataaagtagtagtgtttatagtccctctccaaggacttaatgctatacttcttacagacgctgtggattagtcctagtctcctaacgcttgacgttttaagaaaggctataaccacagtcgtttgcttaagtggtaattagttggataacgcatgacgtttcatttagcacgaggttacattgggcaaaccggtctgtggaagaaaacagtgtcaatacaaattcaaaggagaagccactatgatttatgtcggtattgatgttgctaaggacaagcacgattgtatcatcgttgattcggatggggtgatccgtttcccgacgttcaccatcccaaacaacaaacaggggtttcgtgaattgcttacaaatctcaagacatgtgggagtgatttcgctcaaattaaagtaggactggaagctaccggtcactacagcgataatcttttggagtttctgatcgccaatgatctccccactacggtaatcaatccgttacataccaatctttacagaaaaggtctaagccttagaaagacgaaaacggatacggtcgatgctcactcgattgtgactatgcttaggacagaatgcttaaagccctactcgaaaacatcttaccatgtccgcgaacttaagtcactaacaagataccgcttctctttggtgcaagattgcgcaagactcaaatcctcttatgcaagactttgcgtcatccttttccctgaattggagaagctggtcccgtcgctgcatatggcttctgtatatgctctactctctgaatttccaagcgcaagagccatatcccagtgtcaccttactagactatctaatcttcttaccactgcatccaaggggcgctacggtaaggagaaagcgatggaaatccggaatgcagcacgagactccatcggtccttacagcgacgtgaaatccttagaattgcagcagaccatccaaaggatccggatgatggaagaccagattaagcaggtcgaagcagaaatcaatcccattgtcgatgaatttcatagcccgcttctgacgattcccggaatctcctaccgcatggctgccattctcattgccgaaacagaaaacttcagcaacttcgattcggcggagaaggtgcttgccttcgccggtttggaaccttccgtttatcagtcaggacaactgacctccacacatgcgaaaatggtgaagcgtggctctaaatatctacgctacgccctatttaatgccgcaaaatatgtctgccattgggatggaggcttcggtcagtaccttgcgaagaagcgtgctgagggcaaaccttacaacgtggccgtttcccatgcggccaagaaactgactcgggtaatctttcaccttgtgaaaacgaatcagaccttcattagccaagcataggcactatgccattgtaattccgagagcagctctttaggggtgctaattttgtcatgcaattatcaaggtacagtttgtctgagttgcatttctgcaattcatccgaagtttttcattttgggtcttgacttttaatagttagt

SEQ ID NO: 3760 - DNA, 1294 bp, unidentified
  source 1..1294: mol_type = unassigned DNA; note = element_59d55fb
  misc_feature 1: note = core
  misc_feature 2..212: note = LE
  misc_feature 213..1184: note = CDS
  misc_feature 1185..1294: note = RE
  misc_feature 35..203: note = bridgeRNA
tcttaagtttgattctctttaaatttatagtattaaccagagagaacgaaagagcggattaaggtcaaggttaccgttggaacttatgattccgtcaacattgatgatccccgctcttttctacttccatttcgttcagttctatgagactttagatctcgatttcaagttgttgaaaaaaaagtaggtcgtcctttcttaaatcaatccttatgaataaatataaagaaatttttggagtagatatcagtaaagatgtctttgatgtttatggaagtgaaagtggccattcccaattcaaaaatactccgcaagggtttaaattgttcgccaagacattgccaacgggggctttggtggttatggaagctacagggtattaccactatcgtttagctcaatatctttttagccatgatatctccgtttccgtggtgaaccccctacaggtaaaacgttttgttcaaatgcgattatctaagatcaagacggacaagagcgatgccaaggcaatctgtgggtacgcaatagcaaatacggttccgctatatgacgccgtgaacgagacccaggcggaatgtctccagttatttcgcttacttgatgtttatctcaaacaacggaccgcgatcaaaaacaagcttcacggagagcgaacattgggcaggccgtccaaagtggtctatcgctcccttagtcgcagcctgaagcatctggacgtggaaatcgattgtttggaggtccgtattttaagcctggtcaaacaaggacaacaaaaacagttgacggacttgaagagcatcccgggactaggaaccaaaacggcgctgttcttgatcgtggttaccgacggtttcaacaagttcgacactgctggccagctttgcagctatgtggggctgacaccgattatacgcatgtcgggcagtagtgtcaggggcaaggccagaataagtaaaatgggcaaccgtaagctccgcaacctactttttttatgtgccttttcggcctgtaaacataataaggcatgcagggccgtttatgaacggatcgtagcgaaggggaaaagtaaaaaattggccttgatagcggtggccaacaagttgctgaaacaggcatttgcaattgccaaatcagggttgccctatgatgagaactatgtgtccgcccaagtcaagggatagattgaaaaagcagtgatgtcaaaaaagccaagatttatttttaggttttggcaaagaataattatgttttaaaattaaccgaggaaacagttgttttttaactcagttct

SEQ ID NO: 3761 - DNA, 1393 bp, unidentified
  source 1..1393: mol_type = unassigned DNA; note = element_59d62fb
  misc_feature 1..3: note = core
  misc_feature 4..90: note = LE
  misc_feature 91..1122: note = CDS
  misc_feature 1123..1393: note = RE
  misc_feature 1093..1380: note = bridgeRNA
agatggggtggttgccgcccccctcagacgggaccgcaatgtgccaaagatacggtgtctataaccaccgatcggaaaaggacggcaactatgacgaaggatgtgatgattggagtcgatctagccaagaatgtcttccagctgcacgcagcatctctgaccggacatctgcggtatcgcaagaagctgtcgcgggaagcattccgccgattcatggctgagcagcccccagcgatcgtagtgatggaagcttgtggcagcgcgcattactgggcccgcgagatggccagacacggccatgaggtaaggctgatcgctcctcgctatgtcaagccgttcgttaaacgccagaaaaacgatgccgctgacgccgaggctatcgtcgtcgcggcacagcgccctgaaatgcgtttcgtcgaaccgaagtctgcagagcagcaaggtaaggcgatcctgtttcgctctagggagcgactggttcaccagcgcaccgagctgatcaatgctctgcgggcttatctctatgaatatggccatgtcattccacaaggtatccgtcagcttggaaagatcgaagatttcctagatgcaccaaactgtgatttgcctgacctggtgcacgaagagtgccgcaatttgctggagcagattaccgagaagacgactcgtatcgacgcccagacccgcaagatcaagaagttggcagccgaagcggatacagcgcgacgcctgcagaccatccccggagttggtcctatgatcgctctcgccgtcgaagcctttgctccgccgatggagagctttcgatgtggccgcgacttcgcagcctggctcggtcttgtgccacgccaattctcgtccggcggtaaagagcggctcgggcgcatctccaaggcaggacaaaccgatatccgcagactattgattgtcggagcgatgtcccgtctgaactggttaggtcgccaatcaattgtaaagggttcgtggctttcgcaaatgttgatgcggaagccacgaatgcttttggcaatcgccttggccaacaaaatggcgaggacaatatgggcgatgatcgtcaggaaagaagattaccgggttccggcagaagcaactgtagcttgaccaacaaactacgtagagctcctgctggataaaagggtgaaagaaggcgacgacccgaatgggcaaaatgatcgaacagatctgggtgaggaaaaccagtcataactgatgggcattgaagctcgacaacgagatttggacctgacccgcagatcaccataccggccagcggcttctggaaatgccgtagaaaaaggccttacagaagaccgcactcgatcacatgcgcattcagacaaaaccttcttgcatcctaggcggcaaccacaga

SEQ ID NO: 3762 - DNA, 1502 bp, unidentified
  source 1..1502: mol_type = unassigned DNA; note = element_59e6d82
  misc_feature 1..2: note = core
  misc_feature 3..243: note = LE
  misc_feature 244..1482: note = CDS
  misc_feature 1483..1502: note = RE
  misc_feature 15..239: note = bridgeRNA
ctaataagtcgtgtcgggtccgccatacggcagacttggctgaaggtggccgccggcaggtgagcacttgcttctcctgggcttcgggtcctgctgagagaccgtgcccctgccggcagccgggagagttgatcgctgctgggatgtcgtgcccgccgctggcgtgagcaccgtgtttattaggtcgccgatggttctcccgctggctgctggcgtgtttcgacagagttgacgggagacttgatgcggctgttcgccggggatgactgggcaggggatcaccatgacgtcgaggtgatggacgggtccgggaagaagctggcggcgcggcggctgcccgggggcgcggccgggatggcgcagttccacgcgctggtcggccggttcgtgcccgaggatgacatggacagcgccgaggtggtcatcgggatcgaggccgaccgcggcccgcgggccgccgccctggcggcggcgggttacccggtgtacccggtgaacccgctgcaggcctcgcggtaccgggagcggcacggcgtgtccggcgccaagagcgacgccggcgacgcgcgcatgctcgccggcctggtccgcaccggctcccaccagctgcgggccgcggccggggactcgccggaggcggcgggcaccaaggtgccggcccgcacgcacaagacggtgacctgggagcgggcccgggcggtgcagcggctgcggcaccagctgcgggggtacttccccgccgcgcccgaagccttcgatgacctcgacgcggccggcacgctcgagctgctgggcaaggccccggaccccgcccgggccgcgaagctgacgcgtgcgcaggtcagcgcggcgctcaagcgcgcccgccgccggaacatcccggacaaggccaccgcgatcctggcggcgctgcgcggtgagcagctgggccagccgccggtcctgaccgacgcctgcgcagcgaccgcccggtcgctgctcgcggtgattaccgtcctgaacgagcaggtcaaggcactgcaagggcaggtggaggaccattttggccgtcacccggacgctgaggtctacctgtcccggcccgggatgggcaagatcctcggcgcccgggtcctcggcgagttcggcgacgacccggaccgctaccgcgatgggaaggcccggaagaactacgccgccaccagtcccctcacccgcgcgtccgggaagaagaaggtcgtcgcggcccggttcatccacaacgaccggctcgtcgacgcgctcaacgcccaggcatccgccgccctgggcgcctcgcccggggcccgcgcctactacgacgagctccgcgcccgcgacatcgagcacaacgacgccctgcggccggtagccaaccgtcttgccggcatcctgcacggatgcctcaagaccggcaccctctacgacgagaccaccgcgtggggccaccgggaaaacctccctcaatcctcgctcgcggcttgacatctaagctcctgggatgt

SEQ ID NO: 3763 - DNA, 1583 bp, unidentified
  source 1..1583: mol_type = unassigned DNA; note = element_59f5263
  misc_feature 1..2: note = core
  misc_feature 3..247: note = LE
  misc_feature 248..1417: note = CDS
  misc_feature 1418..1583: note = RE
  misc_feature 6..225: note = bridgeRNA
ctcgtattatatagtcatacccattctttacctgttctaaggtatagggtatgctgttgaagatgctgtggattggtttttctctcctaccgcatagacggtttaaataaggctccaaccacagcctctttgtcacaatgttaatcagttagataccgcatgacggtttatgtagaacgaggttacatcggcaaagagccctgtggatccaatacagcgtcaaatacttttaaggaggatcatgtgtatgatctatgttggtatcgatgttgcaaaggataagcacgattgctgcatcctgggatcagaagccgataaactctatccggttttcactatcccgaataacaaggctggctttgatgaactttatgggaagattttctccgtgactgacgataagaccgaaataaaagtaggtcttgaagctaccggtcactactcactcaatcttctcggatcgctcattgataaaggtctacccacctgtgttatcaacccgttacatacaaatctttacagaaaaggtctaagccttagaaagacgaaaacggataaagtcgatgccagttcgattgctatgatgttgatgactgataagactctcaagccctactcagacacatcatatcacagcgaagaactcaagtcattaacccgttatcgtttcgacaaggttcaggaacgcgcaaagctcaaatcatcagtggcccgtcttgtaaacatccttttccccgagttggaaaaactcgttcccagtcttcatatggcttcggtgtacgccctgctttccgaatttcccggtgcatcactcatcgccgattgccatcttacccatctcaaaaatcttcttgaaacagcctctaaaggccgctacggacgagatatggcaatcatcataagggatgcagcaagaggttccattggctctgtaatgcctgcaaaatcaatggaattgaaacacaccatccatttgattgaagtgatgacagacgagattgatgaaatagaatcgtccatcaagtccatcatggacgcctccagatcaccgattacgaccatccccggaataaactaccgtatgggagctatgattcttgcggaggtaggggatttctccaaattcagcaatgcagatcaaatacttgcatttgcaggattatcaccttccacgtatcagtccgggcagttagaatccagctattcccatatggaaaaacgtggctcccgttacttaaggtatgccttattcaatgccacgaaatatgtctgccactgggatgaagaattcggtaaatacctatccaaaaagataggagaaggtaaacattacaacgttgcagtctcacatgctgcgaaaaaactaatacgcactatttaccgaatggaacttattggcgaagcctaccgtaaataatactttgacttcatatccttttcttagagcacctatacagatgctctgtttgtcatgcgattatcaaggtactgattgaggcttaaacctgccttcttaatatttaaaacatctgatgatgttttattcaaaaaaaccattttcctcttgacttttaatagttagt

SEQ ID NO: 3764 - DNA, 1183 bp, unidentified
  source 1..1183: mol_type = unassigned DNA; note = element_59f653d
  misc_feature 1..2: note = core
  misc_feature 3..205: note = LE
  misc_feature 206..1168: note = CDS
  misc_feature 1169..1183: note = RE
  misc_feature 12..210: note = bridgeRNA
cttgtatctttaaacctgaccagcaaggtagagtctcaacgccgttgaggcggccagaccggcccgcgcagttcggtaggcactggggtgattgagcccgtttctgagtacagaacgcacgagcgccgcgctggtcttcgtgaagcccgaacggttacgcgcgccttcgatgagcgcgcatgcacaagcaggggatctgaagatcatgtctgttacctcaacaacggtgggcatcgacgtggccaaggcgcacgtggatgtctgtgtgctgggcaccaagagcgatgcccagcggttggacaacgacgccgagggccactcggcgctggcggcggctttgcaacccctgggcgtgggcctggtggtgatggaagccaccggcggctacgaggcggcgctggcctgtgcgctgcaggcagcgggtttgcccgtggccgtggtcaatccgcgccaggcgcgcgactttgccaagtccatgggacgcctggccaagaccgatgcggtggacgcgcgcatgctggccgaactgggctcggtgctggtacgccgcgaggacctggatcgcttcctgcgcccgttggccgatgagcgccagcagtggctggcagccctggtcacgcgcaggcgccagttgctcacgatgatgcattcggagcgccagcggccgcagatcacgcctaagaagctgcacgccagcatcgaggtcatcgtggcggtgatcaaggcacagctcgacgagatcgaggggcagatggtcgcccacgtgcgcgagcactttggggaactggactctttgctgcagttcgccgcagggatcggtccggtcgccagtgccacgctgatcgccgagttgcccgagctgggcaagctcaaccggcgcgagattgccgcgctggtgggcgtggcccccatggccaacgactcgggcagcagcaaaggtcggcgccgcgtgcagggtgggcgctttgagatacgccgcgcgctctacatggcaacgttgacggccacccgctacaaccccgccatcaaggccttttacgagcgattgaaagccgcgggcaagatgcccaaggtcgccctggtcgcttacatgcgcaagctgctgaccacgctcaacgccatggtccgtaccggcaaaccttgggacaaatcgcttcacggtgcttaacttccaagacggtta

SEQ ID NO: 3765 - DNA, 1452 bp, unidentified
  source 1..1452: mol_type = unassigned DNA; note = element_59f6f8f
  misc_feature 1..4: note = core
  misc_feature 5..230: note = LE
  misc_feature 231..1436: note = CDS
  misc_feature 1437..1452: note = RE
  misc_feature 1..234: note = bridgeRNA
ccccgttacctttttcgtagctcctgatcgaggagttgtggtcgccgggtccggcatgactgacgccccagtcgaaggcatgatccggggggtggtgtcaccggacccggtggcatcgccggaccgctgatagggacacggccaccttcgggtaggtctcgtcgtaacgtgggtgccggcctgcgatgcccacccctgcggccacccgcgacggacgaacggcatgaccgatgaccagcactttcggggtgttcctcggcctggatgtgggcaagggcgaacaccatgccgtgggcctggaccccgccgggaagcggctgcacgacgcgcctctgcccaacagtgaacccaggctgcgcgcgttgttcgacaagctcgccgagcacgggccgctgctggtggtggtcgaccagcccgcgacgatcggcgcgctgccggtcgcggtcgcccgggcggccggccacaaggtcgcctacctgcccggcctggccatgcgccgcatcgccgacctctaccccggccgcgcgaaaaccgacgcccgggacgccttcgtcatcgccgacgcggcccgctctctgccgcacacgctgcggccggtcgacgtcggcgacgacgccctggccgaactcgacgtgctggtcggcttcgacgacgacctggccggcgaggccacccggatcgccaaccgcatccgcggcctgctcaccggcatccaccccgccctggaacgcgcgatcggctccaggatcagccacccggcggtgctggagatcctgtcccgctgcggcggcccgaccggcatcgccaaggccggccgccgcaaactcaccgcgatcgccaccgcccacgcaccccgcatgggcgacaagctggtcgccgcgatcatgactgcgctggaggagcagacggtcaccgtcccgggcaccacggccgcggacacggtgctgccccgcctggccgacagcctgaaaacggttctcctgcaacgcaaacaggtcgccgccgaggtcgaggggatactcgatgcccaccctctcgccggggtcctgacctcgatgcccggcatcggcgtcaggaccgcagcccgcatcctgctcgaaatcggcgacgccacgggctccaagacctccgggcacctggccgcctacgccggcatcgccccggtcacccgcagctccggctcctcgatcaagggtgagcacccggcgcgcaccggcaaccgcaaactcaaacgggcgttcttcctcgccgcgttcgccgccctctccgacccgaccagcagggcctattaccagcgcaaacgcgaccagggcaagaaacacaacgccgctctgatctgcctggcccggcgccgctgcgacgtgctgttcgccatgctccgacacaagacctactaccggcaccccgagcctgctccagccccgactgcggcttgacaaccacatagggaca

SEQ ID NO: 3766 - DNA, 1383 bp, unidentified
  source 1..1383: mol_type = unassigned DNA; note = element_59f81f1
  misc_feature 1..2: note = core
  misc_feature 3..239: note = LE
  misc_feature 240..1277: note = CDS
  misc_feature 1278..1383: note = RE
  misc_feature 7..216: note = bridgeRNA
ctcctatgtttgtcattaaccaataaattagtgttatgaagtgaagaggaatgagagcggatggtcgcccaaacaaccatttagggtatgtacagagagagatactgcctcatttctttttaccctttagagtttgaacagaatgtaaggagtagtgcaaggcattacatccgggatatccgtcaggagaaaagacgaagaagggtgattcactttgtgaatattaaacaaataaagtgatgacaaacattgtaaaacaggtggcaggcattgatgtggcccaggatgagctggtcgtatcgcttgggaaaatggatattgctattgaaacaactatttatgccttcaaaacatttgccaataaaccttccgggtttgcggcactgctggtatggataagtaagcatgccagtgctgatgtaccggttcgcttcgtcatggaagccacaggcgcatatcatgagaaattagcttattatctaactgagcaggaaaagcaggtaagcattgtgttgccaagcaagatcagcaattatgttaaaacgctcgatataaaaacagtcaccgataaaacggcatctcaggccatctgccagtttggactaggaagaaaactggaaatatggcaaaagcctaaaaaaatattcagggacttaaagcaactgacccgtgagcgggatcagataatagcagaacgcactattgctaagaaccaattacatgcagaacagtcgggcgcgttcccgaatgaaaggagcattataagattaaaccagcgtatcgatctgtttaacagccaggagaaggagatccatacagaaataagcgaagctataaaaacagataaggagctgactaaaaagataaataccattacctcgataccaggcgtaggtaaactcaccgcgacgatagtgatagccgaaacgaatggctttgagcttatacgtaataaaagacaactggtgagttacagcggattggatattaaggaaaagcagtccggcacatctgtaaaagcaaaaccaaaaatatcaaaaaaaggaaacaggcacgttcgaaaagcaatgtatatgcccgctttaaccgccatcaggaatgatgagcgctttaaagcaatattcgtcaggctggtatcaaaacatggaatcaaaatgaaagcagcagtagctgtgcaaagaaagttattggaaatgatctatactatatggaaaactgatactaaatacaatataaactacttgcaaaaaacaactcaggatatacaggcgacttaaaaagagttagggcaggtacatcacaaagatggccgccctaaacaggctggcattaagccgccttaagtgaacaaaattaaatattatttgataattaacacagaat

SEQ ID NO: 3767 - DNA, 1581 bp, unidentified
  source 1..1581: mol_type = unassigned DNA; note = element_5a00f0d
  misc_feature 1..3: note = core
  misc_feature 4..283: note = LE
  misc_feature 284..1459: note = CDS
  misc_feature 1460..1581: note = RE
  misc_feature 26..259: note = bridgeRNA
tcacgtataatccaattatcttagatggtaattggatttttcctttctcccagttaacactgggtatttatttccatctctgatatattttgaaaaggcactgtggatctgtatctataactttacagctttgactggtatgaggtgactcagaccacagcttttcgtctattactgttaatcagtttgttaacgcatcgacgtttttatttacgtgattacacagccgaattctctgtggaagacagcagtgctcaaaatatttatcaggaggtataaacctatgtcaatgtactttattggaattgatatttccaagtacaaacatgattgctgcatcatttctgcagctgatcaaaaagtagtttctaaagtcacaatcaaaaacaataaagccggctttaatgaactgcttacaatcattcattctctcgcaaatcctgcagacataagaatagggtttgaatcaactgcccattatgctctcaatcttgaactcttccttgaaaattctctcctaaccttcatggaagtaaatcctgttctcatcagtgaatacaagaaatcaaaaacacttaggcgtacaaaaaccgactctgttgactgcgaatcaatagctcgttggttaatgactgttgaatacaaaccccattcaaaaggattttaccacgcttactctttaaagtcattaactcgtttacgcgataaacttatccgacagcgttctttctatcttattaaaatcacaaatgtgttagatcatacattccctgagtttaaaccattctttaatgaacgcttatccaaaactgctctctatctgcttgaaaactatggttctgctgaaaagatggctcgtatgaactcagcctcttatgaaaagctacgttccttatcccgggggaagttttcaccacagcaatttctacgactaaaagaacttgctgccaatactgttggtgtaaataactctatttttgatgtagagctgaacagtcttttatctttatacaaatcccttgtaaaagagattaataccattgaaaaagaaatcaacaaactaattgaagaagtacatcctcactatatgtcagttcctggaatcggaccattatcagcagctgtaatctattctgaatacggcgatatatctaacttcactaatccaggacaaatgcttgcatttgctggaatagaaccgggaatcaacgaatctggtactgaatctcacggaggtaagatggttaagcgtggatcatcccagctccgctacacacttatcaattgttgtctaccgttaatccgctttgacatgacatttgcaacttactatgccaagaaacgcggagaaggcaaaccacatcgagtagccattactcatgtagccaaaaagcttattagagtcatctatgcattggagaggcaaaatatcgactttaatgcacagaaacttcgttaatctctagtggattaatactaatttctcccatctgaaatacgatgtattcagatggcttattaaagttacccatttttacaattcaaaaaaatttcaaaattctcttgactgtttatagtttg

SEQ ID NO: 3768 - DNA, 1158 bp, unidentified
  source 1..1158: mol_type = unassigned DNA; note = element_5a0401b
  misc_feature 1..2: note = core
  misc_feature 3..192: note = LE
  misc_feature 193..1143: note = CDS
  misc_feature 1144..1158: note = RE
  misc_feature 56..202: note = bridgeRNA
cttgtatgcttcgttttactggacatgggttagttttttgttggttaattctgtctggcccggcacagcagctcgactagcccttgggacagcaagcccgtgtcgaagcgaggagcgttgtgccggtttttcattgataacccgaacggttgcttgggtaaataagcccgcatttttgcaaggatgggtgccatgaataaaatgatagtggagaagtttgttggcatcgatgtgtccaaatccacgttggacgtgtgcatcgagcctgctgtgcagacgttgcatgttgcttacgatgaggcgggagtacgccaagttgtcagccgtctgaaagaagtaaaaccgattttgattgtgatcgaagccacgggcggattggaagtgcgtatcgcgaccgaactggccagccttggattgccggtcgctgtcattaacccgcgccaagcgcgtgattttgccaaagccaccgggcagctggccaagacggatcaggttgatgcggcggcactggcggcgttcgccaaagcaattcgaccgcaggcgcgcccactcaaggatgcggatacccgcgccttggatgacatggtgagcagacggcgtcaattgatcgatattcgggttcaagagaccctccggctcggcacagcagcttccaaaccaatgcaaaaaagtttgaacaaacacattgcttggctggataaacagattaccgaacttgacaacgatttggccaagcgtttgcgcgaatcggatatgtggcgagccaaggacgacctgctccgtggcattcctggcgttggcgcggtgactactctgacaatgctggcaaagtgtcctgagcttggaacgcttaatcgccgcgaaattgcggcgctgactggcgttgccccattggccaaggacagcggcaagcatcgtggcaaacgcttcgtctggggcgggcgggctgatgtacgtgcagttttatacatggcgaccgtctctgcgatacggtgcaatgacccgatcaaggcattcgctgaacgcctgaaaaaagcgggcaaaccgcccaaggtcgtgatcgttgcgtgcatgagaaagttgctgaccattatgaattcaatgttgaaaaataataccccgtggaaccccaaaaccacttgacttgtaacacggttg

SEQ ID NO: 3769 - DNA, 1678 bp, unidentified
  source 1..1678: mol_type = unassigned DNA; note = element_5a099ac
  misc_feature 1: note = core
  misc_feature 2..149: note = LE
  misc_feature 150..1328: note = CDS
  misc_feature 1329..1678: note = RE
  misc_feature 1383..1590: note = bridgeRNA
agacatcatggccccgccaatgcgaggcgggtcgcaatagttgggattgagaggtctgcctccattaccgtgggttgcgcaccgaagtgtgccgagccacatacagaacgcgttgcggcgtcttctgcaaaattcactggaggcagaccatggaaaagcatagcaccgagtttatcggattggatgtgcacaaagagtcgaccgcgattggccgagccagcgccggcggcgcggggggtcggttcgtcgggacagtgggtccgaccttggcggagctgctcaaatcgctgaagtcgctgggccgcccggaagaattgtcaatcgtgtacgaagccgggccttgcggctacggattggtgcgcgagctgcgatcgcgaggttacgcgtgcgaggtgatcgcgccttcgaaaattccccgccggtccggcgatcgagtcaagacggaccggcgtgatgcggtacgactggcggaattggcgcgcgccggcgagctggtcagtgtgatagttccggacgagcgcgatgaggcgatccgggatctctcgcgggcacgagtggacgcggtgcgagcgcggcttgcggcacgtcatcagctcaaggcaatgttactgcgacacggccatcgctatggcaggagctcttggacgcaagcgcacgaacgctacttggccaaaatcacctttgctcacgcggcccaagacgcgacgtttgccgaatatcgtcaagccgtcagcgaagccaacgagcgggtccagcgattggtcgaagcgttgcgcgatcagtgcacgacttggcgtatgcagccggtgcttgaggcattgatgagattgcgaggtatcgactttgttgccgccgcgaccttggtggcggaactaggggatttgaagcgttttgcacatccacgcgagctcatgtcgttcctgggtctggtgccctcggaatacactagcggtgacgcgcgccatctcggcaagattaccaaaaccggcaacggccacgtgcgccggattttaatcgaagcggcctggaattatcgctttgcggcccgcatgagcgttgtgctccaaaagcgccaggaggggcaaccgaaggtggtccgcgacatcgcctggcgcgcgcaactgcgacttgcgcagcgataccggcgcctcagcgcgcggcacttgcatcacaacaaggtctgcgtagcgatcgcgcgcgagttggccggatttatccgggacatcggtcgccacgtgccgatccacgacatgccaatgaaagcaccgaaaacaggaagtggtaaccccaaggggtgccacgcgattgccgctgcagcgactttataggcagtcgatttttggagcattctcaaaaaaaggacctcgacgacgtactaacctcaaacacactggaataggaacgcgatgcgcgggacacgatgtgggggaatcctcgagcacgatatgtgggtatccttcgggtgatctccgatgctagaacgaggcagccccgcgacggacagatgaaatgcggtaaccaacccgcgaatatcagcatgatcaatcgtcgccaaagcctcccgcgcgtcgcgttccccttccggtgtgagataccaatccgaagcggtcgaaatcgaaacccaagcgcggatccgcgagccttacgctcgcgcctgttgacagcaaggggccatatc

SEQ ID NO: 3770 - DNA, 1618 bp, unidentified
  source 1..1618: mol_type = unassigned DNA; note = element_5a26db1
  misc_feature 1: note = core
  misc_feature 2..281: note = LE
  misc_feature 282..1499: note = CDS
  misc_feature 1500..1618: note = RE
  misc_feature 17..304: note = bridgeRNA
tcctaatatataaagtgtagtggtcagtaacctcacatccagcgaggaactgctcatctcattattaaagctgttaaaatgtagtggcatggttttggcgtagtcctccttggacttttatgtccgtcggaaagcctgccgtccggtcactcatttgcagctgtttggtttatgtaggttgaaccgctctatacttgcgtgttcgtttgatgcccaggagattaaataagcaatgagaaagcccggtaccattgcaaatttattctttaggaggcataactatgttaaacgctgtaggtattgatgttagtaagggtaagagcacaatcgcggttcttcgcccggcaggggaaattgtacgtaagccctttgatgtaaggcacactccaaaggagctttctatcttgtcctcgtatatccaacaccttgaaggcgatactcgcattgtcatggagtgtaccggtcattatcacgaaccgattcttaaagttctttctgattcaggtttcttcgtttctgctgtaaatcctcatctcattaaagagtatgacggcgataattctcttagaaaggtcaagtctgattctgccgatgcaaagaaggttgcaggatatacacttgacaagtggcaccttcttcgtcaatattcagctatggataatacacgcacgcaactaaaaactctaaatactcagttccagtttcttatgcgacaaaagacagctcttaagaacaatctcatttcattacttgatttaacttatcccggtgttaatgcattcttcgacagtcctgttcgcaagaatggttcgcagaaatggcttgactatgcctattctttttggcatgcagattgtgtaagaaccatcggtctgaaaacttttaccgagcgctacaagaagttttgtaaaaggcagggctacatctttcagcctgataagccaaagagtctatttgaatcttccaaagaactcattgccgttgttcccaaagaccatatttacaaagatatggttctctccgctattgtacaggttaatctcatttccgcacagattgaatccatgcgtctaaaaatggatgaattagcttctactctgcctgaatatgaagtagttatgaacatgtttggagtatgtcataccttcggtcctcagcttatggctgaaatcggagatatttcacgctttaaccatcgctcagctttaactgcctttgcaggtgttgatcccggagtcaaccagtccggcaagatgaaaattgacagtaaccgtgcttccaagcgtggtgctccaagactcagaaaaactctttttcaaatcatgcagacattgatgcagaatgctcctgctgataatcgtgtctatctttttatgatgaagaagaaagcagagggcaagccttatcatgtctatatgactgccggtgcaaacaagtttcttcgcatttactatggaactgttaaggctcatttagcttctcaatctcaaaccgaatagaacacctcctcttctgttttttagccggcgattaacggtggctcttttattgtgcttatttttaccaaaaaacatttttattttcctttcaaaaagtgcttgactttttattagtaggc

SEQ ID NO: 3771 - DNA, 1345 bp, unidentified
  source 1..1345: mol_type = unassigned DNA; note = element_5a27663
  misc_feature 1..2: note = core
  misc_feature 3..77: note = LE
  misc_feature 78..1112: note = CDS
  misc_feature 1113..1345: note = RE
  misc_feature 1143..1340: note = bridgeRNA
tgatgtgatggacgccccctccctgcgcggtcagtttcatacttaggctgacagcgttcaacttgggggatcaccacatgaacacgatcaaagtagttggaatcgatattgctaagtctgtttttcaggtgtgtgtatggatggctgatggttctgttgcctggaatcgtaaaatatctcgccagaaactgctccacacgttgcgccagtttccaccgcaaacactgattgctatggaagcttgctcaacatctcatttctggggacgagcactgatatcgatgggctatgacgtaaagctcattcccacacagcatgtcaaagcctttgcaagacaccagaagaatgatgccaacgatgcattagctatttgtgaaacagcttgccgaccagggatccacttcgtctcagttaaaactacagaacaacaagatatcaaggcgttacgtagtgctcgccagctcatagttgagcagcgaaccgctctggctaaccaactacgggcattacttgccgagtacggagtcattattccagccgggttacaacgcctgcaacgacaactgccagaagtgcttgaagacggagacaatacgataaccttcacgcttcgccgactactgagcctgttacgagaagatatgcagatgctcactgaacggattgatgtcttggataaggaactagctgaactgtccagccagcaggttgcctatcaccacttattgaccattcctggtgtcgggccactgattgccgctgcggtggtcagtgaggttgatgccacccagttttccagcggccgtgagctttctgcttggtgtggcttagtccctcgacagcacagttcaggtggaaaacaacggctttcatccatgaccaagaacggtaatcgtaacttgaggaccttgatcatccatggcgctcgagcggtgatgcgttgtgtgcaaaaacgggatgacagtttagggagatgggtgaaggcaattgaattgcggcgtggcttcttgaaagccactgtcgccctggcaaataagttaactcggatcatctggcgtgtactaactgactcggttgatttcagtatgaacagagcttttgcaggaagttaatttgatatttgcttagaaaatctacgttactgagtttgcaggcactgatgaagaaacgggtaccgtccttgtaacagcctgaattagacctgggtatgcatataccggtgtagtgataaggaagcaaggctcggatgacatcatggcgagggagttaatcccatcataacgccggatatatggtcgcaaaccgtatcagttcagttcttgcacaacccgggggcgtccatata

SEQ ID NO: 3772 - DNA, 1448 bp, unidentified
  source 1..1448: mol_type = unassigned DNA; note = element_5a2de9e
  misc_feature 1..2: note = core
  misc_feature 3..229: note = LE
  misc_feature 230..1423: note = CDS
  misc_feature 1424..1448: note = RE
  misc_feature 9..223: note = bridgeRNA
gtcctacctttttcccgggtcgtgcaggccagtcgtaaggtctgaaggccctggggaaccgggtgtggctttcacgaggtcgccgtttcatggctccggagacttggccgcccggttccccgcgacgacccggccgccaattgggatgtgcgagcgaatcgctgtgtaggacaacgccggcgtggtcgtccgcaggacgaatatgtgtgtcgagcgaccggaggtattcatggcccagatctgggccggcgtcgatgtcggaagaactcaccaccattgcgtggtcatcgactccgaaggcaagcgactgctgtcgcggcggattgcaaacgacgagaccgaactcctgcgtctgatgggtgatgccgccgaccttggagaccaggtcacgtgggcgatggatgtgcccgacggcggtgcggcgttgctgatcggcctgctcgtcacccacgaccagcagttgctctacctgcccggccgcactctcaatcgcgcagccggcggctatcgaggagaaggcaagaccgactcacgggacgccgcgatcatcgccgatcaagcgaggatgcgtcgtgacctgcgcccgctgcgtcccggcgacgaggtcaccgtggaattgaaactgctgaccgcccgacgcagtgacctggttgccgaccgcacccgcgtcatcaaccggatgcgcgctctgctggtcgggatcttccccgcactcgaccgcgccctcgaagacctcacccgcaccgggcagctgatgctgctgaccggctaccaaaccgccgccgcattacgccggatcggcctggtccggctcgaatgctggttacgcacccggaaagcccgccacgccgacaagatcgcggcagcggctgtggccgccgctcaccagcagcacatccgcctgccgggtgaggcactcaccgccaccgtgatagccgaactggccggagaggtcatggcgctcaacgaccagatcaagaagaccgacacactcatcgagacccgattccgccagcacgaactcgccgaggtgatcaccagcctgccagggttcggaagcttgctcggcgcggagtttcttgccgtcaccggcggtgacctggcttccttcgcgaccccggaccgcctggccgcgttcgctggtctcgcgccggcgccctgggattccggccggatccgcggcaatctgcacaggccccgccgctaccaccgcggcctcaaccgtgttttctacatgtcggccatggtcagtatcacctgttgtccggaatcgagacggttctacgaccgaaagcgagccgaaggaaagcgccacaaccaggccgtcctcgcactcgcccgacgacgcgtcaatgtcgtatgggcgctcatccgcgaccaccggctctaccaaccggccccacccggcacagcagcggcctgatccggcttgacaactccattgggaa

SEQ ID NO: 3773 - DNA, 1347 bp, unidentified
  source 1..1347: mol_type = unassigned DNA; note = element_5a35f14
  misc_feature 1: note = core
  misc_feature 2..70: note = LE
  misc_feature 71..1105: note = CDS
  misc_feature 1106..1347: note = RE
  misc_feature 1107..1337: note = bridgeRNA
tatgggatggcccgcccttccgagaacatcgagtatgatgtctcgtcattgaaggaagaggagccagatcatgacgatttcgatacttggcatcgacataggaaagaacagctgcagcgttgtcggagttgatcacaaaggtgcggtgattgtccgccgaacgatgcgacgtcagacactcattgagttagtcggcaagatgccggcgtgcatcattgctatggaagcatgctgcggcgctcaccaccttgggcgacttttcgcagcacgaggacacgaagtgcgactgatgtcgcccgagtatgttcgcccctatattaaagcgcagaagaacgacgacagggatgcggcgggcatcgcggaagccgcgtcgcgtcccacaatgcggttcgtcgaccttaagagtgaggagcagctcgatattcagtcgctgcacagggttcgatcgcgcctcgttgcacaaagaaccacgttgatcaatcagatccgggcgatcctccttgagcgcggtctcatttttgctgccggtcgtcgcaagcttgaggttgccctggatgcccttccggttgatcaggaggccaccttttctccgcgcatccatcgactgattgtcgagttgcgaaacgagtggaacgtgctggatacgaagattgcagcactgaacgctgagttcgtgtcgctcgcgcggcataatcttgcgatgcgtcgtttaacgactatccccggtatcggtgtacttaacgccacggccctagttgccgcgatcggcgacgcaagaagcttcaaacatgcacgagatctcggcgcgtggttagggcttgttccacgacagttcacgaccggtggcaagccacggctactcggaataacgaaacgcggcaacaactaccttcgaactttgcttgtgcacggcgcacgagcggcgatgcccgtactcagtcaaagcgatacgcctgtcggccagtggcttcgagcgctggtttcccgcggtactcaccgtaatgttgcgatcgtagcccttgcaaacaagcttgcgcgtattgcctgggctattttgcgtaaggagcgaccgtatgagaaaactttcggcgtagcgccagaatagcagggttggctgcgcttacacgcagcccatgatgtttgcgagaaggaatatagatggcctgacagtcaatcggcgtttagaaagcccaggcgtggaaatggttcattgaaaccgtgttggttatcgtggctctggacgtgcggatatccatcttggctacggcgtgaccgtaagaccgaatacgttgaagcagactgcacagggaatctaaaaaactacttgcgaacagggcgggccatacg

SEQ ID NO: 3774 - DNA, 1178 bp, unidentified
  source 1..1178: mol_type = unassigned DNA; note = element_5a3d13d
  misc_feature 1..2: note = core
  misc_feature 3..206: note = LE
  misc_feature 207..1154: note = CDS
  misc_feature 1155..1178: note = RE
  misc_feature 3..182: note = bridgeRNA
cttgtatggtaggacttgaagggaggaggagggacaaggctcgattctgactgttagccgcagtacagaccgtgggagatatcacccctcctcctttcacccaagcgccgataaagaatgcatctggcctagaccgacgataggaacaagcctgcgcctctgggtgaccccttcaagtgttcaaaccttagcccggaggactttcaatggcaatgcccgtcgccatcacccagtcgatcgtaggtgtcgatgtcgccaaggacgaattggtgatttatcacgccgaatctgatcgactcgaaacgatccccaacactaaagctgcgatcaagaagtggctcaaggcattgcccgcgccagtggatgttgccatcgaagccaccaatatctatcaccaggaattcgtcaatctggcttatgcgcaaggctgtgtgatctatgtgatcgacggttacgagctcagtcattaccgcaaaggtgtgaagattcgcgctaaaactgacgcgctggatgctcgattgctggctcgctacttgagcaacgaaggccaccttctgcacccatggactccaccatcgccgctgtattgccggcttataagccttttccgacgccgggcagctttggttcaagcacgtgtcagcctcaagcaaagctgggcgaacgaaccgttgctcaaaacggcgttcgagaaccagatagctgcaatgcagagactggaaaccttgatcgacaaaacaatccagacgcagttggaacaagccggtttggctcatcagctcaagcgctgcatgaaagtcgaaggcatcggcttgttgagtggtgcccgtttaatcacgtcgtttcagcgtggggacttcagaaatgccgatgctttcatcgcttttctgggcttggacttgcgaatagcggactcggggaaaaagaaggggcgccgttgcttgtctaaacgaggtgatccagaggcgcgtcgtttgatgcacaacgccgcaatgtcggcgagccgcaccgcggcgtggaggggattttatgaggccctaagggctcgaggacttagcacaacccaagcactggtggcactggcccgcaaactggcgcgagtggtattcgctctgttgaagaaccagagcgaatacctaccaaaatgcatctagggggctagtcctacaccatagaat

SEQ ID NO: 3775 - DNA, 1187 bp, unidentified
  source 1..1187: mol_type = unassigned DNA; note = element_5a4625f
  misc_feature 1..2: note = core
  misc_feature 3..218: note = LE
  misc_feature 219..1184: note = CDS
  misc_feature 1185..1187: note = RE
  misc_feature 3..196: note = bridgeRNA
cttgtatggttgaggcgctggggtggagggactcgcttcgcactcggccgcggcagcggaccgacagttttgagatttctcccgccccaccttccaacgtcgattaggaactgagcggagttccgtttgggacggaacgaccgccgatctggacgcaagcgaacgtggtcggtgggctgcaccccagcttggcaaattgtccaactggaggtgctgccatgcaagaacctaccctgttcatcggcgtggatgtttccaaggtcgaactggtcgtttcgctggggcctgaacaccgacctcgcagcgttggcaacgatgcagtcagcatcgccaactggctgcgggaggtgccgcccggcgccctcatcgcgatggaatcgacggggcggtatcacgggctgctggctcatttggcgagtcaggccggtctgacggtgtacgtgctcaatgcgcgcgacgtgtacttctacgcccgggccctgggcaccagggccaagactgacggtgtagatgccggagtcattgcccgctatctggccgagcatcatgaacatctgcatcgctggcagccggccagctcggtgcagcagcggctgcaggacctgctcacgcgtggggcacaactggcgacgcaacgctcggccttgaagcagatcgtgagcggcgtggacgttcgagacatcgatgccagcggcgtgcacgacgccctggatgccttgctgggcgcgatggacgagaaggtgcaagagctgatcgccagtgatgcacaactgcgtagcggatgccagagattgcgcacgatcacgggcatcggtgcgcagacgtcggcgctgctggcgacgttgttcagtcgcttcgagttcgccaatgcggatgcgctggtggcgtactgcgggctggaccctcggcccaatgactcgggcaccaagcgtggcagacgtcgcctgagcaagaaggggccgtcgctgttgcgccggcagatctacctggtgggcttctcggcgagtcatagcaaggcgctcaagccgttgtacgagtcgatcagggccaaaggcttcgcgagcacggaggctttcgtcatcctgggacgcaagctgctgcgcgtggcgtttgcgctctggaaaggtgatggcgcgttcgatccggctcgtctgatgcctacaaacgacttgcaaaaaacatagaac

SEQ ID NO: 3776 - DNA, 1663 bp, unidentified
  source 1..1663: mol_type = unassigned DNA; note = element_5a4b032
  misc_feature 1: note = core
  misc_feature 2..480: note = LE
  misc_feature 481..1344: note = CDS
  misc_feature 1345..1663: note = RE
ttttaccattcctttcgcttcgctcaaggcacaaacaagttatgaaaaatgttgtgcctctcctcgctttgtcttataatatctatataggatagcaatatactacagagcacgggaggaggagtggcgaatttattttcgaccccgtatatttatatgtgccgtcatccttacaagcacaaacaagtgggacattgagcccggactcttatcattggtaataaaaccatgtttattcagtcgcaggatgacagtcaatgttgctatcctttttttataaaggtggtgatacttatgatgaagttaaaatactccatctgctgtgggcttgatgtccacaaaaatgttatcgttgcaaccatcgtaatcacaaatgctgatggaatctctgagtacaagcaaaaaaatcatttttctactttcaactcagatattagaaaaatttcacagctggctaatcgagaataattgttatcatgtatgtatggaatccactgggaaatattggattcctattttaattatctcgagaatgacatagaagtctgccttacccatcctaaatatgtcaaagccatcaagggaaagaaaactgataaaaaagactccaaatggattgctgacctctacaaattcgaccttgtcagatgctcgttcattccccctaaagacttcagacagctgcgtgaaatcgcaagataccgtttcaaactggtatgtatgaaatcttctgagaaaaaccgcatacaaaactgcatgactgtttccaatgtcggcattgccagtgtactgtctgatccttttggcaaaacagccacagaaatcatgtcgtatcttcttacacatacttctgattccattgatgaaaaagctgtccgcagactcattaaaaaaggggcaaaagctaaatccgatgaaatcattgaggcaatcagggggtataacatagaatctgatcaggctaaaaagcttgaacttgcccgcagccatctggagtatcttgatggcatgattactcaatctgaagttgagctttatgtaaggatgaagccttactacaagttcgttgaacttgtttctacaatgcctgggatgaccgaactaagttcaacaatcgttcttgccgaaacaggcgtagatatgagcatctttgatgacgcaaagcatctgtgctcatggtgtgggctttcacctactaacaatgagtcagccggtaaaaagaagtctgtgcggatttctaaagcaggagattacttaaaagcctatgatggtacaatgtgcgcttgcagcaatcaagagcaaaaaaagcagacctatttttgcaatcaaatatggtcgagttaaaaaaacgccgtggtcataagaaagcaatcattgccatagcacgaatgatgatagtatgcatttatcaagatggtttcagaagaaaaaaaccgtttaatcctattgattatgaagaacttatgtctccgaaaaaaatcaaatagagcgtgtgattctaaatgaaaacaatgtctttgcttatcttgaaagccttggttatgatagctcaaagttagtaaaacgcaacgataactaacatttatttatatagttaccaattttagggatcttgcgaccccttatataagtgcgcccaataatataagttatttttcactct

SEQ ID NO: 3777 - DNA, 1627 bp, unidentified
  source 1..1627: mol_type = unassigned DNA; note = element_5a4de49
  misc_feature 1..2: note = core
  misc_feature 3..231: note = LE
  misc_feature 232..1296: note = CDS
  misc_feature 1297..1627: note = RE
  misc_feature 16..240: note = bridgeRNA
tctgattgagacttgagccaggcgctgcgtttcgcgcgtagcgtttaggggtccggtgggatggctcgagatggatctgccgacgcggttggtctggcttgttaacgacctgctgcctgccggatctcgtcgcggtgtggctcgtaagaggcgcgagcgctgaggttctgtaatcagatttgcccgccgcgatcgtcccctttttgactctcgcgagaggactggtgggtgatggctgcggtggtgatcgggattgatccgcataaggcgtcgcatactgcggtggccgttgacgagcgggaggtcgcgctcggcgatgttcgggtgcgagcgaccgccgcccaaagcgagcgactgctggcgtgggcaggtcgatggccgcagcgcatctgggcggtagagaacgcggagggtctggggtatctgctggcgcagcagcttgccggcgccggcgagcacgtggttgatgtgcagcccaaacttgccgctcgagtgcggttgcttgccgccgatgcgagtagcaagaccgatccgcatgatgcccggtcggtggccatcgtcgggttgcgttcggctggccttccgcgggtcgtagtggaggatcacgccgcggtgatgagggtgtggatccgccggcgccggcatctgtcccggttgcgcaccaaggtggtcaaccagcttcatgcattgttgtgcgaggttgttcccggcgggtttgcgcgtgagatcagcgcccggcaagcgacggtgctgctccagaccgtgcatccgagctcggccgccgaccaggcgcgtgtggagttagccgccgagatcctcgacgatctgcgccgggtggatgcgcagctgcgggagctgcacaagcggctgaccgccgtggtgctggcgtccaagacatcggtgaccagcatcgtcggtgtcggcagcatcgtcgctgccatggtcgtcggtattaccggtgatgtgagcagattccgcaccagcgaccacttcgccgcttacgccggcaccgcaccaatcgaagtatcctccggcccgcacaagatcttccggctctcacggcgcggaaaccggcagctcaaccatgcgatccacatggccgccgttacccagatccgcaatcgcaacagcgatggatacgcctactaccagcgcaaaatcgctgaaggcaagagcccgaagatggcgctgcgagcactcaaacgccgcatcaccaccacactgtttgacaccatgatccgcgacgctcgccaccaacccccgcggcacggaccggtcggtcccaccggcacctaactccgggttgttcccgtcgctgcttaacagcgccacccgcagccggggtcaagactggccgaaggccacccgaagggcttggccttgaccccggtgaggacggcgccacactctcgctgcaggaacaaccccggatacccgctcgcggcaggagtccgggagggcaaacggggaacgactctgactccagcgcgaccagctcacaccccgacaccggctcttcggaacagccactcccggacccgtcacaagcctagaacggctcgccaacgcagaagcaggccgaggcaacggaaacgatcaccgcgaaaccattgacaacaaagaggcg

SEQ ID NO: 3778 - DNA, 1413 bp, unidentified
  source 1..1413: mol_type = unassigned DNA; note = element_5a4e2ec
  misc_feature 1: note = core
  misc_feature 2..224: note = LE
  misc_feature 225..1400: note = CDS
  misc_feature 1401..1413: note = RE
  misc_feature 14..238: note = bridgeRNA
ctacttgttccattgaccccaggaccggtgcctggcgaggctcggttcaggcgtccggggttgtcgctctcatttcggctgctcacgttggtgtggctctcatttggcctgcgcatccccggacgtcgccagggcgggagaggctcaagaggggtttgccctagctctaagtagcgttgccctcccagctcgacagctccatttggttcgagttcggaggacacatgaacgagacgccgcgggtggtcatcggaatggacccccacaaacgctcggtgacgatcgaggtcatgacgagcgacgagtccatcgtcagcaagggccggttcggcaccgaccgcgcaggacacgacgcgatgctgcgtcaggtgaaggcatggcccgaccgggtctgggcgatagagggatgccagggcatcggccgccacgtcgccaaccggctgctcgccgacggcgagaaggtcgtcgacgttccgcccaagctgtctgctcgggcacgtgtgttcgcgaccggtcagggccgtaagaccgacgcgaccgatgcccactcggtcgccctggtcgggacgcggatgagcgggttgcgtccggtcgtcaacgacgagcaactcgccgtgctgcggatcctggtcgatcgccgacgatcactgggtgatgagcacacgcgcaagatgtcccaggtccaccatctgctgctggaactgatccctggcggggcgaagaaggacctcagcgcggcccaggccaaggcgctgctggccaccgtccggccgcgcgacatcgccggcaagacaaggcggcgcgtggcggccgaactcatcgccgacctcgagcggatctacctgcgcaagaaggccgcgaacaaggagctcaccgagctggtcgccacgaccggcaccagcctgctcgggctcgaaggcatcggcccgtcgggggccgcgcggttgctcgtcgaggtcggcgatatcacccggttcccggacagcaaccacttcggttcctggaccggcaccgccccgatcgacgcgtcctcgggcgagaacgtccggcaccgtctctcccgtggcggcaaccgccagatcaaccgcgtgctgcacatcatggccgtggtccagctgcgtcacgccaccgaaggccgcgcgtattacgaccgcaccaaagcgcgcggcaagacctccaacgagtccatgcgactgctcaaacgacggctctccgacatcgtctatcgcacgatggtcaacgatgccgcgaggcacatggcgacgggcccgggagggcaacggggcaacgtctctgactccagcgcggccggctcacaaccccaacaccagctcttcggacaagccactccggggcccgcctctcagcactctaagcccgcactcccgaaggtgtcttgacacagaggggagc

SEQ ID NO: 3779 - DNA, 1579 bp, unidentified
  source 1..1579: mol_type = unassigned DNA; note = element_5a584e0
  misc_feature 1..2: note = core
  misc_feature 3..281: note = LE
  misc_feature 282..1451: note = CDS
  misc_feature 1452..1579: note = RE
  misc_feature 36..258: note = bridgeRNA
cacgtataatccaattatcctctttttgaggagaatggattattctcctttctcccaacctggttgggtaattttgaatactccattataataattaagcactgtggatttgtttctattcacttacagcattgactgttcggaggtgactcagaccacagtctttcgtctttactggtaatcagctagttaacgctttgacgtttatatttacgtgataacacagtcgagattcttgtggaaaacaacagtgcaaatattatttttaggaggtatctatcatgtactttgtcggaatcgacatttccaagtacaaacatgactgtttcattatgtctgaaacaggcgatgttatttctaattcatttaccatcacaaataatcaagatggttttcatatgttacttacggttcttaattctcttgatattcaagaagaaataagaatagggtttgaagctactggtcattacgccttaaacctgaaattattccttgaaaaagcccactacagcttcatggaatttaaccctgtacttcttgcgaagtttaacaaatctcaaactttaagacgaaccaaaacagatgccatagattgcgcttctattgctcgttggttaatgactgtagactacaaaccctacccagtaggattttatcatacatactctctaaagtcactaacccgtcttagagacactttggtaaaacagagaagtttttatattgtcaagataacaaatgttctcgatcatacatttcctgaattcaaaccattcttcggaaatcgttttaccaaaactgctttatatctgcttgaaaactatggttctgcagaaaaaatggctcgaatgaattctgcctcttacgacaacctcagaaaaatttccagaggtaagttttcaatacaaaaatttctaaaactaaaagaattagcagcaaatacagttggtgaagataatgaaatcttttctttgcagcttcaaagccttttaaatctatacaaccaaagcgctattgaagttggcaagctagaagaacaaatcatcactttaataaatgatattcagccaaaatctatgaccatacctggtatcggaccattatcagcagctgtcatttatgccgaatatggtgatatcaataaattcaactcgccatctgcaatgctgtcattcgcaggtttagaacccggatactatcaatctggaacttcagaacacagagggcacatggtgaaacatggatcggcccatcttcgttttacacttatgaatctctgtatacctttaattcaatacaacatggtattcgctgagtattatagcaaaaagcgcaatgaaggaaaaactcacagagttgcttgttcacatgtgataaaaaaacttattcgaatcatttatcatcttgaaaaagaaaatcttgatttcgatgcttcacaactccgctgattgagtagtggcaaccagtaataaaatctatcagcttttcaaaaaaactatctttgaaaggtttattaaagttacccttttttatttcaaaaatagttcagaaaaactattgacatctaatagctagt

SEQ ID NO: 3780 - DNA, 1493 bp, unidentified
  source 1..1493: mol_type = unassigned DNA; note = element_5a5e403
  misc_feature 1..5: note = core
  misc_feature 6..214: note = LE
  misc_feature 215..1483: note = CDS
  misc_feature 1484..1493: note = RE
ctcactggtgcacccttgtggtgtcagcggttgggagactgctggcccacccgatctggtgcccaccggaccaccgccacgggcgcttgctgtgtgacggccagcgtgagttctgcggggtccggtggcccaggacgtgccaagcggcgacagggctgcgcgccagcgagcgccgatcagtgagcgaccggcgagcacgtcccggcaccaccgggtgcactccgactgcgccaccagccaggaggcacgcatccagcatgccagccagagccccaccccgacgaggacggccgggatcgactgggcgaccgacaccaacgcgctgtgcgtcgtcggcggcgacggccaggtcgtgggtgagctggtgaccacggccgacgcggccgggatccgccggctgctgagggaactggaccgctccggcgtcacccaggtcgcgatcgagcggcccgacgggccggtggtcgaggcgctgctggggaccggccggaccgtcgtcgtggtcccgccacggcaggtccgccacctgcgcacccgctacggccaggccggcaacaagcacgaccgcttcgacgccttcgtgctcgccgacgtcctgcggaccgacggccggcgcctgccccccttgcaccccgacaccctccagaccgtggcgctgcgctcgctcgtccgcgcccgcgccgacctggtccaggcccgggtggcgttgtgcaaccagctccgcgcccacctgcgcgtggtgttccccggcgcggtcgggctgttcgccgacctggacgcaccgatcagcctggccttcctggcccgcttcccctcggccgaggcggccgcctggctgtcccaccagcggctgggcgcctggctggccgccaaccgctactgcggccgcacccccacccaggtcctgctggagcgcctgaccagcgccccggccggcctgaccggcgaacccggccaggccgcctcccacaccaccggcgcccatgtgcgcgccctggccgccatcggcgaccagatcgccgcgctccaggcccaggtcaccgagcagctcgccctgcaccccgaccgggtggtcttccagtccctgccccgcgctggcgtggtccgcgccgccaaactgctggtcgagttcggtgacgcccgcggtcgcttccccaccgacgccagccctgccgcgctcgccggcgcggcgccctcgacccgccagtccggccgccgccaggtcgtcagcttccgctgggcctgcgacaagaaactccgcgccgccgtgaccgacttcaccgccgacagccgccgcgccagcccctgggccgaggcgatctaccagcgccaccgcgccgccggcaagacccaccagcacgcggtccggaccctggcccgtgcctggccgcgggtcatctggcgctgctggcaagaccaggccccctacaaccccgccctgcacggcatcgccaagcaccggcgcctgccactcacggcttgacacagggcta

SEQ ID NO: 3781 - DNA, 1384 bp, unidentified
  source 1..1384: mol_type = unassigned DNA; note = element_5a62041
  misc_feature 1..2: note = core
  misc_feature 3..84: note = LE
  misc_feature 85..1116: note = CDS
  misc_feature 1117..1384: note = RE
  misc_feature 1150..1370: note = bridgeRNA
gatggggtggatggctcccgctcccggccccgaaatgccaagctggaccgctgtcggagcgaaacgagcaaggagccatccgtcatggagatcacaacgattggcctggatctagccaagcacgtctttcaggttcatggcatcgacgcctcgggcaaggtcactgtgcgcaaggccctacggcgggcgcaggtgctcgccttcttcgggaaacttccgccatgcctggtcggcatggaagcctgtggcacctcgcaccactgggcccgtgagttgacccgcctgggtcacgaagtgcggctgatgccgcctgcctacgtgaagccctatgtcaagcgcggcaagacggatgctgccgatgcggaagcgatctgcgaggcggtgacgaggccgacgatgcgattcgtgccagtgaagtcgcgtgaacagcaggctgcgctgtcgatgcatcgcactcgcaatctcctggtcaagcagcgcactcagttggttaacatgatgcgtggacttctggcggagttcggcgtcgatatcgcgcaaggtctcgagcgcgcgttgctgctggcgcgacggattgtcgatggccaggtgcctgatgtaccgctcgaagcgggcaaggtcgccgttatgctgtcacagcaggcgctcagcctgcatgctcaactgcaggagatcgaccgcgctcttgtcgccttgcagcgcgccgatgatgtcgcaaggcgtttggcgacgatcccgggcatcggtcccgtgggatcgacggcgctggccgcggctgtcaccgaccctggccagttcagatccggccggcagttcgcggcttggctcgggctgaccccgcttcagaactcgagtggcggcaaggagcggctcggccgtatcaccaagatgggcgacaagtatctgcgcaagctcctcgtcatcggcgcgacctctctggtccgccgtgccaagtctaaacccgagagcgtagaccctcgcctcgttgaacttctggcgcggaagccagcgcgcgtagcagcggtcgccatggccaacaaaatggcgcggatcgtctgggccgtcatggcacgaggtgaagtctacaaggctgcccatagccctaccgtggcgtaggaaccctgaagtttagctgaggagatcagcttcacggagttgtgagagcgacgcgatgtgatggcgacaccggtcaggccgggaacagggacaacccgccgaatgtcgaaggcgtgacagcctgagaagcagaatgggacccggttcgcggactccatcagggccagcagtcccttgccgactgcatcaacaggccggacagaagactgcacccgaccaagccgccagaccatcgaatccacttgcaatgcgggagccatccacagaa

SEQ ID NO: 3782 - DNA, 1361 bp, unidentified
  source 1..1361: mol_type = unassigned DNA; note = element_5a651cf
  misc_feature 1..2: note = core
  misc_feature 3..83: note = LE
  misc_feature 84..1097: note = CDS
  misc_feature 1098..1361: note = RE
  misc_feature 1125..1348: note = bridgeRNA
tgatggagtggatggctcccgctcccggcatcgcaatgtgccacattgggtgctgtcaaaaccaaccctgaagggagccatccatgacggagatcaccacggtcggcgtcgatctcgccaagtccgttttccaggtccacggcgtcgatgccgaaggtgcggtcgtgctgcggcgacagttgcggcggaaccagatgctcgagttcttccagcggcttgcgccctgcctggtcggtattgaagcctgtgccggagcgcaccattgggcgcgcgagctgggcaagctcggccatgacgtccggctgatgccgccgtcttacgtcaagccgtatgtccggcgcggaaagaccgaccaggccgatgccgaagcgatctgcgaagccgtcacccggccgtcgatgcgcttcgttccggtgaagagcgaagagacgcaggcactgctgatgacccacaaggcgcgcgagtttctcgtccgccagctaacccaggtcaccaacgcgatccgcgcccacctgggcgagttcggcatcgtggcgccgaagggcgttcacaatgtcggccgcctgctcgaggccggggagcgggccgatctgccgcccgctgcccgggtgccactgcgcctgctggcggatcagttctccgagacccgtgccaagatcgacgcgctcaccaaagacattcgtcgcgaagcggaagccggcgaggccgcgaggaggttgcagacgatccctggcatcggtcccatcaccgccacggcgctggcagcgacgctgccagatgtgaccggcttccggacgtcgcgcgacctgtcggcctggctggggctgacgccgaagccgcattcaagcggcggcaaggagaagctcgggcgcatctcgaaaatgggaaaccgctacctgcggaggctgctctatctcggcgccatgggcgtgatctcggctcgacggcgcgggcagcccggaggcgactggctgtggcgccttctgcagcgcaagaccgtgaagcaggccgcgatcgccttggcgaaccgcatggcgagaaccgtctgggccctgctgagaaacaggaccagctacgacgcggcgcgcgccgcctgagagaaccacggggctcacggccccggacgagatggtgaggtgcaaggtgggatgatggccatctgacggacatgctgccgggataccctgttcggaccggagcgcttagagcgcgtgccattgatcgggacctacggcagccacgcggactttcatcagggcgcgcagccgccgtgctgcagacagacgccgaatacatggccgcacccgaccagacgcttgaagcccacgaaacgcccttgccacgcgggagccatccataca

SEQ ID NO: 3783 - DNA, 1427 bp, unidentified
  source 1..1427: mol_type = unassigned DNA; note = element_5a6f86b
  misc_feature 1..4: note = core
  misc_feature 5..201: note = LE
  misc_feature 202..1413: note = CDS
  misc_feature 1414..1427: note = RE
  misc_feature 1..191: note = bridgeRNA
ctccgtaagttgataggtggccctgtggtgccgggtgtggctgatcagttcttgcgctcgttcgttcccgaggagtggccgcccggctccgcggggcaccctgactgctgattgagacgtgcgggtaggtcgctggttacggagatgtcggcggggtgttccacgggccgtgtcaccaccaggaccgatcagtaggagcacatgttggaagcaagaagacttcgagtgtgggtcggcgtcgacgtgggcaaggctcaccactgggccgctgctgtggatgagagcggcacgcaggtgtggtcggccaagatcgtcaacgacgagacagcgattcttgatgcgatcgcgacagcgctggagctggctgagcgggtgtcgtgggccgtcgacatcagcggcacctcttcgacgctgctgctggcgctgttggcggctcatggccaagagacggtctacgtgcccggccgcacggtcaacgcgatgacagccggctaccgcggtgaagccaagaccgacgcccgcgacgcgttcgtgatcgctgagacctcccggctgcggcacgacttcgccccagtccaggtcaacgcgcaactggtcgccgagctccgcttgctgaccgcccatcgcaacgacctggtcgctgaccgtgtccgtttggtcaaccggctgcgcgatgtgttgaccggcgtcttccccgcactggaacgggccttcgactattcctcgcaccaaggtgctgtggtcttgctgaccggttaccaaatccccgacgcactgcggcgccgtggacaaaacaggctggaatcctggctcagcaagcgcggtgtccgcaatgccgcccaagtcgcccagactgcactggcggcggccgcagcccaacacaccaccctgcccggacaagacatcgccgcccagatcatcgccgacctcgccacccaactgctgaacctcgatgaccgactgggtcgactcgagggacagatcaagaccacgatggctgcccatccccaaaccgcgatcatcacctcgatgcccggcatcggaccgatgctggccgctgagttcgtcgttgccgctggagacctcaacgcctaccccgacgccggccacctcgcatccgctgccggactggtacccgttccacgtgactccgggcgccgcaccaacaacctgcaccgacccaaccgatacagccgccgactgcgccgggtcttctacctctcggctcaatccagcatcatccgcgacggccccaatcgggacttctacctcaagaaacgagccgaaggcctcagacacatccaagccctcatcgccctggccagacgccgcgtcaacgtactgtgggcactgctccgcgacaaccgcacctggactcccaccagcccaacaaaagccatcaacgcagcttgacttcgtcattgaga

SEQ ID NO: 3784 - DNA, 1439 bp, unidentified
  source 1..1439: mol_type = unassigned DNA; note = element_5a75301
  misc_feature 1..2: note = core
  misc_feature 3..83: note = LE
  misc_feature 84..1187: note = CDS
  misc_feature 1188..1439: note = RE
  misc_feature 1256..1377: note = bridgeRNA
taattggatggactcacccgcgccgaggcgtcaatgcgccacggtggcagtctaagaaagccaacgacagcgagggtgagtccatgaaaaaggatacgacgatcaatcagtccctgtcttctgccgatttgtcgtcgtgtacgacattggcagtcgaccttgccaagcgggttttccagcttgctggcgagaatgtcctgggtgaagtgatttacgaaaagcgcatcaagtcgcgtgaggcgttttacacgttcctgcgtgccctttcgcccagcatggtggtgctgatggaaaccgggccgggggctcaggcatgggcccggcagcttcagtcccagggcaatctggccagaatcctgcccgcccagcatgttgcagatcatcgcagtggcgccaaaaacgatcgcaacgatgcactggccatactgagggccggtcgcgatagcagcatcgcatccgtgcccatcaaaagcgcgacagccttggccatgcaggctttgcatcgagcgcggcagagctatgtgcgccgccgcacggcgatgagcaatcagatgcgcggcttgttgctggagcatggcgtggccctggcacaaggcgaggttgcaatcagccaaggcatcccgcggattctggaagatgccacgcagccggtgcccgatctgttgcgtgagctgatcgacgaaatgctgggcgaatggcgccagttgggcgagcgcatcaaggtgctgacagggcggttggaaatggcggccaacgatgacgcaacggccaagcgcctgatgaccgtgcgaggtatcggcccgatcatcgccacggctctaattgccaaggagtgcgaccccaaaagcttcgccaacgcgcggcagtttgctgcttactttggcatggtccccgagcagcacagcagtggggaacgcgtacggctgggcaagatgagcaagcgcggagatcggtaccttcgcagtttggcgattcagggcgcgcacgcggtgctaagacagatcaagcctgattcagagcaggcagatgaccagcgattacagcgctggatgaaccgccttgggcgtaaggaggccgcagtgcggctggccaaccgcaacctgcggatcgtctgggtgcttttacagaatgaccaaacttatcgccgtcagccggtcaatgaccagaggatggcgatgagttcctgatccaccgagttctgccaccgaggcttaacgcgcctcaacccttgctgacgaacattgaccccaggtcagaccgtcgcggattgatgcctacactcctaccggcccttgaggcctgattgtaattggcatgccgcgagctcacccaatgttggccagaagccgaaggcggcttcctcgaacaggcctgatacatagatgcaaccgggtagcagtgttcaaaaagcgggtagacagtggaggtgagtccataca

SEQ ID NO: 3785 - DNA, 1534 bp, unidentified
  source 1..1534: mol_type = unassigned DNA; note = element_5a7c4a9
  misc_feature 1..4: note = core
  misc_feature 5..259: note = LE
  misc_feature 260..1399: note = CDS
  misc_feature 1400..1534: note = RE
ctcactggtgcaccatgcctgtgtcggtgatcgtggatggattgccgatgcacccgaggcgccgcgaggttatcgccctgctcgcttgacagctgtgatgtctatcatgagttctgcggaatccggcggttgccccggacgcgccgaccgtcgatcgggctgagcgccgatgagcgccgaacagtgagcgatgcggcagccgcgtctgggcctcgcacgagggtgcctccccactgagtacagcagcgaggaggctgtcatgaagtgtactgccgaaaccaccctgcccgacgagccgccgaacgctgtcacgtgtggaattgattgggcacgagacgatcacgcggtatcgatcgtcgacgcgcgtgggcgcgaggttcgccgcgtcaccatcgagcacaacgccgccggactgcgcgagctgcgcgagctgttcgagctgctgagccgggccggtgcctgcgaggtcgccatcgaactcccgagcggcccggtcgtggacaccctgctgcaggccgggatcacgatagtcgtgatcagcccgaaccagctgaagaatcttcgcggccgttacggctcgcccggcaacaaggacgaccgcttcgatgcgttcgtgctcgccgacacgctgcgcaccgaccggtcccggctgcgcccactgctgcccgacaccgcggccacggccaccctgcgccgcacctgtcgcgcccgcaaagaccgcgtcggacaccgggtggcgttggccaatcaactgcgcgcgcacctgcgcgtcgtctttccgggcgtggtcgggccgttcgccgacatcgactcgccgatcagcctggcgtttttgacccgcctcgactgccagaaccgcgcgaactggctgtcggtcacgcggctggccgcctggctggccggcgccggttactgcggccgcgtcgacccggccgtgctttacggtcggctcaccggcgccccgcacggcgccaccggtgacaacggcgccgccaacgcacacctcacccgcgccctggtcgccgcgctcaccagcgtcgcggcccagatcaaggcgctcgacgcgcaaatcgcccaacagctcgccctgcacgccgacgcgcacatcttcacctccctgccccgctccggcaccgtccgcgccgcgtggctgctcgccgagatcggggactgccgagcccgtttccccacacccgaatcgttggcctgcttggccggagtcgcaccctgcacccgccaatccggaaaagtcacccacgtcggattccgttgggccgcagacaaacaactccgcgacgccgccaccgacttcgccggcgacagccgccgagccaacccctgggccaccgacctgtacaaccgcgccatcccccgaggacacgaccaccccacgccgtagccatcctggcccgcgcctggctctacatcatctggcactgctggcaagacggcgccgcctacgaccccacccaacaccgagccctccaggccctcctcaaccaagaccaacaaacggcggcttgacacagggcta

SEQ ID NO: 3786 - DNA, 1489 bp, unidentified
  source 1..1489: mol_type = unassigned DNA; note = element_5a7c886
  misc_feature 1..2: note = core
  misc_feature 3..242: note = LE
  misc_feature 243..1469: note = CDS
  misc_feature 1470..1489: note = RE
  misc_feature 10..239: note = bridgeRNA
ctaatgagagttaacgacttgccgttcggcaggctcgggactggtagcccccggcaggtgagcacccccaagatctggaccgcgagtcctgtcgaaagaccgtgcccctcgccggtaaccgggtgagttgatcgctgatgggatgtcgtgccccccgccatgggcgtgagcactgattcattaggtcgctgacggttccccaaggctgccgagaatgatccgcacgcaagacaggagaagcgttgctgttcgtcggagacgactgggccgaagaccatcacgacgtcgaattgatggatacttcgggccgccggctggccaaggcccggctgccggagggcgtggcggggatcacgcgcttgcatgcgatgatcgccgaacatctcgacgaggacctcgatcagggcgctgaccaggtgttgatcgggatcgagaccgatcggggcccctgggtgcaggcgctgatcgccaccggttatcaggtgttcgcgatcaacccgttacaggtctcacgctaccgggagcggcatgcggtgtcgggcgccaagagcgacgccgccgacgcgcacgtgctggccgacatggtgcgcaccgatgcccaccagctgcgcaccgtggccggcgacagcgcccaagcagcggcggtcaaggtggtcacccgcgcgcacaagacgctgatctgggaacgtacccgccatgtccagcggcttcggcatgcgctgcgcgagtacttccccgccgcgctggaggcattcaacgacctgagcgccgccgacgcgttggagctgctggctcaggcgccggatccggcctcggccgcgaggctttcgaccgcgcagatcactgcggcgctgaagcgggcccgccgccggagcctgcctgataaggccgccgcgatacaggcggcgttgcgggccgagcatttgagccagccccaggtcgtgacggctgcgtacgccgccacggtccgcgcgacggtagccgtcctggtcgtcttgaacgagcagatcacctctctcgaaaagcaggtcgaggcgtgtttcagcgagcacccggccgctgagatcatcttgtcgcagccgggcttggggccgatcgtcggtgcccgggtgcttgccgagttcggcgacgatcccacccggtatgccagcgcgaaggcccgcaagaactacgcaggcaccagcccgatcacccgggcctcaggcaagaagaaggtcgtcttggcgcgctacgtgcacaacgaccgactcgtggacgcgctcggaactcaagcgttctccgccctgcgctcctcacccggcgcccgcgcttactacgaccggttgcgcgcccgcggggtcggccaccacaccgcgctgcgccagcttgccaaccgactcgtcggcatcctgcacggctgcctgaagaccggcacgctctacgacgagtcgactgcctggggacaccacgccgacactcgtgcggcttgacttccaacttcctgggatgt

SEQ ID NO: 3787 - DNA, 1385 bp, unidentified
  source 1..1385: mol_type = unassigned DNA; note = element_5a9d652
  misc_feature 1..2: note = core
  misc_feature 3..87: note = LE
  misc_feature 88..1116: note = CDS
  misc_feature 1117..1385: note = RE
  misc_feature 1087..1372: note = bridgeRNA
agatggggtggttgccgccctcccgatacggcatcgcgatgtgccaaggtcgtggtgttaagagccacgaagcggagaggacggcagatgaaggatacgatgatcggcgtggatctggcaaagaatgcgttccagctccacggcgcctcgatgacggggcaagtgaagttccgaaagaagctgacgcggctgcagttcctgaagttcatggcggaacagctaccaactgtggtggtgatggaggcttgcggcagcgccagctattgggcgcgcgagatggtcaagttcggccatgaggtgaaactgatcgccccacagtacgtccggcccttcgtaaaacgccagaagaacgacatggcagatgccgaggcaatcgtcattgccgcgcaacgccccgagatgcgtttcgtcgaaccgaagtcagagaaacagcaggcgcgtgctgtgatgttccgcagccgagagcgccttgtccaccagcgtacagaactggtgaacgcattgcgcgcagtcctttacgaatacggccataccattccgctgggaatcagacagctcaagcgaattgaggcgctgcttgatgagccaaacagcgatctgcccgcgctggtccgtgaggaatgtcgggacatgatggcgcagatcgcggagaaaaccacccggatcgaagcccgaacgaagcgcgccgcggaattggccgcctcggacgacatggcaaagcgtttgcagacgatgccgggggtcggaacgctgaccgcgttggcggtcgaagcctttgctccggacatgacaagcttccggcgcggccgcgactttgcggcatggctcgggcttgtcccgcgtcagcattccacgggcggcaaacaacggctggggcgtgtgtcgaaggccggccaagccgacatccgacgactcctgattatcgggtcgatgtcgcgactgaactggctaggccgccggactattcccgaggggtcctggctcgcgcgcatggcagagagaaagccgcggatgctcgtcgccatcgctctggcgaacaagatggcgcgggcaatctgggccatgctgacaaagaacgaggactatcgtgatccggcatgggctgccgctgcatgagcttcatggcgcggacgacagcccgccgccggtgacggaggtgtgagaagccgaagaccagaatgggcaaaagatcgaacagatccggacggtaaaaccaggcgatacgccagagccccgagctcgtttcatagatttggacccgtttcgcggatcaccataccggccagcggcacgtgaacgccgcagaaacaggcctcacacaagaccgcgctcgatcacatgctcataggtagaaaacttcttgcatcacgggcggcaaccacaca

SEQ ID NO: 3788 - DNA, 1232 bp, unidentified
  source 1..1232: mol_type = unassigned DNA; note = element_5aa5eb3
  misc_feature 1..2: note = core
  misc_feature 3..242: note = LE
  misc_feature 243..1217: note = CDS
  misc_feature 1218..1232: note = RE
  misc_feature 6..211: note = bridgeRNA
cttgtatctctactaacgcctccgcagagtcgatagttctcgactgatcatcgaggaaaaggagtgaagccgggcagcggctaaggctttaagcctgacctgtagattgtgctcctccttttcgccctaactcgctaagtccgaacggtatcaagagcccgccaacggcggtagctcgtattgacaaggcagagactgagtgagggatgatcatagagtaaacaaaatcaggaggaatcatcatgtccagcgtcgtcggaatcgatatcgccaaaagcacatttgatgtggcaacccccttaccaaatggcaagtacagaacccggggcaagattcccaacacccgcaaaggttttgagcaacttgatagttggctcaaagaacacgccagccttggggcgcgagtggtgatggaggccaccggtgtttatcacgaagcgttggctgaacacctctatcaccaaggctatgaagttatcgtggttaacccagcgcgggtttatcacttcaaaaagagcgaaggtgttcactataaaacggacaaagtggatgccaagttgctggctgactttgcacaagccaaacacaaaaaaagcttgttcccctggaagccggagcccacgtctttacgtcatctgcgcgtattgctaaagcgtttggatgacttgcaggaaatgctgcaaatggagcgtaatcgtctggacactgcccacagggctgtccgcgaatcgattgagtcgcatatcaagcacattgagaaggatattgcgcagacgcggcgcttgatcgaccagcacatcgacgatgaccctgatctgggtagtaaacgagatttgttgctgagtattgacggcataggtgaaaagacggctgccgtcattctcgccgagttgggtgatgtgtctgaatttcgaagtgctagagccattgtctcttttgccggactcaacccaaaactcaacgaatctggaacgctgaaaggccgaactccgataaccaaagcaggatctggacgtttacgtagggcgctgtacttgccttgtgtcaccgccatgaatatgagcgagccgatgatggcgatgaagagtcggcttaaggcgaatggcaaagctggcaagcaaatcgtctgcgcagggatgcgtaaaatgctgcacatcgttttcggagtgctcaagtcgggccaaatgtatgacccaaaattggctcttgcccggtgacgggcaagacggtat

SEQ ID NO: 3789 - DNA, 1609 bp, unidentified
  source 1..1609: mol_type = unassigned DNA; note = element_5aa690f
  misc_feature 1..2: note = core
  misc_feature 3..275: note = LE
  misc_feature 276..1373: note = CDS
  misc_feature 1374..1609: note = RE
  misc_feature 12..295: note = bridgeRNA
ctattacaataagttcggacaggaacaccggatagccagtccggtgttctttccgtcccgtgccttagctagaataagatgagcaactagctgaccaactgtaccttgggtttacatacccgcagataagactgctagtcatcctcttgttgcaacgttcgatttgagcaggttgagccaccgaataccggagagttcgcgtcacgcaatagattgaatcgtcaacgagaaaagatggattccggttgcaggttctttgtgtcggaggaatgtgaatgaactgcgttggcatcgatgtttcccatggtaagagcataattgtggtcatgcgcccttttggagaggtggttgtctcgccctttgaggtgcttcacaccgacagcgagctaagcaagctggcagggctgctaaaaagtctggacggtgagacccgtgtggtgatggaatccacaggttatcaccacacacctgtggcctggctgctccacgacgcgggcctttatgtctcagtagtcaatgcaatgctggtgcatgactacggaaacaacagtttaaaacgagccaagaccgacaagaaggatgccgtgaagctggccaactgcggccttgatcattggctcacactgccgagatatgtccctgaggaggatacccggctcatgctaaagacctgctaccggaagtaccagcagtattctaaagtacagaccatgctgaagaataacttgatctccctgctggacattgctttcccggacgcaaaccgcctgtttaccagtccgccccgcgccgatggcagcgagaagtgggtggactttgtagccgctttttggcattgcgagtgcgtctgcaacctgtctgagaaggctttcaccgccaagtaccataaatggtgcagaaagcacaggtataaattctgcgaagataagacgctggacatttattcctctgcctgtggacacttcggtgtcattccaaaaacggatacggcaaaacttttggtggaacaggcagttttccaaatccgggcaacttcaaccacattagctgctctcaagcaggagatgcagtctctggcagcttctcttccggagtatcctgtggttatggggatgtttggtattggacctgccctcggccccccactcatggctgaaattggcgatgtacgtcggtttcattccaaaaaagcgttggttgccgttgcgggcatcgatgcccctccttaccaattcggtcaaatggacgtccgtagccacagtatttccaaacggggatctgcctcgctgcgcaggacgcacttcctagtgatgagtgtcatcctgcaacacgctccaatgaatgagccggtctaccagttcatgaacaagtaacgctctgaaggcaagccctaccgtgtctacatgatggcctctgctaacaagtttcttcgcatctattacgcttctgtgaaagcctatctggattctgcagaacacaactgattttcctatgctttgccagctggatagtcgccatttcgattttgagatgctcagcggctcagattagtgcgtcccttttctttgctcgttcccttaaaagttttacttagcttttattagcaggt

SEQ ID NO: 3790 - DNA, 1155 bp, unidentified
  source 1..1155: mol_type = unassigned DNA; note = element_5ab1693
  misc_feature 1: note = core
  misc_feature 2..198: note = LE
  misc_feature 199..1140: note = CDS
  misc_feature 1141..1155: note = RE
  misc_feature 14..208: note = bridgeRNA
ccttgtatctggatagaggcggcgaattgtagtggagaatgtcgctgtgaggggtccgcgatcgcggacccctcacgcggcgggaggcacccgtgatccctcaggctgacagccgtagtggagcgttgggaacctcgccgcagtcacgcacgaccgaacagtcgccagacctcaatcgcacgtacaaggcaggttaccgtggccaagataatttgtggagtagatgtttcctctttttctctggaagcgggtatcggccgcagcgggccgaaccgttcttttgctaacactgccgaaggcgttaccgagttcatcgctttttgtcggcagcaccacgtcgagatgctggccatggaagccagcggcggctacgaaaagcagccgtttgcgctgctgtgggcgcagggctggccggtagctttgctcaacccgcgagcggtgcggcgctttgccgaaggcaggggcctgctggagaagaccgaccgcatcgatgcggggataattgcctggtttgtggcggtcaaaggcagcgtacccagtgttccggccagtgcggaacaggagcggctcaaagcgctggtcacccgactgcgccagctcaccgaactgcaagcggcacaacgaaaccaacggctgctggtcagcgcagccacggtgcagtgctcgttcagcgaagtgctggccgtggtggctgcgcaaatgcggattctgcaagcagcgattgccgcattgatcgctgcagatccgctgtggcaaaaactggatcaggcgtttcgctcgatcaaaggcgtggccgaccgcaccgtggcacgactgatggccgaggtgccggagatcggcatggcatcgaacaaagcggtgtccaagctggtgggcctggccccgttggcacgcgctagcggcaagcatcaaggcaaacgtgtggtgcgtggcggacggcgcaacgtccgcgccatcctgtacgtggtcgccgcagtggtgcggcgtcacgatgccgattttgctgctttccatcaacgcctcaccgcggcaggaaaacctaaaaaagtcattcgcatcgcgttggcacataaacttttggttcgactcaatgccaaagcacgagaagtacgaagcgaattcgccatgcttacctcttgacaaaccagacagtcg

SEQ ID NO: 3791 - DNA, 1436 bp, unidentified
  source 1..1436: mol_type = unassigned DNA; note = element_5ab9fc6
  misc_feature 1..2: note = core
  misc_feature 3..233: note = LE
  misc_feature 234..1421: note = CDS
  misc_feature 1422..1436: note = RE
  misc_feature 11..226: note = bridgeRNA
gtcctacctttcaagcgtgggtctgagctggtccttcgtaagatcagcgggcccgggggttctgggtatggctgtgagcttgtcgccgttcgatggctcaaagaacttggccgcccggagccccgcgacgactcgaccgctaattgggatacgcgacttgatcgctgtgtaggacaacgtcggcgaggtcgtctgcgggtccgtgtgtgacgacgaactggcggaggtgacccgtgccccggatctgggccggagtggacatcggcaaggaacaccaccactgcgtggtggtcgacgagcgaggtgaacgcctcctctcccgccgagtcttcaacgacgaacaggctctgctggagctcatcacagacgtactcacgctgtccgaggacgccctgtgggcggtggacatcaatcatggcggtgccgcgctgctgatcggccttctgctcaaccaccggcagccgatggtctacatcaccggcctcgccgtgcaccaggcgtcgacggcctaccgcggtcagggcaagacggatgagaaggacgcgttcgttatcgctgatcaggcacgcatgcgccaagatctcggtctcctgcggcccggtgacaagatagccgtcgacctgcgcaccctgaccgcccgtcgccttgatctggtcaacgaccgcacccgtcagaccaaccggctgcgggctcagctgctggagttcttccctgctctggagcgggcgttgaacttgagcaagaagggtccggtcgtgctgctgaccggttaccaggcgccggccgcgatccgccgcagcggggccggccggctcggaacctggctgaagaaccgcaaggtgaagaatgcagcggtgcttgccgagacggccgtcgaggcggccaagtcgcagcacaccgcgctgccgggtgagactctcgcgggcgccatggtggcccggatagccaaaggcgtgctggctctcaacgaggagatcgccgaactcgacgcgctcatcgaagcccggttcaacgagcaccgacacgcgacagtgatccggagcctgcctggcatgggctccctcctcggtgccgagttcatcgccgcaaccggcggagacatggaggctttcggcacggccgaccgcctggcgtccttcgccggcctctcacccgtgccgcgggactccggacgcgtcagcggcaacatgcgccgcccacgccgctaccaccgaggcctgctccgagccctctatctctccgcgatggccagcctgagagcctgctccgcctctcaggcctactacggacgaaaacgcaacgaggggaagggccacaagcaggccctgctcgctctggctcgtcgacgagccaatgtcttgtgggccatgctccgcggaacgtgttacgaggtcctaccaaccgtcacagcagcggcttgacatcgtcattgggaa

SEQ ID NO: 3792 - DNA, 1611 bp, unidentified
  source 1..1611: mol_type = unassigned DNA; note = element_5abeb6a
  misc_feature 1..2: note = core
  misc_feature 3..518: note = LE
  misc_feature 519..1490: note = CDS
  misc_feature 1491..1611: note = RE
  misc_feature 14..294: note = bridgeRNA
ctactacaatgtatttatggttaataccccttacagccagtaaggaattatccatcttgttgcttaagctgttagaatgagtgaggcaataggtctggccgtttcctcctgaaacttaacgtccgtatgacagtcagccaaccagccctcattcgcagcattcgttttacgtaggttgaaccttggggcgttcgtgtgatacccagtagattgaacaggcaatgagtaattctggtattgaccattgctaatacatttcaaaggagtatctgttatgaacgctgttggtattgatgtctccaaaggcaagagcactgtcaccatccacaggccggtcgatattgtcgtcatgtctccccggacattccgcacacacagtccgcgatcaatactctgatcaatctgatacggggcttgacggggaagcaaaggtctgcatggagcacaccgggaggtactaagaaccggttgccatctggctttctgacgccggtatctttgtcagtgccgtaaatcccatgctcatcaaagacttcggggatgactccctgcgctctcccaagaccggcaaggctgattctaaaaaaatcgcccgttacacccttgaccgatgggcaaaactgaagcagtatggaagcatggataaaacacgcaaccaactaaagaccatgaaccgccagttcggtttctatatagatcaaaagactgccatgaagaacaacctcatcgccctgctcgaccagacctttccgggcgccaatgatttctttgacagccctgcacgtagtgacggcagccagaaatgggtggattttgttcatacctactggcatgtggactatgtccgctccagatcactggatgcctttacggtgcattaccggaacaggtgcagacgcaaaggatataacttcagcgccgataaaaccgaaaagatatatcagctttcctctgacatgatcgccgtattcccaaaggatgacagcacgaaactgctgatacggcaggctgtggcaatgctgaacaccgcctcggagactgtggaatccctacgcctgaaaatggacgagaccgcatccacgcttcccaaataccctgttgtcatggctatggacggcgttgaccacacccttggcccacagcttatggctgagatcggggacgtaacacggttcacgcaccgcggagcgctgaccgcttttgctggcgttgaccccggaaagcacgatttcgggcagcacattcagaaaagcgtacctacgaccaagaaagggtcaccaagcctgcgcaggacgctctttctgatcatggaaggtcttatcaagcgttctcccaccaatgatcctgtttatgcctttatggacaagaaacgggctcaaggcaagccttattacgtctatatgactgccggtgcaaataagttcctctgtatttattacgggcgggtgaaggagtatctttccatactcacagaaaccgaagaaacctaaaataatacagttatcttttaagaggccagcgttccgtggtggtctttttgtagtgttcattttccaacctgtataaaattttcaaagttcacaaatttctgcttgactttttatttgcaga

SEQ ID NO: 3793 - DNA, 1445 bp, unidentified
  source 1..1445: mol_type = unassigned DNA; note = element_5ac114d
  misc_feature 1..2: note = core
  misc_feature 3..149: note = LE
  misc_feature 150..1193: note = CDS
  misc_feature 1194..1445: note = RE
  misc_feature 1210..1440: note = bridgeRNA
agatggggtaacgggccggccgcggcgcaaccgctcgctcgctacagcgcgagtgaaggcgcgcttgcgcgacggtggtcgtccctcactgatggtgtcatttgaccggagtcggggcttacccgctccagcatcatcgagggacgaccatgaagcattatgcaggaatcgacgtgtctctgaatagctccaacgtgtgcgtggttgacgagagcggtaaggtcgtgcgggaggtgaaggtgccgagcgagccggtggctctgattcgctgcatcaaatcgctcggtgtgagagtggagcggatcgggctggaagctggcccgctgtcacaatggctgtacggggcgttgcgggagagcgggttgccggtggagcttctggagacgcgtcacgtgaaggcggcgctgtcggcgatgccggtgaaaacggaccgcaatgacgcgcgcgggctggcgcagctgatgcggttggggtggttccggccagtgcactgtaagtcgatggctgcgcaggaggtgcgagcactgctcaccgcgcgcaagctagtgcagtcgaagctctacgatatcgagatgagcttgcgcggcattctgcgcggtttcgggctcaaggtggggccgacgacatcacgcagctttgcggcgcgcatcaatcatctgacagccgaccatccgagcctggaaatggtagcggaagcacttctttcgacgcatgcggcggcgctgtgcgcgttcaagaacctggagaagaacgtgcgacagatcagtcgcgccgacacgcgggttcggctgttgatgtcgacgcccggggttggcccagtggtcgcgctcacttacgtttccgcaatcgacgacccgaagcgcttcacctcgtcgaagccggtgggggcgcattttgggctcacgccgaagaagtatcagtcaggcgaaaccgacatcaacggtcgaattagcaaggtaggtgacagttcggtgcgcgccgttctctatgaggccgctcatatcatcttgacgcggccgatccatggcggcgcgctcaagagctgggcgatgcgccttgccaagcgcgccggcatgaagaaagcgaaggtagcgctcgcccgcaagctcgccgtcgtgctgcaccgcatgtgggtcagcgccagtacttttgatttcgaaaaagcgaacagttgcacgcgcgccgcggcttaacgataggagctcacaactttcgacgagggtcacgacaccaggccctctcgaagcgaagtcccgtcgccgggacgatggacgaggtcagaccgggataggttcagtggcattgtgaccacgcttactagattggccggcctcatccacattcaaaccccatcaggtggcggccatgtgccgaccccggacagaagcgagagttcggcgactggatgacgcaagagggattgacaagtcgtggcccgttacaga

SEQ ID NO: 3794 - DNA, 1319 bp, unidentified
  source 1..1319: mol_type = unassigned DNA; note = element_5ac4804
  misc_feature 1: note = core
  misc_feature 2..250: note = LE
  misc_feature 251..1303: note = CDS
  misc_feature 1304..1319: note = RE
  misc_feature 20..246: note = bridgeRNA
ctgtgaggcttgtgcctgcggctcgctgagcggtgggctgtgttcggtgggtgcgcgcgtgactctacgtctgactggcttcgtgccttcgagcggacttgtccgcgcgtgcctgccggccccggcccgaccggagttgctggcctgatcaggagcttgaccgcccgtggacgcgggcgtgtcccgtcacagtcctgccgatctccagccggaccggaacctcacgttcctccggtcgaaggagtacgcagtgaccagtctggctgaacgcgtcgatctcgtcatcggggtcgacacccacaagcacacccacaccgccgcggtcgtggacgcgaccactggcggcacgctcagcgagttgaccgtcagcaccgatccgggtggctatggcgagctgctgacctgggtcggcgcgatccgtggtggctcgcgggtctgggcgttggaaggtggcggcggctacggcgccggtctggcccggttcctcgggtcggccggtgagcaggtcgtggagctggaccgcccgaagcgagccgcccgacgtcatggcgcgaagtccgactccctggacgcggtccgcgccgcacgcgaggccctggcccgcgagcacctcgcgcggatcaaggacgacggtcctcgcgccgagctcgccgttctcatggcggcccgccgctcgggggtcgaggccgcgaccctggctcagcgccagctgctcgctctggtcaccgcggcgccagaggagctgcgcgccgtgctgcgcggggcgaacacgaccgtgacggtccagaccgccgcccggttgcggacccgatcggcctgggaccgtcagacggtgaccaccgcgaacgtcctgcggaccctggcgcgccgggtcctgaccctgcagggcgaggcccgcgaccacgagaccgcgatcggtgagatcgtgcgctcgtggcggcccgacctgctgacccagcccgggatcggagccctcaccgccgcccaggtcctgatcgcctggtcccacccgggacggatccgctccgaggccgcgttcgcgatgctcgccgggaccgccccgatccccgcgtcctcaggcatgacgatccggcatcggctgaaccgttccggggaccgccagctcaaccgcgcgctgcacgtcatcgccctgtctcgcgcccgctacgaccagcgcacccgcgactacatcgaccgccgccgcgcccagggcaagaccgaccgcgagatccgccgctgcctcaagcgatacatcgcccgcgacctgttccgccaactcgaacacggcccactcccggcttgacgaaccataggagcgt

SEQ ID NO: 3795 - DNA, 1525 bp, unidentified
  source 1..1525: mol_type = unassigned DNA; note = element_5ac7e76
  misc_feature 1..2: note = core
  misc_feature 3..248: note = LE
  misc_feature 249..1412: note = CDS
  misc_feature 1413..1525: note = RE
  misc_feature 3..230: note = bridgeRNA
cttgtatgatgtatttacacggaaatacatcaatactctcctttcttttcaactttgttataatcaatagtaacactgtggacttttcattttattttatagctttgactattcgaaggagtgtattgccacagttttatctgaattatttatagttggataagtctttgaactttcatgtcacgcaagtttatgatgataaaactaggtggacaaacacagtgattaattcaaaggaggttctgtttatgaactatgtcggcatcgatattgccaagcaaactcattatgcttccatcatgaattctgatggagaaatccttgtagatccatttcctttttcaaatgatctttctggattccaaaaactcctaaaaaatctttctgctttttcgaaagacaatgttctcattggtatggaatctaccgctcattacgcggaaaaccttaccagcttcctttttaccaggggctttcacatctgtatcattaatcctatccaaacttcaactctacgaaagtcaaatattcgtaaaactaaaactgattcggttgatacatatctcatcattaaagccctatctcttaaccactatcgactttttacagaacgcgactacgactctttacaattaaaaaacctctgtcgcttccgtcaaaaacttatgaaggcaaggacaaaggttaaaattcaacttgtgacttatgtggacttgttattccctgaactacagtattttttcaaatctggaattcacggaaaagcctgttatgcgttgttaaaagaacaaccaaatcccgacaggattgcaaaaatgcatctcacaaggcttacgaaccttctatccaagacctctaagggccactataaacagtctcatgctgtacaattaaaagagcttgcatcgcaatctgtcggtattaaaaatagtacactatctttacagattttgcaatctattaatcagatcgaattatacaattctcaacttgaagaagtggaaaatgagattaaaaccattatggaaagaattgactctgtaatcaaaactattccaggtatcggttcactcaatggtgcaatgattatcggtgaaattggtgatatcaccagatttcaaaaaacttgccagctccttgcatacgccggtttagatccttcagtatatcaatctggaaactttaatgccgccagaaccagaatgtctaaacgtggctcaaaacttcttcgttatgcccttattaatgccgcatggcagacaacactcgtaaataataccttcaagaattactatgacttaaaagtatcccaaggtcgtcgccattacaacgctctagggcatgtagcacataagcttgttcgtgtcatacataagatgatgacagataatatcgagttcgacttagcctaagtcttacctaaactatattttattttgaaagcacctaaaaagatgctttattaactatacacttttttaactataaatttttgttatttttttattgacttttcatagttggt

SEQ ID NO: 3796 - DNA, 1389 bp, unidentified
  source 1..1389: mol_type = unassigned DNA; note = element_5aceb13
  misc_feature 1..2: note = core
  misc_feature 3..234: note = LE
  misc_feature 235..1164: note = CDS
  misc_feature 1165..1389: note = RE
  misc_feature 1154..1376: note = bridgeRNA
tgatggggtggacggctccctctcgcggcatcgcgatgtgccacattgggtgccgtttcagacccatcgagggagccgtccatgcaacagcctaccaccatcgggatcgatctggccaagaaccgaattcagctgcacggcgtcgacgcggccggcgcggcggtcgtgaagcggaagctccgtcgcggtcaggtcctggcgtttttcgaacgctaggagccctgtcttgtcggcatggaggcctgcgccggggcacatttctgggcacgcgagcttcaggccctcgggcacgaggtccggatcatgccgccctcctacgtgaaaccgtatgtgaagcgggggaagaccgatgccgcagatgccgaggctatttgcgaggcggtcacgcggcctacgatgcgcttcgtgccggtgaaatcggcggagcgccaggcagcgctgctggaccacaagacgcgggattttctcgtccgccagcgcacccagttggtgaacacgatccgggcgcacctgtccgagttcggcatcgtcgtggcgaaaggcatccacaacgtcgagcggttgctggaggcagcgaccgaactgcccgccgccgcgcggccggccgtcgatctgcttgccgaccagctgcgcgagacgcaggagaagatcgagagggtcaccgacctcatcgaggcggcccagaggaccgatcagctcgcccgacgtctggcgacgatcccgggtgtcggcgccatcacggcaagcgcgatcgcggccacgacacctgcggtcgataacttccgctcggcccgcgactatgccgcctggctcggcctcatcccgcaaccccattccagcggcggcaaggagcggttgggacggatctcgaaagccggcaaccggtacctccggcggctcctgtacctcggggccatggcgcagatcagcgcgcggcggtgccgacgaccgggcgacgactggctctggcgcatgctggagaaaaagcccgtgaaggtcgtcgcgccgccaatgctgctcgaaccattggcgcgatcattggcggccgctggcgaaccgcatggcacgcgtcgtctgggcgctgatccgaagcggcgagagttaccgggtcaacccggcatgacaggacacgccggtcgttttcggccggcaccgagacggtgaggcgcgacgtgaggtgatgccgaacagacggcgacacggcaatcgggacacccagttcggaccggagcaccctccagtgcgtgccattgatttggacccgagcgccggcggacttcatcagggcgcgcagcccgagcgctgcaagtcacacgccggatacatggccgcgaccgaccaactgcctgaaccaaatcgagcccttgccccgcgggagccgtccataca

SEQ ID NO: 3797 - DNA, 1448 bp, unidentified
  source 1..1448: mol_type = unassigned DNA; note = element_5ad39af
  misc_feature 1..4: note = core
  misc_feature 5..231: note = LE
  misc_feature 232..1431: note = CDS
  misc_feature 1432..1448: note = RE
  misc_feature 1..235: note = bridgeRNA
ccccgttacatttattgggtccccgagcgccgggggcatggtcgctggacccggtatgactttctcgccctgttactgatgatccggggggtgttgtcgccgggttcggaggcacttgttgaccgctgatagggacaaggccggaccaacgggtccaggtctcttcgtaacgtgggtgccggcatcgggtgtcgtgactgcggccatatagtggtgcaaaggagcgccgatatggatcagggattcgacgtttattgcggactcgatgtcggcaagagcgaacaccatgccaccgcgttgaaccgcgccggcgaacgtctttttgataggccgctgccgcaggacgaagcccggctacgggagctctttacgaccctgcagcaccatgggaacgtgctaatcgtcgtggaccagccgaacacgattggcgcgctttccgtggcagttgcccgggactgcgggtgcgaagtcgcctacctgccgggcctggcaatgcgaaaagcagcggatttgtatcccggaaactcaaaaactgatgcccgtgacgcgttcatcatcgccgagacggcccgggcgatgccgcacaccctgcgcgcggtcgaccgtgacagcgaggtgctttcggctctcaaggtgctctccgggtttgataccgacctgactcacgaatgcacgcgggcaatcaaccggctccgatcactgatgctgcagatcttcccggccctggaacgcgcctttcccggcacgatcctgacccgttcactggtcttggaactgctgatcaattacgcgggcccgactggtcttcgtgccgcaggacgaggaaacgtgctgcgctgggcccgcaaccacagccgcaaagacccggccgcgctcatcgacaccgtgttcgccgccctgggcgagcagacagtcaccgtcgccgggaccgaagccgtggagctcgtcatcccgcgcgtcgccgcccagatcaaagagctcaaacaccagcggaccatcgtggcagaagaagtcgaaaaactcctggacgacttccctctttccaaggtcttgatgtccatgccgggagtcggcatcaagaccgccgccaccatactcctggccgtcggcgacggaagcagtttccgcacgtccggacacctcgccgcctacgccggcatcgcacccgtcacacggcgctccggcacctccatccgcggagaattccctgcccgctccggcaacaaagaactcaagaacgcactgttccgatccgcacggatagcctcctgccacgaccccttatccaaggcctactacgagcggaaacgcgccgaagggaagaaacacaacgccgccatcatctgcctcgcccggcgccgctgcgacgtcatctacgccatgctcaaaaacggaaccctctaccaggaaaaagctccccaagccgcttgaccaaaagcatagggaca

SEQ ID NO: 3798 - DNA, 1464 bp, unidentified
  source 1..1464: mol_type = unassigned DNA; note = element_5ade38f
  misc_feature 1..2: note = core
  misc_feature 3..229: note = LE
  misc_feature 230..1444: note = CDS
  misc_feature 1445..1464: note = RE
  misc_feature 6..226: note = bridgeRNA
ctaatgggattggaaagccgctggttttgcgagaggatttccaccgagccgctgactggtgagcactctgcgagcctgagccttgagctctaggtctagagcgtgccccagtcagattggcgaggttgacggagagggctggaggggtgtcgtgccaggagcactaattcattaggtcgccgccgttgcctcgaggctcgttgaactatcgaccatcggaggtgactacatgatttttgttggagtggactgggcggagacccaccacgacatctgcgtccttaacgaggcgggcgaggtgctcgcgcgaaagaggattccggacacgtttgaaggcctgcgagcgttgcacgagctgctggcgccgcacgccgaagagccggaagaggtgatcgtcggaatcgaaaaagaccgcggcctgattgtgagcgccatgctcggcgcgaactaccacgtctacgcgctcaaccccatgtcggtcgcgagataccgcgagcgccacgtcacgtcgggctcgaagtccgatcccggtgacgccaaggtcctcgccgacctcgtgcgcaccgatcgtcataaccaccgcgaagcggccggcgacaccgagggggccgacgcgatcaaggtgctcgcgcggacccaccagagcgccatctggtcgcgccagcgcgagaagaacgccctgcgcaacgctctcaaggactattaccccggggcgctcaacgcgttcggcaccgaccttgacgacggcgacgccgtcgaggtcctcacgatcgctcctaccccggcacttggggcgcagctctcactctcgaagatcacctcggccctacgacgtggtggtcgtcagcgcaacctcgaacgcaccgcgaagaagattcagcacgccttgcgcgaagagcaactacgcgagcgtccgaaggtcgaagcggccttcggcaagatcacgttcgcccacgttgcgatgatccgcgcctactcagccacgatcgcggaactcgaacatgcgctggctgaggattttaagcagcacccggacgcgaagatcatcctctctctaccaggactcgggatggtcctcggcgcccgggtgctgggcgagttcggggacgacccgaaccgcttcgccgacgccaagtctcgcaaaaactacgccggcacgtcaccagtgaccaaagcgtcgggcaagagccgcgtggtgctcgctcgccacgcgcgcaacacgtggctcggcgacgccaccgaccagtgggcgttctgttcgctcaagaaatcacccggtgctcgtgcccactacgacgagctgcgagcaaaaggaaagacacaccgacaagccatccgacagctcgccaatcggagtgtcggcatccttcacgcgtgcctcgaacaacgtgtcgactatgacgaagatctcgcctggaagcatcgagcagacatcagagcttgacagttcgagtcaaggggtgt

SEQ ID NO: 3799 - DNA, 1451 bp, unidentified
  source 1..1451: mol_type = unassigned DNA; note = element_5ae7246
  misc_feature 1: note = core
  misc_feature 2..7: note = LE
  misc_feature 8..1141: note = CDS
  misc_feature 1142..1451: note = RE
  misc_feature 1218..1442: note = bridgeRNA
taatgggatggcccggccgtgctcccgccccgccagcaatagaagctgggatggggcgtcaagacaaggagcacgccattcccagacactgaacgctgcaattgccgtggttggtatcgatattggcaagaactctttccacatcgtaggccacgatgagcgtggcgcgatcgtgctgcggcagaagtggtcacgtggccaggtcgaggcccgctttgccaatatgccgccgtgcctgatcggtatggaagcctgcgtcggcgcgcatcatcttagtcgcaaactcagggcacagggccacgatgcccggctgatgccggcgaagtatgttcgtccctattcgaagggacagaagaatgacttccgcgatgccgaggcaatcgccgaggccgtgcagcgaccgacgatgaagttcgtggcgaccaagaccgccgatcagctggacctgcaggcgctgcaccgggtacgggagcggttgatcagccagcgcaccggcatcatcaatcaaatccgcgccttcctgctggagcgcggcattgcggtgcgccaggggttacggtttttgcgcgccgagctgccgcgcatcctggccacgccaccagatgtcctgtcgcctcgtatagtgcgcattgtcgaagatttggctggcgattggcgtcggctcgacgagcgggtcgagcgactatcggatgaaatcgaagccatcgcgcgcctggatgccggttgcgagcggttaatgagtgttcccggtattgggccgatcatctccagcgcgatggtggccgcgatcggcgcaggggatgtgttcaccaggggtcgcgacttcgctgcctggctggggctcgttcccaaacaaatctcgaccggggaccgtaccatcctcggcaagatatccaggcgtggcaatcgctacctgcgcgttctgttcgtgcaggcggcgtgggtcgtgctgatcaaaccgaaaacctgggagcgccacgggctaaagccctggatcgaggcagccaagaagcggctccatcacaacgtgctggcgatcgccctcgccaacaagctcgcccgcatcgcctggagcgtcctggcccgtggccgggcattcgaggcgcggaagatggatcaggcagcgaaccaatccgcttgattcctattccacgccaacggcaacagaggccgaaaaatgaggagcccgcgatgacatagccagattgatacgatttacctgccgaggtctgcgagaggataagacgaatggaggttcggtcttcccggcgcctgcgaacactggtgacccgaatggccgttgaggcctgtccgctaatgagatcgcacgcgcgctgatatccatgatggccaggagcacaacgctccaatcaaaggccggatacattgatgcaagaccgctcaccgccatcgcggcgaaatccacttgcaacgcacggccggaccataca

SEQ ID NO: 3800 - DNA, 1383 bp, unidentified
  source 1..1383: mol_type = unassigned DNA; note = element_5af01bd
  misc_feature 1: note = core
  misc_feature 2..88: note = LE
  misc_feature 89..1117: note = CDS
  misc_feature 1118..1383: note = RE
  misc_feature 1153..1375: note = bridgeRNA
taatggaatggtcgcctcccttcccaaactaaaaacgtaatggcaaagtagtgaggcagtttctcatcaactcaaagaggcgtaggcaatgactatcacaactataggtatagatttagctaaaaatgtctttcagatccacggcgtagacggatctggtaaaacagtcttgaagaaacaacttaggcgtaatcaagttctcacttactttataaagttaacgacgtgcactattggaatagaagcctgtggtggtgcacattattgggcgaggaaacttagagcaatgggacatacagtaaagctgatggctccacagtttgtgaaaccctacgtcaaagcgaataaaactgatgcagcagatgcggaggcaatctgtgaagcggtaacgcggccaaacatgcggttcgtcgctattaaaaatgtagagcaacaagctattttatctctgcatagggcaagacaaggttttgttaaagcaagaacggcacaagcgaatcagatacgaggattgctcggtgagtatggcatcactattcctcaaggtattaaatacgttatgaaggatatgctgaagttacttgatccaccagagcatgacttgccaggcgcgtttactgatttactaaaacgccttcacactcacttattagtgcttgaagagcaagtaagtgatttagagacacaaatcaatagttggcatagtaacaatgagtatagtcagaggctaagtaaaatcccaggcatcggtccactgactgcaacggctctcgttgcgtctattgccgatgcaaattgctttcgcaatggcagagagttggcggcatggttgggacttgttcctcgacaacactcaagcggaggaagacctatgctattgggtatcagtaaacgaggcgatacgtatctcaggacattgttaatacatggagcacgttcggcagtgcgtgtagccaaaaataaaagtagtccgactgataagtggacaaatgaaatgctcaatcgccgacaccaaaacgtagcatcggtagcgagagccaataaaaatgctcgtattgtgtgggcgctactcgctcacggaagagattataatgcggaatataaaatagcggcttaagtagtagaaagtagtagaaaacagttagtacaatttcacgattgctccggcaattatagcgtgatggcaagacaggtcagaccgtggcaagtaaaacctattttacacagggagcttcgagctcgacaggctgttaaggtacttgccagcaaattccatcagggacaggggttattacctcgattaaaagtccggatctatggctgcaatcttatcctgttaaacatcataaaataattgcttggcaaatgggaggcgaccatcta

SEQ ID NO: 3801 - DNA, 1614 bp, unidentified
  source 1..1614: mol_type = unassigned DNA; note = element_5af7dfe
  misc_feature 1..2: note = core
  misc_feature 3..285: note = LE
  misc_feature 286..1491: note = CDS
  misc_feature 1492..1614: note = RE
  misc_feature 14..305: note = bridgeRNA
ctactacaatgtatttatggttaatactccttacagccagtaaggaattatccatcttgttgcttaagctgttataatgatggagcaatcggtatatcggcttccaatcttggacttcgcgtccgtttgatagactgataaccagctcctcattcgcagcgttcgttttatgcaggttgaactgcctcccggtacgttcgtgtcacgccacagtagatggaataggcaatgagtaaaactggtatttatccattgcattatcaaattttaaggggtggcaagtttatgaacgcagtaggtattgatgtttccaaaggtaaaagcatggtggctatccttcgcccatatggcgagattgtttcaaagccatttgaagtcaggcacacagccagtggtatctattctctaattgagcacatcaaatccattgacggagaatcccgtattgtcatggagcacacgggacgttactatgaacctctcatccatgaactttctaaatccgggctttttgtcagtgccgtaaatcccaaacttatcaaagacttcagcgacaattcccttcgcaaggttaaatctgataaggcagatgcggtaaaaatcgcccgctatactcttgacagctggacggaattgaaacagtattgtcttatggacgaaatacgtaatcaattaaagaccatgaaccgccagtttgatttttacatgaaacacaaaaccgccatgaaaaacaacctcatcagcatccttgatcagacgtatccgggtgcaaacacctattttgacagtcccgcccgcgaagacggaagccaaaaatgggtggatttcgcagctactttctggcatgtagattgtgtccgcaaaatttctctaaaagtctttgtagaccactatcagaagtggtgcaaaagaaagaagtacaacttcagccagtcgaaagccgaagaaatctatggaaaagcaaaggagcttgtttctgtacttcctaaggatgatttaacaaagcttatcatcaaacaggcgattgaccagttaaataccgcctcccagactgttgagcagcttcgaaccatgatgaatgaagccgcttccaagctgccggaatatcctgtagtaatggctatgaaaggggttggtaagtcccttggtccacagctcatggctgagattggggatgtttcccgctttacacataaaggagccatcacagcctttgcaggcgtcgatcctggagtcaatgaatccggttcttatgaacagaaaagtgttcatgcctctaagagaggctcgggcgcactccggaagaccctgtttcaggtcatggatgctcttatcaagacaaaaccacaggatgacccagtctacctgtttatggataaaaaacgggcacaaggaaaaccttactacgtctatatgaccgctggcgcaaacaagttcctacgcatctactatggcagagtgaaagaatacctttcaactctttcagaataaccagctaatacttacccttattttagaccagcgaatatcggtggtcttatttcaatattcaaaatctcgcataaaactttttgcctaaaatcatcaatttactattgactttttatttgcagg

SEQ ID NO: 3802 - DNA, 1148 bp, unidentified
  source 1..1148: mol_type = unassigned DNA; note = element_5afc5f5
  misc_feature 1..3: note = core
  misc_feature 4..162: note = LE
  misc_feature 163..1137: note = CDS
  misc_feature 1138..1148: note = RE
  misc_feature 24..188: note = bridgeRNA
gcttgtgtcttagcaccggcgtaggcttcagggtgagagcggagtgcggcaagcccgctagcggcggtgctgcgagcacgtgtaggagctggggctgccgcactcccttcaccaaagcccgaacagttgcccgagtcgtacctcgaattcacaagccggggcatggtggaggtgctctcacttccgatcgtactctggagtgaagtcatgagcatccacgtaggtatcgacaccggtaaatccatgctggacgtgggtttttaccctgacaggcgctgcgagcgctttgccaatacgcccgagggccatcgtgctttgctgcttgcgctggcacccttggacgtcccgcacatcgccattgaagccaccggcggctacgagcgaggtgtcgtcgacgccttggtgcaggccggctattgcgtcactcgcctggcctcgcatcgcgccacggcctacgcccgagccatgggaaccttcgcgaaaagcgatgcgctcgatgcccagatcctggcgcgcatggcggcgcaggtcacgccgcagccttacgaagtgcctgcgcctgagcgcgctgaactggctgaactggtgcgttgccggctgcagatggtcagtcagcgtgacgacaacaagcgacgcctgttgcagacacagttggccgcggcccagcaggcgctgcgcggcatgatcgaggcggccagcgtgcaaatccgcgaactggaccgacgtatcgcgacggcgacaaaggcagcagatcctgcctcacggttacgtgaggtgccgggcgtcggacccgtcgtcgaagccacgctgatcgcctatttaccggaactggggcgactgacgcgacgacagatcgccgccctggtgggcgtggcgccttatgtcgaccagagcgggcgccgtgacggtccccgacgcgtgcgtgccggccgatggatcgtccggcgcgcgatatacatggcgacctgggcggctatccggaccaaaggaagcgccctcggtcagcgctatcgcgccctacgggcgcgggggaaagtcgccaaagtagcgctcgtcgcctgcatgcggtgcctgatcacagccatcaatgcgatggtccgcgctcaggttggctggcgtcagccggcaactgtctgaaaaagacagtt

SEQ ID NO: 3803 - DNA, 1427 bp, unidentified
  source 1..1427: mol_type = unassigned DNA; note = element_5b06b90
  misc_feature 1..2: note = core
  misc_feature 3..120: note = LE
  misc_feature 121..1176: note = CDS
  misc_feature 1177..1427: note = RE
  misc_feature 1193..1422: note = bridgeRNA
agatgccgtaatgggccggtaccggggaccaatactgacctccggcgcgggtctgttcagagtggtggcgtgacgtgcggacccgggcggttcgggtccgaccccatcaggaggacggccgtggaacaccatgttgggattgacgtgtcgctggagctgagcagcctgtgcgtgctggacgcgacgggcaaggtcatccgggaggcgaaggtcgcaagcgagcccgaggcgctggtcaagttcctgcgcgggcttgatctgaccatcgtgcgggtcggcctggaagctggccccctgtcgcagtggctctacgacgggctgcacgaggcggggttcgaggccgtgctgctggagacgcggcacgtcaaagcagcgctgtcggcgatggcggtgaagaccgaccggcgcgatgcccgcgggatcgcccagctgctgcgcatggggtggtatcggccggtgcatcgcaagtcggtgccctcccaggagatccgggcattgctcggcgcgcgcaagcagctgcagatcaaggtcatcgacctggagcagaccgtgcgcggcctgctgcgcggcttcgggctgaaggtcggcgacgtgagccgcggcaagcttggggcgcgcatccgcgagctggccgccgggcacgccatgctggagaagatcgtcgagcctttgctggccgcgcgcgaggcgatgtggcgcgagttcgccaagctgcatcgcgaggtgctggtgatcgtcaaggaggaccaggtctgccggcggctgatgacggtgccgggcgtgggcgcgctggtgtcgctgacctaccgtgctggagtggacgaccccgggcggttcacgaagtccaagtcggtcggcgccttctttggcctgacgcccaagcgctaccagtccggcgaaacagacgtgaccggcgggatcacgcgggtcggcgacgccggcgtgcgcacggcgctgcacgacgcggccaacgcgctgctgacacgcgcgacccggttcagcacgctcaagcgctgggcgctggacgtcgcgaagcggcggggcatgcggagggcgaaggtggcgctggcacgcaagctcgccaccgtgctccaccgcatctgggcgaacgggacggagttcgtctggggcaaggacccggtggcggccgccgctgccgcagcaccggcggcgtaaccgcgaggaggcataaggttcggggcggggccaggcggcccagctcccacgaggtcccttcgccgggacgcggagacggtaaggcaggttccgttgcagtggccgggagcgatcccgtatcacgctgggtagattgctccgccggctccctcatgaagcatcatgtggcggccttgcgccgatcacgggcagaagcacgaaaccggcgagcggatgcactctgagcttgacgacgaagggcccattacaga

SEQ ID NO: 3804 - DNA, 1312 bp, unidentified
  source 1..1312: mol_type = unassigned DNA; note = element_5b07631
  misc_feature 1..2: note = core
  misc_feature 3..260: note = LE
  misc_feature 261..1265: note = CDS
  misc_feature 1266..1312: note = RE
  misc_feature 44..212: note = bridgeRNA
cttgtatattaaacatatctcttaaacacaggattatttaacataaaaccattatagtcataactgattttctggggaaaccggcccatccttaagcttcgagcttgtacgtagattggctccccaccctcgtcatccatgccgtggagtatctgagacctgtaagctatgcttctgagtctgcattcacaaggacggtaggtgaagtgtcagggttgggaaaccagggatcattataatacttaaatatgagataaaaaatgaatactatcggaattgatgttggttgtaaggaattagttgttgttgtcgttatggttaatggtaaggcgcgtaaagctaaatcttttgaaaataccccttcagatcatcaatcaatgattaagtcgtttacaaaacttaaaggagaaacaaaggtttgtatggaagcaacaggtgtttatcactttgatttagcggtcgctttgagtcgttctaatgatattgaagtgatggttattaaccccaaggccgcacataactttgcgaaagcattaatgacacgtagcaaaacagatgcgattgatgcagaaaatttagcgatttatgcggagagaatgccttttaaagtctgggagcgccctactgatgaatgcattagcctaagagcgacagcacgccgtgttgcagcattaagcaaacaaaaaacacaaactaaaaaccagctccatgctttaaaatcaaccgtagaaacgcctgcgcttgttattgagcaaactgagcaattaattgatgttttagatacacaaattgaaacgctgcgtgaaagtgcacttagccttattagcgataatgaagagctgaagcaagcttatatattaatcatcggcatcaaagggattgcgcatgcctctgcggtacaaatactgagtgagctgatgattttacctaaagatatgacggcacgacagtgggttgctcatgcagggctagatccaagaatatttgattcaggcagtagcgtttctaaaaagccacgtattagtaaagtaggtaataaatatattcgccaagccttgtacatgccagcactagttgctagccgcttagagcccaatattaaaggctattaccatcatttaattaatgataacggcttaaaaaaagtacaagctatctgtgctgtaatgcgtaaattattacacgccatccatggcatgttacggtctaataaagaatttgatgggactcgtttttatacgttacctatcgccacagattcataaaaaaatatgaatatttgtaaatttacgcttgtgttttaatagagtat

SEQ ID NO: 3805 - DNA, 1004 bp, unidentified
  source 1..1004: mol_type = unassigned DNA; note = element_5b08017
  misc_feature 1..2: note = core
  misc_feature 3..206: note = LE
  misc_feature 207..992: note = CDS
  misc_feature 993..1004: note = RE
  misc_feature 12..209: note = bridgeRNA
cttgtcttataaattgagtagctcctgtgcaaaactggagccactgcccgtcaggttatttatgacgtgcagtggcgggggtcggatcggttccctcttggtcgtgatggaccgttgaggagtatggtcgcccccgtctttttctctaacctgaacggatacatgggctttgggctcgcatgacaagacgaggtagatagaagacaatgcaacatacaataggcatcgacatctccaaaggcactttagattgctttgagttgtccagcagtaaacattaccaatatcccaacgatgatctggggcaaaaagacttaattaaatggatcaagaaacaggatgcagttcttgtagtttttgaagcaacgggtgcttaccaccgcagccttgaagccacgttggcaagacacaaacacccatttgcaaaggtaaatccacggcaggccaggcgatttgcagaagcgactgggaggcttgctaaaacagatcgtgtcgatgctgtaatgcttgcaaaaatgggttctattctggatttgcctgcacaagagcccaaatctgaaaacatcaatattctcagagagttactaacggcacgacgcgcactcacaaaagacaatgccgcagcaaaaacacgtgcgcaaacaacagtacatgctgtgctcaaaatacaaattaaggctcgccagaaacagataaccttgcagttaaagcaagctgctagcttggcaggtctcgcaccaatttctcgccaatcaggcaagtggcaaagcaaagaacgtattcaaggtggaacggcgttctttcggcgcgcaatgtatatgcccgcgctttgcatcattcgtcacaacctgagcagcaagcagaaatacgatcaaatgattaaaaccggtaaaccggctaaagtggctataactgctatcatgagaaagcttgatgtactcgccaatgtccttttacgagatgactggatgtgggctgaaaaacccacttgaccaacacggata

SEQ ID NO: 3806 - DNA, 1359 bp, unidentified
  source 1..1359: mol_type = unassigned DNA; note = element_5b08717
  misc_feature 1..2: note = core
  misc_feature 3..156: note = LE
  misc_feature 157..1098: note = CDS
  misc_feature 1099..1359: note = RE
  misc_feature 1074..1346: note = bridgeRNA
tgatggggtggacgccccctgagggcatcgctgtgccaaagtggtgtcgttgatcatcacttgaacggaggcgtccatgtctgaagttagcactatcggattggatctggcgaagaacgtgttccacgcgcacggtgccgatgcatcggaacggtcatgttcagaaagaaacttcgtcgtgaacaggttcttcggttcctggcaactcagccggcctgcacggttgccatggaggcatgcgccggcagccattattggtctcgagagatagcgaagctgggacatgatgtccggctgatcgccccgggctacgtcaagccctttgtgaagcggcagaagaacgacgccgctgacgccgaggcgatctgcgaagccgcacaacggccgaccatgcggttcgtaacggcaaagagcgaagagcagcaggcggctatggtgttccgcattcgcgatcttgtggttcgccagcgtacgcagacgatcaacgcgatgcggggccatcttgccgaattcgggctggtggccgcgcaggggcttttctacgtggccaagctcgtcgcggcgattgaggataaggattccgccatccccgaagccgtccggccggttctatgcctgctcgttgagcagctccgcacgctggatgagagagcggccattctcaaccgcgagatcgcccggcgcgccaaagaagatgcggaagccaggcgattgatgaccattcccggtatagggccaattgccgcaactgccgttgccgcgttggctccttcggcccggacgttccggagaggccgggacttcgcggcatggctcggccttacgccgctgcaacgtccctcgggcggcaagcaaaagctcggcgagacgtcccgaatgggcgagcggactttgcgccggctgctgatcgtcggggccagcgcgaccgtgcgctgggcgatgcgcaaaggcgcggcagcagatccttggctctctgggatgctgagccgcaagccgcccatgctcgtgatcgtcgccctggccaacaggacggcacgcgtcgtgtgggcgttgatggccaagggcgggacctacagggcaccggctttggcagggtagtccgctccccgggcgggccgccaaagtgtgagaaggtcgaacggagagtaatggcgctatggtcaatgagacgggatcgggaaaaccagatcatggatacgcgcctcgagcgcgccagattgttttggatccgctccgcgaactcccatacgggcccgcggcatatgacagccgcaacagaggccggacacatgtcagcacccgaccacgctccgcgctcttcgaaaagattcttcttgcaccaacgggggcgtccacaca

SEQ ID NO: 3807 - DNA, 1399 bp, unidentified
  source 1..1399: mol_type = unassigned DNA; note = element_5b15f06
  misc_feature 1: note = core
  misc_feature 2..87: note = LE
  misc_feature 88..1116: note = CDS
  misc_feature 1117..1399: note = RE
  misc_feature 1155..1386: note = bridgeRNA
tgatgctgtggacggctctccacccggcatcggagtgccatagagtggttattgctgaggtaaccacgctgaaaaggagagccgcccgtgggacaggttacgacgattggtcttgatatcgccaagtccgtatttcaggtccatggcgtcgacgccgatggacaggtcgtcctccgccagcgcctgacccgcgcccgcgtcttgccatttttccgcaaacagccggcatgccgcgtcggcatcgaggcgtgcgccacggcgcaccactgggcgcgtgaactcctcacccttggccatgaagtccggctgatgccgccggcctacgtcaaaccctacgtcaagcggcagaagaacgacgccgccgacgccgaagcgatctgcgaggcggtcgggcggccaaccatgcgcttcgtcacaccgaagacggtcgagcagcagagcgtgatgatgctgcatcgcgtccggctgatgctgacccgccagcgcacccaggtcggcaacgcgatccgggcgcacctggccgaactgggcatcgtggcgccggtcggccgcaaggggctggcgagcctgctcgcgatcatcgccgacgagaccgacgcacggctgccggcggccatgcgctgttgcctcgcaatgctggccgaacagctgcagcttctgagtgtgcagatccaagagaacgaccgtgccatccgtgaaacgatccgcaccagcgaggtcgcccgccggctgatggcaatccccggcgtcggtccgctgctcgccagtgccctggtcgccagcattgccgatccggccacgttcaagtccggccgcaacctcgccgcctggatcggcctcgttccgaagcagaactcgagcggcggcaaggagcgattggggagcatcagcaagcagggcaaccgctatctgcggcagttgctggttgtcggcgcgctggccgtcatccgccaagcccagcgatacggcagcaagcgggcctggctgatcgggctgatgggccggcgggccacccgggtcgcggcggtggcccttgccaacaaaacggcgcggatggcctgggcgatcatgacctcgggtgaatcctaccgcgagccgaaggcggccacggcctgatcttggaagtaaagacgcgatccaccgagcaggacaaggagattggcaagggcaatcaggcaggtgatgcggacaacggtcgacaccgtcggggcgggaaaacccatttatcccagcgcacgtctttcgagtgcgggctcttggttgggactcgtccccgcgaagaaggcatcagggcctgcggccatgtacgcgccgcatcacaaggccgaacacatggtcgcaccgaccaacgccgcagatctcgcacgaaaatccttgccaacggagagccgtccacaca

SEQ ID NO: 3808 - DNA, 1310 bp, unidentified
  source 1..1310: mol_type = unassigned DNA; note = element_5b20e9f
  misc_feature 1..2: note = core
  misc_feature 3..263: note = LE
  misc_feature 264..1265: note = CDS
  misc_feature 1266..1310: note = RE
  misc_feature 45..212: note = bridgeRNA
cttgtatattaaacccatctctgaaacacaggataatgtaagaaagaagtttatagttgtaactgattttctggggaagccgccccgaccttaagccttgagcttgttcgtagattggctccccaccctcgtcatccatgccgtggagtatctaagacctgtaagcgtaagcttctgagtctgcattcacaaggacggtagatgaagtgccagggttgggaaaccagtaatcatcataacaaacacccagtcagagatgaaaaatgaatcatataggcattgatgtaagccacaaagaattgatcgttgtcgtcagcgtcaatggcaaggcccgtaaagccaaaagttttgaaaataccgcaatagggcatcaggccattatcgaatggtcatcaaaattaaaaggcggatcccgcgtttgccttgaagcgaccgacgtttaccattttgatttggcggtcgcgctcagccgcgccgaaggcatcggggtgatggtcatcaaccccaaagccgcccatcactttgccaaggtattaatgaaacgcagcaaaaccgatgcggtcgatgcggaaacattggcgatttattgcgaaaggatgccctttgaaacttggcaacgtcctgctgacgaaactattgccttaagggcgatggcgcgaagaatagccgccttaaacaaactaaagacgcaaaccaaaaaccagttgcatgcattaaaagccaccgaagatacgccggacttcgtgatcgggcacacagaagcattggtcgacgtcttgcaaaagcaaatccgggcacaccgggacagtgcgctggaactgatccgacagcataaggcactcacccgcgcctttgcgttaatcaccggcatcaaaggcattgccgaagccagcgccgtgcaaatcttggctgaattgatggttttgcctcatggcatgacggcaaagcaatgggtggcctacgctggcctagacccccgatgctttgaatcaggcagtagtattgcgaaaaagccccgcatcagcaaagccggcaataagttcattcgtcaagccctttacatgccggctttagtggcgacctgtcatgagccgaatatcaaaagctattaccaccatttgattgaacacaatggcttaaagaagatacaagctatctgtgccgtgatgcgtaaattactgcatgccatccatggcatgttgaaagcagataaagaatttgacgggactcgtttctatacgatacctgtccaagcaaattcataatagttatgatttttgctaaatccgacttgtgatttaagagagtat

SEQ ID NO: 3809 - DNA, 1551 bp, unidentified
  source 1..1551: mol_type = unassigned DNA; note = element_5b21dba
  misc_feature 1..3: note = core
  misc_feature 4..185: note = LE
  misc_feature 186..1262: note = CDS
  misc_feature 1263..1551: note = RE
  misc_feature 1296..1551: note = bridgeRNA
agatgtaatggatgtctccctgcctacgggcagctcaaaggccgcagaagcataaagatgaacagcgtgaccgttttgggagtgtgcttgttcgctagacgagctggactcttgaatggatacggtatcaaagtgcccgtggcttgatagaccaatgtcttcacaaacaccagcgaggttccgtcatgcatcgtcgtactacccaaagcgcggggcaaatcatcggtcagatggccggcctgcaggtcattggactggacatcgccaaaagcgtgttccaacttcacaccgtggacatgagcacaggcgagattgtcaacgtgcagctcaagcgggccaaggttttagggcacttcgccaaccgtgcaccttgcttgatcggcatcgaagcctgcggcggagcgcaccactgggcccgtgagttgacggcgcagggccatgccgtgcggctgattcatgccaaagccgtgcgcccattcgtgaacggcaacaagaccgacgctacagatgcacgcgccatctggctggcgatccagcagccgggtaccaaattcgtgggcgtgaagacgctggcgcaacaagccacgctcaccttgcatcgtcagcgcgagatgttgatgcggatgaagatcatgcagatcaatgcgttgcgggggctactctatgagtttggagccaccttagcgcgaggcaagaaggcgttgttgggcgagttggaactcgcactggaggcgcttgccaacagcattccacagtatgtcgtcgatagcctgcgcgagcaggcccagcgcatcaagcaactggcgatagacattaaggccatcgaggtgaggcttgctgaggtcctgcgcattgacgtggacatgaagcgtgtggcggcgatacccggggtaggcctgctctcggctacagcggccatcgccactatgggagaagccaaggcattcaagtcggggcgcgaattctgtgcctggctgggtctggtacccaagcaacgaggcacaggtggccgggtaaatcttctgggaatctccaaacggggcgacacctacctgcggactttgcttattcacggtgcgcgtgcggtactgagacatgcgaaagagcccggcccatggctggaacagcttcaagccaggaggccagcgaacgttgtgatcgtggcacaggcggccaagatggcgcgaacgatctgggccgttacggcacgacagcaggactaccaacgaggccaccagagcaccaggccgcttggggcttgaactgatagcagatcaacccgagaaaggaggatgtgaacctttgaaggcgatgaggcagcaacaaagcagcgtgatgtgaaacaggtcagaccgggacgagctaaacctggatgaactaccggacttcaaaagtccgtcctaggagatgaggcgctcgtcagcggattacatcggggccagcggacaaggggcaacccagcgtccacatcacaggccggatacaaggcagcagccgacttcttcacaaagcattgcgggttactactcatagctgggaggcatccataca

SEQ ID NO: 3810 - DNA, 1396 bp, unidentified
  source 1..1396: mol_type = unassigned DNA; note = element_5b23924
  misc_feature 1..2: note = core
  misc_feature 3..80: note = LE
  misc_feature 81..1121: note = CDS
  misc_feature 1122..1396: note = RE
  misc_feature 1092..1383: note = bridgeRNA
agatggggtggttgccgccctccccagacggcatcgcaatgtgccaagaaagtggtgtttacagccactgagcggaaaggatggcgaccgtgacgaaagatattatgatcggggtggatctggcaaagaatgttttccagctgcacgctgcgtcgatgacggggcagccaaagtttcgcaagaagctgttgcggcagagtttccccaggttcatggcggagcagcctcctgcggtggtcgtgatggaggcctgtggcagcgcgcactactgggcccgcgagatgatcaggcttggtcatgaggtgaagctgattgcaccgcaatacgtgaagccgttcgtgaagcgccaaaaaaacgatgcggcggacgccgaggccatcgtgatcgctgcccagcggcctgaaatgcgcttcgtccagccgaagtcggcagagcaacaaggcagggctatcttgtttcgagctcgagaacggctcatccgccagcgtaccgaactggtcaacgcactcagggcctgcctctatgaatacggccatgttgttccgcaggggattcaccagatcgggcggatcgaagagatcctggatgcgccgcacagcgacttgcccgatttgatgcgcgaggagtgccgggaattgctggaacaggtggcggaaaagtcggtccgcatcaatgcccgcaccgggaagatcaaggcgctggcggctgaagatgatacggcgcggcggttgcagacaattcccgggattggtccattgaccgctctggcagtcgaagcctttgccccaccgatggagaatttccggcgcggtcgcgactttgccgcttggctcggcctcgttccacgccagttctcatccggtggcaaggagcggctcgggcgcatttccaatgcaggccaggctgatatccgcagacttctgattatcggcgcgatgtcgcgcctgaactggctgggccgcaaatcgattccggaaggttcctggttggcgcgcatggtcgcgcgaaagccaaggatgcttgtggcgatcgctttggccaacaagatggcgcgaaccgtctgggccatgctgacaaagaacgaggattaccgggatccggtgcaggttgtggcagcatgatcgacatgccgcaaaatcagtctgacgtcggataaagggggtgtgagaaggcgacgacccgaatgggcaaaatgatcgaacagatctggatcaggaaaaccaggtgaatgacgagagcttaaagctcgacggtcagatttggacttgattcgcagatcaccataccggccagcggcttctgaaaatgccgtattcaaaggccttacagaagaccgcactcgatcacacgcacattcaatcggaaaccctcttgcacaacgggcggcaaccacaga

SEQ ID NO: 3811 - DNA, 1466 bp, unidentified
  source 1..1466: mol_type = unassigned DNA; note = element_5b2b783
  misc_feature 1: note = core
  misc_feature 2..246: note = LE
  misc_feature 247..1449: note = CDS
  misc_feature 1450..1466: note = RE
  misc_feature 10..232: note = bridgeRNA
ccgttacctttttcatgacgccggtgtccgggaggatgaaggcgtaggtaaccagccggccccggcatgatgtccgcccccagtcgcttatgatccggggggtgtagtcaccggggtcggtactggttcacacggaccgctaatagaagcacgacccgtcaggcgggactttgtaacgtggatgcgggcgagtgaaccacctggtcacctcacctccacccctgcgtgatgaagaaggtgaccaccatggaacatcagctctacctcgggatcgacgtcggcaagaccgcccaccatgccaccggtttgagcgctgagggcactgtcgtgcacgataaatccctcccgcaatccgaacccaagatccgtgagctcctccaggacctagccgctactcacgggcctgtgctggtggttgtggatcaacccaagaccatcggtgccctggtgatcgcggtggcccaggatctgggcatcgaggtggcttacctgcccgggctgaccatgcgccgggtcgcggacctgcacccggggcaagcgaaaaccgatgcccgggatgcgttcatcatcgccaacaccgcccgcaccatggcccacaccctgcgtgggattaccctgaccgaggaagacatcgccgaactgtcgatgttgtgtgggttcgatgatgacctcgcctcccagatcacccaagtccgcaaccggctgcgcgggttcctcactcagatccaccccgccctggaacgcgtgctgggcccgcgactggcccacccaggggtgatcgcccttttggcccggcactcttccccggcccgattgaagaccgctggccgcggccatgtacgagctctactgaagaagcacgcgccccggttggcggagaaactcaccgaggagatcttcaccgccctggccgaacaaaccgtgatagtcacgggcacctcggcggcggagaagatcatcgggcgcctggccgaccagctcgcgcaactgggcgcccagcgggtggagatcgagaccgagatcctcacggtggtcgatgcgcaccctctcacccaggtcctgacctcaatgcccggggtaggggtcaggacagcagcacggctgctcaccgaagtcgtgggcaaggacttcaaagacgccggacacctggcttcctacgccgggatcgcacccgtgacacgcaggtccgggacctcgatccgcggggaatcaccctcccggcggggcaacaaggtcctcaaacgggctttgttcctctccgccttcgcctcgctgagtgctagccccgcttcacgggcctattacgatcgaaaacgggccgagggtaaacgccacaaccaagctgtgatcgcactggccagacgacgaaccgatgtgctctacgccatgttgcgcgacggatctttctaccaagaacccaccccaccgaccgtggccctagccgcttgacgaaaaccatagaagca

SEQ ID NO: 3812 - DNA, 1381 bp, unidentified
  source 1..1381: mol_type = unassigned DNA; note = element_5b31d6e
  misc_feature 1..2: note = core
  misc_feature 3..87: note = LE
  misc_feature 88..1119: note = CDS
  misc_feature 1120..1381: note = RE
  misc_feature 1149..1369: note = bridgeRNA
tgatgctgtggacggctcctcccccggcacgagagtgccaaagatgtgggcgccgcttgaggctcccacgattcggaggagctacccatgcagacgatttcgaccatcggtcttgatatcgccaagtcggtttttcaggtacatggcgttgatgcggctggccaagtgattgtccgccgtcagctgaagcgtcggcaggtcttgacgtttttccggaagctgccgccgtgcctcattgggatcgaggcctgtgcatcatcgcattattggtcgcgcgagcttcagtcgctcggccacactgtgcgactgatgccgccggcctacgtgaagccttacgtcaagcgacagaagaacgacagtaccgacgcggaggcaatttgcgaagcggtcaccaggccgaacatgaggttcgtgcccaccaagacgatcgagcagcagagctgcctggtgcttcatcgcacacgccaactatttatccgccagcagactgccaccatcaattcaatccgggcgcatcttgccgagttcgggatcgtcgcgccggtcgggcgacgtggggtcgaacagctgctcgaagtcatcgccgattccaatgacgcccgggtccccgaagtggcgcgagcatgcgtcgccgctctcggggttcagttgcggcagctcaaggcacagattctggaactcgaccgccggatcacggcttggcatcgatcgagcgagttgagccggcggctcaatgagatccctggggttggcccggcactagccacggctctggtcgccagcattgctgatcccaaggttttccgatcggggcgggacttctcggcctggatcgggctggttccgaagcagaactcgagtgggggccaagacaagcttggcagcattagcaagcaaggggatcgctatctgcgcagcttattcacaaccggtgcgctggcggtcatccgctatgccaaaatccatgggaccaagcatcggccctggcttgcggcgttgctggcacggcggccgacgaaggttgccgccattgcgcttgccaacaagatcgcgcggattgcatgggccctgatgaccaggggcgagcgctacaagcaacctgccgcactagtggtgtgaagagatcgcgtcgggcacccggcgtgatgtgacggttggaaagggtgaacagcacgcaatgcagagccggtcgatctggcgatcaggacaacccacatgggccatagcatcattgaatgcgcgcttttgaccgggacctgatccgcggagggcattatggccagcggtcacgtgaaccgcgctaacaggccgaacacatggctgctccgaccaatgctgcaagcgtgaagaaaacccttgccaacccggagccgtccacaca

SEQ ID NO: 3813 - DNA, 1401 bp, unidentified
  source 1..1401: mol_type = unassigned DNA; note = element_5b3d676
  misc_feature 1: note = core
  misc_feature 2..224: note = LE
  misc_feature 225..1388: note = CDS
  misc_feature 1389..1401: note = RE
  misc_feature 13..239: note = bridgeRNA
ctacttatgtactggtgctacgaccgcagccaggccaggcttggtcgaggtgaccggcggggtagctctctcatcggctgcccaccgcgagttggtgtggctctcatttggcatgcgtcctgccggtcaccgtggcgcggagaggctcaagaggggtctgcccagctcgaagtagcgctgccctcctcgccggattcagcccggtttgatcgaggaggacgagcgtgggacgcgtcatcatcggcatggatccgcacaagcggtccgcgactattgagatcatcaacgaccgcgagcagatccttgcccaaggcagattcgccaccgaccgtgatggctaccaggcgatgctcaaggtcggccgacagcacaaggaccgtgtttgggcggtcgagggctgcagcggcatcggccggcacatcgctcaacgcctcgtagccgacggggagactgtgatcgacgtgccggcgaagctgtccgcgcgggcccgggtcttcgacaccggtcagggccgcaagaccgacccggtcgacgcccacagcgtggccgtcgcggcgttacgcgccaagggcttacgggaggtggccgtcgacgacgcgaccatcgcgctgcgactactggtcgaccgtcgcgatggtcttggtcatgcccgtacagacctactcaaccgcattcacaagttgctcctggaactggtgcccggcggggcgaagacgttcctgtccgccccgcaggcccggacactactcaacacggtccgaccccgtgacctggtcggatccacccgccggcgactcacgtcagaactcatcaccgagctggcccaggtcgacaagaaaatcaaggccgcgaacaaggagctcagcgaactcgtcgccgccaccggcagtggtctgcaggacctcaacggcatcggcccgtccggcgccgcccggctgatcggcgacgtcggtgacgtcagccggttcgcgacccgtggccacttcgccgcctggaacggcaccgcgcctctggacgcctcgtccggcgaccagaaacgccatcgactgtcccgggccgggaaccggcgcatcaaccgggtcctgcacatcatggccatcgtccagatgcggcacgacaccgaaggtcgcgcgtactaccggcgcaaactcgccgcgggcaagaccccgatggaggccatacgctgcctgaaacgacgcctgtccgacgtcgtctacaagcagatgatcaaagacgccgcatcggcgaggacgggcccgggaggacacgtggggacgactcttcaatccagcgcggccgacccaatccccatggtcgacacttcggaacagtcacttcccggacccgccgaaccccagcctagaacaccgctcctcgccgcctcttgacacagaggggtgc

SEQ ID NO: 3814 - DNA, 1153 bp, unidentified
  source 1..1153: mol_type = unassigned DNA; note = element_5b3fbf2
  misc_feature 1..2: note = core
  misc_feature 3..177: note = LE
  misc_feature 178..975: note = CDS
  misc_feature 976..1153: note = RE
  misc_feature 34..198: note = bridgeRNA
cttgtatcttgaaagcggtttacaatcgctacgtttggatttggcaaggcgtatgcagcccgataccatctggggttcatagcccgtcgtcaagcgaatggcgcatacgctgagccactcatctgaaacccgaacagttgtccgtactccataacgtatttgcaaggaagggtaataatgagtctgccaaatcaactttgtgcgggaattgatgtttctaaagcgacactggacattgctgccagcagtgattttgcacagtttactgctggtaacaacgctgatggttttgatgccattattgtagaactgagaaaacattcggtagctctggttctgatggaagctactggcggtcttgaaactgccgtggcctgtgcgctccaggccaaaggtttttctgtcgccgtagtcaatcccagacaagctcgcgactttgcccgcgctatgggctatctggtaaaaactgaccgcattgatgccagagtgcttgcacaaatggcaggggtcattaatcaacatccggagagaaagcgattcattcgggaactgcctgatacggaacgccgggctcttgctgcaatggtggtgcgcagacgtcagctggttactatgtgggtagccgggcgtaatcggcttcatccctctcacccgcagagcagggagagtattgatatcatcatcaatgcactggaagatgagattgccagagttgatgaaaatatgaacaaccacatccgtacttactttaaagaacttgctgagcgactgagcagtattaaaggggttggtcccatgacgactgcggcattattagccgaagttcctgagcctgggcacctctcaagacgagagattagtgcgttggtaggggtcgcccctgcaaacagggattctggaaccatgcgaggacggagaaccatttttggcccgaacagcgttatatatggccgtgcttgtcgcgaccagatttaacccggtaataaaagccttttacacgcgtctactttccatgggaaaacctaaaaaagttgctctcgttgcatgtatgcgaaagctcctgactatcctgaatgcgatgctccgtaagagcgaagaatgggatgagtcgtatcatcacgttacaccataatttttatacgtaagacagttg

SEQ ID NO: 3815 - DNA, 1398 bp, unidentified
  source 1..1398: mol_type = unassigned DNA; note = element_5b40560
  misc_feature 1..2: note = core
  misc_feature 3..94: note = LE
  misc_feature 95..1138: note = CDS
  misc_feature 1139..1398: note = RE
  misc_feature 1170..1395: note = bridgeRNA
taatgtaatggactccacccaccccgacgccacggcacaatgcgccgatcgggtgacgagcggcgtcgaacccgtctaggatgaggaatccatcatgacctgcgttgctaccgtgattggcctggatatttcgaagaacgtgttcgttgccgtcgggcgtgaagatcagggccgcgaagcgttcaggaagaagctttcgcgacgtcaggtactgacctttttcgctcgcgcgaccccggcgaaggtcggcatcgaggcctgttctggcgcccactactgggctcggtcgcttgccggtcaacgtcacgatgtttgcctgatcgccggacagcacgtcaaggcatatctgaccggcaacaagaacgacgcaaacgatgcggcagccatcgcagaagcccgccgccgcgcaatgacgaaatacgttccgttgaataccgaggcgcaacaggatttgcagatgatgcaccgggtccggcaaagtttgatcgagcgtcgaaccggtgtcatcaaccaggatcgagggctgctgggcgagtatggaattgtgattgccaccggcgcccagacctttcgtcgagaactgggagcgatactcgccagcgatgcgcatggtttgtccgcgtcggcgctcgacaacttccgggatctatctcaccagttggacgatctggaagaacatctcgcccagtacgacagccgtatcaggcacgcagcgcgcagcgatgagcgggctcgacgcctgatggaggtgcccggcgtcggcgtcctgacggcaacggcgctgctggcgtccctcaatgacgcgtcgcccttcgacagtggcaggcactttgccgccaacatcggactggtacctcacgagcacagcacgggcggtcggcagcgcctgttcggcatcaccaagcgcggcgatcgctatctgcgcatgctgctgattcacggcgcgcgaagcgcgttgcaatgggcgcataagcgaagtgaccgaatcttgcggtgggctgcagaccttcagcaacgcaaaggcacgaacgtagccgccgttgcactggcgaacaaactcgcccggatcgtctgggcgctgctcgcacacggtcgtcactatgagtcagcgcacctcgccggcatgacggcgcgctgagcgccgccctcgagaacgtttgaagttctgccacggttgcgaaggaacgagagaaagatgcacaactggtaaaaccagcgtcaggaaaatcaggttagcgtactggcttctgaagccgctttcgtatttggaccctgacgtgcgcactgcattgtggccagagcatcccggtgctcacccgaaggccggatagatacgcgcaacctttacccagtcgttcatcgacgatcgtcccttgcaaaacgggtggagtccataga

SEQ ID NO: 3816 - DNA, 1354 bp, unidentified
  source 1..1354: mol_type = unassigned DNA; note = element_5b43397
  misc_feature 1..2: note = core
  misc_feature 3..80: note = LE
  misc_feature 81..1097: note = CDS
  misc_feature 1098..1354: note = RE
  misc_feature 1096..1341: note = bridgeRNA
tgttggggtggacggccccctacggcatcggatgtgccagactgtgagagcgcatccacacagccaggggagccgtccgaatgagcattatcaggattgggttggacacgtccaaacatgtctttcaagtccatggggttgacgagaacgagcaaccggtgttgcggcgacagcttcggcgccaggacgtggtcaaattcttcgccaagctggcgccgacgcgcatcggtatggaggcgtgcggcgcatcgcaccattgggcgcgggtgctgcggagcttggggcacgaggtggtgctgatcccgccgcaatacgttagagcctacgtgcagcgcggcaagaacgacaagatcgacgcggaggcgatctgcgaggccatgagccggccgaaagtgcagccgcggtttgtcccgatcaagaccgtgcagcaacaagcggcgctgacgatgctcggggtgcgcgacttgctggtcaaacaacgcacgatgctgatcaacgcgatccgcggccatgcggcggagttcggcgtcaccgcgccaaagggaccagagcaggtggccgagctgctgcggcgtctggtgagcgatgcgggtgtgccggcgttggcgcaggagatgatcggcgagctcaccggccagcttgccgcgctggacgccaagttgacggcagtccaggcacgactgacggcttggcatcggcacaatcagaccagccaattgctggcgacgatccccggggtcgggccgatcagcggcgtcagctttgcgctcaaagtaccagacccgaaagtgtttcgctcgggccgacacttcgcggcctgggtcgggataacgccgcgcgaaaactcgaccgccggccgacaacagcttggccggatcagcaaacagggtgatgaggatctgcggcgactgctggtgctcggggcgaccgcggtcatccagcaagccaaaccgggccgtgcctcgccgtggcttgtggatttgttggcgcgcaagccgaagaagctcgtggccctcgcggtggccaacaaaatggcgcgcatcatctgggccatgatgatcagtggcgaaatctatcggcgtccgcaggcggcctgaccccgcccgccgccgtaactggcacatcaacacctggcaaggactgcaacagcaagatggtaatcggtcgatccgaggatcgggacaacccgaggtatccattgatgctcagacatcatcgccatgtttgggacccgatccgcgtaccccatctgggccagcggtcatccgaccgcaccaaaaggccggacatatgactgcattcgaccgcgcccatcccgttgccaaggccttgcgaggcgggggccgtccacata

SEQ ID NO: 3817 - DNA, 1332 bp, unidentified
  source 1..1332: mol_type = unassigned DNA; note = element_5b47b76
  misc_feature 1: note = core
  misc_feature 2..57: note = LE
  misc_feature 58..1089: note = CDS
  misc_feature 1090..1332: note = RE
  misc_feature 1110..1323: note = bridgeRNA
taatgggatggtccgccaccgagactctgtgtagagtccggggccaggaggcattccatgaaactacacgtagtcggcattgacctgggtaaaacggttttccatctggtcggtttggattcgacaggcaatgtggtggtccgcaagaggtgttctcgccggcagctactagcgttcactgcgaatctgcaggttgatttgattggcatggagtcgtgcagcggctcgcattttctgggacgcgctttgcgtgagcaggggcaccaggtgcgattgatgccagcgcagtacgtcaagccgtacgtgcagaccaataagagcgactacatcgatgcggaagctatagcggaagcggtgcaacggccacggatgcgcttcgtgccgatcaaatcaaaagagcaactggatctccaagctctccatcgagtgcgtgaacgttgggtgatgcgacgcacggccgtagtgaaccagatccgcagtcttcttctggaacgaggcctcatattacccaaaggccgatctcatctggaggaagctctgccgcggatcttggaagatgccgagttgccgctgtcggggtcatttcggttgctgttggctcagctgaagctcgaactggaacagctttccacacgtatcgatcagctcgatacggtcattctgcaaagagccaaagaggatgacgcctgtcagcggctgaccgctattccaggagtgggaccggtcacggccaccgctctgattgctgcggttgggaacggaaacgcctttcgaaaaggtcgagatttggcggcgtggatcggcatggtcccgactgagcactccagtggcgggaagcaaacgttattgggcatcagcaagcgaggcaactgctaccttcgacgcctcttcgtacaaggcgcccgcagcgtcttgcaacagcgacatcggcagtctccaggtctcagctgctggttagctcaattgttggctcgcaaacatcagaacgtggtcgtcgtagcgttggccaacaaggtggtccgaatggcttgggtggtgttgtgcaggggtgaacgctatcgtgctcccgtccttgccacatccacctaaaatcccggtttagaaaaacattcttccggtttgctcgcggattgagatgggcaatgggtcgatcccacgctttcggaacctgatatcgccaaaggtctctagcgaggccgtccagtttatagggacgaaagcgagcggatgtccatcatggccaggagtcattgactccactaaaggccgaatacattggcgcagaccaactgccaagctcgtttcgcttgcaactcggcggcggaccataca

SEQ ID NO: 3818 - DNA, 1330 bp, unidentified
  source 1..1330: mol_type = unassigned DNA; note = element_5b4878b
  misc_feature 1: note = core
  misc_feature 2..92: note = LE
  misc_feature 93..1097: note = CDS
  misc_feature 1098..1330: note = RE
  misc_feature 1102..1324: note = bridgeRNA
gaatgaaagagacttcccccgctgctcgatcggcatcgatgtgccagagtggaagtgtcgtcgtttccaactcaatagagaggggggaagtcatggcacagattactaccgtgggaatcgacctggcaaagagcgtgttctcgctgcacggggtggatggcgcaggtcgcgtggtgctcaggcgatcggtgcgccgcgatcagttgcttgaggtggtgacgggtttatcgccgtgtctgatcgggatggaagcctgcagcggtgcgcacgagtgggggcggcggttccaggagctggggcacacggtgcggctgatggcgcccaagttcgtagcgccgtaccgaaagagcggcaagaacgacggcaacgacgccgaggcgatctgcgaggcggtgacgcggccgagcatgcgctttgtgccggtgaagtcggccgagcagcaggcgctgctggcgatgcaccgggtcaggcaagggttcgtcgtggagaggaccgcgaccatcaaccggctgcgggggttgctctctgaattcggagtggtgctgccgcttcggtcagtgacagtacgccgccaggcagccgccgcggccgagaacctgcccgagctcgcacgccgcgcgatcggcgatctgctcgagcagctgcgcgtgctcgatgaacgcatcggtggctacgaccgggagatcgaagcccaggcccggctctgcgagccggcgcagcgcctgatgaagatccgcggcatcgggcccaccacggcgcttgccatcgtcgccaccgtgggcaacgcgcgggagttcaagaacggccggcagttcgccgcctggatcggtctcactcccagccaatactccaccggcggcaagccgcgcctggggcacatcagcaagcggggcgacgcctacctgcgcaacctgctcgtgcagggcgcgcgatcagtgctcaacagcgccggcatgcaccaggaccgcatgtcgcgctggatactggaactgcagccacgccgcggctactaccgcacgctggtggcgattgccaacaagaacgcgcgcatcgcctgggcgctgctcgccaagaacgaatcactgcgcacggcatgaacacatccatccgctgagactgcacttgacgatgacgaaacggtcaaaccggtgctcggagaacctgatcaaattcaacggcagcacgaatgccgactaacgagagaggtccgggcatgcggctttcatcggggccagagcattcatgctcacaaacaggccggttatagtgacgcagtccgaccctccttcgtcatctccgttaccgttgcagcaacggggaagtccttata

SEQ ID NO: 3819 - DNA, 1363 bp, unidentified
  source 1..1363: mol_type = unassigned DNA; note = element_5b51ad4
  misc_feature 1..3: note = core
  misc_feature 4..245: note = LE
  misc_feature 246..1037: note = CDS
  misc_feature 1038..1363: note = RE
  misc_feature 3..219: note = bridgeRNA
cttatattatatttagcgcagttagctactgccaaagcccaagtggtatacttggaataagccactgtggattagttcatttcctccaatcgcttgacgatttccgaaaggctctaaccacagcttttgtttcaattggtaatgagtttgataacgcatagacgttttatctcgtctaaggtaacaaggcaaaaagttcgtggataaccaagtagacttgaaatactatatctggaggtactcccatgctttatgtgggcattgatatcgctaaaaataaacacgatgttacagccttgaatgttccaggaaaaactgttcttaaaccactcactttttcaaataataaagctggttttgaactcttagatctgtctcttcgacagctcaaccaagactgtctcatcgctcttaaacttctttctgaccccaatcgtgaacaatttcaacacgataatcggcaagtagaactaaaaatactggctagacatattcatcgtctcaagaaaaaacagtctgattggaaagtacaatacactcgttgtcttgatatcatctttcctgagttggataaaatcgttgaaaagcattcagaatatacctaccaactcttgacatgctaccctaatcctcagaaaaggcttgaggcaggatttgataagctgatagaaattaagcgattgaccgcttctaaaattcaggatatcctctcagtcgcacctcgttctatcggaacaacatctcctgctcgtgaattcgaaatcatcgaaaacatcaaacattacaagaggctcattgacaaggcggaaacatgtgtcaatgacttgatggctgagttcaactcgatcataacgacggttactgggattgggaatcgtttaggggcggtcattttagccgagattcgaaatattcatgcctttgataatcctgctcaattacaagctttcgctggactggattcttctatttatcagtcaggtcagattgatttagctggaagaatggtcaaacggggttcccctcatctgcggtaggtactcatacaagctgccaaagcatgccctcgcttttcgcctgcttttaaggcctatcttaagactaaattagaataaggaaaacattacaatgtagccatcatccaccttgcaaaaaaacttatccgaaccctgttttatatcctaaaaaagagctgccatttgacgaacaaaaagtgatgtaatttctgaaattaacacaggattacctttgaaaaaatggactttttcaagggctttttgccgtgctctaaaatcatcgccaaatcatcaaattgaaataagaaataatttagataaaactattgacttttcttatagtttgt

SEQ ID NO: 3820 - DNA, 1577 bp, unidentified
  source 1..1577: mol_type = unassigned DNA; note = element_5b589d4
  misc_feature 1..2: note = core
  misc_feature 3..253: note = LE
  misc_feature 254..1456: note = CDS
  misc_feature 1457..1577: note = RE
  misc_feature 32..273: note = bridgeRNA
ttagtaccataaaagtgtagttgttagagagtaattaactctaacatctgcacttattttattataataaagggagtaattggtctgacgagggcttatttgggtcattgcatccgtcaaaaaaaccgttaaccaaccccttattataagcattcgattaagcaggtagggattcgctcccgcgtaaccaactaaactggatggtaataagtgtggctggaacaattacaaaaaacagtataggaggttcaaaatgataagcgtaggaattgatatatcgaaggagaaaagtaccatctgcatacttaaaccatatggcgaaatagtgtgccgaccttttgaaatgcaacatgtagaaaaggatttggaagaatttcatggtttgcttcaaaaattggatggagagatacgaattgtgatggaggctactggaatttaccatttgcctgtcctaacattccttcatgacaaaggatatttcgtatctgttgttaatccatatgcaatgaaaaaatatgcgaaggacaacaatatcagaggggcaaaaactgataaactagattccatgatgattgcaaactatggaatcgagaaatggttcaaattacaaaaatatgagggcgatgaagaaacctatgcggaacttaagcttctaggtcgcagataccgatactatatggagcttcatgtaaaagccttgcaggaattgacgcatctcttggattatgtgatgccaggtatcaagaagatatttaacagttggaatgaaacgaatggaaaggataaacttagcgattttgtggaaagattctggcactttgatctaattacatctatgagccttgaagagttcacagagaaatatattgcctgggcaaaagaaaagaaataccaccgaagcagatccaaggctgagtcagtctatgaattagcttcaagtggcattcctacactgtcatccggtactccatcgaccaaaatgttagtacaggaagcagtctcaacattgagaactgtggatagctctctgtctcttattttaacacgaatgcaggtgcttgcgaagtcccttcctgaatattcaacggttagagaaatgggtggagtgggagatgttcttgcagtaaaattgattgcagagattggtgatgtgagaagactgcacaacgcaaaggctctcatagcatgggctggaatagacccgccaccatatgaatcgggacagtttatcggatcaaaacgtaagataacaaagcgaggattttcaacgcttaggaaggtcggatatgaagtgatgcgagttttaaagagtcatcctgcgcctaaagacgatgctgtctataactacatcttaaaaaaggaaagagagggtaaaagtaaaaagcatgcaaagattgccggtttgaataaatttctgcggatttattatgcaagggtaatggaagtttaccaataaagaaaaatcttatgtgattatataggctggaaacaacgccagtctttttgttgtacacagaaatattttaatgaaataatttttaaaacctgccacaaagtacttgacttttgttagcagg

SEQ ID NO: 3821 - DNA, 1433 bp, unidentified
  source 1..1433: mol_type = unassigned DNA; note = element_5b6bb0b
  misc_feature 1: note = core
  misc_feature 2..78: note = LE
  misc_feature 79..1137: note = CDS
  misc_feature 1138..1433: note = RE
  misc_feature 1200..1424: note = bridgeRNA
taatgggatggtccggccgtgctcctgccccaccagcgttagaagctgggaaggggcaccaaagacaaggagcgcgccatgtcccagaagcccgagagtacaattgccatagttggcatcgatatcggtaagaactcattccacgttgttggcctcgataagcgcggcgccattgtgctgcggcagaagtggtcgcgtggccaggtggaggctcggtttgccaacatgccgccctgtctggttggcatggaagcctgtgttggggcgcatcatctcagccgccggctcaaggcgcttggtcacgatgcccgactgatgccagcgaagtatgttcgtccctattccaaggggcagaagaacgacttccgcgatgccgaggcaattgccgaggcggtgcagcgaccgacgatgaagttcgtcgcgaccaagaccgctgatcagctcgatctacaggcgctgcaccgggtacgggagcggcttgtcagccagcgcaccggcatcatcaatcaaatccgcgccttcctgttggagcgcggcattgcggtgcggcaggggcagcgttttttacgtgccgagctgccgcgcatcctgaccacgccaccagatgtcctgtcgcctcgcatggtgcgcattatcgaagatttggctggcgattggcgtcggctcgatgagcgggtcgagaatatgtcgaacgagatcgaggccatcgcgcgccaggatgccggttgcgagcggttgatgagtgtgcccggtgttgggccgatcatctccagcgcaatggtggcggcgatcggcgctggcgatgtgttcaccaagggccgtgactttgccgcctggctggggctcgttcccaaacagatctcgaccggggaccgtaccatcctcggcaagatatccaggcggggtaatcgctacctgcgagttttgttcgtgcaggcagcatgggtcgtgctgatcaaaccgaaaagctgggagcgccacgggctcaagtcctggatcgaggcggccaaaaagcgactgcaccgcaacgtgctggcgatcgcgttggccaacaagctggcccgcatcgcttggtcagtcctggcccatggtcgggacttcgaggcaaggtcgatcgccaccgcccaacctgtttgatcgctgaacccgagaacgttagatgaggaaaccgcgatgacgtagccagattgacaacccttacctgccgaggtctgcgagaggttgagacgagatggaggttcggtcttcccggcgcttgcgaacactggtgacccacatggcccgttgaggcctgtccgttaatgagaacgcacgcgcgctgatatccatagtggcccggagcaaatgctccaatcaaaggccggatacattgatgcaagaccgctaccgccagcttggcaaaatccacttgcaacgcacggccggaccataca

SEQ ID NO: 3822 - DNA, 1165 bp, unidentified
  source 1..1165: mol_type = unassigned DNA; note = element_5b6fc0b
  misc_feature 1..2: note = core
  misc_feature 3..202: note = LE
  misc_feature 203..1162: note = CDS
  misc_feature 1163..1165: note = RE
  misc_feature 3..178: note = bridgeRNA
cttgtatgtttagacttgaaggggtggtgggactaaaagccggaatctgactctagccagtacagaccgtgggagacttcgccccaccccctcacccaaagcgccgataaggaatgcatcggacaagcaccgacgatagaagcaagccagcgccagggtgaagccccaacaagcctctaaaccctaactcggagagttttgtatggcaatccgtgtgtcacgctcagtcatcggtgttgatgtcgccaaaagcgaaatcgtggtttatcaagctgatctggaccagatccagatcatccccaacaaccgctcagccctcaagcagtggttggagtcattgccgtccagtgcgattgccattgaggcaaccggtatctttcatatggacaccgttgagctcgcctatgaaatgggccatcaggtctacgtcattgacggttttcgcctgagtaattaccggaagggcataggtgggcgggccaagaccgatgcttcggatgcccgtttgctggcgcggtatttgaaaaatgaaggggatgatttgcgtgcctggaatcccccaccagccgtctataccaggcttcagagcttgctacgtaggcgtgcggcgctgatccaagcgaaggtaagtctgacccaaagctgggctgatgagccgcttctgaaagaggcctttaagagtcatgcggactcaatggtcagacttgatctactgatccagaaaaagatcagggacaccctcaaggaggcaggacttctgagtcaggtagagcgttgccaagcgttagagggggttggttttttaacggcaacggccctgacaatggcttttcagcgtggtgagttcaagagcagcgatgcctatattgcatttttaggcatggatttgagggtgtctgactcaggacagaagagtggccggcgcaagctgacgaagcgaggagactcagagatacgccgtttgctgcacaacgcggctatggctgcgagccgatcagcgacgtggaaaccgctatacgagagctatctggcaagaggtctgaagaccacacaggccctggttgcgctggcccgcaagcttgcgaggatcgcgttttccttgatgaaaaatcaaagtcagtaccaaccgaaatctatgtttgagggttcccctcaaacatagaat

SEQ ID NO: 3823 - DNA, 1226 bp, unidentified
  source 1..1226: mol_type = unassigned DNA; note = element_5b77bd9
  misc_feature 1: note = core
  misc_feature 2..234: note = LE
  misc_feature 235..1200: note = CDS
  misc_feature 1201..1226: note = RE
  misc_feature 34..223: note = bridgeRNA
tcttaagtttgtaaatcactaaatttaattaataatcagaaagaacaaaagagagaattaaggttactatatacggtgaagcgttagacttcgacaacattgataatcctctctcttttactacttaaacttcgttcagttccctgcctgccggcaggtaggtgtgagacctagatctcgttttcaagttgttgaaatatgagtagcgttgttctttccaaatttcaagttgttatgactaaagatagaaaaatttatggtattgacattagtaaatctgtgtttgatatttataatcaagacacaggacatgatcaattaaagaatgatgaacagggttttaaaaaactactaaaaagtctatcaaaagatgctttggtagtcatggaagctacagggtattatcattacagattagcgcagtttttatataaaaatggcgtattagtatctgttgtaaatccattgtcagtaaagcgttttattcaaatgaaactagcaaaagtaaagaccgataagagtgatgctaaatctatttgtgagtatggtctttttaatgatgttccattatataatgctctaacagatgtacaggcagaatgcttacagctctttaggttattggatagttacgtaaaaaagagtacagctacaaaaaacaaacttcatggagaagacaccttaggaatcccatcaaaaacggtttatcgctctttaaaacgagacttaaaccatttaaagaacgagattttaatattagagaaacgcttattagaattagtaaaacaagaccagcaagaacaactaactttattgcaaaccataccaggaataggtttaaaaacagccttgtttttaatcgttgttaaagatggttttaaaaagtttgaaagtgcagcacagctttgtagttatgttggaattacaccaacgattcgagaatctggaagcagtgtaagagggcggagtagaattagtaaagtaggaaataagaaattaagaaatcttgtgtttttagcagccttttctgcgtataaatataaccgagcatgcaaagccttatttgatagaattgtagctaaaggaaagagtgctaagttagcattaatagcagtagcgaataagttgcttaaacaggcttttgccattgcaaaaagcggattgccttatgatgaaaactttgtttcaaaattagcttaaagttacttgttttttaactcagttct

SEQ ID NO: 3824 - DNA, 1166 bp, unidentified
  source 1..1166: mol_type = unassigned DNA; note = element_5b7d69e
  misc_feature 1..2: note = core
  misc_feature 3..161: note = LE
  misc_feature 162..1160: note = CDS
  misc_feature 1161..1166: note = RE
cttgtaatagcaaaatcgattatcgttggtctgttccgacaggaatgctctgccgcggacggccatccgcggcagagccgctggcgatcggatcgagcccaccctgagtcatcactgactcttccgtagcgtgatcgcgccagcaccttcatcggacccggatggttgccggaacagttggttcgttcaacaaggcggggtcggcgaagatgacgcagattagcacaacggcggggatcgatacatcgaaagccaagctggacgtggcggttcacggccgcgaccagcactggcaggtcgccaatacagcggagggttggctgcttcttgctgccgaactctccaggaacgacgttacgcgggttggcatcgaggccagcggcggctacgaatgcggcgtggtcgatcatttgcggcaccatggcttcaccgttctggtgctgcagccgatccaggtcaaagcttacgcccgcgtgcatttacgtcgggccaagaatgacaagcttgacgcggcgctgatcgctgcctgcacggcaacgatcaatcagccgcggatcgagccggaccagcgtttggccaagttggcgcagcatctcaccttcgtcgagcagatcgaagaggatattgcccgcttcaaggtccggctcgaacatgtaggggatcggcgcctgcgacgcatggtcatgaccgacatcgcacgactaaaggcgcgacgctcggccgaactatcgcgcatcgtcagagcgttgcgcgctcatgacgacctcgctcgccgtctcgacctggtgctgagcattcccggcctcggcgagcgcaccgtcctcgccatcatcatccgtatgccggagatcggccgcgtcagccgcgaggaagccgctgcgctggctggcctcgcgccctacgatgacgatagtggcaagcacaaaggtcagcgacatatcgccggcggccgaggacgtttgcgtcgctcgttgttcgccgcagcgctgccggcggccttccactggaacaaggctctgattgaactttacgcccgcctcacagcacgtggtaaagcccacaatgccgcgctgatcgcttgcgccaggaagctcttgatctacgccaataccgtggttcagcgcggtacgccttggaccgaaagacccgccctgatctaatggttg

SEQ ID NO: 3825 - DNA, 1463 bp, unidentified
  source 1..1463: mol_type = unassigned DNA; note = element_5b8969b
  misc_feature 1: note = core
  misc_feature 2..245: note = LE
  misc_feature 246..1448: note = CDS
  misc_feature 1449..1463: note = RE
  misc_feature 43..216: note = bridgeRNA
cgttaccttgttgatgggtcctttcgtcggggatgatggggcttgtcggtcagtcgctctggcatggtgtcttgcccctgtctacccaatgatccgggggtgttgccaccagagacgattggcagtgggtgatcgctgatgaggggctcggcactgattccagatgcctgtcgtaacgtggatgtgagacgtactgtctagacctgaccgactacattgaaaagtggcagttgagaggagcgaagatggtcactcaagaaacaccgcacgtctttttaggtctggatgtcggcaaaaccgagcactgggcctgcgcagtcaccgcggagcaaaaggtagtgtggaacaaggcactaccaaacgacgaagcgaaactcgtcgacatatacacccgactgcaggagcacggatctctgctagtggttgtggaccagcccgcaacaatcggcgcgctagcagtcgcggtggcccagcacatgggaatccccgtggcttacctgccgggactcacgatgcgacgtatcgccaacctgtattcgggggatgcgaaaaccgatgagaaagacgcgttcatcatcgctgacgccgccaggagcctgccacacacgctacgtgaactcactccagccgacgttgatgaagctaccttggggatgctcaccggcttcgatcttgatctatcccgtcaggtaaaccaggtatcgaaccggatacgcggcttgttcacgcagatccaccccgccctggagaaagtgctaggactgcgtctggaacacgacgccattttggaagtgctgattacttggccaaccccagacaagctccacaaagcgggaagagcaaggatcgatgcaaaactcaagaagcacggagcacgcaggcactcggcatggaccgaagaaatcctgaacaccctggccaagcagaccgtgacagtcaccgggactgatgctgcgggtatcgtcattccgcacctggctcgccagctcattcatctccacgcacaacgcgctgatgttaccagggaggttgaagaaatcgtggtgggccaccctctttacctggtcctgacctcgatgcctggagtagggctcaggacctgcgcagtgatcatcgctgaactctctgggaaaaccttcaccagtgccgcagcgctggcctcctacgccgggctagcaccgactactaggcaatccggtacctcgatcaaatctgaacgcgtcagtcacagtggcaacaaaagactcaaacgggcattgttcctgtcagccttcgcggtaatccgcaccgaccccgtcagtcgcgcctactacgaccgcaaacgcacccaaggaaaacgccacaaccaagccatcatcgccctagcccaccgcagactcggcgtcctctacgctatgctccgcgacggcaccctctacgaaccacccgaaatagtcctagccgcttgacaaacaacatagggg

SEQ ID NO: 3826 - DNA, 1514 bp, unidentified
  source 1..1514: mol_type = unassigned DNA; note = element_5b9824e
  misc_feature 1: note = core
  misc_feature 2..301: note = LE
  misc_feature 302..1426: note = CDS
  misc_feature 1427..1514: note = RE
tgaccattcctttccgccttgctacaaggcacaaaaataaatgaaagcaacttgtagtaaagctatgtaaaaattgttagaatgtacttgagaaagcaaacacactacagagcacgaagaggtgagtaggttcagcgtatactgaactgaatatttatgtgtgtcagatgctctttcaagcacaattaattagggcattgaaccctgtaaacttatctttggagagatatactactcaatctttcagtgagcatccaatccctgtttgtttcctcaaaatattaattttgagggatgtgttgtgttaaaaatcgtttattctgtttgctgtggaatagatgtccacaaaacctttatctattgttgcattgcaactaccgacaacaagggtattaccacctacaaaagcaatcgtttttcgacttttactaatcaactgaaacgatgtgcaacttggctcaaagagaaagaatgtaaggatatttgtatggaatccacgggcaaatattggattgctgacctttttaagcatgatttaattaacagtagctttattcctccggctgatattcatcagttaagggatttaacccgttatcgaaacaagctaactatttttattgtcggtgagaaaaaccgtgcgcaaaattgcctgactgtttccaatatcaaattagattatgtttttacttatgttttcggtaaggcttcgtcaagtatcatcaatgcccttcttctgaatccatcagagaaaatcacggatgtgtctaaatttagaacaaggggtatgaaatctactgatgaagaaatactcgctgcaatagacggtaacatctgtaatgaacaggctgaaaaactcaaaattattcgttcacatatggatagtattgaagagtgtaaggctaatcttgaatcggttattctcaatcttgctgagaagtacctgccaaagctaaatctgattttgagtgttctgggtatcaaatccttttccgcagtttctataattttggaaattggcgttgatatgtccgtgttcccaacatcaaaacatctttgctcttgggcaggtttaacttctcagaacaatgaaagcgccggtaaaaagaaaactactcgtattagtcgtggtggcgcttacattaagcctttattggttcaatgtgcacttgctgctgtcaagagcaacaagcaccccaaaatacgcaatcgttaccttgctctaaaaaagcgtagaggtcacaagaaagcaattattgctatcgctagaactctccttaccgcaatttacaatatcttaaagaaaaatgaaccctacaatccggatttgtacaaaaaatcggatttaccgccccaacataaaactgtcagctttgacgaggctgtattcattcttcaaagacagggatatatcattacttcctgattttcaactttttatttttgccgccttgtgggggcttactttgttatgcctttttttaaggtgtgttaaaatcatattctttcaaact

SEQ ID NO: 3827 - DNA, 1335 bp, unidentified
  source 1..1335: mol_type = unassigned DNA; note = element_5ba3e2e
  misc_feature 1..3: note = core
  misc_feature 4..246: note = LE
  misc_feature 247..1059: note = CDS
  misc_feature 1060..1335: note = RE
  misc_feature 3..220: note = bridgeRNA
cttatattatatttaacgcagttagctactgccaaagcccaagtggtatacttggaataagccactgtggattagttcatttcctccaatcgcttgacgatttccgaaagggtctaacaacagctttttgtttcaattggtaatgagtttgataacgcatagacgttttatctcgtctatggtaacaaggcaaaaagttcgtggataaccaagtagacttgaaatactatatctggaggtactcccatgctttatgtgggcattgatgtcgctaaaaataaacacgatgttacagccttgaatgttcgaggaaaaactgttcttaaaccactcactttttcaaataataaagctggttttgaactcttagatctgtctcttcgacagctcaaccaagactgtctcatcgctcttaaacttctttctgatcccaatcgtgaacaatttcaacacgataatcggcaagtagacctaaaaatactggctagacatattcatcgtctcaagaaaaaacagtctgattggaaagtacaatacactcgttgtcttgatatcatctttcctgagttggataaaatcgttggaaagcattcagaatatacctaccaactcttgacgcgctaccctaatcctcagaaaaggattgaggcaggatttgataagctgatagaaattaagcgattgaccgcttctaaaattcaggatatcctctcagtcgcacctcgttctatcggaacaacatctcctgctcgtgaattcgaaatcatcgaaatcatcaaacattacaagaggctcattgacaaggcggaaacatgtgtcaatgacttgatggctgagttcaactcagtcatcacgacggttactgggattgggggtcgtttaggggcggtcattttagccgagattcgaaatattcatgcctttgataatcctgctcaattacaagctttcgctggactggattcttcttggaagaatgatcaaacggggttcccctcatctgcggtgggcactcatacaagctgccaaagcatgcgctcgcttttcacctgcttttaaggcctatcttaagactaagttagaacaaggaaaacattacaatgtagccatcatccaccttgcaaaaaaacttatccgaaccctgttttatatcctaaaaaagagctgccatttgacgaacaaaaagtgatgtaatttctgaaattaacacaggattacctttgaaaaaatggactttttcaatagctttttgccgtgctctaaaatcatcgccaaatcatcaaattgaaataagaaatagtttagataaaactattgacttttcttatagtttgt

SEQ ID NO: 3828 - DNA, 1461 bp, unidentified
  source 1..1461: mol_type = unassigned DNA; note = element_5bad4bd
  misc_feature 1: note = core
  misc_feature 2..223: note = LE
  misc_feature 224..1447: note = CDS
  misc_feature 1448..1461: note = RE
  misc_feature 13..238: note = bridgeRNA
ctactagacgattgcggtaggaccggcgtctggccagactcggtccaggtgtccggcgggaggctctccacgcggctgcccaccgagtgttggtgtggctctcttccggtctgcagtccgtcgggcaccgtgacgaggcgtggctcgaaaggggactgcccagctcgtggtagcactgcccacctcgccgtcctatcggtacgaggcaagcaggagaacgcttatgacgaaggtgatcatcggggtcgatccccacaagctgtcggcgaccatcgaggtcatcgaccgacacgagaagcggttgggttctggccgcttcggcaccgaccaggccggctacaccgcgatgcgaacctacgcgaagaactggcccgaccggatctgggcgatcgagggatccaacggcgccggccgaccgttggcgcaacgtctgctcgaggccggcgagcatgtcgtggacgtgccagccaagctcgccgccagggtccggctcttcgacaccggccacaaccgcaagaccgacgcccgcgacgcgcactccatcgctgtcgtcgcggtccgcaccaagaccttgcgggtgctgcgcgccgacggggagctcgaagcgttgcggatgctgtgcgaccggcgagacgaactgacccggctgcgggtccagaccgtcaaccgcctccagcggctgctggcagaactggtccccggcacgaccaagaaagacctcacagccctgcaagccaaggcaatcctcgcgtcggtgcgcccccgcgacatcgccgggaagacccgccgcaagatcgcggccgacgagctcgccgacctgatcgcggtcgagaagaagatgaccaaagccaccgccgaactcaaggccctggtcaaggcccgcgggtcacgactgatggacctgcacggtgtcggacccgtggtcgctgcccgcactctggccgacgtcggcgacatcgcccggttcgccaatcgcaacaggttcgcgtcctggaacggcaccgcacccctggacgcctcctccggtgaacagaaccggcaccggctgtcgcgggccgggaaccggcggatgaaccacatgatccacatcgccgcgatcagccagatccgcctcgacaccgaaggtcgggcctactaccggcgcaagctctccgccggcaagaccaagctcgaggcactgcgctgcctcaagcgcaggatctccgacgcgctctaccgacaactcctcgccgatgccgaacgagcagctctggccaccgcgcccgatagcgctggcacgggtccgggagggcactgcggggcgtctcaagaatccagcgcggtcgacctgcccccgcacatcgacacttcggatcagccacttcccggacccgcacaactgacgctacaaccgccgagcaccggcaggaaagccccgccgaggaaagcaccccagaccacgggttgacaacaaaggggagc

SEQ ID NO: 3829 - DNA, 1565 bp, unidentified
  source 1..1565: mol_type = unassigned DNA; note = element_5bb0863
  misc_feature 1..2: note = core
  misc_feature 3..127: note = LE
  misc_feature 128..1240: note = CDS
  misc_feature 1241..1565: note = RE
  misc_feature 1273..1537: note = bridgeRNA
aagacgatatgagcaggacataaaatttggaagctcctcctgcatgcatattcgtggattaggccgacaatagttaatgtccgttcaacactggcggccacgccacattcatgaaaggagcttccttatgctgaatgctaccacgtttatcggtcttgacgtacatgctcgttctattaaagcctttggatttaatgtaattaccggagaagagttttcttcctctttcggctatgaccacgttgcggtttccgattggatatcatctcttccgcaaccagcaaaatgcgtatatgaatctggtgttactggtttcgatttacaaaagaaacttacccaagatggtatcgattgcgttattggagcggtttccaagatgattaaacccgctgccgacaagaagaagaaaaacgatcgcaatgacgcaaaatttcttgcaaggatgctctcggtaggaaatattaccgaagtatggatcccagatgatgaatgcgaagctgcacgtgatcttgttcgtgctttagaagatgcaaccgaagaggtaaagtgctcaaagcaattactttctaagtttctactgcgtcatggtcttatctttaatgaatatagtcctacaggacagagaaagaagaattggactttagcctattggcgatggatcaaagaaattcactttaaggaaaagactgatcaaaaaacttttgaatactacattgaccgagtaaaggcttcccttgaagaaaagaagcgcttggaagatcttgtaaaagaactcgcttgtcttcctcggtggaaaaagcgcattgactcgattcgctgcattaaaggtatcgatatcataagtgctgcaaatctcgtgtttgaagcagatgagtttagccgattcaaaaacgcccgagcattcgcttcatggctaggtcttactccttctgaatattcaagtggagagtcagtaataagaggagggataaccaaagcgggaaacaagcatctaagacgtatactcgtcgagtcttcttggcattatctttatgcttctccatccgctaaagaccttacaaaaggacaatctcctgaccctctagcccgaaaacacgcaaacaaaggaacgaggcggcttactgaaagaaggcgctatctcttagaacgaggcgtccagaaaaacaaagcaaatatagctaccgcgcgagagcttgctggttgggtatgggctgttggcaaaatcgtagaagataactaatcagaacaagagcgcaacatagtaggttttcatttcttaaatacagtagcatccgaagccgttgaggcaaattcaagtcactttttttgcgagcattatcaaatgccacccgcgtacaaagactgtcttttgattgtgatagcctcagccgtagcaacgaattgttcgacgatatatgtcgttatgaacggatattaaactgcaaagacgagcgtcggaatcgacacgcctaaggtcactgtataggaattgaaataaaaggcctgatcctccaattatgagggtcaggccaactattgcctcttgacaaagtcctgctcatatt

SEQ ID NO: 3830 - DNA, 1559 bp, unidentified
  source 1..1559: mol_type = unassigned DNA; note = element_5bc85ac
  misc_feature 1..3: note = core
  misc_feature 4..186: note = LE
  misc_feature 187..1425: note = CDS
  misc_feature 1426..1559: note = RE
  misc_feature 3..225: note = bridgeRNA
cttgtataatgcagaagcattatatttcccttcctattattgttgtttgtataatgcaagcagacgctgtggattggttatgcctcctatcgctcgacgattccattaaggctccaaccacagtattctgcctgtttgttgatgagttagataacgcatgacgttttatttagagcaaggatacaggtggcagaattgatctgtggagaacaagcggcgtccaaattttgcgaagggagttttctcatgatttatgtaggtattgatatagccaagaacaagcatgactgttgtattcttggcatggaaggtcagattctttttgattcgttcaccttcccaaattccaaaagtggatttcaggaacttacgtcatcgattcaagcgtgtttgcaaaaagcaaacgagaaagaagtgcgtgtcgggctggaggcaaccgggcattacagcaccaatcttgtggctttcctccgtaacagcggaatcgagcccgtcctttttaatccgctcagcaccaatctcttccggaaatcgcagaccttacgaaaaacaaaaacagacaaggtcgatgctcgctgtatagcgtccatgctgcgatccgccaactcagccccgcacgtatctgtatcttaccatacagatgaactcaaggcactcactcgaagcaggtatcggttgattggttatcggtctaaactgaaaatttctcttaaccgcctgttggacattgtctttcctgaacttgccggcctcgtctggtctaccacccagaaatccgtctacgccttattactcgaactgcccaatacaaacgcaatttctcattgtcgaatagataaactcacccggattcttcacgactcttccaaagggaagtatggcagggagaaagctcttctgattcggcaggctgccctggattccatcggctcccaaagtccggctcttgcctttgaaatcaggcagactattcatttggtccaaaatgttcaagttgaagttgaccaactggatcaggaaatagaaaacgaagtaaagagggtcaacacacctttgcttacgatcccaggaatcggatacaccttagcctccataatcctggcggagataggcgatattgatcggtttgattctcctgaacaacttttggcttttgcgggtctggaaccgtccactcaccagtccggaaactttagtgccaacaacacacccatggttaagcggggttctacgtatcttcgctgggccatcctgcaagcggccaggcttgttgccatgagagacagcacatttaaagcctatttgaagaagaaacgtcatgaaggcaagcatttcttggtggctctgagccatactggcaaaaaacttgtacgcgttattttccacatgctgaaaacgaatcgggtatttgtgcctcaatcctgatgatgtatttctacatatcctttgaaccaaggcagtttcctctgtctgtttttacatgcgttattttcaaggttcggtttttcatctatgtctggagatttttttacttatctcttgacgtccatatagttagt

SEQ ID NO: 3831 - DNA, 1445 bp, unidentified
  source 1..1445: mol_type = unassigned DNA; note = element_5bd8a04
  misc_feature 1..3: note = core
  misc_feature 4..218: note = LE
  misc_feature 219..1430: note = CDS
  misc_feature 1431..1445: note = RE
  misc_feature 7..211: note = bridgeRNA
tccctaagttcgtaggtgtccggggtaggcgccccggatgcccgggacgacggggtgtggctgatgtggtgtctgccgtgggtggctcggaaggaatggccgccctgtcgttctggacgccctggccactgattcagatctgatgcgggccgtcgctgtttagggacctgttggcggggctgtccacggggttgacctgcgataacaggagttcgggcgtggcggatcggccgctggtgtgggtcggtgtggatgtgggcaaggcggcgcatcacgcgtgcgcgatggacgcggccggcaaggtcgtgttctcgcggaaggtcgccaacgatcagggggcgatcgagcagctcgtcgcccgtgccggccaggcggccggcgaggtgcggtgggcgatcgatctgacgagcagcgccggagcgttgctgatagcggtgctcgtcgcgtccgggcagcaggtggtctatgtgccgggccgggtcgtgaaccggatggccggggtgttccgcggggagacgaagtctgacgcgaaggacgcccgggtgatcgccgagaccgctcggatgcgtgacgacctgaccccggtgacggcgaccgatgacctggtggtcgagctgacccggctgaccgggcaccgcgaggacctgatggccgactgggtgcgtggcgtcaaccggctccgtgacctgctgaccagcatcttccccgcgctggaacgcgccttcgactactcgacccgctcggcgctcgtcctgctcaccggcttccagaccccggaggcgatccgcaccgccggacaggacggtgtcgcgactcacctgcgcgagcacggcgcctggcccaagggcatccccgccatggccgccgccgcgctggccgcggccgaggcgcagacggtgcggctgcccggcgaggcgaccacggcggtgctcgtcgcccggctcgcccgccagctgttggacctcgaccggcagatcaaggacaccgacaagctgatcaccagccggttccggacgcatccccaggcggagatcatcgagtcgctgcccgggctcgggccgattctcggcgcggagttcgtcgtggtcaccggaggcagcctggccgcgttcgcgacgccgggccggctggcgtcctacgccgggctcgtgcccgtcgcccaggactccggccggatcaccgggaacctgcgccgtcccaagcgctacaaccgcagactgcgccgggtgttctacatggccgccctctccagcatccgcactaccggaccctcgagaaccttctacgaccgcaaacgcggcgaacggctcatccacacccaggccctgctcgccctcgcccgccgcctggtcgacgtcttgtgggcactgctgcgcgacggccggaagttcaccccgaccgcgccccaacccgccatcacagcggcttgacacggtcattcagat

SEQ ID NO: 3832 - DNA, 1529 bp, unidentified
  source 1..1529: mol_type = unassigned DNA; note = element_5bdbb88
  misc_feature 1..4: note = core
  misc_feature 5..250: note = LE
  misc_feature 251..1504: note = CDS
  misc_feature 1505..1529: note = RE
ctcactggtgcaccatcctcttgtcggtagtcatagatgggctgccggtacacccctggtccccaccggaccatcgccacgagcgctcgactctcgaggtccagcatgagttctgcgaggtccggtggcccaggacccgccgaccggctacagggctatgcgccgatgagcgccgatcagtgagcgaccggctgcagggtcccgggaccaccgggtgttctctcactgctccaacagcgaggaaccaaccatgagtgtgacccccgaaacgagcaccacaccagcccgaccccgagtctgtgcgggactggactgggccaaggacgaccacgtcgtgtgcatcctcgacaccgacggcgaggtgatcgaccgcttcaccatcgcccacaccgcagcaggcctcaaacgcctcgtgcatcgcctggcccgcatgggcgtcgccgagatcggtatcgaacgcggcgacggaccggtcatcgaggcactcctcgcgaccgacatcaccgtgcttgtcatcagccccaaccaggtcaagaacctccgctcgcgctacggctcggccggcaacaaggacgaccgcttcgatgcctacgtcctggccgacgtcgtgcgcaccgaccgacgccgactgaccccgctgcaacgctcgagtcccgcgaccagggcgctgcgcaccagcgtgcgtgcgcgccgcgacctcgtcgagcaccgtgtcgcgacgaccaaccagctgcgcgcgcacctgcagatcgtgctgcccgccctggtgggcctgttcagcgagctcgactccgctatcagcctgtccttcatcgaacgcttcaccacccagaccaagatcgactggctcacccccacacgtaccggcgagtggctcaagaagaccggctacaccgaccgcaccgaccccgccctgctgtaccagcgactcatcgccgcaccccgaggaaccaccggcaacgacgccgagaccgctgccgcggtgacgctggcctacgtcgcagtactgcgagccttgaacacccagatcgaggccctcgcgcacaccatcagcgagcagttcgacgcccaccccgaccgcgagatcttcgcgtccctgccccgctcgggcaccctgcgcgcagcccgactgctcgccgagatcggcgatgcccgcggccggttcccgaccgccgactcgctggcctgcctggccggggtggccccctcgacacgacagtccggcaaggtcaaggccgtcacgttccgctggtctgccgaccgcgacctgcgcgacgccctgtgcgacttcgccggcgactgccgacgcgccaacgtgtgggccgacgacctctacaaccacgccagagcccgcggccacgaccacccccacgccgtacgcatcctgggacgagcctgggccgacatcatctggcgctgctggcaagaccgcctcccctaccaacccgaacgacacaacgccctccaacgcgtcctcaaccaacgcgcacaacaagccgcctgaaacagggaaggttgacacagggcaa

SEQ ID NO: 3833 - DNA, 1352 bp, unidentified
  source 1..1352: mol_type = unassigned DNA; note = element_5bdc853
  misc_feature 1: note = core
  misc_feature 2..74: note = LE
  misc_feature 75..1100: note = CDS
  misc_feature 1101..1352: note = RE
  misc_feature 1103..1342: note = bridgeRNA
tatggatggctcgccccttatccgaatcgttgtcatcctacgacagcaggtcgtttgaggaaggagcgaaggtcatggacgtatcggttctgggaattgatctaggcaagaacagctgcagcgtggttgggctggatgcgaccggcaaggtcgtcgtccgccgacggatgcgccgcgacacggtcatcacatacgccgcaggtctgccggcttgcgtcgtggcgatggaggcctgctgcggagctcatcacatgggacgggcgctggcacgacaaggccatgccgttcggctgatgtcgccggaatatgtccgtccatacgttaaggcgcagaagaacgacgaccgcgacgctgaggcgatcgcggaagcggcaacacggccgaccatgcggttcgtcgagttgaaaaccgaggaacaactcgacatgcaaacgctgcatcacatccgtgaccagcttgtcggtgatcgcacctcgttgatgaaccagatcagaagtcttcttctggagcgcggctacatagtcccgcaaggacgcgcaaagcttgccgtccggctgggtgagatgctcgatggtgacgagccagtgctgggctctcgtatccaccggctcgtcagtgatatgcgtctgcgctggattgcccttgatgaccggatcgcagatctcaatgccgagtttaccgaggctgcccgctcggatgagcgaacgcggcgcctcctgactattcctggtatcggcgcgctgaacgcgacggcgctggtagctgcagttggcgacgctcgaacattcggacggggcagggatcttgccgcgtggcttgggctcgtgccgcgtcaagcaacgaccgggggtaaaccgcgattactcggcattaccaagcgcggaagccgctatctgcggaaaaacctgatccagggtgcccgggcatcactaccgacgatgagcaagagcgacacacgacttggcgcctggctacgcggccttttgtcgcgttcccatcacaacaccgtcgtggtggcgctagcggccaagatggcgcgcatcgtctgggcgctgctgcgtcatgagcgtacttacgatccagccgcacaagcggcgtgaacgagatcagccgatgcaccttgcaccggctggatgatgtctgcgggaggtaagtgaaagatggcctgacagtcgaccggtgacctggaaccctatggcttaaaatggcactcgatgccggcccctttatgaggaccaggacgcgcggatctccatcttggccaacgacctcgcgtcgaaaggccggatacgttttcgcagactgctcagaacatcagacacaaaccgcttgccgacggggcgagccatacg

SEQ ID NO: 3834 - DNA, 1326 bp, unidentified
  source 1..1326: mol_type = unassigned DNA; note = element_5be6fca
  misc_feature 1: note = core
  misc_feature 2..90: note = LE
  misc_feature 91..1095: note = CDS
  misc_feature 1096..1326: note = RE
  misc_feature 1094..1320: note = bridgeRNA
gaatgaaagggacttcccctggccggcgacggcatcggagtgccaagattgaagtgtctgtattcaatctaaatagccggaggggaagtcatggaacagattactactgtgggcattgacctggcaaagagcgtgttttctctgcacggtgtggatggcaaaggcaggatggtgctgcgccggacggtgcggcgcgatcggctggtgcagacggtggcagggctcgcgccgtgcctgatcgggatggaagcgtgctccggggcgcatgagtggggccgccggttccaggcacacgggcacacggtgaagctgatggcgcccaagtttgtggcgccgtaccgaaagagcgacaagaacgacggcaacgatgccgaagcgatctgcgaggcggtgacacgcccgagcatgcggtttgtgccggtgaagtcggtggagcagcaagcgctgctcgcgctgcaccgggtgcggcaggggtttgtggtggagaggacggcgatcatcaaccggctgcgggggctgatgacggagtttggcgtggtgttgccactgcgctcggtgacggtgcgccgccaggcggcgcaggcggccgaggcgttgcccgagctcgcccgaggggcgatcgacgacctgctcgagcagctgcgggggctcgatgagcgcattgaggcctacgaccagcagatccaggcccaggcgcggctctcggagccggccaggcgcttgatgcagatccgcggcatcgggcccaccacggcgctggcgatcgtcgccaccgtgggcaatgcccgggagttcaagaacggccggcagttcgccgcctggatcgggctggtgcccgggcagtactccaccggcggaagaacgcgcctggggcacatcagcaagcgcggggatgcctacctcagaaacctgctcgtgcagggcgcgcgctcggtgctgcagacggcggcctcgcaccccgatcggctctcgcgctgggcgatcgagctgcaggcgcgccgcggctactaccgcacgctggtcgcgatcgccaacaagaacgcgcgcatcgcctgggcgctgctcgcccgcaaccaaacgctacgccagaactgaacccaccgcacgactgcacatcgacgatgacgaaacggtcagaccgacgcccggagaacctggtcaaactggacggcgcatctccatgccgactaacgagagaggaccgggcgtgcggctttcatcagggccagagcactcgaatgctcgccaacaggccggttatagtgacgcagtcagaccttcgttcatcgccaccgcagccgttgcagcgacggggaagtccttata

SEQ ID NO: 3835 - DNA, 1270 bp, unidentified
  source 1..1270: mol_type = unassigned DNA; note = element_5bf0662
  misc_feature 1..2: note = core
  misc_feature 3..226: note = LE
  misc_feature 227..1258: note = CDS
  misc_feature 1259..1270: note = RE
  misc_feature 20..238: note = bridgeRNA
ctgacttgttgaattcggggtcaggacgccagggctggagcccgtagcgtccagggtgccggccgtctggctcgcagcaaccttgccaccctgtcgggttggctcgttgatagcgtgcgggagcggtcggcacccgccgtgacgtggctcaacagaggcgtgtgccccctgaagtcaggctgcccgtcgcgggatcgtctctgtccgccgcgacgaaaggccacccgtgatcaccatcgggatcgacccccacaagcgctcgctgaccgcggccgccctggactcccacagccaactcctcggccagcgacggctgccggtcagcgcccaggcgggccggcagctgctggcctgggcggccgcctggccccagcggcgctgggcggtcgagggcgccagcggcctgggccgacccatcgcccagctcctgatcgccgccggcgagccagtggttgacgtgccggccaagctggccgcccgcgcccgcctgctttccaccagcagcgcccgcaagaccgacctggctgatgccggctcggtcgccgccgccgccctccaccacccccagctgcgcccggtcgcccccgaggaccagacggtggtcctgcggctgctgtcggaccgccgccaggacctggtcgccgaacgcacccgaaccctgagccggctgcacgtgctgctggctgagctgcaccccggcggcgccccccgccagctcaccgctgcgcgggccgccgccgtgttgcgccggacccggacgatcacaccggtcgaccttgcccgcaagcggatcgcccgcgagctgctggccgacgtgcgccgcctcgaccggcacatcaagacggccagccaggccatcggcaccgccgtccgcgaccacggcaccaccctgacccaggtctatggggtcggcccgatcctggccgccaagctggtgggccacagcggcgacatcacccgcttccccgaccgggaccacttcgccagctacaccgggaccgcccccatcgaggcctccagcggcgacgtccgccgccaccggctgaaccggggcggcaaccgccagctcaacaccgccctgcacctcatcgccgtctgccagatccgcgaccccagccccggccaggcctactaccgacgcaaactcgcccaggccaagacccccgaggaagcccgccgcagcctgaaacgacacctgtccaacgtcgtccatgcccacctcgtcgccgaccaccaacgtcgaacccccccgagttgacacacagaggcg

SEQ ID NO: 3836 - DNA, 1386 bp, unidentified
  source 1..1386: mol_type = unassigned DNA; note = element_5bf0d82
  misc_feature 1..2: note = core
  misc_feature 3..212: note = LE
  misc_feature 213..1184: note = CDS
  misc_feature 1185..1386: note = RE
  misc_feature 41..218: note = bridgeRNA
cttgtattagcgcgatctgttatgctggcgtcgttccgtgaggaacgacccaacccgggtggccgcccgggttgggccgccgatcgatcggatcgcaacccaccgaagctttgagggctccgttcgtagcaagatcgcggtcggtacttcatcgggacccgaatggttgaacgaactcaaggttcgtattcacaagggagggatcgacgaagatgacaaagcatatcacgatctgtgccgggatcgataccggcaaatcgaagctcgatgtagcggtcgagggcagccgcgagcagttgcaggtcgagaacacgtcggaaggccatgcggtgttgctggcatggctgcgacggcatcgcgtcaagcgcgtcgggatcgaggcgagcggcggttatgagcagccggttgtcgccgagctgcggcgcaagcggttcgtggtcgtggtgtttcagccggcgcaggtccgggcctatgccaaattccacctgcagcgggccaagaacgacaagatcgacgccgctctcatcgcagcctgcactgcggctgtgcgtaagatccatcccgcacctgatccccgattgcagccgttcgccgagcaactgaccatgattgatcagatcggcgaggatatcgcccgcctcaagaaccggatcgagagctgccgcaatacgcagatcaaggggctctgggaggaggatctcgcccgcctggcgaagcgcgagaaggtcgaactcaaggctttgatcgcctcgatccgtaagcatcccgaccttgccaagaggctcgatctgattaacagcatcgacggcattgggctgccgactgccgtcgccattctggtgcgcatgcccgagatcggccagattacccgggagcaagctgccgcgctggccgggcttgcgccctatgatgatgacagtggcgagcaggtcggcacccggcacatcgagggcgggcgtaaaaggctgcgtcatgccttgtacgccgcggcgctggctgcgtcgttccgctggaataagcagctcatgacgctttaccggcgactcatcgcggccggaaaagagcacaagcgcgcgctggtggcctgcgcccggaaaatgcttgtcttcgccaacacgatcgtcgcccgaggaactccgtggcaggatcgtccaccagagaacgccgccctgacagcctcgtagccgtccgtttctttgttcgaccaaagcgacgtttcttcgtcccgacctgccactccgacgacatcgcgcgcagcggccgtcaaggatggccgtcggatccttgctgcctcgatctccgaagccgccaggccatccttgacggctgcgagcacggtgtcacccttgatcaggtcagacgatcacaatcatcctttaatggttg

SEQ ID NO: 3837 - DNA, 1379 bp, unidentified
  source 1..1379: mol_type = unassigned DNA; note = element_5c04ee3
  misc_feature 1..2: note = core
  misc_feature 3..81: note = LE
  misc_feature 82..1107: note = CDS
  misc_feature 1108..1379: note = RE
  misc_feature 1143..1366: note = bridgeRNA
tgatgtggtggacggcgcccgctcccggcgacgaatcgccgtaaggtgatcgttgctacatcacatcagggagccgtccacatgcagattaccacgataggtttggatatcgccaagaacgtttttcaggttcacggcatcgacgtggccgagaaggtcgtcgtcaggaagcagcttcgccgcagtaaggtgatagcttttttcgaagcggtgccaccatgcctagtgggtatggaagcctgtgcttcggcgcactattgggcacgcgagttgaggaagcttggtcacgaggtccgtttgatgccggcgaaggatgtcaaggcctacatcaagcgcaacaagaatgatgcgattgacgcggaagcgagctgtgaggcggttcgccgcccgaccatgcgttttgtggcggtgaagtcggccgagcagcagggccaactgatgcaacatcgcacccgggatttgctgatgcggcagcggacccaggtgataaatgcgttacgggcgcacctggccgagctcggtattgtggccgcacagggccgcgaggggctcaaggatttgctggcgatcattgcagacgaaaaggacgagcgcttgccagtcgacgcgcgtgcgagcctgattgtccttgcggcgcagcttcaggcggtgcagacgttgatcggatcgatcgagaagcggatcatcgcacaacatcgtgcgactgaggcgagcaagcggctgcagagcatccccggcattggcatcattggcgcgagcgctattgtcagcactgtcaccgacccgactgccttccgctcgggtcgtgatcttgcggcctggattgggctcgtaccgcgacaagattcgaccggaggcaaacagaagcttggaccgatctccaagcagggcgaccgctacctgcggcgcattcttgtggtcggggcgcattctgtgctgcggcgggccaaacataacccggagaaatatccctggctgacgcagctcctggcgcggcgaccgtttaaggtcgtagccattgcgctcgccaacaagatggcgcgcattgcctgggcgctgttggccaggggcggcacctatcgagtgcctgcgctcgcggcagcgtgaacccgatgggaggatgaggttgcgtccgtgcgtttcatgaactgcaagggtgatgaagacgttgatgcgaaacggtcgagaccgtcgatcggaaaacccgatgagtgccacgcgagcaaagagcgcgtgcttttgattgggaccgatcagcggatcacatcagggcccgcagctagaacggctgcatttagaggccggatacatggctgcacccgaacgattcgcggaaacgtcagattcttttcccttgcaccgcgggcgccgtccataca

SEQ ID NO: 3838 - DNA, 1444 bp, unidentified
  source 1..1444: mol_type = unassigned DNA; note = element_5c05ec7
  misc_feature 1: note = core
  misc_feature 2..578: note = LE
  misc_feature 579..1427: note = CDS
  misc_feature 1428..1444: note = RE
  misc_feature 1..236: note = bridgeRNA
cgttaccttcttcgtagtcccgcaccgcggggccacggtcgccaagttcggtatgacttcttgcccctgtctctcgaatgatccggggggtggtgtcgccgaacctggtggcgtcgatggaccgctgatagggacagggccaccggatctgaggtaggtctcttcgtaacgtgggtgccgggtgtcgacgtcggatcggtgaccgtccggagcggaacgaaaggcacgcttcatggacccgatctacgccgtattctgcggcatcgacgtgggcaaaggcgaacaccacgccgtcggactcgacccttcgggcactcgactgttcgacaaggccctgcccaacgacgaagccaagctgcgggccgtgttcggccgtctcgccgaacagggtccggtcctggtgatcgtcgaccaaccgaacacgatcggcgctctgccggtcaccgtggcccgagcctgcggccatgccgtggcgtacctgcccgggttgacgatgcgccgcgtcgccgacctgtaccccgggtcaggccaaaaccgatgcccgagatgcgttcatcatcgccgacaccgcccgcacgatgccgcacacattgcgccgggtcgatgtcggtgacgaggcgctggccgaactcggcgtactcgtcggattcgacgacgacctcgccggtgaggccacccgcatcagcaaccgcatccgcggactgctcaccggcatccaccccgccctcgaacgcgttctcggccccaggatcgcgcatccggccgtgctcgaaatcctgtcgaagtgcggtggaccggtcggcatccgcaaggccggcaagcgccggctcaccacactcgcgaccaagcacgctccgcgaatgggctcccgtctcgccgaggagatcctcgccgccctggatgcacaaaccgtgacggtgccgggcagcgccgccgccgagatcgtcctgccgaaactggcggactcgttgaaagaggttctgcaacagcgcaagagcattgccgaagatgtcgagaggatgctcgacgaccaccctctttcccaggtcctgatgtcgatgcccggcatcggcgtcaggaccgcagctcgaatcctgctcgaggtcggcgacggctcggcgttcgcctctgcggcgcatctggccgcctacgccggtatcgcaccggtgacccaccgctccggctcgtcgatccgcggtgagcaccccgctcgttccggtaaccgcaagctcaaacgggcgttgttcctgtccgcgttcgctgcgttgcacgatccgaccagtcgcgcctattacgaccgcaaacgcgccgaaggcaagaagcacaacgccgccctgatctgcctcgctcgccgccgttgcgacgtcctgcacgcgatgctcaagaacaagaccttctaccgcacccccgctgctgcagcggcttgacagcaaacatagggaca

SEQ ID NO: 3839 - DNA, 1543 bp, unidentified
  source 1..1543: mol_type = unassigned DNA; note = element_5c0cf66
  misc_feature 1..2: note = core
  misc_feature 3..251: note = LE
  misc_feature 252..1523: note = CDS
  misc_feature 1524..1543: note = RE
  misc_feature 6..232: note = bridgeRNA
ctaatggggttgtaccgcggtggtgagtcaccctggtacctgagccgccagcaggtgagcacttcctcccgcgggtcgtggaagaccttccgcaagagcgtgccccagctggtcggtgaggtggtctgcagggctggtgggatgtcgtgccacgctccggcgtcgagcactgatccattagggcgctccgggcttcctccaggctcagcatcagaactggtcagacagcacaacgggggcggtgatggtcgatgttgttcatcggcgatgactgggcagaggaccaccacgacatcgaggttgtcgaccctgacggacaccggttagcgcgacggcgcctgccagagggggtcaacggcatcgccaccttgcacgcgatcgtcgcccagcacctggcacagcccgacggcgacggcgctggcgctggcgctctggacgcgagccaggtggtgatcggcatcgaaaccgaccgcgggccgtgggttcaggcgctgatcgccgccggctaccaggtgtatgcgatcaaccccttgcaagcagctcgctaccgcgaacgacacaccacctcaggggccaagagcgatcccggggacgcacacgccctggctgagctggtccgcctggaccgcgcccaccaccgccccgtcgccggtgacagcgccctggcccaggccgtgaaggtcctcacccgggcacaccagtcgatgatctggtcccgccagcagcacgtgaacaccctgcgttcgacgttgcgggagttctaccccggtgcgctggccgccttcagcgaggaaggtgagggcttggtcggcatcgaggccgctgcagtgctcgcggcagcccccacacccaccgcaggacgcgcactcacccaaaccaagatcgaggagttgctgcgcagcgccggacggcaacgctacgtggccgtgtgcgccttacgcatccacaccggtctgcgcagcccgcagctgcccgcacgcgagggcctggaggtcgcctacggggccagcgtgagcgctctggtcgcggtcatcaccgagctgacccgtcagatcagtgccctcgccgagcaggtgaacgcccattttggccagcacccggacgctgagatctacctcagccagccaggcctggggccggtcctggccccccgggtgctcgccgagttcggagacgacccccaccgctacgcgacggtgaagtctcgtcgcaactacgccggcacctcaccgatcacccgcgcctcgggcaagagccgcgccgtcctggcccgccacgtgcgcaacaagcatctggccgacgcgctgtacggccaagccctcagcgcactgaccgcctccccaggagcgcgcgcctactacgacgaacgacgcgccaaaggcgccacccaccaccagggcctacgcgcgctcggcaacaggctcgtcgggatccagcagggctgcctacgccaccaccagctctacgacgagaacaccgcctgggtcagcaaccgccccgaccaacaaccggccgccgcttgacagttagagccgtgggatgt

SEQ ID NO: 3840 - DNA, 1536 bp, unidentified
  source 1..1536: mol_type = unassigned DNA; note = element_5c11efd
  misc_feature 1: note = core
  misc_feature 2..499: note = LE
  misc_feature 500..1429: note = CDS
  misc_feature 1430..1536: note = RE
  misc_feature 16..259: note = bridgeRNA
ccattacagtctgaaataggctatcgataaaattcgatggcgagcattcggcgcattgcctacgatacgggcaagccccgaggggccgccgatcgggcgcctccggatggccgtctgcccctgccccgtagagggcccggggggtgttgccaccggaggcggtcgccgtccggacgactgataggaaactgccgggcgcaagcgccacggccgtaatggggtgtcgcggggcggggttccgatcggcctaccgattggaggataccaccgtggcaccaattagaatgccggaagccgtcatcgggctcgatgtcgggaaatcgtcccactgggcatgcgtcgcgactcgagatggcgaggtgctgttgagcaccccccgtcgcgaacagggaggacgacctggactcgctgttcggccgcttccccgatgcgctcgtggtcgtcgaccagtcgcgcaacataggcgcgcccgcgctcgcccgcgcccggggcggccgggatgtcggcggcgtacctgccgggactcgcggcgcacggggccgccaggctcttcgccggcgacgccaagaccgacgagcgggacgcgatggtcatcgcgaagacggcgctgggcatccccgacgcactcctgccggtcggggatccgggcccgacggtcgcggcggcgagggcgctggccgcccagaggaacttcctgacctgcgagaacactaggaataagaaccggctgcgcagcatcctgctggaatcgtgccccgccttcgaggcgctggtcgacctgtccgacggtccccagctgaggctcatggcatccctcggcggggcctggtcggtggccgacgccgggccccgcagggcggcggcgctcacgcgcggggcggcgcgcggcaagatcgaggccctcgtccgctcgacggcctcctcgacaaggccggatgcgtcggccgtcgccgccgaggaccgggcggtgaaactgctcgcgcgcaggatatccgagaactcggcggagatcgaggcgatcacggcggagatctccgccctgctcgagggcgacgatacctaccgatgcctcctgacggtgccgggcatcgggcccaaaaccgcttccgagcttgcgatctccatcgacatcgaagacttccccagtcacgacaggctcgcgtcgtactgcggccttgcgccgcgcaaccgccagtcgggaacctcgatctcctcggtgacggcatcacgccaaggaaacaagagactgaagaacctgctcatattctcatgtaactgccttacccggacagaggggagatggggtgactactacaccaggtgccgagagcggggcatgtcgcacggcaaggcgctcaaggcgctggcgcgaaagaggctgaaggtcatctacgcggtcatgcgggacagggtgccttacgccgcctagccgaagcgcaccgaacagattggagcccaccggccgaatggcctggcgtcagcatgccgcgattcagtcgcgcgggcagcatttcccagttgacaaaactataggaa

SEQ ID NO: 3841 - DNA, 1317 bp, unidentified
  source 1..1317: mol_type = unassigned DNA; note = element_5c13414
  misc_feature 1: note = core
  misc_feature 2..55: note = LE
  misc_feature 56..1078: note = CDS
  misc_feature 1079..1317: note = RE
  misc_feature 1093..1314: note = bridgeRNA
taatgaaatggacatccctcctatactgagaaagtcagtttaaaaggagaccgccatgagtgatatttatacaatcggaattgatttagccaagtcagttttccaattatgtgcgtttgataaggcagggaaaaaactagtaaatagagccttaagaagaaatcaagtcattaagtttttaagcaatatagccccttgtcttataggaatggaagcctgtgccagttctcattattgggctcgagaaataaggaagctaggccatgaagtcaggctcatgccacctcagtatgtaaagccttacgtaaagacaaataagaacgatatggctgatgctgaagcgatttgtgaagctgttcgccgaccaacgatgcgatttgtttccgttaaaagtgaagagcaacaagctttattgttacttcatcgagaaagagaaggcgtaatcagagaccgtaccgcattaatcaatcgaattagggcaagccttcaagaatttggtgtgagtgttcctgcgggaagatttcagctaagaaaatggtttagagaaggttttagcttggtagagtatcagttgccaaagctgctggttgggcacattaaattaatgcaaacacgtttaagagagattgaacagtatgtggaatatttggatacgcagatagatctcgcgagtgaagtcagtgatgagtgtcagaaggtcaggggtatccctggtgttggtcgcctaacctcatccgcattagttgccagtattggtgatgcaaaagcgttttcatcagggcgccagttatccgcttggatgggattagtgccaagtcagcactctagtggaggtaagtcactgctgctaggtatcagtaagcgaggagatacttacttaagacgtatgtttatccatggtgctagagcagtgatgagacatttgaaagaaggaaaaccgttctttggatgggtaacctcgttgctcaagagaatgcataaaaataaagtgattgtagcgttagctaataaactggttcgtatctcttgggctgtattggccaaagaagaaaattttagcgtagaaagaacctattaagtgaaaagtacatccagttttgctaagtgaaagcaagtgatgacaatacaggttagaccgtgacttggaaattctgtgcctaacatcgtttcttagaaaacgataaaatgattagagccaagtcagcgaagttcatcggggatcaagagcaagtctcttacaaggaatccgaatagatggctgcaaaaccacaattgttatcgtctgatttctcttgcaaaaaacggtgtgtccataga

SEQ ID NO: 3842 - DNA, 1418 bp, unidentified
  source 1..1418: mol_type = unassigned DNA; note = element_5c16860
  misc_feature 1..3: note = core
  misc_feature 4..81: note = LE
  misc_feature 82..1134: note = CDS
  misc_feature 1135..1418: note = RE
  misc_feature 1133..1405: note = bridgeRNA
tgatgtagtggatggcgccctccgacggcatcgaatgtgccaaaatggtttttgcaaaacccaagagaggagccacccaccatggataagattacgacaattggacttgatatcgcaaagaatgttttccagcttcatggagttgatgcggacgggcagatagttttgcgcaagacgctacgacgcgggcagatgcagccgttctttgagaagcttgctccctgcctgatcggtatggaagcctgcgcaacagcccatcactgggcgcgaacgctgatagcagcgggtcatgacgtccggctgatcccaccgagctatatcaagccatacttgcgtcggcagaaaaacgatgctgcagatgccgccactatttgtgaagccgtcacacgaccatcgatgcggtttgttccagtcaagagtgaggaacagcaggcgacattgatgctgcatagcgcgcgcgaacttctgatctctcaacggactgctctcatcaatgccttgcgtggtcattttgctgaacttggcattgtcgccccacagggagctcacaacgcacggcagttaatcgccattctggatgatgatgaacgatacaccccggacgccgttcgcattgctctcggaccgctggcgacaacattgatagagatcgagggccagatcgcaacgctcgataaggcgatcatcgccgctcatcgcaacgacgatgtcagcctccggcttgcaactgttcccgggataggccccgtcatcgccacttgcctttctgccagtgtgccggacgccaagctgtttgtcggcgggcgagagtttgcagcctggctgggtctcgttcccaggcaacattcaacgggtgggaagccaaggctgggctccatttccaaaatgggcaatagacgcttgcgcaaacttcttgtggttggagcacatgccgcgctttacaggatgaagaatggcaagacccaatccccactggcgaattgggcgagaaccctgctggagaagaaatccttcaagcttgttgcggtcgccctcgcaaacaagattgcccgcattgcatgggcgatcatggcgcggaatatacaattccagccggacttcgtgcctgatcaccgggtaccggcttcagtgtaggcatataggagcgaacaagacttgcctttcggggcactacagttggcggagtgacgatggtatgatgtgacagcagagcggaatggaccgcacgaaccgaagaacccgcggcgttgtcttgcgcatcaacagcgcgataatgtgatagggatcggttcaggcggataacatcagggccagcggtcatatcgtgccgcataaacaggccggagacatgactgcacccgacccgccaagctaaaacatcaccaaaatcacgttgccaaatgggcgccatccagaca

SEQ ID NO: 3843 - DNA, 1384 bp, unidentified
  source 1..1384: mol_type = unassigned DNA; note = element_5c24ac3
  misc_feature 1..2: note = core
  misc_feature 3..335: note = LE
  misc_feature 336..1148: note = CDS
  misc_feature 1149..1384: note = RE
  misc_feature 1161..1348: note = bridgeRNA
acatggggtaatcgcgggagcaaccaccatggacaggatgccagataagacaggtggttgttctccgctatgatgaagaacgggctctcgattggtgaccgggcccgacatcggggagaataaccatggacgagtatatcgggctggacgtgtcgctgaaagagacggcggtatccattcggcgcaacggacagcgcatctggcgaggcaagtgcccctcggatccgcagcttcttgccgcattgatccgcaagcgtgctcctgcggccaagcgcgtagtcttcgagaccgggccgctttcagtctggtttttccatgccctgaccgcctaaggaatgccggcgatctgcatcgacgcccgccacgccaaggctgcgctcgacatggccgctaacaagaccgatgccaatgacgccgatgggctcgcgcatctggcagaggtcggattcttccgcgaagtccgggtaaagggcttcgacagcatgctgtcccggacgcttgtcgcggctcgaacgaaactcgtgcgaacgacactggacgtggcgaaccagatccggggattgatgaagacgttcggtctcatcgttccgcgcagcatgggcggcaagttcgaagcgcatgttcactttcttctcgccgaccgcgccgcactctcgcagatcatcctgcccttgctcgaagcctggcgcgctcttcgccttcaggcagccagactgacgcagcaactcctcgccgaagcgcgcagaagcgagcaatgtcagttgctgatgtcgatccccggcgttggtgcgatcacagccacggcctatctcactgccgtcgaggatgcatcgaacttcaagcggtcgagatcggtgggcgcctggctgggcctgacgacgcgccggtatcaatcgggcgaggttgactatgatggccatatctcccgacgtggagacgctcatgtgcgatcgctcctctacgaagctgcggtggtgatcttgacccgcagccaaaccgacagtgatttgcgcaactgggccatgaaacttcgcgagaaagtcggcttcaaacgctctgctatcgcagttgcccgcaagctcgccgtcatcatgcatgcgatgctgcgctcaggtgaactgttcaacaaggaggcagcgaacgcctaactcacaagctctgctgcgccattggcgcgaagaggcgtccctgccgggacggaggctggtcgattccgttaagaccgttgcacctcgagttcgctcggatcgtgcgagacatacattggaaggactgtcccgcgaagccccatgctgcggcgacctatatcgaccgcgtagacgaccgtgctcccggcaaacaacctctcgcacaaaaaggcgcttgcaaatcccgctattagacg

SEQ ID NO: 3844 - DNA, 1592 bp, unidentified
  source 1..1592: mol_type = unassigned DNA; note = element_5c2b977
  misc_feature 1..4: note = core
  misc_feature 5..358: note = LE
  misc_feature 359..1567: note = CDS
  misc_feature 1568..1592: note = RE
ctcactaggctaccctcccccgaagaggttcgaggagagtcccaggcagggggatccctaggtattgcccgaggggcgatcgtcgatcctgatggcgatgcgcgatcgtatttcttgggccgggcgcacggagtcggtgattgtgggcccgatgggaacttcgaggggtcggggagagcctattctgctcgccgctcgacggccagagtgagacctgctcccccgactcaaaccacgagaggcccagaccggccacagggtggagcgccacgggcacctgaagcccagagcgcctgttagtgagcgaccggcaggacctctcactgcgcagtgtctcgccgcctccgggaggaacgcaatgaatctctccatcggtctcgactgggcgagccagacccatgccgtctgcgtcttggaggccacgggccaggtgggctggcagggcaccgtcgagcactcggccgcgggcttggcggagctcctccgacggctggcgcgcttcggcccgcccgccgccctccccgtcgccctcgaacgcccctcgggcctcctcgtcgataccctgctcgccgccggccatcccgtcgtccccatccaccccaacgccctcaaggccagccgcccccgctactccgccgccggcagtaagagtgatccgggcgatgccttcatcctggccgatctcctccgcaccgacggccatcgcttccgccggctccagcccctgtccgacgagacccgcgccctgcgggtcctggtgcgtggccgggacgatctcgtcgccgagcgcaccgcgctcgccaatcagctgcgcgctctgctcgagcgcgtctggccgggcgcggccgcgctctttgccgaggtcgagtcgcccatttccctggccttcctcactcgctatccgacggcgcagagcgccgagcgcctgggcgaaaaacgcttggcccgcttcctcgggcagcacagctactgcggccggcgctccccggccgagctccttgcccggctccgctccgcgcccgcctccgacgtgagcgacctcgaagcggaggccagccgcgacgtcgtccacgcgctcgtcgccgtcctgacccccctgggcgcccagatccagcagctctcggcggccatcgtcgccgccttggcgcagcaccccgatggccccctcctccagtcgttcccacgcagcgggggcgtcaacgccgcccagatcctggccgagctcggggaggatcgcacccgcttccccaccgacgagcagctggccgccgaggggggcgtcgcgcccgtcacccgcgaatccggcaagcaccgccaggtcgcctttcgctgggcgtgcaacaagcgcctgcgccaggcgctcaccaccttcgccgaccactcgcgccaggcctcgccctgggcagcgacgatctacaccgccgcccgccggcgtgcctgtgctcatccgcatgccgtccgcatcctggcccgcgcctgggtgcgcgtcctctggcgctgttggcaagatcgccgcccctacgacgtcacctttcaccgggccgcccagcgcgtggccgccgcgtaaccacatgagggttgacacagggtgt

SEQ ID NO: 3845 - DNA, 1397 bp, unidentified
  source 1..1397: mol_type = unassigned DNA; note = element_5c3a63d
  misc_feature 1: note = core
  misc_feature 2..88: note = LE
  misc_feature 89..1120: note = CDS
  misc_feature 1121..1397: note = RE
  misc_feature 1169..1389: note = bridgeRNA
taatggaatggtcgcccctgtctgattcggcatcaaagtgccacagtggagttgcgaatcaaccactgaccaagaaggggcgaccgtcatgaaggctacgacaatcgggatcgatctggcaaagagcgtgctccaggtgcatggcgtggatgcgcgcgggaatgccgtcgtcaggaagcagcttaagcgcgatcaggtgctgccatttttcggcaaccttgcggcgtgccggatcgggatggaagcatgtgggagcgcacactattgggcgcgcaagctcgagaagctgggacactcggtgaagctcatggcgccgcagttcgtcaagccgtatgtgaagacgaacaagaatgatgcggcagatgcggaggcgatttgcgaagccgtgagccgaccgaatatgcgcttcgttccgatcaagaacggtgaacagcaggcggtgttggcgctccaccgtgcgcggcaagggttcgttacggcacgcacggcgcaggcgaatcagatccgtggacttttgagcgagtatgggatcgtcattccgcagggactgagccatgtcagcaagcgcctgcccgagatccttgaggacggcgaaaacgatctaccgggtgtattccgtcagttgctacagcgactcggtgaccacctccgggagcttcatcggcaagtaggtgagttggagctgcagatccagctctggcatcggcaacacgatgcgagctgcaggcttgcgcggattccgggaattggaccgctcacggcgagcgctctggtggcctccatcggcgacgcgaagagcttcgcgaacggacgccagttggcggcctggctgggcctcgtccccaggcagcactccagtgggggtaagtccgtgttactcggcatcagcaaacgcggtgatagctatctgcgcatgttgctcgttcacggcgccagagcagtgatccgcgtcgccgagaagaagcccggctatgcagatagctggctcgcgcgactgatcggtaggcgccatcccaacattaccgccgtcgcgctcgctaacaagaacgcccgaatcgtctgggcgttgctcaagcatgatagggactaccgaattggttaccagccagcgatgacttgaaccgggtgagagcacaatcgacttaacgaattacgtaaacgaggacctccagcgattgctcaggcgatcaagacgtgatggcaagacaggtcagaccgtggcaggtcaaaccttgttcacacagggagcgaaaagctcgtgaggctgatcaggaccctgccagcaaattccatcagggacagcggctccgccgcacaaaagtccggatgtatggctgcaatctccacctccttgccggaatcgaattgagcgcttggcaaacaggggcgaccatgta

SEQ ID NO: 3846 - DNA, 1362 bp, unidentified
  source 1..1362: mol_type = unassigned DNA; note = element_5c3ccf8
  misc_feature 1..2: note = core
  misc_feature 3..77: note = LE
  misc_feature 78..1103: note = CDS
  misc_feature 1104..1362: note = RE
  misc_feature 1079..1351: note = bridgeRNA
tgatgatgtagacgcccgcgacggcccagatgtgtggcaaagtgggattgtttgaacctacattggagctgggcatcatgagcgaagttcgtacaattggtttggatctggcgaagactgtatttcagatccatggagcggatgcatcaggggctgttgtgtttcgcaagcaactgcggcgtcggcaggtcttggaattctttgctcgccagccacattgtctcgttaccatggaagcctgcgggagctcccatttctgggctcgcgagattggccgtctgggacacgaggtccgcatgattcctccggcctatgtcaagcctttcgtcaagcgccaaaagaacgacatggcagatgccgaagcgatctgcgaggctgcacaacgaccgacgatgcactttgtggcggtgaagagtgaagaggcgcaaggagtggcagtcgtgttgcgtacccgtgatctcctgatccgacagcggacccagacaatcaatgcgctgcgtggccatctggcggaattcggagaggttgctccggagggatcgacatatgctgcaaaactgattgcgatagtcgaggacccacagacggcgcttccccaaacagcgcgcgcatcgctccggtttctgacggcaatgttgtcgcaactgaacgatcagatccaggcgctggacgcggagatcgtgcgccgggcacgggaagatgagactgcacgacggttgatgacgatccctggtgtagggccactgattgcctcggcactcgtggcttcggcaccgccgccggaaacatttcagcgcgggcgggacttcgccgcatggctggggcttgtcccgcgacaacattcgacggggggcaaacaccgcctcgggtccacgacgaagatgagggagcgatccctgcggcggctcctgatcatgggcgccaatagcgtggtcgtgtggcgtgcccgcaagggagcggccccgggatcgtggttggcgaagatgctcgcgcataaaccaccgatgctggtgagggtcgcgctggccaacaagatggcgcgtatcgtctgggccctcatggcaaagggcgaggtctacagagctccggttacgacggcataagccaaacgtaaccgcgaggacgtcgcagcgagagaggtcagcggaaggtatggcgcaacggtcgtgagacggggtccggaaaaccagtgtgcaccaaagtgcctcaagagcacgcggcgttgatttggacctggcctgcgaacaccatacgggcgtctacacatgtcagaaagccgcatcacaggccggacacatgtcagcacccgacgacgcgcaaatgccgaccaaagattcctcttgccaaacgggcgtctacaca

SEQ ID NO: 3847 - DNA, 1366 bp, unidentified
  source 1..1366: mol_type = unassigned DNA; note = element_5c52f76
  misc_feature 1..2: note = core
  misc_feature 3..77: note = LE
  misc_feature 78..1103: note = CDS
  misc_feature 1104..1366: note = RE
  misc_feature 1079..1353: note = bridgeRNA
tgatggggtggacgcctcccgacggccttggtgtgccagagtggtggtgttgagttaccaccgaacaggaggcgtccgtgccagaggctagcactatcggtttggacttagcgaagcgagtatttcaggcacacggagctgatgcatccggcaatgtcgtatttcggaagcggctgcgacgcgagcaggtgcttaagttttttgccgatcgaccagcgtgcgtggtagcgatggaagcctgcagtagcgcccactattgggcgcgcgggatcggcgagcttggccatatggtccgtcttatcccgccggcctacgtaaagccgtttgtgaagcggcagaagaacgataccactgacgccgaggcgatctgcgaggcggcgcagaggccgacgatgcgctttgtggcggtgaagagccaagcagcccaggctaacgccgttgtcttccgagcacgggaccttttggtacggcagcggacacaggcgatcaacgccttgcgcggccatctcggagaatatgggttggttgtcgccaagggccccagtcacgtcgcgaagctcatcgaacaggtagaagatccggccaccgatctgcctgaggccgcccggatagtgcttcgcgtgctcatcgcctcgctgcaattcctgtccgaacggattacccttctcgaccgcgaggtcgctcgtcgcgcccgcgaagacaacgaggtgcgacggctcacgaccattcctggagtgggtccagtaaccgctacggcattggcggcgatggcaccgcctgcgggcgcgttcaggaggggccgcgacttcgcggcctgggtcgggcttacgccgtcgcagcactccggcggcggcaagcaaaagctcggtgcgacctcgaaaatgggcgagcgaacgctgcggcgcctgctgatcattggagcgagttccgttgttcgcaaggctatcaaacacggcacccaatcggggtcctggcttgggcagatgctggcgcgtaagccacggatgcttgtgatcgttgcactcgccaacaagatggcacgcaccgtttgggccttactggcgacgggtgagatctatcgagctcctctcgcagcggcttaaagccgcccgcgatcaggaggcgtcggaggcgtcggagggtcgaaagaaaagtatggcgcacagtcaatgagagacgggatcgggaagccagtttttcacactgcgcctcgagcgcgtgggtgtgatttggacccggtctgcgaactcccataccggcccgcggcagatgaacggccgcagcaaaggccgaacagatgtcagcacctgactacgtgcaataccgtctccaagattcttcttgcgctcacggaggcgtccacaga

SEQ ID NO: 3848 - DNA, 1153 bp, unidentified
  source 1..1153: mol_type = unassigned DNA; note = element_5c540ff
  misc_feature 1..2: note = core
  misc_feature 3..208: note = LE
  misc_feature 209..1141: note = CDS
  misc_feature 1142..1153: note = RE
  misc_feature 13..211: note = bridgeRNA
cttgtcttatgacttccgtcggctcctttgagataaaggagccgctgcctggcacggcatatatgccgggcagcggcgggggtcggatcgagggaaaccaggtgcttcaccaccgaggcgtagtgtgatcgcccccgtcttttcatctgtcctgaacggatacccgggttctgggcccggatgacaagcagaggaagaggaaaagacaatggatgataccatcggcgtcgacatctcgaaacccactctcgatgccttttgcctgcgcacgcgcgagcatcggcaattcccgaacgaccgggccgggtgtgctgcactggtccgctggatcggcacatcggccgtgcgcgtcgtgttcgaaccgaccggcccctatcaccggctcttcgaggcgtctctggtcgcggcaggcatcgaggcggtcaaggtcaatccccggtcctcgcgccgtttcgccgaggcaaccggcgaactggccaagaccgatcggatcgacgcggcgatcctggcgcggatgggcgcggttctcgatctggaagggcggccggcgaagactgaaaccctgcatgatctcagggagttgggcgtcgctcgccaagctctggtcaaggatcgtatcgccgcaaccaatcgcgagcagatcgctgtgaaccccgtgatcaagcgccagttgcgggcccgcctgaagcagatcggcatgcagttgaaagagatcgataccgcgatcgcgaccttggtcggcagcgatcccggcctgtcccggcgccgggatgttctggcttccattcccggcattggagcagtcaccgcaatggcgatcctgatcgagatgccagagctcggcacactggaaaataagcaggccgccagccttgccggtctcgcgcccatgacgcgccagtccggcacctggtccgggcgggcgcgcatccgaggcggccggcgcagcctgcgcacggcgctctacatgcccgcgctcgtggcgctgcgcttcaacccggacctgaagcagaagtatcaggccctcaaggacgccgggaaaccctcgaaggtcgccatcacggccatcatgcgaaagctgctgatcctcgcgaacgccctgctgcgcgacgaccgcaaatggaacgcaaaagccgcttgatcaagacggata

SEQ ID NO: 3849 - DNA, 1394 bp, unidentified
  source 1..1394: mol_type = unassigned DNA; note = element_5c57a84
  misc_feature 1: note = core
  misc_feature 2..38: note = LE
  misc_feature 39..1130: note = CDS
  misc_feature 1131..1394: note = RE
  misc_feature 1163..1392: note = bridgeRNA
taatggaatggtccgcctcactcctaaaacggcttcaaatgagccatgatgtaggttccacaccaacatcaacaagagtgagacaaaccatgaaacatgataaaccaaaaggtaagttagcggtactaggtattgatttggccaaacaaagctttcaactacacggtgtagatgacaagggtaatactgtattaaaaaggaaattaaacaggaataaactctctgaatttattgtaaagttaccgccatgcatcattggcctggaagcttgcggaggtgctcattattggacacgcgtttttgaactgttcggccataaagtgaaaataattgcaccacaatttgttaaaccatttgtaaaatcaaataaaaatgattctgctgatgcagaggcgatttgtgaagcaatacaacgaccatcaatgcgttttgtacctgtaaaaagcatagagcaacaagatatacaaagtttacatcgaattagaagtcaaattgtcgcacgacgcaccgcacaggcaaatcaaattcgaggtttattaatggaatatggcatcattattccaaaagggatttcatatattcgtaaagaaatacccatgattctcgaagacgctgaaaatgaactctcatttttgtttagggagttgttaggtggactgtatgacgaaatggttcacatggataatcgtattaatattattgagcgcaagctagaaacgatctgccatcaaaacgaagattgtcaacgattgcttagtatacctggtattggtttactcagtgcaacggcaatgattgcggcaataggtgatataagtgtattcaaaaacggtcgcgaattagctgcttggttaggtttagtgccacggcaacactcgacaggcggtaaaccgacattgttgggtattagcaaacgaggtgatacttatttgcggacattgcttattcacggtggccgaacagtggtgagagtcagtgagaagtatcaagataaaagaaacaattggataagcaatttaagccagcgtcgggggaaaaacatttcggccgtagcggttgccaataaaaatgctcgaattgtatgggcgttactaatgaacaaaaccacctatcaagcaagtatggcttagtaaaacaaaaagctttaattggtaaaaaaacatttaaaacgagttgcgaagataaaaattaagtgatggcataaaaggtaagacctgtgtaccaaaaacctgtaggggtctagggcccattaaggccgcagacctgatgaggtgggtatgcgcggattccatcagggccggaagcaaagcgcttcaattgaaggccggatatatggaagcaatactttttagaaacacgacatttttatcttgtaatgtggggcggaccatata

SEQ ID NO: 3850 - DNA, 1102 bp, unidentified
  source 1..1102: mol_type = unassigned DNA; note = element_5c6fee7
  misc_feature 1..2: note = core
  misc_feature 3..163: note = LE
  misc_feature 164..1090: note = CDS
  misc_feature 1091..1102: note = RE
  misc_feature 1..159: note = bridgeRNA
cctgtctgatgtgatgctggtatgaaggtgttgcggaagggagcccgtcccccccgagggtctggagcccgatagggagcaagggtcccttccgcgttggtcacaaccctgaacagttgcttgggactgctgatcccgcacgacatggacaggagccttacccatgccacaggccgtcatcggctgcgacctttcgcgtgcccttatcgacatctgcgaactgccatcaggtcggatcgggcagatcgccaatacaccggatgccatcaccacctggctcgacacgctcgaccacgacatccgcctcgtcttcgaggctaccagcggctgcgacggcgacctgattgctgcgctggcgacacgtggccatcccttctcacgcgtcaatccgcgccaagcccgcgagtttgccagagccaccggcacgctggccaagaccgaccgcgtcgacgcccgtgtgctcgcgcagatgggcgcggcactcgatctgcccgccaccatcccgctcagccccgcccggtcgcgtctggccgatttcctgcgtcgccgcaggcagttggtcgacatgcgcaaagccgaaaagctgcatcgccacagcgcaggtcagcccgaaatcgcacaagccatcgaagctatgatcactctgctcggccagcagattgccgatctcgaccgacagatcgcaggcttcatcgccgaggatcaggcattggccgaagaggcccggctgctgacagccgtccccggcatcggacccaccgtcctggcaaccctgctcgacgaactccccgaactcggcaccctgtgccgccgcaagatcgcctcgctcgcaggcctcgccccgcacgcccgcgaaagtgggacatggcgcggcgccagacgcatatggggtgggcggcgaaaggttcgcgaagccctctacatcgccgccctcaacgcttcacggcgcatccccgtcctcaccgccatgcgcgacaggatgcgcgccaagggcaacgcgcccaagacgatcctcatcgccgtcgcacggcaactcctcgtcatcctcaacgccatgatccgaaagcgacagcctatcgctttcgcatgaacatcacagttg

SEQ ID NO: 3851 - DNA, 1380 bp, unidentified
  source 1..1380: mol_type = unassigned DNA; note = element_5c7e8c8
  misc_feature 1..2: note = core
  misc_feature 3..307: note = LE
  misc_feature 308..1117: note = CDS
  misc_feature 1118..1380: note = RE
  misc_feature 1149..1368: note = bridgeRNA
tgatgctgtggacggctcctccccggcacgagagtgccattgatgtggtgctgttaggacaccctatgattcggaggagccagggcatgcaaacgaccacgaccgtcggtctcgatatcgcgaagtcagtttcccaggttcatggcattgatgcggatggcaaagtgttgtgtgccgtccgctcaagcggcgttatgttttggtgttttttcagaagctgccgccgtgcttggttggtatcgaggcgtgtgcatcatcacattattggtcgcgcgaacttcaggcgcttggccacaccgtacgtctgatgccgcctgcctacgtcaaaccttacgtcgagcgacataagaacgatgcggctgacgcagaagcgatctgcgaagccgtcacgaggccaaacatgcggtttgtgccgaccaagaccgccgagcagcagagctgtctgacactccaccgcacacggcatctgttcattcgccagcagacggccatcatcaattccattcgcgcgcacctggccgagttcgggatcgtcgcaccggtcggacgcggtggtgtcgagcagttgcttaaagccgtcgccgatgccaacgacactcggctcccagagatagcacgggcctgtgtggctgctcttgggagtcaattggtggcactgaaagcccagatcctggccttcgatcgccgcatcatggcatggcatcgatcgaatgagaccagcaagcgacttgacgccatcccgggtgtcggcccggcccttgcgactgcgctggtggcgagcattggggatcccaaggcatttcgatcgggacgggatttctcggcctggatcgggcttgtgccgaagcagaactcaggcgggggcaaagacaagctcgccagcatcagcaaacaaggagaccgctatctgcgcagcttgttcaccgccggcgcgctcgccgtgatccgctatgccaagctccacggcaccaagcatcgaccatggctcgcggcattgctggcgcggcggccaaccaaggtcgccgccatcgcgctcgccaacaaggtcgctcgcatggcctgggcgatgatgacgaggggagggcgctacaaggaacctgtcgcactcgcggcatgaaagacatcgcgtcgggcatccggcgtgatgtgaacggttgggagggcaaacagcacgtaatgcagagccggtcgatccggcgatcgggacaacccactcgggccagcgcattgtcgaatgcgtggtattgaccgggatccgatccgcggagggcattatggccagcggtcacgtgaaccgcactaacaggccgaacacatggctgctccgaccactgctgcacgcgtgaagaaagctcttgccaacccggagccgtccacaca

SEQ ID NO: 3852 - DNA, 1431 bp, unidentified
  source 1..1431: mol_type = unassigned DNA; note = element_5c919f5
  misc_feature 1: note = core
  misc_feature 2..70: note = LE
  misc_feature 71..958: note = CDS
  misc_feature 959..1431: note = RE
  misc_feature 1212..1425: note = bridgeRNA
taatgggatggtccgccgcctttccacagccagcaactggggtataagaggcacacggaggaggtgtcccatggaactacatacgataggcattgatcttggcaagacagtctttcatctggttggtctcaacctgcgggacgaggtcgtggtgcgtaagaaattttcgcgcaggcagctgctgcagttcaccgccaacctgcaggtagatttgattggcatggaagcatgcggcggtgcgcatttccttggccgagcactgcgcgaacaggggcacgaagtacgcttgatgccagcccaatatgtgaaaccttacgtgaagaccaacaagaacgactacatcgatgctgaagcgatcgctgaggctgtcgcaaggccaacgatgcgattcgtaccgatcaagaccgatgatcaactggatatgcagtcgctccaccgggtgcgagaacgttgggttatgcgccgcacggcgaccgttaaccagattcgtggtttgctgctcgaacgtggcatcactcttcagaagggacggagtcatgtcaatactgctcttcccggcatattggaagacgcagattctaagctatcgggctcattgcgcgttctgctcgcacaactgaagctggaactcgatcagacaacgatgcggattgacgaggccgacgcggtccttaatcagacggctcgtgagaatgaagcctgccaacgactcgtgacaatacctggaatcgggccagttaccgcgactgcactcatcgccgccattggaaatggagcggccttccgcaaagggagggagttctcggcctggatgggtgtggtcccaagagagcattccaccggcggcaagcaaaactgcttgggatcagcaagcatgggaactcctacctgcaaagtttgtttatccaaggtgcccgtgccgtactgcaacatcgtacgaagcaaacaaccggcttgagtgagtggttggcaaaacttatcagtcgcacgcaccataatgtcgttgccgttgcattagcaaacaaattggctcgaattgcctgggcggtgctcgcacaagggaagcgataccagccacaagcattaatcggcccggagacagcttgactggcccgcagatgacgcatggctgagtccatgcttggaaatcgcatccgcgattcccacatctacagcccagcggctactgctgcagagaatttgattccctacaggtctgctggcgaacaatgagatggcttaacggtcgaacccggcactctggaaacctgaggtgcaaaacagtcttcaaaagactgcctagttaatgaggaacagagcgcggcgcattccatcatggcccggaagaacatctccaacaaggccgaatacatttgcgcagaccaacctgccactccacttttcgcttgcggaacggaggcggaccataca

SEQ ID NO: 3853 - DNA, 1581 bp, unidentified
  source 1..1581: mol_type = unassigned DNA; note = element_5c935d1
  misc_feature 1..2: note = core
  misc_feature 3..250: note = LE
  misc_feature 251..1420: note = CDS
  misc_feature 1421..1581: note = RE
  misc_feature 6..227: note = bridgeRNA
ctcgtattatatagtcatacccattctttacctgttcttaggtatcgggtatgctgttaaagatgctgtggattggtcttggtctcctaccgcatggacggttatagaaaggctccaaccacagcctctttgtcacaatgttaatcagttagataccgcatgacggtttatgtagaacgaggttacatccggcagagagccctgtggatcttacagcagcatcaaatacttttatgggaggatcatgtgtatgatctatgttggtatcgatgtagctaaggataagcacgactgctctatcctgggatccgaagccgaaaagctgtttccggtattcacaatcccaaacaacaaggcaggctacgatgagctttatcagaagatatctgaactgaccaaaaataaggcagaaataaaagtaggccttgaagctaccggtcactattcactcaatatcctaggttcgctcattgataaaggtctgaccacctatgttatcaacccgttacatacaaatctttacagaaaaggtctaagccttagaaagacgaaaacggataaagtcgatgcctattcgattgctatgatgttaatgactgataagactctcaagccctactcagacacatcatatcacagcgaggagctgaagtcattaacccgttatcgtttcgataaagttcaagaacgtgccaagttaaaatcttccgtttcgagactggtgaacattctttttccagagcttgagaagcttgtgccaaccttgcatatggcttctgtctatgcactactctcagaaatgcctggtgcatcttacatcgcttcttgtcatcttacccatctgaaatccgtgctctatactgcttcaagaggcagatacggcgatgaagttgcacgtacaatcaggaatgcagcgagggattctattggttctgtaatgccatctaaatcgttagagctgaaacacaccattcatctgatagatgtccttacagctgagattgaggaggttgaaaaatcaatcaaatctatcatggatacctgtaactcacctataatgacaattcctggaatcagttacagaatgggcgccatgatacttgctgaaataggtgattttacacgtttctcaagtgcagataagatccttgcttatgcaggtatgtcaccttcaacctatcaatcaggtcaattgaactcatcccattcacatatggagaagcgaggctccagctatcttcgctatgccctctttaatgcaactaaattcgtatgcaagtgggacgaatcatatggtatctatctttccaaaaagataggcgaagggaaacactatagtgttgccgtttcccatgctgcaaaaaagcttgttagattgatctaccgtatggaacttacaggcgagccataccacggataagctcttttttaccttttctacgagcacccttatggatgctctatttgtcatgcagttttcaaagtactgattgcagaagtaagacttctgccactatctaaaacacatttctgtgtcttgaccaatatatatgaaatatctattgacttttaatagttagt

SEQ ID NO: 3854 - DNA, 1212 bp, unidentified
  source 1..1212: mol_type = unassigned DNA; note = element_5c97e40
  misc_feature 1: note = core
  misc_feature 2..211: note = LE
  misc_feature 212..1186: note = CDS
  misc_feature 1187..1212: note = RE
  misc_feature 35..200: note = bridgeRNA
tcttaagtttacaaatcattaaatttattagataatcagaaagaacaaaagagaggaataaggttaatatagccgtagaacatttaagttcgccaacattgataatcccctctcttttctacttaaatatcgttcagttctgtgagacgttgatctcgattttaagatgttgatgtgtaagtagattgtcctttccaaattttcagttcttatgaataaagataaaaaaatttacggtattgacatcagtaagaaagtatttgatgtctacagcgaagggtcgggccatttgcagtttgccaacgatgagaaagggttcaggaagctattgaaacacttgccggaacactccctggtggccatggaggcgacagggtattaccattacaggcttgcccagtacctccatggcaaaggtgttgcggtctcggtggtgaacccactctcggtgaagcgcttcatacagatgaaactggccaaggtaaagaccgacaagagcgatgccagggcaatatgcgagtacgcacgggtaaaccaggtgctcatgtacagtgcccttacggaggtacaggcagagtgcctgcagctcttcaggcttctggacagctatgtgaagatgcgcacgcagaccaagaacaagctccacggagaggaggcacaggaggcactgggcattcccaccaaggccgtctaccgctcgctcaagcgcaacctgaagcacctggacacggaacttgagggactggagtcgaggcttctcgagctggtgaagcgcgaccagcagcatcagctgacactgctgaaggggataccggggatgggcgtgaaaacggcactgttcctgatagtcatcaccgatgggttcagcaagttcgaaagtgcttcgcagctgtgcagctatgtgggcatcaccccgaccataagacagtccggcagtagtgtaaggggcaagagcaggatcggcaaggtgggcaacaggaaattgcggaacctgttgttcatgtgtgccttttcggcctgtaaacataacagggcatgcagggcaatctatgaacggatagtggcaaagggcaaaagtaaaaagttggcattgatagccgtggcaaacaagttgctaaagcaggcattcgccattgcaaagagcgggttgccttatgacgaaaaatttgtgtcaagattagcttaaaaagatttgttttttaactcagttct

SEQ ID NO: 3855 - DNA, 1534 bp, unidentified
  source 1..1534: mol_type = unassigned DNA; note = element_5c9e560
  misc_feature 1..2: note = core
  misc_feature 3..250: note = LE
  misc_feature 251..1414: note = CDS
  misc_feature 1415..1534: note = RE
  misc_feature 3..230: note = bridgeRNA
cttgtatgatgtatttagtaataaatacatcaatactctcctttctttttcaactttgatataatcaatattacactgtggactttttatttttttctatagcttagactatttaaaggagtgtattgccacagttttatctgaattttttatagttggataagcctctgagcttttatgtcacgcaagtttattatgataaaactaggtggaacatccacagtgattacattaagggagatgacttcttatgatttacgtaggcattgatattgccaaacaaaaccatgttgcatcagcaatgagtgctgatggcgaaatcatttttgaaccttttggtttcactaatgataattcaggttttcaaaagttgcttgataatctttcttctttagataaagaagaaatgttgattggtatggaatcaaccgctcattatgctgaaaatcttacatgctttcttttctcaagaggattcaatatctgtatcattaatccgattcagacagctgctcttaggaaaacaaacattcgtaaaacaaagaatgaccgtgttgatacctacttaattatcaaagctctaattatgaaccaatgccgtttatttactcaaagagacttacaatctctgaaattaaaaaacctctgtcgctttcgccaaaaacttatgaaggcaaggacaaaggttaaaattcaacttgttacttatgtggatttacttttcccagagttacaatacttttttaagtccggcattcacattaaatcatgctatgctttgcttaaagaatgttctaatcccgacagaattgctaatatgcatctcacaaggttaacgaaccttctttacaagacctctaggggccacttcaataagcaatctgccattgctttaaaagagcttgcacgcaattctgtcggcactaaaaatgatacactatctttgcaaattacgcaatcaataattcaaattgaattatttacagaacagcttgatgaagtggaagacactattaatgacattatggattcaatggattctgttattaagactatacccggtatcggtaaccttaacggtggtatgattatcggtgaaattggtgatatccatcgctttgagagcccttgtaagttactggcatacgcaggacttgatccttctgtttaccagtctggcaagtttaatgcctctcatacgcaaatgtctaaacgtggttctaaacttcttcgctatgctcttattaatgctgcatggcagttaaccttaaacaacaagacctttaaggattactacgatttgaaaatttctcaaggtcgtggtcattacaatgctttaggtcatgttgctcataaattggttcgtgttattcataaaatcatgattgataacattgaatttaatttagcttagtccagcctactatattcagtttttttaagcatcaatccagatgctttatttggtatacacttttttagtctaagatttttttaaaaagtcctatttttctattgacaattcatagttggt

SEQ ID NO: 3856 - DNA, 1456 bp, unidentified
  source 1..1456: mol_type = unassigned DNA; note = element_5cc0bb2
  misc_feature 1: note = core
  misc_feature 2..154: note = LE
  misc_feature 155..1186: note = CDS
  misc_feature 1187..1456: note = RE
  misc_feature 1204..1456: note = bridgeRNA
gaatgaaatggacgcctcctacctggattggcagtgacgtagcgacagtgtggggaagataagacgattggaggcggatcctcacgggcctacggcatcaaagtgccaaaatggaaagtgtcaaaactttcaggctaaaccgggaggatccaccatgaatactactaccaaaatgtgcgttggggttgacacggcaaaggatgtttttcagctccactgggtcgaacgcgagactggcgaagtacgcaacaaggcactcaagcgtgacaaatttctcgagcatttcgccaacctgagttccagcattgtcggcatggaggcatgcggcggatcacatcattgggcccggcgcttgatggcgatgggtcatgaggtcaagctgctgtcgggacggttcgtcaaggcattcgcgcccggaaacaagaacgacgctgccgacgcacgcgccatttggctggccatgcaacaacccggtattcgtactgtggccgtaaaaactgaagagcagcagtcggtgctggcgatgcatcgaatgcgcgaacaattgatcaaattccgtacggcgcaaacgaacggacttcgcgggctgatggcggagtacggcgaggtcatgaaacgtggcagagctgcgatgaatgagcaaatgccggcggtgctggaacgattatccaaacgtctgccaggtctgctgatagacacgttgcgcgcccaatggaacaggatcgctgtcatcgacggagacatcaaacaaatcgaggtgcgcctgcaggcgtggatgaaagtggatgaatcttgccaggcgatcgccgcgatacccggcgtgggcctgctgaccgcgactgcggcggtggcgacgatgggtaacgcgaatgccttcaagtcgggacgcgagttcgcagcatggataggtctggtgccggcccagaatggcactggcggccgggttaagctgcttggcatcagcaagcgcggagacacctatctgcgtacattactgattcatggcgccaggtctgcactgctgcattcaaaggagcctagcgcgtggacccaggagatgcgcaagcgccgcccactgaacgtcgtcgtggtcgccctggcgaacaagatggcccggatgatttgggcgatcctggctcatggccgagcctacgataagcaacacgtgagttcccgaccagcgtaaaaaccgctggccgggcctaagagagtttgacgcgtcgagagttgcgcagggtagtttaagtgtgatgacaaacaggtaagaccgtgacctactaaacctgaatgggttcccggggcatcaaagcccgttgcgggaatgaggtgtgggtcagcggatttcatcagggccagcagagggaaatccctgctgcacacaaggccggatatagaactgcaactgacctgtcaacaaaacacaaaaaccaccttgcaaacgggagacgtccatata

SEQ ID NO: 3857 - DNA, 1735 bp, unidentified
  source 1..1735: mol_type = unassigned DNA; note = element_5cc6661
  misc_feature 1..2: note = core
  misc_feature 3..244: note = LE
  misc_feature 245..1579: note = CDS
  misc_feature 1580..1735: note = RE
ctcgtataataagatttgcagacagttttaagtgagtctgcttagttcactgcgtgtagtcaacaggctatgagatgcccgtgatacaatagctgtaggacagcagggtcaagttctcgagctcccagttgagccgcaaggctgcttcaaggaaagtccgttcccctgagccggaagttagctgcaaactcattggctgtttgccggaggcaaggccgcccttttcgcagtgagggctatcgcattggcctgctccggaatgattctgatacgcgaggttgcggatgctccggttatcatgggtatctcaaagtctgctggcctgaaatcccgacggggggaggtgaaaatcgtgaacccactattcgttggcattgatgtgagcagcagaagtaatgttgcctatctgatgaaacccgacggcagcaagcactccagcttttccgtgcagaacaacctgggcggtgctaaactgttgtcagagaggattgtgtcggcattacactccatgcagctcagtgatgtggtaatcggcctggaggccacctccatctacggggacagcttggtctatgccctccgggaggatggcggccttggccggttccagcggaagatctacgtcctgaatccaaagcaggtcaaaaagttcaaggaagcctatcccgatctgcccaagaatgactttgtggacgcctttgtgattgccgaccatctccgcttcggcaggatcgccaaggaggtctatatggacgactatcgctaccaggcgctcagaacccttaccagggccagatttgatgtcattcagaacctgactcgggaaaagcagcggttcgccaactacttatttctgaaatgctccggcatagcccagaccaaggatatccagaacaccagcgccaccaccatcgcgctcatggaacactttgaaaccgtggatgacctggcaaacgctgacatggaagaactgacctcctttatcactgaagcaggccggggcagattttccgacccggcagccgccgccaaggcggtacgggctgcggccagaggctcttaccgcttgcccaagactgtgaacgatacggtaaaccaggccatgtcggtctccattgcctccatgcgggctctgaaggaacaggtcaaggtgttggacaaagccattgagcagcagttcgagatcgtcccgaacacgctgacttctattcctggcattggtaaggtctactctgccggtatcatcgctgagattggcaatatccaccgtttcggttcccaagcatctgtcgccaaatttgccggcctcgtctggcacaaagaccagtccggcgaatttgaggcggaacactcccggatgattaaatccggcaaccgctatctccgttactacctgctggaagccgccaactctgtgagaagatgcgactccgagttccggcgctactatgacctcaagttccatgaggtcaacaagtaccagcataagcgcgcactcgccttaactgccagaaaactggtccggttgatctttcggctgctgaaggacaaccgcctgtatatcccgccggagggctgagcgtatcgcttgctgctctgacgcataggccctgtttcaaaatttctcggggacggggcttaggttggtattgcctttttcctgcccacatggtcctttttactcattctcatttgaaattttcttgcatcgcctacttgacttcataccattgga

SEQ ID NO: 3858 - DNA, 1254 bp, unidentified
  source 1..1254: mol_type = unassigned DNA; note = element_5ccae1a
  misc_feature 1..3: note = core
  misc_feature 4..183: note = LE
  misc_feature 184..1239: note = CDS
  misc_feature 1240..1254: note = RE
  misc_feature 3..203: note = bridgeRNA
tccttaagttcgaggggtcagtaggttgtgctgacgacccgagcgggtcgggtgtggctggatgggttggttgccggctttagggtgcggcttgaaagggactggctgcccggcccgcttggacttccctggccgctgattgagatctgcgacttgtcgctgctttgaggacctgatggcggggtgacgttgctcgacccagacggtgcggtgctgctgtcgcggaaagtcgccaacgacgagcgcgagatcgtgcaggtcatcgctgactgtgccgcggcggcgcggcatgtgcagtgggcggtcgacctgaccaccgtcgaggcggctctgctgctgagcgtgctgtgggccaacgagcaaccggtcaggtacttgtccggccgcatcgccgaccagtcccggatgcgccgtgacttgccggtgctgcgacccggtgacgatctgatcgctgagctgcgcaagctcacccgccgccgcgccgatctggtcgccggccgcacccagaccatcaaccggctgcgccagcagctgaccgcggtgtgcggggcattggaacgcgccgccgacatcgcctcccatcggggctgggcgatcctgctcgcgcgctaccagcgtcccaaggcgatccgccgcgccggcgtcgaccggctcaccgcgttgctggccgacgccggggtgcgtaacgctgccacgattgccgaggccggcgtcaccgcggcgaagtcgcagaccgtacgcctgccaggcgaggacatggccgccgagatggtggccgccctcgcgaaggaggtgatggacctcgacacgcggatcaagcaggcagacaccgcgatcgaggaccggtttcgccgccaccacctggccgacgtcatcgtctccacgcccggcttcggctaccggctcggcgcggaactgctcgccgcgatcggcgacctcgacctgatcagctccgccgaccacctggccgcctacgctggcctggccccggtcgccaacgactccggcaaactgcacccgcccagccgctacaaccgccggctgcgccgcgcgatgtacatgtcggcggtgaccagcatgcgctgccaccccgaatcccgcgcctactacgaccgcgccgaaggcaagcgccccatccaagccgtcatctgcctggcccgacgccgcaccaacgtgctgtgggccctcatccgcgacaaccgcacctggcaggacgaaccacccgccatcacggcttgacacgctcattgagag

SEQ ID NO: 3859 - DNA, 1458 bp, unidentified
  source 1..1458: mol_type = unassigned DNA; note = element_5cd4aaa
  misc_feature 1: note = core
  misc_feature 2..240: note = LE
  misc_feature 241..1443: note = CDS
  misc_feature 1444..1458: note = RE
  misc_feature 11..239: note = bridgeRNA
cccattaccttcttggtggccccgcaatggggcgcccggcctccggagttggcatgactttctcccccctgtcgaacgcatggcctggggggtggtgtcaccggctccggaggcatcgacagaccgctgattaggggcatgaccaccgaccttttcgcaggtcgggaggctcttcgtaatgtggatgtggcgatcggtgccgtgggacggccgggcgagagggacgaccggaggacgcacgtgatcgacgtcagcgatatcggtgtcttcctcggtctggacgtcggcaagggcgaacaccacgccaccgccgtcaccccggcccggaagaaggccttcgacaagcggctgcccaacagcgaacccaagctccgtgaggtattcgggaaactgcaggccaagcacgggacggtcctggtggtggtcgaccagccagcctcgatcggggctctgccgctggccgtggcccgtgacatgggctgcccggtcgcctatctgccagggctgacgatgcggcggatcgccgatctctaccccggcgaggccaagaccgatgcccgcgacgccttcgtcatcgcggacgcggcccgcgtcatgccgcacaccctccgctcggtcgatctcgaagacgaaacgatcgccgagctggagatgatcgtcgggttcgacgacgacctggccggcgaagccacccgcgtcagcaaccggctgcggggcttgctgacgcagatccacccgtcgctggaacgggtcctggggccgcgagtgcagcacccggccgtgctcaagctcctcgaccagttcggctccccggcccagatccgcaaggccggacggcgacggctcgtgacgttgatacgcccgaaagcaccgcggatggccgagcggctggtcgaggacatcttcaccgccctggacgagcagaccgtcgtagtcccgggcaccgacgcggccgcactgatcgtccccagcctcgccaactcgctccaagcagtgcttgaccagcggaaactcctcgccgcgcggatcgaggaactgctggaggcacaccctctttccaaggtcctgacgtccatgccggggatcggcgtcaggaccggagcacggatcctcatcgacgtcggcgacggatccagcttcccatccgccgcccacctcgccgcctacgcaggcctcgccccagcgacccgcagctcaggctcctcgatccgcggcgaacaaccctcccgacgcggaaacaagcagctcaaacgggccttcttcctctccgccttcgccgccctggccgacccggcatcccgcacctactacgacaagaagatcgcccaaggaaagcaccacacccaggccctcctctgcctcgccagacgccgagccgacgtgctgttcgcgatgctccgcgacggcaccttctacgaaccccaacccgcccccacgggttgacgaaacccatagggg

SEQ ID NO: 3860 - DNA, 1318 bp, unidentified
  source 1..1318: mol_type = unassigned DNA; note = element_5ce342b
  misc_feature 1..2: note = core
  misc_feature 3..61: note = LE
  misc_feature 62..1066: note = CDS
  misc_feature 1067..1318: note = RE
  misc_feature 1103..1305: note = bridgeRNA
ttatgggatggacgcctcccgcttcccggcgacgatcagtcgccaaccacaggagggaagcatggctctcgaactattggcgatcgacctgggtaagcgctcttttcatctctacggcattgacaccgacggcgtggtcctgtcgcggaaagtaagccgagcgaagttggccgaggtggtcaacgagattgcaccggcgacaatcgcgatggaggcgtgcgccagcgcgcatcattgggctcggtgctggcttgcggctggtcgcgaggtacgcctcatcaatccccgttttgtaaaggccttcgtcaaaggctcaaaaaacgacgcggtagacgcggaggcgatcttcgaggcagcggcgcgcccaacgatgcgcttcgtgccggtgaagtcgacagaccaacaggacgttcagtcgcttcaccgtgcccgcgaccgcctgatctgccaccggacggcattgatcaatcacacgcggggtctccttgccgaatatgggatcgtactgccacaaggcccgtggcgctttatggcgcaggcaccgaccgtgatcactgatgccgaactgtccgacctggcgcgctcgatctttagtgagctgctggaccaacttgacgacctcgatcgtcgaatcaagaagctcgatgcgatgattgttaagctttgtcgcgctaatgaaacttgccgacggctcgcccagctgcccggcgtcggcccgatcatcgccaccgcgatcgtcgctgccgtcaacgatggccgacagtttcgctccggccgcgaaatggcagcctggatcggcctggtgcctcgacaatatacgacgggtggcaagccacggctgggcggcatcgggcaccgtgccaaccactacctcaggcgtcagctgatccatggcgctcgcgcggtcgtcagccggctttccaagcatgatgaccagcgatcaacctggctgagagcacttgttgcccggcgcggctttaatcgggcgatcgtcgcactcgccaacaagacggcacgtatcgcgtgggtgttgctgaccaaaaaggcggcgtatgcggctccctaagtaatcgcacacacggctccgctgcatagaggttatcgaatgcgaggtgaatactgatggctcctcggcaaggaccgcagcttcaaagcctgatgtacgacaaggcccaagcggccgatggtgttatgaggtcagaagcacagcggactcccatcaaggccaggagcggtttcgctccagcaacaggccggatagattcacgcatcccgcggagaccaacaggatcatcttgcggcgggaggcgtccataga

SEQ ID NO: 3861 - DNA, 1352 bp, unidentified
  source 1..1352: mol_type = unassigned DNA; note = element_5cef718
  misc_feature 1: note = core
  misc_feature 2..69: note = LE
  misc_feature 70..1107: note = CDS
  misc_feature 1108..1352: note = RE
  misc_feature 1121..1346: note = bridgeRNA
taatgggatggtccgctccgattccaacgggagcacactatatccaagcaactgcggaaggagaccgccatgaagaagcgcattgaaggagtcacggtatacggcatcgacattgggaagaacacctttcacgtcgtcggcctcgacaactcgggtaagccgatgttgcacagcaagttcaagcgcgatcgattgctcgttcacttcgcgaacacgcctgcagcgcttattgggatggagagttgtccaggatcgcagtggctggcacgcaagctccaggcttcgggccacacggtcaagatcatccctgcacagttcgtgaagccttacgtgaagtccaacaagaacgacatggtcgacgctgcagcgatcgccgaagcagtcaccaggccgacgatgcgcttcacgcagatcaggcaaccggagcagagcgcacgccaggcgttgcatcgcgttcgggatcgatatatgagccagcgaacgggtctcatcagccagatgcgaggcttcctgctggaatttggtatcgctattcggcaaggagctggagtcttcagactggacgttccacgggtcctgggtgacgaggagaacgaacttccgccatccatgcgaactttgcttggagacctgtggaacgacttcaaactcctggagaacaggatcgaagaactctcgaagcaaatccagcgcagcgttcagtacagcgacactgcccgacgactcatgaccgtacctggcatcggaccgcttgcggccagtgctcttgaagcctcagccggtaacggtcaccagttcgccaacgggcgtttctttgcggcatggcttgggctcacgccgcgagagtattacacgggtggtaagaccacactgctcggcatcagtaaacgaggtaacacttatcttcgaaggacacagatccatggagcccgatcctgcgtgcagacctgcgacaggcagcgtcatccgctgggagaatggatcacgaagctcgaacaacgcatgcatcgcaacaaggtcatcgtcgcacttgcgaacaagatcgctcgagtcgcctggaagatcctcaccagacccgaggagatttatcgctgggctgatgcctgacaccaactcttcctaagtttgctgcgcagaaaacggatgacacaacggtcgatcggcttgctgtaaacccgctcgggaaaccggtcttctttaagaccgaaccaagttattgggaacggcatgcgcgggtctcatcatggcctggtcgccaaaagcggccgactcgcgagaggccggatacatttatgcaaaccgctatgtgtcaaaagcaaacctgcgcttgcaaaaacggagcggaccataca

SEQ ID NO: 3862 - DNA, 1386 bp, unidentified
  source 1..1386: mol_type = unassigned DNA; note = element_5cefee0
  misc_feature 1..2: note = core
  misc_feature 3..78: note = LE
  misc_feature 79..1113: note = CDS
  misc_feature 1114..1386: note = RE
  misc_feature 1115..1373: note = bridgeRNA
tgatggggtggacggccccgagcggcatcgatgtgccagattgaggtcgttgctgatcctcaaacaaaggagccgtccgtggagaagattattcgaattggcatggatacgtcgaagagtgtttttcagctgcacggggtgaacgaggtggagcagcctgtggtgcgcaagaagcttcatcgcaaggagatggtaaagttcttcagtcagcttgagccgacggttgtcgggatcgaggcctgcggcgggtcgcaccactgggcgcgggcgctgggggcgttgggtcacacggtgaagctgatggctccgcagctggtgaagccctatgtgaagcggggcaagaacgatgcggcggacgccgcggcgttgtgcgaggcgatgagccggccgacgatgcgctttgtaccggtgaagagtttggaccagcaggcggcgctcatgttgatcgggcttcgcgatgggctggttcgccgacgcacccagctctccaatgcgatccgcggctatgccacggagttcgggctggtggcggccaaggggctggagaggatcgagcggttgctggcgcgcgcccaggctgcggatctgccggcgctggcgggcgagctgttcggcttgctgggccgcgactacgcctgtctccaggagcaggtgagagaggtcgaggctaggctgatggcctggcaccgggagaatgaagtcagccggcgcctggcccaggccccgggcatcggtccgatcggagccacgatgctggtgatgaaaacgcccgatccccatgcctttcgctccgcccgggacttcgcggcctggatcgggctgacgcccaaggaccactccacggcgggcaaggtgcggctgggcggcatcacgcgggccggcgatgaggcgctgcgcagtgtgctggtggtgggcgccatgtcggtgatccgccaggctcggcaaggcaagggccatcgctcgccctggctggctggccttctgcagcgcaagccgcccaaggtcgcggccgtggcgctggccaacaagatggcccgggtcgcctggaagatgatggcgacgggggaatgctatgacgccgggcgttcctcgccggcgcccaagaccgcctagaccagatcgctcgggcgggaagccgttccgcccggtcgatgccggaccttgccagagaaggagcagatggcgggatcgatcgatccgaaacgcgggacaatccgaggcatccaccggttcgacaccgcagtcgtgtggggaacccgcggtaaggaagccatcttggccagcggtcgatcgtgaccgcatcaaacaggccggacatatggacgcaagcgatccgattccaacctcgttcccaaatctctttgcaagccgggggccgtccacata

SEQ ID NO: 3863 - DNA, 1449 bp, unidentified
  source 1..1449: mol_type = unassigned DNA; note = element_5cf1a6a
  misc_feature 1: note = core
  misc_feature 2..179: note = LE
  misc_feature 180..1436: note = CDS
  misc_feature 1437..1449: note = RE
ctactaggagacttcccagcaggaccggcgtctggccagactcggtccaggggtccggcgggacgctcgttatgcggctgcccaccggctactggggtgtggctctcatctggactgcgacccgtcgggccccgtgacgaggagtggctcaagaggggtctgcccagctcgtagtagcaatgcccacctcgtcgtccccaactggaaccacgacggacgaggtgaacaggttgaagacaaccagggacgtgatcatcggggtcgatccccacaagatgtcggtgacgatcgaggtcgtcgaccccaacgagcgcctgctcggcaccgggcgcttcgggaccgatcaggccggctacgccgcgatgcagcgttatgtgaagcagtggccacaccgcacctgggccgtggagggagccaacggcgccggtcgcccactggcccagcgactcatcgccgccggtgagcacgtcgtcgatgtgccggccaagctcgcggcccgggtgaggttgttcgacaccgggcacaaccgcaagaccgacgccctggatgcccactccattgccgtggtcgcggtccgcactccggggctacgggtcgtggtcgaggacggtgagctcgaggcgttgcggatgctcaccgagcgccgtgatgagttggcccaccagcgtgtgcagacggtcaaccggttgcagcgcctgctcagcgaactgctgcctggccagcgcaaacgcgacctgtccgctgcacaggccaaggccatgctggccaccgtgcggcctcgcgacgtcgccggcaagacccgacgccggatggcagctgagcaggtcgccgacctggtcgtactcgatgcgaagctgaagaagatcaaggccgagctgaaggacgccgtgaccgcgcgcggatcgaacctcatgggcatctacgggatcggccccgccggtgccgcacgcatcctggccgacgtcggtgacgtggcccggttcgccgaccggaaccggttcgcgtcctggaccgggaccgcacccctggacgcttcatcgggtgagcagaaccgtcaccggctctcccgcgccgggaaccgccggatgaaccacgtgctgcacatcgccgcgatcgtgcaaatccgccacgacaccgaaggccgcgcctactaccgccgcaagctcgccgaaggcaagacaccgatggaggcactgcgctgcctcaaacgacgcctgtccgacgtcgtctaccgccagctcgtcgccgacagcaaggcccccaccacgcccgtggacgcggatccgggagggcaccgcggggcgactcttcactccagcgcggtcgactcacacccgcacatcgacacttcggatcagccacttcccggacccgcgaggccgacgctacgccccgaccgcgagcacgtgaagaacctcgtccccagcacccgttgacacagaggggtgc

SEQ ID NO: 3864 - DNA, 1511 bp, unidentified
  source 1..1511: mol_type = unassigned DNA; note = element_5cf6bd9
  misc_feature 1..4: note = core
  misc_feature 5..244: note = LE
  misc_feature 245..1495: note = CDS
  misc_feature 1496..1511: note = RE
gtcactagggcaccctctttctcgtaggcaccgttacggtgcttgctgttgggactcggcgggagccggggtgacggtctgtggcggtcgctcttcgagggcctaaatgacaccaccgcccccggttctcgcggggctggagatcggccacagggagatgcgccgcagagcgccggttagtgaccacccgagagctggcctcgtcaccgccgagtcgacgtcgctgccattgtgaggagttgctttgtctcttgccctgccccccgctgagttcttcgtcggcgtcgactgggctgctgaggtccacgccgtgtgcgtgatcaacatcgaagggaaggtgctgtcgcagttcaccgtggcgcattccgccgatgggatcgccctgctgctgcgtcggctggccaagttcggtgagccgatcgacatcccaatcgggagcgaacgtcgcgacgggcggctggtcgacctgctgctggaggccgggcatccggtggtaccggtcagcccgaacgcgatcaagacctggcgcgaaggcgaggtgctctctggtgccaagtccgatgccgccgacgccgcggtgatcgcggaatacctgcggctgcggcggcaccggctgaccgccgccgccccatactcggctgagaccaaggcggtccgcaccgtagtccgcacccgcgacgacctggtacaaatgcgggtagccgcggtcaaccagctggccgcgctgctggacgcctactggcccggagccaccgcaatcttcgccgacctggagtccaaaatcgccctggagttcctcagccgctacccgaccccgaccgcggccgcccacctcggcgagaaacgcatcgccgggttctgcgccgcgcgcggctactccggcaaacggtccgccgccgagctgctcacccggctccgggcagcgccagccggcaccaccgagccccacctcacggtcgcactccacgacgccgttctggccctggtcggcgtggtaaaagcggtcaacactgcgatcaaggacctcgacaaatccgtcgccgcccggctcggggagcacccggacgggaagatcttcacgtcgctgccacggtcgggtcagatcaacgccgcccagatgctcgccgagtggggcgactgccgccaagcctacgaagcacccgactccatcgctgcgctcgccggctgcaccccagtaaccaaggcctccggcaaacacaaggccgtccacttccgctgggcctgcaacaaacgctttcgggtggccatcacaaccttcgccgacaacagccgacacgccagcccctggaccgcgaagatctacaacgacgcccgcacagccggcaaagaccacccccacgccgtccgcatcctcgcccgtgcctggatccgagtgatctggcgcagctggcacaacaacacgccctacgaccccaccagacacggagccgcccaaccgctctccgcgcactcttcggtcaacctcgcagcatgaggttgacacagggagt

SEQ ID NO: 3865 - DNA, 1550 bp, unidentified
  source 1..1550: mol_type = unassigned DNA; note = element_5cf9c82
  misc_feature 1..5: note = core
  misc_feature 6..261: note = LE
  misc_feature 262..1398: note = CDS
  misc_feature 1399..1550: note = RE
aaacatccatgaataaattttactccccacccaggcatgaaaatccatctctccttccataatggaggatgaacgcaaacagtttggaaagacgtgctttttaatggtggttcgaccctgtgcaaaaaactgtttgagtccatttggtgttccacccattgtgagcccttttcatgtgaaaaggtgactacgaacagaaaaatgcctaacgtacaagtggactcactgtttgcgaatttatcaatggaaggagtaagaatcatggatgttctttatcatcgttgtgcgggattagatgtccataccgaaaccattgtcgtttgtgcccttcttggagaagaagatcacattcaaaaggaaatcgaaacattccctactttcacgaaagatttgtttcgtcttctgaaatggttagaagatcgtgggatcactcatattgcgatggaaagtaccggtgtttactggaaacccgtgttcaacattttggaagactattttgacattactctcgctaatgcccagcgcatcaaaaatgttcccggtcgaaagacagatgtctccgatgccgaatggatcgccaaattattgcgttatgggctgatcgagaagagtttcgttccgcctgcggacattcgggaattgcgagatttgacccgtttacggaaaaagtggattgggcaattgaccgctgagaaaaatcggatacaaaaagtgttagagtgttcgaatatcaagttaagttctgtcatttcggacatatttggtgtatctgggcgaaaactacttgaacgcctaatgaaacaaggatatatcgaagagccagggattgatgcctgcattcatgggagaatgaaaggaaaaagacaacaaattcaagattctctctttggaacattgaccgagcatcagttgtttatgattcgccaatcttggaagcatatcgaatcgttggaaagcttacttcgagaaatcgaagagcgaatcgaccaactcttacaagcctacaaacaagagatggagcttcttgtgaccataccgggagtcaaaaaagaaaccgctgccgtgatcatcgctgaaatcggggtcgatataggacagttcccaacttcgcaacacctcgcttcatgggctggagtggctccagggaatcatgaaagtgcagggaaacggaaaagtacccgaacgacgaagggaaatccccatatcaaatccgcgttatgtgaggcggcgtgggcgttatctcgatgcaggaatcaacgattggcagcgaaatattggccactggcggcacgcaggggaaagaaaaaagcactcgttgcgatggcgcaccgaatgcttacaatcatttactgcatgctttctcgaaaagaaccgtttcgagaacagccaacctattagtataaccaaaaagacgaagaactatacgagatacctaaaaataaggtagctctgctttcttattgccgtttttggtcattaacagggtatccaatttgatcgtggggtataccgattcgaccatgtttcattgattttcatagaaaaaaaag

SEQ ID NO: 3866 - DNA, 1208 bp, unidentified
  source 1..1208: mol_type = unassigned DNA; note = element_5d1896d
  misc_feature 1..2: note = core
  misc_feature 3..206: note = LE
  misc_feature 207..1193: note = CDS
  misc_feature 1194..1208: note = RE
  misc_feature 12..189: note = bridgeRNA
cttgtatctttccctccgtggtggttagctatcaccacacgaagcagaggcagcttgagcccgaccttaaggcattgaccttgttccgtagatcaagtcttctgcttcacctctcgccagtaaagacactgaacggtagccaaggggcgaaccctgaatgcacaaggcaagtgggcgaagctggctaactttttcaggaggtcatcatgcgctatctcggtatggatgtagccaaggccaagttggattgttgtctgttgctggacgaagacagtgaaaagcgcaagaccaagtcggtcaccaacagtcgatccggtgttgctgattttctggcttggataggcaaacagcatatttcccccgccgagttgcacgtcatcatggaaggcacaggcgtctatcacgaacaggctgcgctggcattggccgatgcaggggttacggtatctatcgtcaatccggcacaggtcaaagacttcggacgcggtctggcggtgcggaccaagaccgatggcatggacagctttgtgttggcgcgttacggcgcattgctcaaacccgccgcctggataccacctgcaccagaggcgcgggtgctgcaagcgctgctcgcccggcgcgatgccattgcccaagacctgcaacgtgagcgcaaccgtcaggagaaggcgggtgccaccgacaccccgatgctgatacggcagtcgttgtccgacagcattgagttcctgtccgggcagctcgcccaattgcagcaggatattgaccagcatattgatcgccatcccggcctcaaggacgatctggccttgctccagagtattccggcagtggggcctcaggtcggaaacaacatgcttgcggtcatgcacagccacgacttcggctcagccgaacagctcgcggcctatcttggattggtgcctattgaacggcagtcgggtagttcagtgttagggcgagccaggctatccaaggcgggcccagccagaatacgcgccgtgttgtacatggctgcggttgtggcgacgcgctgcaacccccatgtcaaagctgtctatgatcgactacttgcccgaggcaagtccaagatgtcggctctcggtgctgccatgcgcaaactggtgcatctatgctttggggtactcagaacccgccagccgtatcagcgcgattatgcaaaaatcgattgacgagcaagacggtat

SEQ ID NO: 3867 - DNA, 1211 bp, unidentified
  source 1..1211: mol_type = unassigned DNA; note = element_5d1bfad
  misc_feature 1..2: note = core
  misc_feature 3..209: note = LE
  misc_feature 210..1196: note = CDS
  misc_feature 1197..1211: note = RE
  misc_feature 12..192: note = bridgeRNA
cttgtatcttgaaccggtagctggttagctaccggttacatgaaacggaggaagcttgtatccgacctgaagacctcgatcttccgacgtagcttaagccctccgtttcacctttcacgccactcaaaatccgaacggtaaccagaagctctgacttcgcatgtacaaggctggaatggcgtgttggttcacgtggaaggagatgaaatatggcttttctcggtgctgatatcagcaaaaataaaatagatgtctgtctgcttgttgccggtattaagggtaagaaaaagcagaaagtcttcaccaatgaaccctgtgtggcccgcaaaatcatcgactggctggaggcccaaaaatgcgcctctgataatatgacagtcgtgatggaagccacgggtatctaccatgagaatctggcgtatgggcttcatgatgcggggatttctgtctgcatggccaatccataccgtgtccgtgagtttgcctgcggaatggatatcctcacgaaaaatgacacagtggacgcatttgtgctggcctgttatggcgagctgaagcatcccgatgcctgggtcccaccgtcagttgaagtccgtaaactcagggcgttgttgcgtcagcgcgacgcgctgaaagaggatgtgcagaggacggccaaccggcttgaaaaagcgcattcaacctcgacaccacgggaggtcataggctcactggagcggacacacggctggctgagtgatgaactggaacggatagaaaagctcattactgaccacacagataacgacccgggactgaaggccgatctggagctgctgaaatcgataaaatgtgtgaaggagcaggtgggacgggagatgctggcactactgaaagacgggacgttcaaaagtgcctcgcaggtggcagcgtatctgggaataacaccggtggagagagtgtccggcagttcggtacgcgggcgggcacatatgtcaaaaacaggcccctcaatagtcagagccaaactgtatgtagcagccctgagtgcaatccggtggaataaacccgcgaaggcgatatatgaaaggctggtagcgaaaggtaaggcgaaaaaagcggcgctgggtgcagtgatgcgtaagctggtacatatgtgcttcggcgtactgaaaacccgattaccatgggatgaaaattatgcagctaccgcttgacgtccaagacggtag

SEQ ID NO: 3868 - DNA, 1393 bp, unidentified
  source 1..1393: mol_type = unassigned DNA; note = element_5d37fab
  misc_feature 1..2: note = core
  misc_feature 3..78: note = LE
  misc_feature 79..1155: note = CDS
  misc_feature 1156..1393: note = RE
  misc_feature 1109..1380: note = bridgeRNA
tgttggtgtggacggcctccgtacggcatcgatgtgccagaatgagtccgttgagatctcagacagaggagaccgtccatggaacacattaccagaattggaatggatacgtcgaagcaaatcttccagcttcacggggtgaatgccgtggaagagccggtcttgcgcaagaagctgcggcgcaaggaaatggtgaggtttttcgaggagttaccaccgacggaagtcgcaattgaagcctgtggtagctcccatcactgggctcgtctgctgcaatcgcttgggcatgaggtaaagctcatcccaccccaatttgttaaaccgtacgtcaaaaggaacaagaacgacgccgcggatgccgaagctctctgcgaggctgtgagccggccgacaatgcgcttcgtgccggcgaagaccgccgagcaacaggccgctttgatgttggttggggtgcgtgagcggctggtccgcaatcgtacgcaacttagcaatgccatccgtggctatgctgctgagttcggcgtaactgcctcaaagggcttgtgccggatcgaccagttgctggagcgcatagcgacggacgatacgctcccggccctggcacgagaactgttcgcgatccatggcaaggagtataggcaactgcaggcgcaacttgaaaagatagaagccaggttgatggcgtggcaccgtgcgaacgcctgtagccagcgcctggctgagatccccggcatcggcccgattggcgcatcaatgctggtcatgaaaacaccggcacccgagacctttcgatcagggcggcactatgctgcctggcttggtttgacgccgaaagatcattcaaccgctggaaaatccaggctaggcgggatcacccgcgccggcgacgaggctttgcgaagtgttctggtggtagggtctacctcggttctacatcgcgtccgacagcgaggaactggctcgccctggcttatcgacctactgaagcgcaagccaccgaagttggctgctgtagcgctagccaacaaaaacgctcggatcgcctggaaactcatggtgagcggtgagcgctaccgaacaaacccaacaccgattgccaaccccaatacaggattcagcccgccacgccgagcgcttcaagcgcgatcgtgttgagttgatgcggaacttgcaagaaaacgagtaggtggcgtgatcgatcgatccaacacgcgtgacactccgaactttacaccggctgtgagaggccgaaaaaatgttaggaactcgcgtcgcggaaaaccatcttggcccgcggtcctgtgcgaccgcacaaacaggccgcacatatgatcgcaagcgatccgatcagactgctactcaaccaccttgcaaggcggcggccgtccacata

SEQ ID NO: 3869 - DNA, 1364 bp, unidentified
  source 1..1364: mol_type = unassigned DNA; note = element_5d45535
  misc_feature 1..2: note = core
  misc_feature 3..77: note = LE
  misc_feature 78..1103: note = CDS
  misc_feature 1104..1364: note = RE
  misc_feature 1079..1351: note = bridgeRNA
tgatggggtggacgcctccccgacggcattggtgtgccagagtggtggtgtttgcgaccactgagcaggaggcgcccgtgtctgaggttaacacgatcggcttggacttggcgaagcacgtctttcaggcgcatggggcggatgcgtccggcaacgttgtcttccgtaagcggctgcgacgcgagaaggttctggagtttttcgcgggcaagcctgcctgtgtggtggctatggaggcctgcagcagcgctcatcactgggcacgtgagattgctcgactgggccatatcgtccggctgattccgcctgcatacgtaaagccatttgtgaagcggcagaagaacgatgccgctgatgccgaagcgatctgtgaggcggtgcagcggccgacaatgcggttcgtggtggtcaagagcgcgacggcacaggccaatgcggttgtgttccgggcccgggatcttttggtccgacaacggacacaggccatcaatgcccttcgcggccatcttggcgagtatggtttggtcgtggctaagggcccgggtcacgtaatcaagcttatcgctcacgtcgaggatccggacagtgacgtacccgatgccgcgcgcttggtgctccgtacgctggtcgaggcattacaattcctgtcggcgcggattgaccttctcgatcgggagattgcacgccgggcgcgagaagacgttgaagtgcggcggctgacgagcatccccggagtgggaccgatcaccgccacggcattggccgcactggcgccgcccgcggacgcgttcaggagaggtcgggacttcgctgcctgggtggggctcacgccctcacagcactctaccggcggcaagcaaaggcttggcacgacctcgaagatgggggagcgaacgttgcggcgacttctgatcatcggagcgagttcggtggtgcaaaaggcagtcagacagggcgtggccgctgaatcttggttagggcgaatgctggctcgcaagcccagaatgctcgtcattgtggcgctcgcgaataagatggcccgtatcgcgtgggcggtgcaggcgaaaagagaggtttaccggggtccagtcgtggtggcgtgacgcacctacggcaagaggcgtcggaggcgtagggcggtcggaaggagagtatggcgcacagtcggtgagagacgggaccggcaagccagtttttcacactgcgcttcgagcgcgtggctgtgatttggatccggtctgcgaactcccatacgggcccgcggcaaatgatcggccgcaccggaggccgaacagatgtcagcacccggctacgcgcaatacaaactggaagatttctcttgcgcccacggaggcgtccacaga

SEQ ID NO: 3870 - DNA, 1457 bp, unidentified
  source 1..1457: mol_type = unassigned DNA; note = element_5d46c1b
  misc_feature 1: note = core
  misc_feature 2..239: note = LE
  misc_feature 240..1442: note = CDS
  misc_feature 1443..1457: note = RE
  misc_feature 9..240: note = bridgeRNA
cgttaccttgttcgtggtcccgcaatggggctcccggccttccggttcggtatgacttgggccccttgtcgatcatggtcgaaaaagtggtgtccccgagccgggaggcattggcagaccgctgatcaggggcatgaccgctcgcctcgctcgtcgaggtgaagcaggccttcgtaacgtggatgccggcacgctgatgccgcaggtggggccggggaagttctgtcggggaggggtttgtgcaccacgagagcgaaatcgacgtctatctcggtctggacgtcggcaaaggtgagcatcacggcactgctatcaccccggcaggcaagagagtgttcgacaagccgctgccgaacagtgaaacgcggctgcgggagctgttcactaaactgcaggccagacacggaacagtactggtcgtggtggaccagccagcctcgatcggtgctctgccgttggccgttgcccgtgattcgggctgccgtgtcgcctatctgccggggctgacgatgcggcggatcgccgacctgtatccgggcgagtcgaagaccgacgcgcgtgacgcagcgatcatcgcggacgccgcccggaccatgccgcataccctgcgcgagctggcaccggacgacgaaacggtcgccgagctgaacatgatcattgggttcgacgacgacctcgccggcgaggtgacccggatcaagaaccgcatgcgcggcctcctcacccagattcatccctcgctcgagcggattctggggccccgtctggatcacccggcggtactgttcctgctggaacgctacggatcgcccgcccagttgaggaaagccggcaggcgccggctgataacgatgttgcggcccaaagcaccacgcatggccgaacgtctcgtcgaggacatcttcaccgccctggacgagcagaccgtcatcgtccccggcaccgacgccgcagccttgatcattcccagccttgccggctcgctgaccgcggtactcgaccagcggaaactcctggccgccaggatcgaggagctgctggaggcccaccctctttcgcaggtcctgatctcgatgcccggcatcggggtcaggaccgccgcccgcatcctggtcgacgtcggcgacggcagtggcttcgcaaccgccggacacctcgccgcttacgcaggactggcccccgccacccgcagatccgggtcgtccatccgcagtgaacacccttccaagcgaggtaaccggcaactcaaacgtgccttctacctcgccgccttcgcctcactgtcacagccggactcacgcgcctactacgacaggaaacgacgcgagggaaaacaccacgtcgcagccatcatctgcctcgcccgacgccgcaccgacgtcctcttcgccatgctccgcgacggcaccttctaccaaccacccaccacagcaacggcttgacgaaaaccatagggg

SEQ ID NO: 3871 - DNA, 1127 bp, unidentified
  source 1..1127: mol_type = unassigned DNA; note = element_5d5189f
  misc_feature 1..2: note = core
  misc_feature 3..263: note = LE
  misc_feature 264..1112: note = CDS
  misc_feature 1113..1127: note = RE
  misc_feature 12..185: note = bridgeRNA
cttgtaactcatcatgtgccgaatccggtatagtgccggttgcggtggcggacgggagaccgacccacctctgggcgtgcggcttgggagagctgggtcgccgtccgccgttccatcgaacccgaacagtcgcctgggccgcaagcgaagcccgtttaggcaaggatgggagaagatggacgccattgttgtggggatcgacgtttcgaaggatcgtcttgacgtatgtgtgacgccgtccggggaggcgatggctgaagccaatgacgcggccggggtcgagaagctcgcgttgcgccggccgggctgacgccggcgcttgtggcgctggaggcgaccggggctacgagacgctggcggcggcggcgctttcggctgcgggcttggccgtggccgtggtcaacccggcgcaggtgcgttcgttcgccgatgcgctcggcaagcgggccaagaccgacccgatcgatgcggaagtgattgcccgtttcgccgcggcgagcggcgtcaggcccaagccgctgcccgatgaacaaagccgcttgctggccgatctggtgacccgccggcggcagatcatggccatgatcgtggccgaggaagcccggctgaagcgggccgccaaccgccaactcaagaagagcattggccgcctgctcgccgcgcttcggcgcgaactcgagaccctcgacgccgatctggacaagcagatacgcagctcgccggcgtggcgcatcaaggagcaactgctgtcgtccgtgcccggcgtcggcaaaggcatatcgcgcaccctgattgccgagctgccggagatcggcagcctcgaccgccgccagatcgcttcgctggccggcctcgctccgttcacccggcagtccggcaaatggcgaggcaagagcttcatcagcggcggcagggcgagcgtgcgcgccgccctcttcatgggcgctttggtcgcttcgcgacacaatccggtcctcaaggccttccgcgacaaactcgtcgcgcagggaaagcccaggatcgtcgccatcgtcgcgacagcccgcaaactgctcaccatcctcaacgccatcattcgggaaaaccaaccatggcgccaacaaaacgcttgaccgccaagacagtcg

SEQ ID NO: 3872 - DNA, 1520 bp, unidentified
  source 1..1520: mol_type = unassigned DNA; note = element_5d56d9e
  misc_feature 1..2: note = core
  misc_feature 3..246: note = LE
  misc_feature 247..1416: note = CDS
  misc_feature 1417..1520: note = RE
  misc_feature 3..224: note = bridgeRNA
ctcgtataataaagttgtaccagatattcccttttaaaatgaattacggtacgattagaatggagctgtggatcggttgcgccccctaccgcttgacggttttcgtagagtccgaccacagacttcattcaatttgttaatgagttggataccgctcgacggttcatatctagcgaggatacattatgatgaagtctctgtggctttgatgcacagctgccaattcaaaaaaggaggtcggtttttatgctttgtgtcggaattgatgttgcaaagcggaaacatgactgctgtatcatcgactcggatgcattgaaaacagttgaatcttttacgtttcccaattcacgggaaggctttgacatgcttctttccaagatttttgagctgggcatcccaaaagataaaataagagtagggttggaagcaaccggccactattcctcgaatctcgcccatttcatctcagaacatgaccttcccctgaacattttcaatccgcttctcacgaatagatacaagcaaggattcagcctgcgtaagaccaagactgataaagtcgatgcctgcgctattgcacagatgattgtgtcaggaaaagcatcccaaacctactcccctttattgtaccataacgaggagctgaaatcactctctcgttacagatctcaaaccatacagaagtgttccaagctaaagatatcggtttcccgtctggttacgattttgttcccagagctggaaggtctgacatcgtccatccatcttgcttcaatttatgcgcttctaaaagcctatcctggccatgaacagattgctcattgcagcatgaagcggctgacacgcctgttaagtgatgcctcccaaggcagatttgacaaaagcaaggctttggagatccatcaggcagcatgccgttctatcgggacagtctcgctttcggcttctatggaactcgtccatgccattacggatattgaagttttgaagcagcatgttgctgaaatcgatgagaaaattaaggaaatggtagaccaggaggaatcttcaattattgacataccagggatcggttataccctttgtgccagtattctgggcgaaatcggtgatttcaagcgttttcctgatgtcgataagctccttgcttatgcagggatgtcaccttccaaatatgaatctggaggtttccattcgaaccataacaagatggaaaaaagaggatccccctatttgcgaaagacactgttcgtcgctgcccgcctggttgcacagaatgtgccaaagttcaaagaataccttgaaaagaaattgtccgaacacaagccttacaaagtcgctttgtcccatgtggccaagaaactgatccgattgatttaccggcttggtgttagtcgctgcccttatttagcctgattttttaaagcccacaagagggggcttgggtaagtgcgcccttttgccaaaatccatagcaactgaaatttattttaaaattggcttgactttatatagttggt

SEQ ID NO: 3873 - DNA, 1386 bp, unidentified
  source 1..1386: mol_type = unassigned DNA; note = element_5d6089f
  misc_feature 1..3: note = core
  misc_feature 4..88: note = LE
  misc_feature 89..874: note = CDS
  misc_feature 875..1386: note = RE
  misc_feature 1087..1372: note = bridgeRNA
agatggggtggttgccgtcctcccctcacggcatcgcaatatgccaagatgatgtggttgtagcccacaggacggagaagacggcaaaatgaaagacacgatgatcggggtggatctggcaaagaatgttttcgtgctgcacgcagcaacgatggcgggcgaagtacggtatcgaaagaaactgtcacgaggacagtttctccgctttctatcggaacagccgccagcgattgtgattatggaagcctgcggtagcgcccattactgggcccgtgagttggtcgaagcggggcacgaggtcaggctgattgctccgcaatatgtccgccctttcgtgaagcgccagaagaacgacgccgccgatgctgaagcaatcgtcatcgcggcccgtcagcccgagatgcgtttcgttccgcccaaaactgcggatcagcaagctcgggcggttctgttccgggcgcgcgagcggattgtccgccagcgaacggaattggtgaacgctttgcgtgctgttctctatgaatatggccaggccattccccagggcatcgctcatatccagcgcattgaagcgatcgttgagaggactgaaatcggcctgcctgaactcgttcgagaggagtgccgtgatcttttggctcagatagacgagaagacagcccggattaaggagaaggccaagaagctcgtggatctgtctcgacagagcggaatcgcgcatcgacttcaaacgatgcctggcgtgggtccgctggtcgcactggcggtagaagcgttcgcgccagcgatggagaatttccggtgcggccgagatttcgcagcctggctcggtctcgttccccgacaattttcgtcgggcggaaggaacgactaggccgggtatcgaaggccggacaggccgacattcgcagacttctgatcatcggtgcgatgacctgcgtaagttgggcgggtcgcaaaccgccggtgcacggatcgtggctttcacggatgctcgcaaagaagccgaagatgctggtggctatcgcactggcgaacaaaatggcgcggaatatatgggccatgctgacgaagcaggaagattatagagacccggctctggcaattatggcgtgacacggaaccgccacggataaccaggaccggctaggaggtgtgagaagtcgatgacccgaatgggcgcatgatcgaaacgatctggatcgggaaaaccagtactgctcttggagccacgagctcgggaacaagatttggaccggatccgcagatcaccataccggccagcggcctctgaaagtgccgcaaagaaaggcctgacagaagaccgcactcgatcacacctcaagaaggtcagaaactacttgcgcaacggacggcaaccacaga

SEQ ID NO: 3874 - DNA, 1394 bp, unidentified
  source 1..1394: mol_type = unassigned DNA; note = element_5d64874
  misc_feature 1..2: note = core
  misc_feature 3..89: note = LE
  misc_feature 90..1121: note = CDS
  misc_feature 1122..1394: note = RE
  misc_feature 1162..1380: note = bridgeRNA
gatgaggtggatggctcccgctcacggcatctaggtgccaaggtgtgaaggccgtcaggcgttcacgagcaaaatgggagccatccgctatgcagattaccacgatcggcctcgacttggccaagagcatttttcaggtccacggcgttgatgcgagcggtcagatccttgttcgcaagtcgcttcggcgatcgcagatgctgccattttttacgaagttgcctccttgcctggtcggcatggaggcgtgcggcacatcgcattactgggcgcgcgagctgatcaagcttggtcatgaagtgcgcctgatgccgccggcttacgtcaaaccgtatgtgaagcgcgggaagaccgacgcggccgatgcggaagcggtttgcgaggcggtgacgcggtcgacaatgcggttcgtgcccgtcaagtcgcccgagcaacaggcggcgctgtcgatacatcggacacgcgatctgctggtcaagcagcgtacgcagctgatcaacatgatccgcggtctactggctgagtttggggtcgacatccccaaggggttagaacgagcactgctgatggcccgacagatcgtcgatggcaaggcagcagaggttccatttgaagctgccaaggttgtcggcacgctgtcacagcaagcgctcgacacccacgttcgggtccgcgagatcgaccgcgatctggccgttttgctacgaagcaacgatgttgcacgtcgtctgatgacgatccccggcatcgggccggtcggcgcgacagcacttgccgcatcggtcaccgatccgcatcagttccgctcggggcggcagttcgctgcctggctgggactgacgccacttcagaagtcgagcggcggcaaagagcggctcggtcgtatcaccaagatgggcgacaagtacctgcgcaagctgcttattgtcggcatgacgtcacgcgtgcgccgtgccaagcaaaatcccacagtcgatccgcgcttggccgatctgctcgcgcgaaaaccaacgagggtcgccaccgtcgcgatggcgaacaaaaccgcgcggatcatctgggcgatcatgacacgtggcgagacctatcgtgccggccacaggccggcacttgccgcttaaaaagaccgtacaggacttggctgaagaggagatcagcttcacgaggttgcgagcgcgatgcgatgtgatggcaaaccggtcagacccggaacagggacaacccaccggatgtccaaggcgtcatagcctgaaaagcagaatgggaccttgttcgcggactccatcagggccagcagtctcaaatgactgcatcaacaggccgaacagaagactgcacccgaccaaagccgctgcgtcaatttatcacttgcaacgcgggagccatccacagag

SEQ ID NO: 3875 - DNA, 1375 bp, unidentified
  source 1..1375: mol_type = unassigned DNA; note = element_5d66437
  misc_feature 1..2: note = core
  misc_feature 3..86: note = LE
  misc_feature 87..1118: note = CDS
  misc_feature 1119..1375: note = RE
  misc_feature 1123..1363: note = bridgeRNA
tgatggtgtggaacggcccttcgaaccggcatcaaggatgcctattgtggggacgccaatcaccactcttttgaaggaaccgttccatggagaagattaccacaatcggttttgatttagccaagtcgatctttcaggtccatgctgtgactgcagaggggaaagttgcactccgccgttccttgaggcgctcgcaggtgcttgattttttccgctccatcgagccttgcctgataggtatcgaggcttgcggtaccgctcactattgggcgaacgcgatcggacaattcggtcatacggttcgtttgatgccgcctgcctatgtgaaagcttacgtgaaaagaaataaaacggacgccgcagatgcagaggccatatgtgaggcggtgacgcgaccgacaatgcgcttcgtatccgtcaaaaccgcggaggaacaagccgccgggatggttttgaagacgcgagagctgcttgtccgtcagcgcagccagatgtcaaatgcgatgcgctctcacatggccgaacttgggatcattgcggcaaccgggctgcccagcatcgccaagctcgttgtcatcctacgtgacgaagaagatcatcgacttcccgcttcagcgcgggccgcgcttctggaaatggccaagcaaatcgaaaccctgacagagagaattgaaaagctcgacagcaggattgtggccgcagtgaaagccgatgatgccgctcgccgtctgacaacgattcccggcgtcggccccatcatcgctgcgactgttcgagcctcaatcccagatcccgctggctttcggacagggcgcgatttggcggcctggattggagtcacgccgagggcaaactccagcggaggaaaagagcgacttggtaaaatctcgaaacgtggcaacaagcagttgaggactttgttggttgttggtgcgacctcgatcctgaagcaggctcgacggggcgcgaaactacctgcctggatagccgctttgatagagcgaagaccctataaggtcgctgcggtagcgctggctaacaaaatagcgcgtacaatatgggcgctcctcgtcgaaggagggacgtatcgggctccggcgatcatgatgaaggcataaaacaagcttctcggcgacaggcgccgggatagcggcaaggtacaacagcgtgatgaaccactggaacgcaacctcaatatcgatcagaccgtgtgattcagggcgccattgagcgcgtgagattgattaggcgatcgacattgcggacttcatcatggccagcggtctaataccgcatcaacaggccgaacatatgaatgcaccgtccgatggtgacttacgaggaaaacaccttgctaaccgggccgttccacata

SEQ ID NO: 3876 - DNA, 1362 bp, unidentified
  source 1..1362: mol_type = unassigned DNA; note = element_5d6656b
  misc_feature 1..2: note = core
  misc_feature 3..76: note = LE
  misc_feature 77..1102: note = CDS
  misc_feature 1103..1362: note = RE
  misc_feature 1078..1349: note = bridgeRNA
tgatggggtggacgccccccgacggcatcgacgtgccaaggtggtggtgttgaagagccaccagagggaggcgtccatgacagaggttagcaccatcggcctggatctggccaagaacgtctttcaggctcacggcgcagatgccggcggcgctccggtcttccgcaagaagctgcgacgcgatcaggtgctggccttcttcgctgcccagccgccctgcctcgtggcgatggaggcctgccccggcgcacatcactggggccgggagatcggcaggctcggacatactgtgcggttgatcgcccccgcctacgtcaaacccttcgtcaaacggcagaagaacgatgcggccgatgccgaagcgatctgcgaggccgtgcagcggccgaccatgcgcttcgtggccgtgaagaccgaggcgaagcaggcgtctgcggtgatcttccggacccgcgacgtactggtcggccagcgcacccagatcatcaacgcgatccaaagtcatcttgccgaatacggcctgatcgcgccgcagggccccttccacgtcgagcggctgatcgggcagatcgaggatcccgagtcggatattccaccagctgctcgtacctgcatgagcgtcctcgtcggcgcgctacgacatcttcaggagcagactgcagtgctcgatgccgagatcgccgcgcgcgccaaatccaacgaaacggcccggcggctgatgagtgtgcccggcatcggtccgctgatcgcgaccgccatcgaggcgttggctccgccaacggagacgttccgctcgggccgcgacttcgccgcgtgggtcgggctgacgccggtgcagcgctcgacaggcggcaagcagcggctcggacgcacctcgcggatgggcgagagaacgctgcgtcgtctgctcatcatcgcagccagctcagtcgtgcgctgggccaaacgcaagggcgtgtccgccgactcctggttgggccggatgctcgcgcgcaagccaccaatgctggtgatcgtcgccgtggcgaataagaacgcccggatcgcgtgggcccttctgacgaagggtggaatttatcgagctccggccgtcgccgtgtaagcgggacggacgcgaggctgccggagggcgtgaggaggtcgacggacaggtatggcgcaacgtcggtgaggcggggttgggagaaccaggcgcgtggggagtgcttcgagcacgttccagtgatgtggacccgaccctcgcatcccatacgggcccgcggcatatgaaccgccgcatcagaggccggacacatggcagcacccgatcacgcgcagcgcccgtccagagattctgcttgcacccgcaggggcgtccacaca

SEQ ID NO: 3877 - DNA, 1568 bp, unidentified
  source 1..1568: mol_type = unassigned DNA; note = element_5d6a3cf
  misc_feature 1..3: note = core
  misc_feature 4..255: note = LE
  misc_feature 256..1464: note = CDS
  misc_feature 1465..1568: note = RE
  misc_feature 13..275: note = bridgeRNA
tttagtaccataaaagtgtaattgttagagagtaattaactctggcggttgcacttttcttataatgaggggaagtaattggcctgacatgggtctttttggatttttacatccgtacataaaactgtcagccaatccccttattataagcattcgcttaagcaggtagggatcagctcccgtgtaaccaactaaactgaatggtaataagtgcggcttggaacaattactaatttcatatttaggaggtattacatgatcagcgtaggaattgatgtatccaaagaaaagagcacggtttgcattcttaaaccctacggagaagtagtttgtaagccatttgagctgcaacacagcaagaaatcactggaatcgttagacgagcttttacggagattggacggcgaagtaaagatcgtaatggaagcaactggtatctataaccttccggtactgaactttctcgacgagaagggttattttgtttctgttataaatccttgtgtaatgaagaaatatgcaaggaacaataactttagaaacgttaaaacagacaagatggattctattaccattgcgaactatggaatagagaagtggttcaaacttaagcggtacgaagcctcagaatctacgtatacggaattaaaaatgttgggtagaagatatcgtcactatatggaaatgcacattcaggcattgcaggagcttacacacgtattagattatgttatgcctggtattaagaatttgttcaacagttggactgaatccaataacagagataagttgagtgattttgttgaaagattttggcattacgatctgatcacttcaatgagttgcgaagagtttgttaaagcatataacgaatgggcgaaagaaaagaaataccatcagagcgaatccaaggctatacaagtctatgaattagcatctaatggtattcccacattatcttccaacctcccatcgaccaaaatgcttgtgttggaagcaattaaaacactaagagccgtagatgactctctgtatattatattatcgcgaatgaaggaacttgcgaagagtcttccagagtattcaacggtgagagcaatggggggagttggagatgtactggctcctaaacttatagcagagataggtgatgttagaaggttgcacagcgctaaggccctaatagcttgggcgggaatagatccgccaccttatgaatcagggcaatttgtaggaagtaatcgtagaatctcaaagaaaggttcggctacattacgtaagacaggctatgaggttatgagagtcctcaagagtcaccaagcacccgaagactgtacggtatataactacattctgaaaaaggaagctgaaggcaaaagtaagaagcaggcaaaaatagccggcctcaacaagttcctgcgcatatattacgtgagagtgatggaggtatatcaatctgtgtaaaaatgtagggctatctatgataggaatagatagcctgtctgtttgctatgcacggaattttttagggaaagcctgccaacaagtacttgatttttgttagcagg

SEQ ID NO: 3878 - DNA, 1188 bp, unidentified
  source 1..1188: mol_type = unassigned DNA; note = element_5d6c6e9
  misc_feature 1..2: note = core
  misc_feature 3..207: note = LE
  misc_feature 208..1173: note = CDS
  misc_feature 1174..1188: note = RE
  misc_feature 6..212: note = bridgeRNA
cttgtatgttcagctcagaccagcgcggtagagtctcggtgccgttgcggcgaccggaccggaccgtgcagcctgaggccgcctggggcgtgagagcccgtatctgagtacatggcgcacggaccccgcgctggtcttcgccgagcccgaacggttacgcgcgccgcgcctgcgagcgcgcatggacaaggaagggatgcgaaggccatgtccgagagatccgcagtcgtggtgggggtcgatgtcgccaagcgccatcttgatgtcgctgccttgggtgcgcgcctgccgcaagcccgcttcaccaatgacgccgagggtcaagcgcagctcgcggcgctgctggcagaggccgagcccgaactcgtgctcatggaggcgagcggcggctacgaggcggcgctcgcctgcgagctcgacgccgccggccttcccgtggtcgtcgtcaacccccgtcaggcgcgcgacttcgcgcgcgccatgggcaggctcgccaagaccgaccgtctcgacgcccgtctgctcgctgagctcgccgccgtgctcgtgcgccgcgacgacctctcgtgcttcgtgcgcccgcccgcggatcccgaacggctcgacctcgcggccctcgtcgctcgccgccggcagctggttgcgatgctgctcgccgagcgccagcgcctcgcgctggcgcggcccacggtgcgtcccagcatcgaggcgttgatcgacgccctgcgcgcccagctcgatgtgctcgacggcgagatgcgtgagcacgtcgcgagccaccatcgcgccctggacgtgctgctgcagagcgccaagggcatcggccccaccagctcggcgacgatcatcgccgagctgcccgaactgggacggctcgaccgtcgccagatcgcggctctcgtcggggtcgcgccctacgcgcgcgagtcgggcgtctggggaggccggcggcgcatctccggaggccgctctcagctgcgccgcacgctctacatggcgacgctcacggcgacccgcttcaacccgacgatccgcgccttctacgcacgcctgctcgccgccggcaagctcaagaaggtcgctctcgtggcctgcatgcgcaagctgctctcgatcctcaatgcgatggtccgtgactcccgctccttcgatccctggctcaatcacgcttgacgtccaagacggtta

SEQ ID NO: 3879 - DNA, 1668 bp, unidentified
  source 1..1668: mol_type = unassigned DNA; note = element_5d70c81
  misc_feature 1..2: note = core
  misc_feature 3..316: note = LE
  misc_feature 317..1519: note = CDS
  misc_feature 1520..1668: note = RE
tttatatccattcctttcgctttgctcaggcacaaaacgttatgaaaacagttttctacccggctttttttctttataattctttttgtagggaactcggtatactacaaatcacggggaggtgagtaggctgttcctcttctggaatgactgtatttttatatgtgtagttcgccttttcaagcacaaataagtgtgacaccaagcacgtaatcttatctttgtataaactacttcgtttatggcttaggcgttcagtcaatgccgtctctccctataatctttagtgaaccttttggttctgaaaggagtccctatggctttaaaaatcgtgtacaaaatttgttgtggtatcgatgtccacaaaaactttgtagtggcttgcattgctaaaacggataagcaaggcgttaccacttatgagcgccatcacttttcaacctacacgaaaggactgaaacagttgctcaaatggctgctcgaccgtaattgcaaggatgtctgtatggaatctacaggtaaatattggattcccgtttacaatgtcttagaacacgactgttccattgtccttgctcatccgaaatatgttaaggctatccgtggtaaaaaaactgacaagaaagatgcgaaatggattgctgacctgtttaaacatgatcttgttgccggtagctttatgcctcctgctgacatccgtcaactccgtgaccttatgcgttaccgtttcaaactgacctgctttaagtccagcgaaaagaatcgttaccagaattgtctcacggtttccaacatccagttggggaacgttgtctcggacacttttggtaagagttctcaaaagattattgctaaaatccttgaaaatcctgatgatacttcttttgatatcggatctttaatccatggttccatgaaagataaacttcctgaactggaactcgccattgacggatatatcactccggaacaggctgctaaattaaagatcattaaagaacattttgataaccttgaagcccggaaagcagagttagaagaactcattcttgcgctcgccaatccctatcagcaggaaatttccattatcctaaccgctccaggttttaagaacacctttactgctatcggtatcatctccgaaatcggaacaaacatggaggctttcccttcggcgaaacacttatgttcatgggctggtcttactccaaccaacaatgaaagtgcagggaagaaaaaatctgtccgggtttccaaggccggatgctatatcaaaccacttcttgtacagtgtgcaaacgctgcgatcaagagcaaaaagcatcctgaaattcgtgaccgctacctccgtatcaaaaagcgtcgcggtcataagaaggcaatcattgctattgcaagaatgcttcttacagcattataccacatgctcaaaaatggtgagaattataattcagatttataccaaaaatctgatattcttccgacaacccgtgaaatcacggttgagcaggctatttaatggctcagtttcaaggtttccgcatcaagtcagcaacggaataacctgtaactttgtctacatattcaattttcaaagcagccaccgtaagatggctttgttgtgatacgattaaggtaatggataacctctacttttcattttcaatc

SEQ ID NO: 3880 - DNA, 1375 bp, unidentified
  source 1..1375: mol_type = unassigned DNA; note = element_5d7882c
  misc_feature 1: note = core
  misc_feature 2..92: note = LE
  misc_feature 93..1124: note = CDS
  misc_feature 1125..1375: note = RE
  misc_feature 1142..1364: note = bridgeRNA
caatgggatggactcctcctctccttaaacggcatctgaagtgccaaactgggaatgaagtttccagtaacaggtagagaaggagtccactcatgaagcttagctatgttggagttgatttggccaaaaacgttttccagctgcacggtattgatcgccacggccaggccgtatggcggcgccggctgcgtcgcaagcagtggctgaaggtgctgctggaaaccgtcgagcctggctgcattattggcatggaggcctgttcgagcgcgcaccactgggcacggcagctgcaggccaatggctacgacgtccgactggtcgccccgcagttcgtcaagccgttcgtcaagagcaacaagaatgaccgcaacgatgctgaagcgatctgcgaggcgatcacgcgcccacacatgcggttcgtgcccgtcaagaccgtcgagcagcaggacatccaggcgatccatcgggttcgctgcaccctcatgtcgcagcgcaacgccaaggccaaccagatccgcgggttggtggccgagtacgggatcgtggcacccccgcaggtactctcgttacgccgcgccatacctgactggctcgaagatgccgagaacgggctgagcacctgtttccgagcgcttctgcatgacttgtggatggatcttcagcagctgcaggaacggctcgccgaactggaccggcagatcgaacagattgcgaaagacaacccggtcacccgccgcctgcaacagctgcgtggtgtcgggccaatggtggccacagcactggtggcgaccgtgggtgacggatcacacttcaggaaaggcagacagatggctgccgccatcggtctgacgcctcgtcaacacagtagcggcgataaacgacgactgctgggcatcagcaagcgcggggatgcttacctcaggacattgctaatccatggcgcccgggccgtcgtgtcgcaggccaaacgccgtgacgatccgctgagtctgtgggtgaccagcatcgccgagcgcagtcacaccaacgtagcggcggtggcgctggcgaacaagaccgtgcgcatcgcctggtcgatgctgcgaaacgaatcggattacaacccggcagtggccgtagcctgacagaacccagggagcactccaccgcgattgccaagtgaactgaaagatggcgaacaggtcgaaccggcgtcagcagaacccgggaatgaccgcgggcatcaagcccgaagaaccgattgggagctgacgcgcggatagcccattaaggcccggcatcaacgtatgccaactacagaggccggatatacgtacgcagtcgtaccttgaagtcgtcgatcagcgagcttgcaacccgaggaggagtccatata

SEQ ID NO: 3881 - DNA, 1406 bp, unidentified
  source 1..1406: mol_type = unassigned DNA; note = element_5d81d42
  misc_feature 1: note = core
  misc_feature 2..303: note = LE
  misc_feature 304..1362: note = CDS
  misc_feature 1363..1406: note = RE
  misc_feature 119..279: note = bridgeRNA
ctttaattttgcagattgagaagagagtccttacaatctcttaaatattttaacgttcaatatatgaagaaaacataaagaagtatcacggtaattccttacctttgttgtagaaaggaaggattaactgccggaggtcaacctattcccctacggagacttggagtctatcccttgttgaaggccctccggatttaaagctgcaaattccgaataggaaggtaggctcggagcctaattaaagtagtggacactcacagctttagcagttaaccgcttcctgtaactaattaacgcagaaacatgaagaaaattgttgtcggaatcgacatttccaaggaaaagattgacgcaagcgcaatcgatgtaagagaggggcagattggcctggtgaaattgggatatcaggtgtttgagaaccgcccaatgggcttccgccggatgattgtctgggcaaagcgcctgataaaaggcacacggcatgaggatgtactgttctgctgtgagaccacaggcggctacgaccgcgcactgtgcgactatgtctacgccaagggactggacatctggcgtgagagtgcgctgcagatcaagcgcagcatgggcgtacgaaaggggaaggatgacaaggccgactcgctgatgatagccgagtatgccatgcgccacatggacaaggccgttttctacgagacacccagcgaggctgttcgcgaactgaagaccctgttcctctaccgatataaactggtacaggaaaagaccgagaagactgtccgcatgaaggagatggaggccactgcggccaaaagcaagtccatgaccttcatcctgcgtgatgcccgcaagagcatcaaggccatcgacaagagcatcaaggagtgtgagaggcagatactccagatctacagcgacaatgagaatctgaagaaaaactacgaccacataaattccgtcagcgggataggcatcgtcaacgcaacggcttttatcgcatacaccaacaacttcgctaacttcacaacggcaaacaagattgcctcatattggaactgtgcctctttccgcgagaggtcaggcacaagtgtggacaaaaaggcatacgtcaagtgctatagcagttctttgctcaaggcatacctcacacaggcagcagaatgcaccgtcaagaaccacggcatatatcatgactattacctacggctcaatgctgcggggaaaccatatggggtaatcatcaacaacgtcaggaacaaactcatacatatggtgttctcactcgtcaataacgacatggactatgaagagaatcacgagttcatcagagagaaaagaaaaggcaaacaaaaattgtccgcctaattagaaaatattaactaaagttctttgcacaatatcataagaag

SEQ ID NO: 3882 - DNA, 1303 bp, unidentified
  source 1..1303: mol_type = unassigned DNA; note = element_5d85f0c
  misc_feature 1..2: note = core
  misc_feature 3..227: note = LE
  misc_feature 228..1292: note = CDS
  misc_feature 1293..1303: note = RE
  misc_feature 35..242: note = bridgeRNA
ccaacttgttggattggtggcggagatcggggtctgcagccatgatcttcgaggctgtggccggggtcgctcgggaaacacctgccgccctttgggctggccctcgaacggcctgcgccctgaccgcagccgccggcgagagtggctcgagagaggtctgttaagcccgaagctggtctgccctcctcgccggaccctgctcacgtggtcccgcaaggagattcccaatgccctcagccctgcccgcgatacctgccccggtcgtcatcgcgatcgatccgcataaggcgtcctggaccgcggtcgcggtcgatgagcgccttcagcccctcgccgcgatccgcgtcggggtcagccgtgatggctaccggaagctgcgctgcttcgcccgccgctggtcacctgccctttgggcagttgaaggcgccaccggtctgggtgcttcgctgacggcccggctggcagacgacggcatcgccgtggtggacgtgcccgccaagctggcccgccgcgtccggatgctctccaccgggcacggccgcaagaccgaccaggccgacgccctgtcggtcggcatcgccgcgcacaccgccacccggctgaacaccgcagttgtcgatgaggccgtcgcggccctgcgcgccttgaccgagcaccgtgacgatctggtccgctcgcggacgcagaccatcaaccggctgcatgccctgctcacccagctcatcccggccgggctgccccgtgggctgaccgcggacacggcggccgctgcgctgcgcagcatccgcccccggacggtgctggcccgcacgctgcgccaggtcgccgtggagctgctgagcgaggtccgccgcctcgaccggcggatcgccggggcaacgacggcgctgtccgctgccgtcgccgcgtccggcaccaccctgaccgagctgcacggcatcggagacgtcatcgccgcgaagatcctggcccgagctggtgccgtcagcaggttccgctccgagtctgctttcgcctcctattgcggcgtcgcgccgatagaagtgtcctccggcgatgtccagcggcaccgcctgtcacgggccggcgaccggcagctgaactatgcgctgcatgtcatggccatggcccagatcaagcgagcaactcccggccgggactactacctgcgcaaacgagccgccgggaagacccacaaggaagccatgcgctgcctcaagcggcgtctcgccgacgtcgtctaccggaccatgatccacgacacggagacctctctgctgaccgcgccttgacaagagaggtg

SEQ ID NO: 3883 - DNA, 1370 bp, unidentified
  source 1..1370: mol_type = unassigned DNA; note = element_5d8a99a
  misc_feature 1..2: note = core
  misc_feature 3..254: note = LE
  misc_feature 255..1298: note = CDS
  misc_feature 1299..1370: note = RE
  misc_feature 33..206: note = bridgeRNA
cttgtatcttgtttgcaactgccccgatccaccatttcctgctagtggggaattggatcgggcttcggcgggaggccgtgatgacctgaggcgcgtttgttctgcagcctgggagtagataggccccccgccctcctttcccacgccgtggagaatccgaggccgtacgagcctgcattcacaaggtcggcgcgagaggtgatacagggtcggggagccgaaactcagtctaatcccagatcggtgaggtggttatggaaaaagcttctcaagcggaagttcaagtattcgctggcattgacgtaagtgcgcgtgagctaagcgtggctgtgcagtgcggcatcaaagaaggaatcgcgattacaaccttccccaacaaagcagctggacataaagcgcttttggcatatttgctgcgggcaaaagggcgggctcgcgtctgcttggaggcgagtggcaattacagtctggatctagctttaaccctgcaggctcacccgcaagtggagatcagcgtcgtgaatcctcgccgtgcgcgacgctttgcggagtcgctgggtgagcgtagcaagacagacccggtcgatgcgcgagtgctttgcgaatatgctttgcggatgccgtgggttccttgggtaccacccagcctggcagccctgcggttgcgtagcatcacccgggcgatcgaagatctggttgccatgcaggcccaagagaagaatcgtcagcatgcattgctcgccagtgacgccctcccggctctgttgattcgcgaactggagcagcatctgcgttacctaaaactccggatcacacggctgcgtcgtgaagcactccggctgatcgcccgtaaccccgagctgaatcgccgtttccatctcatgctgacgactccgggactcggcgaaaccagcagtttgcaaatcctcggtgaacttgtggtgctgcccgagaccctggacgcgcgccagtgggttgcctttagcggactggacccgaagcagtttagttccggcacgtcggttgaaaagaaaccgcggatcagccgaggtgggaatcgtcacttgcgtcgagctttgtacatgccagcgctagttgcaacacgtcatgagcccttcctgcgggacttctaccagcgtttgctgcgccgcggaaaggctccattacagggtgtggtggcagtcatgagaaagctcctccacgccttattcgccatgttccgccgcgatgaagcttacgacggatccaagttatgcccagccgagttcgctcgtcatacagccgttgtctgtgtttgaccggagagcaaaagagagagggttctccgcacctctcccagagagaaaaagcttgactgcaaaagagagaat

SEQ ID NO: 3884 - DNA, 1359 bp, unidentified
  source 1..1359: mol_type = unassigned DNA; note = element_5d90e7a
  misc_feature 1..2: note = core
  misc_feature 3..75: note = LE
  misc_feature 76..1101: note = CDS
  misc_feature 1102..1359: note = RE
  misc_feature 1124..1355: note = bridgeRNA
ttaatgagatggtcacccccacaccctgcgagggctacgctttcgcagggtgttttgttttcggaggccatcgtcatgagcgaatcagcgctgatcggtatcgatctcggtaaacacagtttccacctgcacggccaagacacatggggccgggaggtgttccgcaagaagtgctcgcggccacagatgatgcagtttttcggcaatctgccggcctgtactgtggtgatggaagcctgtgccggcgcgcattttatcgcgcggcaactgatgaccatgggccatacagctaagctgattgctccgcagttcgtccggcccttcgtcaagggcaacaagaacgactttgtggatgctgaagcgatttgcgaagcggcctcgcgcccatcgatgcgcttcgtcacacctaaaaccgaggggcaacaaaccctgtccgtcctgcatcgcctacgcgagtcgctggtgcgtgaccgcaccaaaaccgccaatcagatgcacggtttcctactggaattcgggatcagtctgcccaagggcttggcgatcatgaagcgtttggcgagcgtcttggccgagcatgagctacccgctcggctcacggtgctgttgcagcgcttgcatgagcacttctgttacctggatgagcaggtcaaggcactggatcaggagctggcgagccagctggccgacgatgatctgggcagtcgtttgctaagtatgccgtgtgtcgggccgatcaccgccagcctgctggctgtcgagatgggcgatggccggcagtacggatgcagtcgcgactttgctgcttcggtcgggctggtgcccaggcagtacagcaccgatggtaaagcgaatctgctcggcatcagcaagcgcggtgacaagaacctgcggcaattgctggtgcagtgtgcccgggtttacctgcagagactggattaccagcacggccctttggccgcttgggtgcgcgccttgcttgggcgacgacactcgaacgtggtggcctgtgccttggccaacaaattggcgcggattgcctgggcgctagccgcgcaccatacgcaatatgaaacagggccagacgccttgaacgcctgaccctgcggttgttgcagccctacgattcacccttcaggttttgcgatagctgaacaacggatgacgtgaacggcccaccggcctgacgaagaacctgacataaaaatcggcttcagaagccgcgtggtttttcaggatcgtcaggcgcgactctcatcgtggcgcggggcatgccccccaacagacgccggatagatttaagcaagccaaccacttcatccattaatcagtattgcaaaaatgggggtgaccatagat

SEQ ID NO: 3885 - DNA, 1352 bp, unidentified
  source 1..1352: mol_type = unassigned DNA; note = element_5d929e2
  misc_feature 1: note = core
  misc_feature 2..73: note = LE
  misc_feature 74..1099: note = CDS
  misc_feature 1100..1352: note = RE
  misc_feature 1123..1350: note = bridgeRNA
aatgagatggtcacccccacaccctgccagggttaggctttggcagggtgttttatttacggagaccatcatcatgagcgcagtcgcactggtaggtatcgatctcggcaagcacagcttccatctgcatgggcaggacaagtccggacgcgaggtcttgcgcaagaagacgacacgtctgcaaatgatgcgattcctgggcaacctgccgagttgcacggtggtgatggaggcctgcgccggctcgcatttcatcgctcgccaactgaagtcattcgggcacgaggtcaagctgatttcgccgcagttcgtacggcctttcgtcaagggcaacaagaacgacttcattgatgccgaggcgatctgtgaggcggcctcccgccccacgatgcgtttcgtgacgccgaagaccgaagcgcagcagacgctgtccgtactgcatcggatgcgcgactccctggtgcgtgaccggacgaaaaccgccaaccaggcccatggttttctgctggagtttggcatcagcctgcccaaagggctttcgttggtcaggcggctgcccgtcacgctagacgaatacccactaccccctcggttggtttccctgttgagccgactgcaccggcacttctgctacctggatgaacagatcaaggagctggacagggagatggccgagcaacttgccgaagatgatctcggctctcgcctgctgaccatcccgtgcgttggcccgatcacggcgagtctgctgtcggcagagatgggagacggtaagcaattcggctgtagccgagacttcgcggccgcagtcggactggtaccccgccagtacagtaccggcggtagagccaacctgctgggtatcagtaagcgtggcgacaagaacttgcgccgcctgctggtgcagtgcgccagggtctatctccagcgcctggagttccagaaaggagccttggccgactgggtgcgatcactgcgcgagcgtcgccactcgaatgtggtggtgtgcgccttggccaacaagttcgcccgcatcgcctgggcgatggcggccaatcactcggagtttgaaacagggccaagcgcttctgccgcctgatcctgcggatacagctgtaccccgaaacaccctttcaggttttgcgacgctgaacaactgatgacgtgaacggcacaccggcctgacgaagaacctgacataaaaatcggctcttgaagccgagcggcttttaaggatcgtcaggcgcgactctcatcgtggcgcggggcatgccctctacagacgccggatagatttaggcaagccaaacactcatcactgatcagcattgcaaaaacgggggtgaccatag

SEQ ID NO: 3886 - DNA, 1368 bp, unidentified
  source 1..1368: mol_type = unassigned DNA; note = element_5d9ba60
  misc_feature 1..2: note = core
  misc_feature 3..81: note = LE
  misc_feature 82..1104: note = CDS
  misc_feature 1105..1368: note = RE
  misc_feature 1136..1355: note = bridgeRNA
tgatgaggtggacggcctcctaccgcggcacgtgaggtgccatagtgcggctgttaggagccgcaaatcggaggaccgtccatgaaggaaattgtcacagtcggcgttgatattgccaagaacgtctttcaggttcacggagttgacgcacaaggtgttgtggtggtgcgccggaagcttcgccgcagcaaggtttcaggattcttcgaaagtctgccaccttgtctgattggtatcgaagcttgtgcgacagcacatcattgggcgcgacatctgatggcgcttggacatgaggtcaagctgatgccagcggcttatgtgaagccctatgtcaagcggcaaaagaatgacgcggcagacgcggaaggcatctgtgaagcggttcaacgtccgacgatgcggtttgtgccggtcaagagcaaggaacagcagggagtgctgatgctgcaccgcgcccgagagttgcttgttcgtcaaagaacgatgctgatcaatgcgttgcgcgctcacctggcggagcttggtatcgccacccggctcgggccgatgggcgtaaaggatgcggtggcagtgattgaaggcatcgaccaacacttgatcccggagatcgtgcaacatgctttgtctcccctgtgcgatcaactgcgccatgttcacacgaagatcgaagagatggaccggcagatactcgaatggcaccgttcgagtgcgctcagccagcgtctggcgacgatcccgggtattgggccggttacggccagtgcgattgcagcgacgatcacggatgtctcaagctttcgttccgggcggcaattggcggcgtggatcggtctcgttccccggcagagttcttccggcggcaaggagcgtcttggcaggatcacgaggcagggcgatccctacatacgccgcttgctggtgattggggcaactgccgtgttgcgcttcagtcgcaagtcgaacgctgcctcgacacaatgggcgaggcaattgctggaacgaaagccaggcaaagtggcagccgtcgcactggccaacaagatggcgcggatcgcctgggccttgatgacgaaagataccagtttcaggtcagcgatgagctgacaaagcgcatcgagagttttttgaggccaaacgaattggtgaggtgctaatggtgtgatgacaagggtcgaaacccggatcgggataatccgctttgcgacgagcgcgaaaagcgcgggggcttgtttggaacctgatctgcggacttcatcatggccagcggcagtcttgagaggccgcaatcaaaggccggacacatgcctgctaccgaccaacctgtcaaaacaccaaaataatccttgccaaacggaggccgtccacaca

SEQ ID NO: 3887 - DNA, 1481 bp, unidentified
  source 1..1481: mol_type = unassigned DNA; note = element_5da4ea2
  misc_feature 1: note = core
  misc_feature 2..237: note = LE
  misc_feature 238..1461: note = CDS
  misc_feature 1462..1481: note = RE
  misc_feature 14..249: note = bridgeRNA
ctaattgagaccgaggcaagcgttgcggtgtttgccgtagcgttccaggggtctgacgggctggctccctaaccgcctgccgaccgcagctgcactcgcggtctggctttatatcgaggtgccagcctgccgggcctcgccgcgacgtggctcgaaagagggacgagcgccagcaccgtaattaggcatgcccgccgcgggtcctgcatcccggaacgaggaattggagcgtgctgcatgacggcggtgatgatcggcgtggacccgcacaaggggtcgcataccgcggtggcgatcgatgcgtcggaggagccgctcggcaagctgcgggtccgcgcctcggccagccaggcgcagcggctggtggcatgggcggcggcctggccggagcggacctgggcggtcgagggcgccggcgggctgggtcacctgctggcacagcagctggttgcggcaggcgagcgggtgctggacgtccagcccaagctcggtgcccgggtgcggctgctggccaccggcgccagtaacaagaacgacccgaacgacgcgctgtcggtggcggtcgcggcgctgcgctcgaggacccgccgcccggtcagcgccgacgatcacgcggcggtgctgcgggtatggtcccggcggcaccgggatctgggccgggccaagaatcaggtcgcgtgccggctccacgcggtgctgtgcgagctagtgcccggcggcgtgcccgaggagatcaccgcagctcaggctgcccgcctcctccggtcagcccagccgtctggtgccggggggcaggcccgcggcgagctcgctgccgagctcctggaggacatgcgccgcctggaggcccagatgcgcgagtcgaagaagaagctcgccgtcgcggtcaaggcctcgggcaccagcctgaccggcatcttcggcgtcggcccggtcatcgccgccaccgtgatcggcgacgccgacggcgtggcccggttcgccagccgcgatcacttcgccgcctacaacggcaccgccccgatcgaagtctcctccgggaaccgcaagatctaccggctgtcactgcgcgggaaccggcgcatcaaccacgccatccacatggccgcgatcacccagatccggcaccggcacagcgacggccgcgcctactacgacaagaagctgaccgaaggcaagacgcacaaagaggcgctccggtccctcaaacgcaagatcagcaacgctatctatgcccgcctgcaggccgacgcccagtctgccgccagcgccgcagcgacgggcccgggagggcaaccggggaacgactctgactccagcgcggccggctcacaccccgagcgccagctcttcggacaagccactcccgagcccgccaccgcgacactacgacgagctaccccgcgacggctacccacgccggcccggcccgccgcaaagaaaatccgtcagacctcttgacagcgctctcaaagaggtct

SEQ ID NO: 3888 - DNA, 1472 bp, unidentified
  source 1..1472: mol_type = unassigned DNA; note = element_5dab766
  misc_feature 1: note = core
  misc_feature 2..77: note = LE
  misc_feature 78..1112: note = CDS
  misc_feature 1113..1472: note = RE
  misc_feature 1250..1466: note = bridgeRNA
taatgagatggtccgccgctgtaaccctctgctgaggcggaggatggtatcagcggtttcagaggaggatcatcgacatgcagattcgttcggtaggcatcgatttgggcaagacgacatttcaccttgttgcgctgggagcatcgggcaaggtgatggtgaagaagaagtttacgcagaagcagttgctaacctttacggcgaacatgcagacttcgctgatcggcctggaagcctgttctggcgcgcattttcttggacgagcactgaagcaacaaggccatgatgtacggctcatcgctgcgcagttcgtgaagcccttcgtgaagtccaacaagaacgacttcgtcgatgcagaggctattgccgaggccgtcgagcgcaagaacatgcgtttcgttccgatcaagacggatgaccagctcgacctgcaggcgatgcaccggattcgtgaccggctcatttcacggcgcacggcagtcatcaaccagatacgagcgtttctcctggagcgcggcatggtcttcgctcagaagccagcgaagctgagggccgcgatggccgatgtgctcgagaacgcggacaacgcgctgacactgatgatgcgcaacctgatcggcatcctgtgggacgagtggaaaagcgttgagcagcagatcgatgagctgaccgacagcctagaacagatcgcagagagcgatgccggttgttgtcgcatccgtcagatcccgggcatcggtcctatcgttgcaaccgcgatcgtcgccgccatcggtaacggcgcggcgttccgcaagggccgagacttcgctgcatggctcggcctcgtgccacggcagtactcgaccggtggcaagactaagctgctaggcatcagcaagcgaggcaacatctatctacgcaaggtgctcatccacggagcacgcgcagccgcgatgcgcataaaacgagaccgcttcccgattggtgcatggatgaacggtctcgaagctcgtgcgccacgcaacgtgctggtcgtagctatggccaacaagctcgcacgtatcgcatgggctgtgctctcaactggggaagactatcgccccgccgtcagcgcggcagcagcggtatgagctagcagcacagcgaaggggaaggaccgcatccacaaggatgccagagggtaatgctgaccgcgcccaggggcttgggcaccgtctgcgagcaacggtcgagcgcagaccacgccttcgctgtaatcaagcttccacaaagtctgcaatggaacagtaaggacgaaagaacagtcacaacggcgtatctgaaacctgctcctgataagggtcttcaacgactgaccgacttgtaaggacagatgcgcagcggaactcatcctggccaggagcgcgcggctccatcaaaggccgaacacattgccgcagacgtgtcttcccgctcgaactaatccttgcagtcacgcggcggaccataca

SEQ ID NO: 3889 - DNA, 1568 bp, unidentified
  source 1..1568: mol_type = unassigned DNA; note = element_5db2efb
  misc_feature 1: note = core
  misc_feature 2..226: note = LE
  misc_feature 227..1306: note = CDS
  misc_feature 1307..1568: note = RE
  misc_feature 17..241: note = bridgeRNA
ctacttatgtcttccaagaccgctcggggcgagtcaggctcgggtgaggtgccggccggaacgctctcatcgcggctgcccgccgtctggcgaggtgtggctcttttctggcatgcggtccggccgggcgccgtggcgaggcgtggctcaagaagggtctgctcagctcgaagtagcgttgcccgtcctcgctgacagggatgcagctcggtgaggaaggtgcgtgatggatcaggtgatcatcggggttgacccgcacaagctgccggtgacgatcgaggccagggacagccgggaggttctgcgggccacgggccggttcggcactgacacgcagggctaccggcagctgctgagggcagcccgtcagtggccgcagcgcgtctgggcagtcgagggcgctaacgggatcggccgcccgctcgcgcagcggctgctggccgatggcgagcgggtgctggacgtgcccgccaggctggccgccagggcgcgcgtgtctggcaccggccagggacgcaagaccgacgccacggacgcgcacgcgattgtcatggtcgcgctgcgggacacaggattacgcgagctgagctccgatgccgggctgatggtgctgcggctgctgtgcgaccgccgcgatgagatctcccgggcccgggcgcaggctctcaacccgatgcaccggctgttcctggaactgctgcccggcggggcgccggtgaaaaagtcgaccgggcagtacaaggccatgccggccagggtgcgcccccgtgacctggccggaaagacccgccgccggatggccgccggggaactagccggcctggcacggctggacgccaagctcaaggccatgaaagccgagctgaaggccgcggtccaggccagcggatcccacctgatggacatccacggaatcggccccgccggcgctgcgaggatcctggccgatgtgggagacgtggcccgcttccctgaccgcaaccactttgcgtcctggaccggcaccgcgccgatcgatgcctccagcggcgagcacacccgccaccggctgtcccgggcagggaaccgcaggctgaaccacgtgctctacatggccggcatcgccggctccgccacgacacccccggccgggcctgctaccggcgcaagcggcagcagtccaggacctccatggaagccatgcggtgcctgcgccggcgcctgcccgacgtggtctaccgccagctcgccgccgacgccgccgctgcacggccagcaacagcaccagatcaggcaggcccgggagggcacccggggacgactctaaaatccagcgcggccgacctgaccccggacatcggctcttcggaccagccacttcccggacccgcaccctcgacgccacccccgcccgtgcccgccaggaaccccgccgggccggggacaggcgccataccgcgccggcgcgccggaggtgtcaacgtggagcgccccaccggacgaacgacgttgacaccgacaagcgccggcgcacactcgaaagcctcccgcacccgcgccccttgacaaagttcttcatagaagggagc

SEQ ID NO: 3890 - DNA, 1431 bp, unidentified
  source 1..1431: mol_type = unassigned DNA; note = element_5dc05ec
  misc_feature 1..2: note = core
  misc_feature 3..233: note = LE
  misc_feature 234..1415: note = CDS
  misc_feature 1416..1431: note = RE
ctgatatagctccttgtcagagggttcatcctgaagtggaccctcgcggggagaccgacattcagctatccggctcgaccgttgggactagtgtgcggccctcgcattccgttcgggaacggtgatcgggaccctgtggcggccgttggccgaccagtgatcgggcatcagcaggcgtcggacggaagcagcgagctcctcggggtcgaaatgatcgcgtgggaggacctcgaatgcagaccatcggcatcgacgtcggcaagcgccagcacatcgcggcgatctgtcaccagggcgaacgggaggcccgcaaggcggtgctgcgcttcagtacggaccgcgcgggccttgggcaactcgaggattggctcgcccgccagggccagatcacccgggcggtcctggagtcgagcggccactatcacctgaacctcgccgcggcgctccaacgccagggcgtcccggtcgcagtggtgaacccgatcgagtccaagtacttcggcaagcggcggctccagcggaccacgagcgatccggccgacgcgcgcacacgtgcgctcctggcgatggtcgaccagcccgagatccgtgacgtcctcaccggcgccgagctgcgcgaggccgcgcgcttcgcgatggccctggtcgacgaacgcggtcgggtctgccagaagatcacccgcctgctcgagctcgggttccctgagctcgagcaggcgtacgacgatccgacctgcacgagcgccctcgcggtgctccggcaggccccgaccgcgagcgcggtcgcgcgcaagcgcccagcgacgctcgctctggcagcccgaccgggcggcggccgggcgatcggcgcgaagaaggccgcccagatccaggacctggcgcgggcgacgatcgcggctcctgagcttgccgcccagatcggcttccagatgcggctgcggatcgcccagtacgacctcctcaccgcgcagatcgccgaggccgaggcccaccttgcgacgctccttgacggcgagctcgtccggcggctccggacgatccccggggtcgggccagcgatctgcgccacgctcatcgccgagatcggcgacatccgccggttcgagcggttcgaccagctcgtcgcgtacatcggggtccatccggccgagaagagctccggccagaagggcgccaaccccgagacgagctggcggatgagcaaggccggcaacgcgtatctgcgcaccgcgctctatcagctggcgatcgtcgggatccggcacaacccgatcatccgggcccactacgcccgcaagcgcgcgcaagggaagtcgaaggtgaacgcggtcggccactgcatgaagaaggggctcgcgatcgtctggggcgtctggcggagcggcgaggacttcgccgctccggagacaccttgacaactacctatgggac

SEQ ID NO: 3891 - DNA, 1419 bp, unidentified
  source 1..1419: mol_type = unassigned DNA; note = element_5dc6386
  misc_feature 1..2: note = core
  misc_feature 3..117: note = LE
  misc_feature 118..957: note = CDS
  misc_feature 958..1419: note = RE
  misc_feature 1176..1371: note = bridgeRNA
agatagggtaatcggcttcgagcccgtcttcgacttggtaaaaggagcagcgcttcgagttgatgataaacgtggtctgacgtcatcagccacaagcatctgaaaggaagcgctgccatgaaatactacgccggtctcgacgtttcggtaaaggagacgagtgtgtgcatcgtcgatgaaaaagggaaaatctgccgggaaagaaaggtggtcagccacccggacgatctcgtttcatttctgagcgatcctcaatggcattttgaaagggttggccttgaagccggaccgctatcccaatggctgtatgagggactggccaaggctggattccctgctatctgcatcgaaacccggcataccaaagccttcctcaaggcccagccgaacaagaccgaccgcaacgatgcccgtggcatcgcccagatgatgcgcgtccatctgttcaagccggtgcacgtgaagacgctgacgagccagaagcggcgggccttgttgacggcccgtgcgctactgcaggggaaagccattgcgatcgagaacgacattcgcgggctgctgcggaacttcggcctgaaggtcgggatggtcggagcagtcaaatttgaagatcgcattcgcgaactgatcgagggggtgccagatctggcggagatcgtgaagccgctacttgccgcacgacgcaagttgcgagaggagttcgaaaggttagaccacaaggttcgggaagaagccaggatcgatccggtttgccagcgattgatgacggtgcccggcgttggcccaatcgtttcgctggcatacgcggcgacaatcgacattccggcccgattccgatcctcgcgggcggttggagctgttctcggattgacgccgattctcaaccagtcgggagagagtaaccgcataggccatgtttcccgttgtggcgacggtatgctgcggacccttctctaggaggccgcgcagactttgctaacacgggtcgcgagatggtcctggctgaaagcctgggcaatgaatgttgccaaacggcgcggcgcccgtaaagccgtggtagcgctggcgcggaggcttgcagtcatcctgcatcggatatggagtgatgaaaccgagttccgctggacacgggaggcaacgactgcagcataagcctcggctctcaaagagcatataaagttccgcctcgcggcggaagacgtccttcgtggacgacgagtgatatgagttcgcactcaaccatactcgatgacatgattatcagggtggcaaaaagattgaaccatatcattctcctgaccctatggtgggacggccttaaagccgatcccggagagaagagagggccgcgaaaagacgttgaatgccgtataagtggaaagctcgattgtgcttgaccttgaccacgccgattagaga

SEQ ID NO: 3892 - DNA, 1409 bp, unidentified
  source 1..1409: mol_type = unassigned DNA; note = element_5dd2041
  misc_feature 1..2: note = core
  misc_feature 3..78: note = LE
  misc_feature 79..1125: note = CDS
  misc_feature 1126..1409: note = RE
  misc_feature 1124..1396: note = bridgeRNA
tgttggtgtggacggcccccgacggcatcgatgtgccagaatgaggtcgttgctgatctcagacaaaggagaccgtccgtgggcgagattatcagaattggaatggacacgtcgaaacgtgttttccagcttcatggagtgaatgcgcaagaggtgccggttctgcgcaagaggctggcgcgcaaggcgatggtggcgttctttgaaaagcttgagccgacggagatcgcactcgaagcctgcggcgcgagccatcattgggcgcggctgctgcaatcgtttggacatcgggtgaagttgatcccgccgcaactggccaagccctacgtcaagcgtggcaagaacgatgcggcggatgccgaagcgctgtgcgaagcgatgagccggccgacgatgcgcttcgtgccggtaaagacggtcgagcagcaagcggccctcatgctggtcggggtacgggatcggttgatccgcacacgcacccagctggccaatgccatccgcggctatgcggctgagttcggcctttccgccgctaggggcacggcgcacctggttccgctgctcgagcgcctccaagccgatgagagcttgcctgtcctggctcgcgaactgttcgccattcaggccaaggagtatgcgcagttgcaagaggagatcggcgaaatcgaggccaagctcatggtttgccaccgggccgatgaatgcagctggcgacttgccaagatccccggcatcggcccgatcggcgcggtgctacttacgatgaaaaccccacagcccaagctcttccggtcaggcaggcagtttgcggcctggatcggcttgacgccacgggatcattcgactgctggcaaggtccggctcggcgtgatcacgcgcgccggcgacgaggccttgcgaagcatactggtagtgggagcgacctccgttatccggcaagttcggaccggacgcagcaggaatgcctcaccctggctggttgcgttgctcacgcgcaagccgccgaaattagccgccgtggccctggccaacaagatggctcgcatcgcctggaagatgatggtgagtggcgaagtctaccgcggggtaaaaaccatgccgccgatcttggcgaggatagcttaaggaatcagccagatacggggagcaactcaatgcaaccgtgctgagccgatgacggaacttgcaacgaaatgagcaggtggcgtgatcgatcgatcctcgacacaagacactccagttggggcaatgaccctctacaaggtcgccaagatgtttggaacttgtgccgcggaaaccatcttggccgcgctcatcggtgggcgcacccgacgaggccggacatatgatcgcaagcgatccgatcaaatcactgcaaaattttttgcaaggagggggccgtccacata

SEQ ID NO: 3893 - DNA, 1351 bp, unidentified
  source 1..1351: mol_type = unassigned DNA; note = element_5dd235d
  misc_feature 1..3: note = core
  misc_feature 4..86: note = LE
  misc_feature 87..1118: note = CDS
  misc_feature 1119..1351: note = RE
  misc_feature 1122..1338: note = bridgeRNA
tgatgctgtggacggcgcccactctgcggcatcaaagtgccaaagggtggtcgcgtgaagcgaaccacgttgagggggagccgtccatgggcgaggttagcacgattggtcttgatattgcgaagtctgtgtttcaggtgcacggggttgatgccactggcgcggtggtaatgcgcaagcgcctcggccgcgcgaaggtgttggcgttctttgccggcttgtcgccgtgcctggtcgggctcgaagcttgcccatcagcacattattggagccgcgagctgcaggcactcggccacaccgtgaagctgatgccgccgagctatgtgaaggcctatctcaagcgcagcaagaacgacgccaacgatgcggcggcgatctgcgaggcggtaacgcggccatcgatgcgctttgtttcgatcaagactgaggaacaacagaccggcctgatgctgcaccggagccgacaattgttggttcggcagcgtacgatgttctcgaacgcgatccgcgggcatatggccgaactcggcatcatctcggccaaaggccgcaatggcacggctgagctgttgcagattattggcgatgtggcagacgatcgcattccgccggttgcccggttttgtctcgatcttcttgctcgccaatacctgacgctcaacgcagaggtctcatcgatcgacaagcgcatccatgcttggcaccgatcatgtgaagagagccgacggctcgaggagatcccgggcattggtccgattgttgccactgccctggttgcggagatcggtgactggaaggcgttccgctcaggccgcagtcttgcggcctggatcggtttggtgcccaagcagcactcgaccggcggcaaggaacggctcggcagcattaccaagcagggcaatcgctatttgcgctggctactcgttaccggtgccatggccgtcattcgatacgcgcgacagcgcggcaccaagcgagcttggctcatacgaataatggatcgccgacctgcaaaggtggcggcggttgcactcgccaacaagatcgcccggatggcgtgggcgatcatggttcgcaccgaacgctacagagaaccgaagctgctgctggcagcgtgaatacacgaattggcgagggcatgacgacgtaatgcagatatggtcgttccgaggattgggagaacccgcttgggtcatcgcactttaaagtgcgcgctaacgattgggacccaatccgcgcagagcattagggccagcggcacatccgccgcatcaacaggccggacacgtgaccgcacccgaccaatgctgcagcaacgtcagaaagttcttgccaaggcgccgtccacacg

SEQ ID NO: 3894 - DNA, 1423 bp, unidentified
  source 1..1423: mol_type = unassigned DNA; note = element_5dda111
  misc_feature 1: note = core
  misc_feature 2..78: note = LE
  misc_feature 79..1125: note = CDS
  misc_feature 1126..1423: note = RE
  misc_feature 1185..1414: note = bridgeRNA
taatgggatggtccggccgtgctcctgccccgccagcaaacgatgctggcaaggggcgccaaagacaaggagcacgccatgcctcagatactcaacgccgcaattgccgtgatcggcatcgatatcggcaagaactcgttccacgtcgttggccacgatgagcgcggcgcgatcgtgctgcgtcagaagtggtcacgtggccaggtagcagcacattttgccaacctaccgccgtgcctggtcggcatggaggcctgtgtaggcgcgcattttttaagccgcaaactcaaggggcttggtcacgatgcccggctgatgccggcgaagtatgttcgtccctattcaaagggacagaagaacgacttccgcgatgcggaggcgatcgccgaggcggtgcagcggccgacgatgaagttcgtcgccaccaagaccgcggatcagctcgacctgcaggcgctgcaccgggtgcgtgagcggttggtcagccagcgcaccggcatcatcaatcagatccgcgccttcctgctggagcgcggcattgcggtgcggcagggacaacgcttcttgcgcgccgagctgccgcgcatcctagcgactcccccggatgtcctgtcgccacgcatggtgcaggtcatcgaggacttggccgacgactggcgtcggctcgatgagcggatcgagagactatcgggcgagatcgaagccatcgcgcgccaggacgccggctgcgagcggctgatgagcgtgcccggcattgggccgatcatctccagcgcgatggtggccgcgatcggcgctggtgaagcgttctccaagggccgcgacttcgccgcctggctgggcctggtccctaagcagatgtcgaccggggaccgcacgatcctcggcaagatatccaagcgcggcaatcgctatctacgcgtcctgttcgtgcaggcggcatgggttgtattgatcaagcctaagatctgggagcgccacggcctcaagccctggatcgaagcagccaaaaaacggctacaccacaatgtgcttgcaatcgcgctcgccaacaagctcgcgcgcatcgcctggagtgttcttgctcgtggccgaagcttcgaggtgaggtcggccgccgcttaatctgtttgatcgtccagtgcgagatagaggagcgcccgatgatgtagcccgaaagccctacctgccaaggtctgcgagaggatgagacgagatggaggttcggtcttcccggcgcatgcgaacactggtgacccgaatggcccattcaaggcctatccgctaatgagatcgcatgcgcgctgatacccatgatggcccggagcacaaaacgctccaatcagaggccggatacattgatgcaagaccgctcaccgccagctcggcgaaatccacttgcgacgcacggccggaccataca

SEQ ID NO: 3895 - DNA, 1376 bp, unidentified
  source 1..1376: mol_type = unassigned DNA; note = element_5dde4a4
  misc_feature 1..2: note = core
  misc_feature 3..81: note = LE
  misc_feature 82..912: note = CDS
  misc_feature 913..1376: note = RE
  misc_feature 1138..1364: note = bridgeRNA
tgatgctgtggacggctcctccgccggcatcgcgatgtgcgacgttgcggtgtcttgaggaccgcaacagaggagccgcccatggaggagattagcacagtcggattggacatcgcgaagtcggtgttccaggtccacggcatcgatactgcaggcgaggttgtcgttcgccggcagttgaagcgttgtcaggtcctgcagttcttcgccgcgatgaagccttgtctgatcggcatggaggcctgcgctaccgcgcatcactgggcgcgggagctgacgaagctccggcatgaggtgcggctgatgccgccgcgctatgtgaagccctacgtcaagcgcaacaagaacgacgcggccgatgccgaggcgatctgcgaggcggtgacgcggccgacgatgcgctttgtgccagtcaagacagtggaccagcagtcggtgctgatgctgcaccggacacggcagctattcatccgccagcggaccacgctgatcaactcgatccgcgcccacctggccgagttcggcatcgtcgccgggatcggacgcaacggcgttgaggtgttgctcgagctcatcgccaagggagatgaggacattgttccagcagaggcacgagtttgcctgctggctctcgcgacgcaactcgaactggtgaagcgccagatcctcgaaatggatcggcgggttctcgcctggcatcgcgccagcagcctcagccgcaacctcgaagcgatcccgggcgtcggcccgctcatctcgactgccctggtggcgagtatccccgacccgaaggtcttccgctcgggtcgcgatctcagcgcctggatcgggctggtgcccaagcagaactccaccggcggcaaggagaagctgggaagcatcagcaaggctggcaaccgctaccttcgctaacttctcgtggtcggagcgctggcggtaatcaggcgcgccaagcagttgggttatacccgccacccgtggctggtgcggctgatggaacgccgatcggtagaggtagcggcggtcgcgctggccaacaggatggcgcggatcgcttgggcaatgatggcgaggaacgaaccgtaccgagcgacactgcctgcctgaggaatcggaatacgcggagcgatccgcgtcaccaagttggagagagcaacgacctgtaacgcacccatgccagtcggtccacggaccgggacaccccacttgggccaaggcgcctcgagcgcgagcttttgaccgggacccgatccgcggagagcattatggccagcggctatcgtcgagtgccgcacccaaaggccggacacatggcagctccgaccagcactgcatcaggtcaacaaagcccttgccaacacggagccgtccacaca

SEQ ID NO: 3896 - DNA, 1156 bp, unidentified
  source 1..1156: mol_type = unassigned DNA; note = element_5de19ba
  misc_feature 1..2: note = core
  misc_feature 3..208: note = LE
  misc_feature 209..1144: note = CDS
  misc_feature 1145..1156: note = RE
  misc_feature 13..210: note = bridgeRNA
cttgtcttatgacttccctcggcttccttgcgataagggagccgctgcccggcaccccaaatatgccgggcagcggcgggggacggatcgagaatgggtcggccgttgcgggccgtgcggtagtgtgatcgcccccgtcttttctcatgacctgaacggatagcagggcttcgggcctgcatgacaagcagaggtaaggaaaagacggatgcaggatatcatcggcatcgacatctcgaaagaccggctggacgcgttccggctttcggaccggcagcacaacgccttcggaaacgacaaggccgggttcaaggccctgctgaagtggatcggcagcgccgagggactgcgcatcgtctacgagccgaccgggccctatcatcgcgggatggaggcagctctcgcagatgtggggcacgcgctggtcaaggtcaatccgcgacaggcgcggcgcttcgcggaggccaccggaacccaggccaagacggaccgggtggatgcgatgctgctggcgcggatgggtctggcgctcgacctgccgccgcgcccagttcgtggcgaactcatgaatgagttgagggagttgcacgtcgcacggctggcgctgatcaaggaccggacggctacggggaaccgcgcggacaccgcgacgatcggcctgatccgccgccaggcgaaggcgcggctggccatcatcgagaagcagcttgccgaggtcgacgaggccatcacagccaggattgccgacgatcccgacctggccgagcgtctcggcatcctgacctccatccccggcatcggtgccgtgaccgcgtgcatgctgctgatcgaaatgccggagctcggcaccctcgagccgaaacaggctgcaagcctcgccgggctggcgccgttcacgcgccgttcgggaaagtggaagggcaaggagatgatccgcggcggacgcgccagcttgcgcgccgcgatcttcatgccggccctcgtcgcgatccggttcaacgcggacctcaagcgcaaataccagcagctgatcgatggcgggaaagcgccaaagctcgcgatcaccgccgtcatgcgaaagctcatcctgctcgccaacgcgctgctgcgcgacggccggaaatgggccgacagacctacttgaccaagacggata

SEQ ID NO: 3897 - DNA, 1349 bp, unidentified
  source 1..1349: mol_type = unassigned DNA; note = element_5de61bb
  misc_feature 1..3: note = core
  misc_feature 4..194: note = LE
  misc_feature 195..1334: note = CDS
  misc_feature 1335..1349: note = RE
  misc_feature 3..151: note = bridgeRNA
cttgtatgttgacgaggagacgcggggaagccatcggcacctgaagccaagagcttgtggagaagatgggctccccgccctcgtcaccaagaccgaagagtatctgaggcgcgagagccagcatttacaaggtcggccggtgagggtacagggtcgggaagcccgcgtcttgaataacgcaagtggagtcgaggatgcaatcgatcaagacgtgggcaggagtggatgtaagcgccaagatgctggccgcacatcggctgcgtgatggcaagcaggaggctcgagagttcagtaacgatgcggtcggccatcgtgacctactcaagtggctgggaaagagagcccgagtctgcatggaggcaacgggtgtgtatcaccttcagctcgcgctcatgcttcaagcggcaggagtggagctgatggtggtgaatccgcgtgtggcaaaggacttcgctcgggcattgtcgaatcgaagcaagaccgaccaggtcgatgcgtggacgttgctcgagtacgtgcaacgaatggagttcatcgcctggcaggcgcccaaggcggccgtgctcgcggtgcgagagctggggcggcgactgagcgagctggtacacgctgccgtagacgaaaagaaccggtttcacgccaagaatgtggcggcgatcagttcgatcgtggtcaacgacgtcaaggcgcacgtggcacagatcgagcggcggatcacacagatcgaaaaatccgccgtgaccgtcattgatgacgatgatgatctacgcgaacagttccagatcctgatggcgatcacgggcatcggacgacgatcggcgattctgttactgagtgaactggccgtgctcgatccgaccatgaccgtcaagcaactggtggcgcatgctggactggaccctcgggtttatgagtccgggaccagcgtggagaagccggcacggatcagcaaggttggaaacgcgcggctgcgagcgattttgtacatgaacgcgctgtcggcggtgcgccacgatcggggagcgcggttgttcttcgcccagttagtggcgcgcggcaagaaacggatgcaagcgctggtcgccgtgatgcgaaagctgctgcacggcatttggatcgttctgcagcgccgcgtgtcgttcgacagctccgttctgttcgcggcctcgctggcgaaggccgaatcctccgattcggccgtagctgcaaaccagctggagccgagtcaggatcacccgaagggccgcagcgcagcggaggagctgcgcaagcagcttgatcctgactcggcggaggctacgcgctcgcgaaaaaggagatcaaaagccgcttgacttacaacagagtat

SEQ ID NO: 3898 - DNA, 1487 bp, unidentified
  source 1..1487: mol_type = unassigned DNA; note = element_5de7027
  misc_feature 1..4: note = core
  misc_feature 5..238: note = LE
  misc_feature 239..1471: note = CDS
  misc_feature 1472..1487: note = RE
gtcactagggcaccatccttattgcgggccttgttgagaggttcgtggaagggactcggcgggggccgaggtgacggccagcgtcggtcgctcgtagagggcctgcatgacaccgccgccctcggtcctgccggggtcgcagaccggcatcagggagacgcgccgcagagcgccagttagtgaccgtccggtggtcgatcccctcgccgcgtcgtcgctgccactgtgaggagaaccgttgtccgaggacaccgctgaaatcgtctacgtcgggttggattgggccaccgcaacccacgctgtgtgcgtgctgtccgccgtaggaaaaatattggcacagttcatgattgaccacaccgtcgacggcatcgccaccctggtccgcaaactcgccaagttcggcgaacccgccgacgtgcacatcgggatcgagcgacccaacgggcggctggtggacctgctgctcgacgcgggccatccggtcatcccggtgtcgccgaacgcgatcaaaacctggcgtgacggcgaagtcgtctctggggcgaagtccgatgccggcgacgccctggtgatcgccgaatatctgcggctgcgccaccaccggctgcacccggtagcgccgtacagcgggcacaccaaggcgttgcgcaccgtggtgcgcacccgagacgacctcgtcgccatgcgggtatcggccaccaaccaactcagcgccctgctcgatgaccactggcccggcgccaaggcgatcttcgccgacgtgcaatccccgatcagcctggctttcctgcatcaatacccgaccgcggtcagcgccgcccgcctcggagagaagcgccttgccgccttcctgatcaaacacggctactccggccgccggccggccggtgaactgctggggcggctgcgcgcagcgcctgccggcaccagcgaccccatcctctcgatcgcggtcgccgacgccgtcacagccctggtcaccgtgctggacaccctcaacaaagtcggcaagaccctcgaccgctgcgtgatcgcccggctcggggagcacccggacgccgagatcttcacgtcgctgccaaggtcgggtcagatcaacgccgcccaggtgctcgccgagtggggcgactcccgtgcagcctacgacggacccgacgcggtggccgccctggccggagccacaccagtgaccaaagcgtccggcaaacaacacgcggtgcacttccggtgggcctgcaacaaacgattccgccgagcactgaccaccttcgctgacaacagccgccaccaaagcccctgggccgcagacatctacacccgagctcgcgcccgcggacacgaccatccccatgccatacgcatcctcgcccgcgcctggatccgggtgatctaccgctgctggcacgaccaccgcccctacaaccccaacctccacggcggaacacaaagactcctgccgaaaacggcctgaggttgactcaggaagt

SEQ ID NO: 3899 - DNA, 1424 bp, unidentified
  source 1..1424: mol_type = unassigned DNA; note = element_5df75b1
  misc_feature 1..3: note = core
  misc_feature 4..79: note = LE
  misc_feature 80..1102: note = CDS
  misc_feature 1103..1424: note = RE
  misc_feature 1081..1346: note = bridgeRNA
tgatggggtggatggcccccttgcggcatcgacgtgccaaactggtgtttcgaagaatcaccaggaatgggagccatccatgagcgaaattacaacgatcggactggatctagccaagcatgtttttcaggttcacggcatcgatgcggagggtacgacggttgtgcgcaagcgacttcgccgcggacaagtgctggcgttcttcagccgaattccgcgctgtttggttgggttggaagcgtgtgcaacggcccactactgggcgcgggagctgaccgcgctcgggcatgaggtacggctgatgcctgcgcaatacgtgaaggcgtacatcaggcgcaacaagcacgatgccgccgatgccgaagcgatttgcgaggcggttcagcgcccgacgatgcgatttgtgccggtcaagacgacagagcaacaggcgacccagttgctgcatcgtggccgtgagcaactggtgcgtcagcgcacgatgctggtgaatgcgttgcgggcgcatctggcggagttcggaatggtggcggcgcagggcttgcgcaatgtcggggagctgattgccattgttcgcgacgatggcgatacgcgcctgcctggcgtggcgcggcaggtgctgcaggtgctggcaaatcagatcgagcagatcgagacggcggttgcagggctggagcggcagctgctggcctggcacaaggccaaccctgtgagtcagcggctggccagcattccgggcattgggcccatcatcgccactgccattgccacgacggttgcggacccgaaggtgttccgctcgggccgcgagttcgccgcctggctgggcttggtgccgcggcagaattcaaccggggggaaaacccggctgggcggcatcaccaagcgcggcaaccgttatctgcgtcggctgctcatcaatggggcaagcgctaatctgctgcgatcgaaggcgacgaaagccgatccgtgggtgatcgggctgcgtcggcggcggccgccgctggtcgtagccgtggcgctggcgaacaagacggcgcgcatcgcctgggcggtgatgctgcgcgagaggcaataccagcccagggctgtggcggcttagtaggccacggcgccagtgctggagcttgcgagagagtaatgacgcgtgatggcacagtcggtcgatccgacgcaaccgagagaaacctgccgcttcattgggacatcgatcccgctcgaatgatgaggcctcggttcgcggactccatcagggccagcagtccatccggactgcgtgaacaggccggacacatgactgcaagcgacttctgtgcggcacgcgaagttatctcttgccaggcgggggccatccacacatgactgcaagcgacttctgtgtggcacgcgaagttatctcttgccaggcgggggccatccacaca

SEQ ID NO: 3900 - DNA, 1551 bp, unidentified
  source 1..1551: mol_type = unassigned DNA; note = element_5df7d54
  misc_feature 1..4: note = core
  misc_feature 5..284: note = LE
  misc_feature 285..1445: note = CDS
  misc_feature 1446..1551: note = RE
  misc_feature 18..256: note = bridgeRNA
cctcgtataatcaatcttaagggaaatacatctcttttgattgatccctttcttttatattttcttattattttttagtataataagaatcgcactgtggatttgtttctataattttacagccacgactgttctaggaggctcttaccacagattttttatttaattgttgattagttagttaacactttgatgttttatatgttcagcgaggatacataataaaaaaactatgtggccaaacattcagtgcaacaaaatctaacctaaggaggtgctggtatatgatatatattggaatagatatatcaaaatacaaacacgattgtttcatctgtaatgatacaggtgaagttattgtagaaaacttttcatttgaaaatactaaaaaaggatttcaacaatttctcgacctgttgaaaccctatgataattctaatgtccatattggtttagaagctactggacattatggcttgaatttgaaattattcttagaaaagaataattatagttttatggaatttaatcctttattagttaaagaatttaaaaaatctttaactttaagaagaactaaaactgataaagttgatgctatagtaatttgccaaaaacttatgtcagttccatataaaccaaattcaaaactattttatcataaatattcaatcaagtcactttctagactaagagattctttaattaaacaaagatctaaatatatggttcaattaactaatatattagacattgtttttcctgagtttaaatctttctttaataacaggttttcttcaacatctttatatttacttaataaatatagaagtgctgaaaaaattgctaatatgcgtgattttgatacacctaataaattgtctaaaggtcattttacttatgcaaaatttgctaagttaaaggaacttgctaaaaactctattggtgaatcaaatgaagtttttgaaattgaacttcaaactcttattagtctttataatgaaattgattcaaaaataaattcaatcgataaacagatttctacaattatcaaagaacttaatccaccaactctttctattcctggaattggtgaacttaccactgctgtaatcatttctgaatatggagattttaatagattctccaatgcagataaattattatcttttgctggtttagaacctggtatttatcaatcaggtactattcttacaaatggtaaaatggttaagcgtgggtctggatatttaagatattccttaatgaatattgctaatgttgttattagatataatccaatattctatgatttttacttaaagaaacgttctgagggtaaaactcatcgtgttgctttatctcatgtttgtaaaaaactacttagagtcatttacaaattagaaactcaaaatatccaatttgatccttctttattgaaataattgattactcaatttttcaaaatttcactaacgtgaaatctttttggcgtgagatacttttccaatttataactactacaaaaagctattgactttttatagttag

SEQ ID NO: 3901 - DNA, 1586 bp, unidentified
  source 1..1586: mol_type = unassigned DNA; note = element_5dfab43
  misc_feature 1..2: note = core
  misc_feature 3..144: note = LE
  misc_feature 145..1131: note = CDS
  misc_feature 1132..1586: note = RE
  misc_feature 1346..1584: note = bridgeRNA
cgatgagatggtctcctcccgcttccaagatcggcgtcgaatgcgccaggatggaagtatcgaccaaccatcgcgacgaagaaggaggagaccgtatctgagattacgacgattgggctggacctggcaaagcaggtattccatttggtgggtttcgacagcaagggcaaagaggttaagcgcaagaggctcacgcgggggaagctggtggagtccgtggccaacctgccgccgtgcctgattgcgatggaggcctgtggcggcgctcaccactgggcgcgccgattccaggacctgggtcatgaggttcgcttgattgccccgcagtacgtcaaggcctacgtgcgcggcaacaagaatgactacaacgatgcgcgagcgatcggcgaggcggcgcgggtggcggacatgcgcttcgtgcaggtcaagagcgtcgagcagcaggacgtgcaggccatgcaccggctgcgcgaggcgcgagtgggcgagcgcacggcgctgtgcaaccagctgcgcggtttgctgacggagtacgggatcgtcctggcgcagggcgtgggcacggtgcgcaagcgcgtgcccgagctgcttgaggacgccgcgaacgggctgagcgatttcttgcgcgccttgttggccgatgcctaccgtcagctgcgcgagctcgatggccacatcgggttctacaccgacgcgctcacagcgcatgcccggcagaacgaggcggtcgagcggttgcagacggtgccgggattcggtcccatcgttgccagcgcctttcatgccttcgtcggcaacggccacgcctttggcaaagggcgcgacctctccgccgccctcgggctggtgccgaggcagcacagcagcgggggcaagacggtgctgttggggatcagtaagcgcggggatcgttatctgcgcagtctgctggtgcacggcgcccgtgccgtggtgcggatggcggacaaaaaggacgacccactcagccgttggatctgccggctcaaggtcacccgcggcgccaacaaagccgccgtggcactggccaacaagctcgcgcgcatcggctgggccatcctgcagcgcggcggcacctaccgcgcgcaaccggcccccgggggcgccggatgagggcgcccacgtccgcctttcctcctgccgagcaggctcgcttgggggacgcagctatcaaggagcttcccgcgcacgctcgggactcctccttgacacctccgccccccaagcaaagaggtctgcaggaggaaagccttcttgtcccatcaacagatgggcaatcacgaggcaaccgcccaaccgcgggctgacccgaaccacgaggttttttccgaccgacgattgcgaaggctttgtgaccagcgatgacatcataggtcagaccggcgtatcgagaacctgggaagcccgacggcggctgtacgacgccgataggtcgataaggacgatacgcgcgcatttcatcgaggccagaagagcgatatctcttcatcaacaggccggatatacggcagcaatcctgtccctgtcacgcgaccacgagaccttgcaaaatgggaggagaccatata

SEQ ID NO: 3902 - DNA, 1219 bp, unidentified
  source 1..1219: mol_type = unassigned DNA; note = element_5e04cef
  misc_feature 1..2: note = core
  misc_feature 3..382: note = LE
  misc_feature 383..1204: note = CDS
  misc_feature 1205..1219: note = RE
  misc_feature 13..198: note = bridgeRNA
cttgtatcttatttttctatggtagttagctttagctactaccatactgagacagaggcagcttgagcccacccataaggctcagaccttgttttgtagatcaagccctttgtctcacttcatcgccaacccagacactgaacggtagccaagggtacgcccctgtatgtacaaggcaagtgggcgaagttggccaatttcaagtggttaaagatcatggtttatatcggaatcgacgtttccaaagccaagctcgattgctccctgttgatagatacagccagcaacaaacgaaaatcaaaatccgtggccaacagcaagatcggcattgccaacttactggaatgggtccgcaagcaaggcgttttgcctgctgatctccatgctgtcatggaagggcaccggcgtgtatcacgaacaagctgccttcggtcttttcgatgctggcgtaacggtttccatcgtcaatcctgcccaaattaaagatttcggccggggcttggcagtgcgcacgaagaccgacggggtagatagctttgtacccgcccgctatggcgcgctacttaaaccggcagcatggcagccgccttctccggaagctcgtgtattgcaagcactgctctctcgcagggaagctattgctcaagatttacggagagaacgcaaccgtcgggaaaaagctgacgcaacagaaaccccggcgcttattcgccaatcaattaacgacactatcgacttcctgcaaaagcaactcactaaaatacagcaggatatcgacgaccatattggtcgccatcccgatctgcagcacgacctggaactgttgatcagtattcctgccgtgggaaaacaagtcggcagcaacctgctttcggtgatgcgccgtcatcacttcaactcagcagaacagcttgcagcttatcttggcttggtgccgattgaacggcaatccggctcttccattcatgggcgagctcgcttgtcgaaaaccggcccggcgcggatacgggccgtgctttatatggccgctgttgtcgccacccgattcaatccacacgtcaaagcagtctatgaacgactgttggccagaggcaaaaccaaaatggcggcgataggcgctgcgatgcgcaaactcgtccatctgtgctttggagtcctcaaaactcgtagaccctatcaaacagattatgtaaaaatctgttgaccgccaagacggtat

SEQ ID NO: 3903 - DNA, 1351 bp, unidentified
  source 1..1351: mol_type = unassigned DNA; note = element_5e0832b
  misc_feature 1: note = core
  misc_feature 2..282: note = LE
  misc_feature 283..1308: note = CDS
  misc_feature 1309..1351: note = RE
  misc_feature 105..261: note = bridgeRNA
ctctaagtttgcagaaggaatgcgacgcagtcgcataaatgttaaaaaatcaaggcaaaactatgattgctaaagacagtttcgtacctttgttgtaaaaaggtagaatcggtctgtcgaagaggtaaaccatgaatttctccagtcagaagactaaaattcgtttaggacctcatcgacatagttgcaaagaccagatagaaagttatcggctcagagccttgttagagtgttagtccatacaactattgaccaattctacacaataaatcgtacaaagatatgaagaatttatttattggaattgatttttcgaaagaaaaagttgatgtggctatcatttttgcagatggactgacagaaacagctgcacgagtgttcaacgagttcaagacaactgtatctggctacaggcagctggtcaagtgggtggagcagaactcatacggcatcgatccgtctttgtggctcttctgcggtgagaacacgggcggctatagcaacgggctgtgtaagttcctttacggcaggggctatgacatgtggcttgagaacgccaagagtatcaaagacgcgtcaggtctgagacgcttgaagtcggaccgtgccgatgcctcgatgattgccgaatacgctatgcgaaatcacgacaaagccgttatgtataagcctcttaacgagtcgcttgagcagctgcgcgaactgtttcttttccgccagacgttagtcagatacagatgcagtttccaggtgcgcagggaagagaaaagactaactatggacaagtcaccggtcaagacgatgatctcgcagattggaagacacatggtgactacactcgaaaaggaaatcgagaaggtaaacaaacgaatcgccgacctcatcaaatcggacgatgagctcacggaggtgttcaccatcgttacctcgatacctggcataggaacgcagaacgccgtgtgcctgatggtgtacaccgataacttccgtcgtttcaattacgactcacgcaagatcgcctgctattacggcattgcaccgttcggcaaggattcgggtacaagcgtgcattccgacccgcatgtgcactatatggcgaaccgtcagataaaggccatgctgacgcaggctgcactggctgccgtcaactacaatcacgttattgcgaggtactacaagcggctcgtggaacgtggaaagaagaagcaggttgcactgaacaatgtcaagaacaaactcgtgcatttggtttctgctatggtccggaatcgccaacttttctcacctgaatataaaatttcagcataaattaaaaataatggtcaaaatatttggattttaacatagaaag

SEQ ID NO: 3904 - DNA, 1429 bp, unidentified
  source 1..1429: mol_type = unassigned DNA; note = element_5e0c454
  misc_feature 1: note = core
  misc_feature 2..78: note = LE
  misc_feature 79..1140: note = CDS
  misc_feature 1141..1429: note = RE
  misc_feature 1193..1420: note = bridgeRNA
taatgggatggtccggccgtgctcctgccccaccagcggcgcacgctggcgtggggctgccattcgatggagcacgccatgtcccagaatcaagacagcatgatcgccgttgtcggcatcgatatcggcaagaactcgttccacgtcgtcggcaatgacaagcgtggttcgatcgtgttgcggcagaagtggtcgcgcggccaaatcgaggcgcgactggccaacctcccgccttgcctggtcggtatggaggcctgcgttggggcgcatcatctcgctcgtaagctcaccgcgttcggacacgacgcgcggctgatgccggcaaagtatgttcgaccctatgcgcgagggcaaaaaaatgacttcaacgacgccgacgcgattgcggaggccgtgcagcgtccaacgatgaggttcgttgcgacgaagacggccaatcagctcgacctgcaggcgctccatcgcgtgcgcgagcgcttggtcagccagcgcaccggcgtcatcaatcagatccgcgccttcctgctggagcgcgggattgctgtgcggcaagggcaacgcttcttgcgcgccgaattgccgggcatcctggccacgccctgcgatgtcttgtcgccacgcatggtgcgggtgatcgaggacctcgctggcgactggcgccggctcgatgagcgcatcgagggcttatcgagcgagatcggcgctgtcgcgcgccaggatgctggctgcgagcggctgatgagcgtgcctggcatcgggccgatcatctccagcgcgatggtagcagcgatcggcactggcgatgcgttctccaaggggcgagattttgccgcatggctagggctcgtcccgaggcagatgtcgacaggggaccgaacaatcctgggcaagatatcgaagcgtggcaatcgttatctgcgcgttctgttcgtgcaggcagcgtgggttgtgctgatcaaaccgaagagctgggaacgttacggcctcaaaccctggctcgaggcggccaagaagcggttgcatcacaacgtgctggcgatcgcactcgccaacaagctggcccgcatcgcctggagtgttctggctcgtggccgaagcttcgaggtgagcaagattgaggtgagcgcccaacctgcttgaatgtcgaacgcaagatgagaaactcgtcgtgacgtaacccaataactgcttacccccccgaggtctgcgagaggacgagacgagatggaggatcggtcttcccggcgcatgcgaacactggtgacccgaatggcccgttgaggtctgtccgctaatgagatcgcaggcgcgctgatatccataatggcccggagcgcaacagctccaatcaaaggccggatacattgatgcaagaccgctcaccaccagctcgacaaaaacctcttgcgacgcgcggccggaccataca

SEQ ID NO: 3905 - DNA, 1608 bp, unidentified
  source 1..1608: mol_type = unassigned DNA; note = element_5e0e2a7
  misc_feature 1..3: note = core
  misc_feature 4..66: note = LE
  misc_feature 67..1227: note = CDS
  misc_feature 1228..1608: note = RE
  misc_feature 1266..1483: note = bridgeRNA
aagatgctatggggcggcggcgtggatattgcatccatcgttcgctgtgaaccgatggagctgcccatgcagacgttgaataacttgagtcggtccctcatcgccctcgaaccagccagcacattgattgcggtcatcgagatgagcctgtcgagctggctcgttgccggtatcgtgcctggcatcgagcgtcagccgttgaagaagctggcggtcgatgagagcgcattactgaggctgctgcatcgatggcgggaggaagcggagaaagcaggatgcaggatcgaacgcattgtcgttgccttcgaggccggccgtgacggcttctggttggcacgctggctcaaggcgcgcagcattgaggcccacgtcattcacgccgcgagtgtggcggtgtcgcgcgagcatcggcgagcgaagaccgaccgtctcgacgccgagctgctcaaacgtgcttttctcggctggctgcgcggcgagcgtaatcactgcaaggtggtcgcgatccccacattaaaggacgaggatgccaagcgccctagccgcgagcgcgagagcctcgtcggcgagcaaagtcggattgtcaaccgaatgaaggcagcgctgattcggctgggcatccgcggattcaatcccaaactgaaaagggccgccgggcgccttgacagtttgcgaacgcctgagggcgagccgatcccgccgaacacgctggctgagctgcggcgcgacatggagcgccgacggcttatcagcaatcaaattcggcagatcgaggaggcacgcctgaagcattttgagcaagcgcccaatgatggaccacacgccatggtgcgcctgttggcgcgtgtgattggggtcggcattgagacggccgacatgctggtgcacgaggtgctgtcgcgaaacatgcacgaccgacgggccatagctcgttatgccggcctcactgggtcacccgacgagagtggcagaaaacgccgggagaaagggttagcccgttccggcaatggtcgagttcggcgaggcatggtgcaattggcgtggcgatttctaacgtaccagaaggagagcgccttagcgcagtggtatcgagctcgcacggagaacgctcgcggtgctcgcaagcccatgatcgtggccttggcacgcaagctactgatcgctctgtggcggttcgtgtggcagggcgttgtaccggacggcatcgttttgcgtccggcacaatgattggaggacgctgaggtaccccgacagtttcggccccgtttgtacgcttgtgatgggataccgatgacggttcgaggtggcggattcccgacaagtcccttggctttcatgccgattggaagaatgggtccgccgcttcggagcttcgctgccgatgcgcatgactgcatcgtggttccggtccttggacctaccgcatacaaggttgtggcgcgattcaaccgcgcccgaaagcgggctcccctctgattgtcatcccgactgcatcatcgtgctcgaagccgtcaggatgaggccgtcaggatgagtcctggcgagatcgaaccaagaacccgacgatggaaaaatgcgtcaccctgcttgactcaaaaagccccatac

SEQ ID NO: 3906 - DNA, 1408 bp, unidentified
  source 1..1408: mol_type = unassigned DNA; note = element_5e1a9d4
  misc_feature 1: note = core
  misc_feature 2..92: note = LE
  misc_feature 93..1124: note = CDS
  misc_feature 1125..1408: note = RE
  misc_feature 1182..1403: note = bridgeRNA
caatgggatggactcctcctcaccttaccggcatcgcgatgtgccagactgagagcgtaaacatttcagtcacagacaagaaggagtccgagatgaagattactcgcgttggagttgatttggcaaagaaagtttttcaggtgcacggcgtggatgaaaatggtcgtcgggtgtggcaacgtcagttgaagcgatctaactggctcagcgtgctgaccgagacagtggagccggactgtgagattggcatggaggcgtgtggtggcgcccatcattgggcgcgtgagttgaagtcacgtggttttaaggtcaggctgatctcgccgcaattcgttaaaccgtatctgaagagtttaaagaacgacgtcaatgatgccgaagcgatatgtgaggcgatgacccgccaccacatgcgcttcgttgcggtaaagacagtagagcaacagtacatccaggcgatgcatcgcgtacgtgaaggcttgatgaaccatcgtaaggccaaggccaatcaaatccgcggattggtcgctgagtatggcttggtggcgccgagacaaatgggaccgttacgaaaagcgattccgtgctggctcgaggatgccgaaaacggtttacgaccagccttccgtgtattactgcacggtctctgggaagatctgcagagtctggatgttaggctcaaagtgctcgataaagagatcttcgtgctctccgagagccaccccgatgccaagcgcctaaagcagctacgaggtattgggccactaacggccaccgcaatggtggcgcagttcggcgatggccgacacttcaagcgtggccgccaggcgtccgcttcagtcggcatcacgccaagacacgccggcaccggtggcaagaactggctatttggcatcaccaaaaagggtaatccctacttacgcagcatcctgatccatggtgccagatcggtggtgagtaaggccaaacacaaggatgatcgactcagtcgatgggtcactgaactggccaggcgcaaacacccgaatgttgcggccgtcgccttggcaaacaaaaccgtgcgtatcgcctgggcaatgttacgcaacggcaccgattatgatcctgagctcgcgatggcctgatcgccacttgagcccaggctggacaaatgaacgtactgatataaggagttcctcactcacgattgcaaagcaagctgaaagatggtgaaacggtcggaccggcatcagtcaaacccgtgaatgaccgcgtgctcaaagcacgtgaaagcgtttgggtactggtgcgcgaatacccatcatggcccggcatcaatgaatgccaacttaagaggccggatatacgagagcagtcgtccctacctccatcaaacaacttgcttgcaaaaagaggaggagtccatata

SEQ ID NO: 3907 - DNA, 1429 bp, unidentified
  source 1..1429: mol_type = unassigned DNA; note = element_5e1bdd3
  misc_feature 1..2: note = core
  misc_feature 3..120: note = LE
  misc_feature 121..1155: note = CDS
  misc_feature 1156..1429: note = RE
  misc_feature 1191..1424: note = bridgeRNA
agatggggtaacgggccggtcatctggagatgacggattgggtggctgtccctcagaatgatggtgtgagtttgaacggagtcaggatggtcctgctccaagcatcatcgagggacaaccatggagcattatgcaggaattgacgtgtcgttggaaagctcggcggtatgcgtgatcgacgcgacgggtcgggtggtttgcgagggcaaggtggcgacggaaccagagacgctgatcgactggctgcgacaatcagatgttgctttcgcccggattggccttgaagcgggcccgctgtcgcaatggctatatgcgggcctgcgggaggcgggttttcctattgagctgctggagacgcggcatgtgcgggcggcgttcaggacgatgccggtgaagacggatcgcaaggacgcccggggcattgcgcagctgatgcgccttggctggttccggccggtgcactgcaagtcgatggcggcccaggagttgcgggcgatcttgacggcacgcaagctggtccagggcaagctgcatgacgtggagatgagcctgcgcggcattctccgcggcttcgggctgaaggtcggtccgacgacacggcggacatttgccgaccgtgtccgtgagctggtggccggacatccgaccttgcaaatgatcgccgaagcactgctgtcggccagcgatgaactgggtcgtcagcttggccagtttgaggcgcaggttcggagcctggcacggcggaacccgaaagctcggctgctgatgtccacacccggcgtcggcgcggtcgtggcgttgacctacgtggcggcaatcgacgatccggctcggttccgatcgtcacgaacggtcggggcgcatttcggcctgacgccgcggaagtaccagtcgggcgagacggatgtgacgggacggatctcgaagatcggtgacgtcggtgtccgcaccgcgctctacgaagcggcgaacgtcattctcactcggccagtgaaaggatcgacgctgaagagttgggcgatgcgcgtggccgctcgcgcggggatgcgcaaggccaaggtggccctggcccgcaagctcgccgttgtgctgcatcggatgctagccggcggcactgcgttcgacgccacgatggcggcagcgccgcgggcataagcatgagcacaaaatagaagcaggaggagatatcaagttcgggcgaggctgacacctctcgtccggagcaggtcccgtcgccgggacgatggatcaggccaggccgctatgagcgcggcagcatcattcggtgactgcgcatcttgagattggccgaccggtcctcatcagaccccatgaagcagcggaccagcgccgactgcggacagaagcaagacaccggcgatggtacagctctcaacgagggacttgacacccataggcccgttacaga

SEQ ID NO: 3908 - DNA, 1397 bp, unidentified
  source 1..1397: mol_type = unassigned DNA; note = element_5e1e621
  misc_feature 1: note = core
  misc_feature 2..312: note = LE
  misc_feature 313..1122: note = CDS
  misc_feature 1123..1397: note = RE
  misc_feature 1170..1389: note = bridgeRNA
caatgggatggacgcccccactcgtaacggcatcaatgtgccaaagtggaggtgttgagcaaccacttgaaccgagaggggcgtccgccatgaagattacaaccgttggcattgaccttgcaaagaacgtatttcagattcacggtgtggatgagcgaggcaaggccgtgctgaagaagcagatcaagcgtgagcagatggcggttttctttgtcaatttgccgccgtgcttgattgggatggaggcatgcggcagcgcgcatcattgggcccgcaagctgcaagagatggggcatacatacggtgcgtttgatggctccgcagttcgtcaagccgtacgtcaagagcaacaagaatgatgcggccgatgccgaggcgatctgcgaagcggtcgggcggccgaacatgaggtttgttccgatcaagaatgtggagcagcaatcggtgttggcattacatcgtgcacgccagggattcgtgagagcgcgtaccgcgcaggccaaccagatccggggtttgttggccgagttcggtcttgtcgtgcccaagggcttggcgcatatcgccaagcaggtgccggaattgattgaggatgcgtcgaatgaactgacgggatcgttccgccgactcgtgcagcgtcttctggagcatttgcaagagctggataggcaggtaggcgagttggagctacagatcaaggtatggcatcgggaaaacgaggccagcagccgcttggagaagattccagggatcggcccgatcacggccagcgcattggtagcaacgattggagatgccaagaatttctccagcggccggcaggtcgcggcctggctgggcctggttcccaggcagcactccagtggtggcaaggacgtgttgctcggcatgagcaagcgcggggacacgtatttgcgaacgctgctgattcatggcgctcgggcagtgatcttcagagcgcagcagaaagcggataagagcagctggctacaccggttgttggcccggcgcaatccgaacgtggccgcagtggcgttggccaacaagaatgcccgaatggtgtgggcgttgttggcccacggccggcagttccgaccggattacgagcctgtcgtctcgtaatccggtcggcccgaagtttctttatcgaaaagtaggagtagtgtgtcaccgattgctcaggcgatcatgaagtgatggcaagacaggtcagaccgtggttggcataacccgcgacggacgaggcacttcgagtgcgtgtaagcgattgggcaccgaccagcagaacccatcagggacagcagcgtggctgcacgtaaagtccgaatgtacgggtgcaatctttaccttcgcggcatcatgaattgaaagcttggcaaaccgggggcgtccatgta

SEQ ID NO: 3909 - DNA, 1517 bp, unidentified
  source 1..1517: mol_type = unassigned DNA; note = element_5e236a8
  misc_feature 1..2: note = core
  misc_feature 3..278: note = LE
  misc_feature 279..1496: note = CDS
  misc_feature 1497..1517: note = RE
  misc_feature 7..262: note = bridgeRNA
ctaatgggggtggatcggtgatctttctccgtggtggaggggatgctggtcgtgtgagcctgcccggtcggtgaccactggctggccctgaaaacggttggtggatttctacacgaagaccgtggcccggccgggcgggatcgcctcgtagaacgcttctgggatgtcgtgcccctgtgacggtatggatgagcactgatccattaggccgcgtgagaggggatcctcgggctcacatcgcaactactcgctatgaggagaagaggtgagcgttcgacatgatcttcgtgggcaacgactgggcatccgatcaccacgacgtgtgcgtgatggatgagaccggcaacgtcctggccacccgccgatgtgctgaatcagcagccggcatcaccgccctgcacgacctactcgcccgcttcgccgatcaaccgcagcaggtggtggcgggtaccgaaaccgaacacggcatgtgggtcgacgcgttggtcgccgccggctaccaggtgtatgcgatcaacccacgatctgtctcccgctatcgcgatcgccatcatgtcggtggcaccaaatccgataaggccgacgcgaaaaccctcgccgatctggtgcgtaccgaccgccacaaccaccgactcgtcgccgacgacagtgccgaagccgacgcgatccgggtgatggcccgtacccatcagaatctggtgtgggcccgctcggcacaacaaaacgtgctgcacgcccaactgcacgcctactacccggccgcactcgaagccttcggcggggatctggcccaccgcgacaccctcagcgtgcttcggcgggcccccacccccgaccagggggcgcgactgtcggtggcagcactgcggtcggcgttgaaaaagggtggccggcaacgcaatatcgacgcccgagcccgcgagatccaccaggcgctaggtgcctccggccatctgaccgcgccaccgcagctggtcgccgcatatgcggcgacggtgaccgcaacagtggagatgctcacggcattgaacactcagatcgtccagctcgaaaccactctcaaccagtcttttgacacgcatccggacgccgcgatctacctgtccatgcccggaatcggtgaaaccatcggcgcccggatgctcggcgagttcggggatgaccccgaacgctatgccaccgccaagtctcgcagaaactacgccggtacctcaccaagaaccatcgcctcgggtaaaggtcacgtcgtgttggcccggcacatccgcaacacccgactcaacgacgccgccatggcaatggcacaaagcgcgttgaccggcagtgtcggcgcccgcgcctactacgacaacctcaaagcccagaacaagacccacacacaagcccaacgagcattggccaaccggctcatcggcatcctccacggctgcctggcccaccacactctttacgacgaacacaccgcctggggccaccgcgcaaacctcgccgcttgacaccttgcacccctgggatgt

SEQ ID NO: 3910 - DNA, 1397 bp, unidentified
  source 1..1397: mol_type = unassigned DNA; note = element_5e26f4f
  misc_feature 1..2: note = core
  misc_feature 3..82: note = LE
  misc_feature 83..1108: note = CDS
  misc_feature 1109..1397: note = RE
  misc_feature 1134..1384: note = bridgeRNA
tgatggtgtggacggcctctcctcaacggcatcatagtgccaaagcgtggtcgccggggcgccacaaaaagggagaccgtccatgaagcagtttatcagaataggcgttgatctggccaagaagtattttcagattcacgcgctcgtgagcgaaggcggccccgccgtgacgcgcaagttgacgcgcttgaagatgcgtgagttcttttcgcagatcgaaccctgccttgtcggcatggaggcctgcggctcggcgcattattgggcgcgcgagctcaaggccatgggtcacgaagtgctcctcatgccaccggcctacaccaagccctatgtcaagcgcggcaagaacgacgcggtcgacgccgatgcctgctgcgaagcgatgtcgcgccccggaatgcgcttcgttccggtcaagagcgcggagcagcaagccacactgatgctgcacaagacgcgcgaactgctggtcaagcagcggacgatgagcgtcaacgcgctgcgcggtcatctttcggagtttggcattatcgccgccaaggggatcggccgtgtcgacgaactgctcgaattggccgggagcgacacgacgcttccggacgccgccagggcggccgtgaaggttctggcgctgcatcttgaggagcttgacaagtcgatcgacgatctggatgacacaatcgccagcgcccatgcgcaaagtgagacgagtcggttgctcgacgaggttcccggcgtcggcaagattattgcctcggtgatcgcagccagtgtgccggacccaagcgtattcaaatcggggcgtgatttcgccgcctggctcggcataacgccacggcaaaactcgaccggcggcaagcagacgctcggcgccatcaccaagcagggcaaccgatacataaggaaactgctcgtcttggccgcgacctcgctgctgcggggcgtgggcaagcgcaaaggcgccttgcgcgactggatcgtcgcaatgctggcgaagaaacccgcgcgactggtcacggtggcgctagccaacaagctcgctcggatcctctgggcgatgatgaagaccggcgagagcttccgcaccgacatgttcgcgaaggcgtaaggaagccggctgtcaccacaaggagcgttcacagaggagagctacaggttcgagtttggcaagcgcaaaacaaacgtgatgaacgacacggtcgccaccgaagaccaggaacaacccgccaagccccatgagcgcaaagctcgcttgtatgatagggatcacggtcgtcggacttcatcaaggcccgcggacatatgcttcgcacaaaccgaggccggacatatggctgcagccgaccaaatcgttcgaaacgctaaaaaagtgcttgccatggagggccgtccacata

SEQ ID NO: 3911 - DNA, 1376 bp, unidentified
  source 1..1376: mol_type = unassigned DNA; note = element_5e292e4
  misc_feature 1..2: note = core
  misc_feature 3..242: note = LE
  misc_feature 243..1295: note = CDS
  misc_feature 1296..1376: note = RE
  misc_feature 7..217: note = bridgeRNA
ctcctatgtttgtttttatataatttaacaaaaaaataagtgaaagatggtgagagcagatttgtttctaaacaacctcaaaggtatgttcgcaaaaagataatgcctcgccatcttttaccttttagagtttgaacagaatgtaaagcacaaggttctatccctgtagcttgaatatccaaccaggagaaaagatgaagaaaggttattcacttattccattaccgttaaaaatcaataggatgaaaaacattttaaaacaagtcgccggtatcgatgtagcgaaaaaagaacttgtcgtgtgcctaagcttccttgatgaaaatttgtcagtaggaattattagccatcaagtattcagcaataacaaaaaagggtttgaggctatggtgcggtgggtaactaagcaaacaggaaaagaaacgaaggttcgctatgtaatggaggctacgggcgtgtatcacgaagcattagcttatttcctaaccgataaagaattggaggtgagcattgtgctacccaacaagatcagcaactttttcaggacactcgaaatcaataccataaccgataagacagcatcacaggccattgcccgctttgggctggagcggaaactggaggtgtggaagaaaccaaaggacacttttaggcagctgaagcaattaacccgggagcgggaccagatggttgccgatagaactgttttaaagaatcagttacatgcagaacgttcggaagcatttccaaaccaaagcagtataaagcggattaataaacgcatagcactgattaacaagcaagaagaagagattaaactggaggttgcagtgatggtgaaaaaagaccgggaactttgcgataaaatcgaaaaaattgcaaccatacccggagtaggaaaactgacagccgtaattgtacttgcagaaaccaatggttttgaattaattaaaaatactaaacaactggtcagttatagtggattggatgtgaaagtaaaagactcgggaacatcggtaaaaggaaaacctaaaatatccaagaaaggaaacaggcatatccgcaaagccatgcacatgccagccttgtcggcaattaggtacaatgaaaaacataaagcactatttacacgcctaatatcaaaacatggtatcagaatgaaagcagttgttgctgtacaaagaaaaatactggagttgatttatattatttataaaaccgacctgccttttgatcaggaatatgcaaaaggagaaaataaaacccagaagcaaattttagagcagccattataaaaatgaaactgctctaacctggctggctgatgccgcctttgaataacaaaattaaaaattatttggaatttaacacagaat

SEQ ID NO: 3912 - DNA, 1408 bp, unidentified
  source 1..1408: mol_type = unassigned DNA; note = element_5e2bcd2
  misc_feature 1: note = core
  misc_feature 2..89: note = LE
  misc_feature 90..1106: note = CDS
  misc_feature 1107..1408: note = RE
  misc_feature 1163..1400: note = bridgeRNA
caatggaatggacacctcccacctaaacggcatcgtgatgtgccagactgaagattccaaaccatcagtcatatagagggaggtgtgaaatgaatattacgcgtattggcatagacctggcaaagagcgtctttcagattcacggagtagaccgtgcgggcaaggtggtcgccaagaagcagctaaggcgcaatcaaatgctgacgtactttagcaaactgtcgccgacgttgattggcatggaagcctgtggaagtgcgcattactgggctcgggagcttggcaaaatggggcatgacgtacgcctgatgtcgccgcaatttgttaagccctacgtcaagagcggcaagaacgacgccaatgacgctgaagcgatctgtgaagcggtgagccgccccaacatgcgcttcgtacagattaaaagcgtcgagcagcaagtgatgcaggccgagcaccggatacgcgctcgtctcatcaaggcgcgtactgcgcttggcaacgagatacgcggcttgcttggagagttcggcatcgcgttaccggtatcgcttgcgaatttgcgccgcgcaatacctgaactgctggaagacgctgagaatggattgctgatggacttccgcaggctactgaaactgctgggcgatgagcttcgcgaactggatgacaacatcaagcactacgatgcccgcatcgcccagaacgcgaaagaagacgaacgcatcaagcggctgctggctgttgaaggaatcggcccggtcgtagccagcgccctggtgtcggcggtaggtaacggaaaacagtttagcaaagggcgggacatggcggcttggctgggactcacgcccaaccagcattccagcggcggcaagaaccggctggggcacatcagcaagcgtggtgacaagtacgtgcgcatgatgctgatacacggggcacgagctgcactcaaagcggcggagaacaaaaccgacgggcgaagccgctgggtgacgggtttagccaagcgccgtaacaagaacatcgcgaccgtggcgctggcgaacaagaatgcgcggattgcatggtcgatcttgagccgtgaagaaacataccgggtcgccgactagaaaagacaggactacccgcaaacgggaagatgacaacggagcattagcaggagacaaccgacagcgattgcatggcaaaacgaattgatggcaaacaggtcagaccggcgtaggcgactcagcttattgcgatggctcactaccggaaacatacggcaaagccgctagggcgatttgaaacttacgcgcgaattccatcatggctcgggtagctcgctacccataaggaagccggatatacggaagcagttgcacccaaaaccatcagccgcgttgcttgcaaaacgggaggtgtccatata

SEQ ID NO: 3913 - DNA, 1151 bp, unidentified
  source 1..1151: mol_type = unassigned DNA; note = element_5e2d583
  misc_feature 1..2: note = core
  misc_feature 3..163: note = LE
  misc_feature 164..1141: note = CDS
  misc_feature 1142..1151: note = RE
  misc_feature 19..193: note = bridgeRNA
gccgcttgtgtctggaggttgctctacagtttgagtggagagcgatgtgcggcacgccgacaggccgtagtgttcgagcacgtgtaggagccagggcggccgcacatcgacctcgttgcctagcccgaacagttgaacgagcgttcgctcgaacttcacaagcgtgggcagcgacgaggtggctctctcctgtccctcagtctacctaacgcttatgcctctttggatcggtatcgatgtggccaaggacaccttggccgtccacgtgcttcccctggaccagttgctgtcctttcccaataccgcccagggccaccagcgcctgtgcgaccaccttgccgggcaatgcgtcggcaatgcgctgctggaggccaccggcggctacgaacgcgcggtgatgacggcactggccacggcagggatcccggtgacccggatcaatccgcgccgggcacgcgctttcgccacggccttgggcacaaccgccaagaccgatccgctggatgcggccttgctggcgcgcatggctcaactggtgcaagcgcccgcgccgattcccgatcccttgcgtgagcaactgcgcatgctggtccagcgccgcgagcaactggtccagcaacgtgacgacgagcgccgtcgcttgcatcaggcgaccctggccatggtgcgcgcatgcctgatcgagcagatcggcgacttgcgccgccgtatccagcggatgaaccaggcgatcaagcaggtgcggtgccagctcgacgatgcgctggcgcacgccctgggcacggtcccgggcatcggcgaggtcaccaccgccagcctgatggcctatctgcccgaactggggacgctggatcgtcgccagatcgcggccctggtcggcctggctccctacaacgtggacagcgggcagcactgcggcaaacgccgcatccgcggcgggcgtgccaccatccgacgagtgctgtacatggcctgttggagcgttgtgcgcacccaagcctccttcaaggagcgttatcaacagttacgggcacgcggcaagcccgccaaggtcgccatcaccgcatgcatgcgcgtactgcttatccgactcaacgccatggcacgagatcgcacaccatggcgtgaggtgatcggatgagaagacagtt

SEQ ID NO: 3914 - DNA, 1159 bp, unidentified
  source 1..1159: mol_type = unassigned DNA; note = element_5e3059f
  misc_feature 1..2: note = core
  misc_feature 3..214: note = LE
  misc_feature 215..1147: note = CDS
  misc_feature 1148..1159: note = RE
  misc_feature 13..217: note = bridgeRNA
cttgtcttatgacttctgtcggctcccgaggcaacagggagccactgcccgccacgccatatttatggcgagcagtggcgggggttggatcgagagaagctgggccgcctctggcgccgtgccgtagtgggatcgcccccgtcttcatcttctgtcctgaacggatacccgggttcacggcccggatgacaagacgaggaagtggataaagacaatgcaggataccatcggcatcgatatctcgaaactcattctggacgccttgcggctgacgacaggtgaatttcgacagttcccgaacgacaaggccggctgtgccgcgctgatccgttggatcggcaagacgcccatgcggatcgtgtttgagcccaccggcccgtatcaccgccttctggagcaatctctgacccaggccgggaccgccatcgtcaaggtgaacccgcgctatgcccgccgctttgccgaagcgaccggcgaactggccaagaccgaccggattgacgcgatgctcctggcgcggatggccgcggttctggacctgcaggcgcgtcctgggcgttcggaaattcatcacgatctcagagagttgagcatggcgcgacaggcgctgatcaaggacaggaccgccgcgcgcaaccgcgagcaggtggcgcagaacgccatcatccgtcgccagctggaagctcgactcgggcagatagagaaacagatgggtgagatcgaaaaggccatggcagcgatcgtcgccgccgacgaaacgctcgcgcgtcggcgggaaatcctcgccagtattcccggcatcggcccggtcacggcaatggcaatcatcgtcgagatgcctgagctcggcgaactggacggcaagcaggcggcaagcctggcgggtttggcgccaatcacgcgcgaatccggcggccggaaagggcgctcccgcatccagggcggacgcgcctcgctcagatgcggtctctacatgccggcgctcgtcgcgctgcgcatcaacccggacctgcggcgcaaatacttggccctcaaggaagtaggaaagccctcgaaggtcgccatcgccgccatcatgcgaaagctgatcgtgctgaccaacgcgctcattcgcgacaacaggaaatggagcccaaatgccacttgaccgacacggata

SEQ ID NO: 3915 - DNA, 1371 bp, unidentified
  source 1..1371: mol_type = unassigned DNA; note = element_5e3215c
  misc_feature 1..2: note = core
  misc_feature 3..237: note = LE
  misc_feature 238..1086: note = CDS
  misc_feature 1087..1371: note = RE
  misc_feature 1131..1321: note = bridgeRNA
gaatgtaagggacttccccgtcccgaggcggcaccgacgtgccaggattgagttgcgagatcaatcttttcgaaagaggaagtcccatgagcttagtttctacggttggaatcgacttggcaaagaatgtgttttcgatacatggcgtcgatgcatgtggcgtggtcatgatacgtcgcacggtatcgcgcaaaactcgcagagctggtggcccagctaccgccctgcctgatcggaatggaggcgtgttcgggtgcccacgaatgggcgcgacgattcgctgccttcgaccatatcgtcaaactgatggcgccaaagtttgtaaccccatatcgcaagagcggtaagaacgacggcaatgatgccgaggcgatctgcgaagcggttgcgcgacccaacatgcgcttcgttcccgtcaaatcgatcgagcagcaggcggatctgaccctgcatcgcgtgcgtcaaggctttgtcgaggagcgaacggccatgttgaatcgcattcgcggactgctcgcggagtttggtcacgttttgccgctgcgtgccgccgaagtacgtcggcgcgtaccggagttgttggaagtactgcccacccgagttgccaactgcgtgcgcgatcttctcgagcatgccattcggctcgacgccagggcactcgagtatgagcgggaaatcagggcgcacgttcgcaccaacgctctggctcgacgagcccaaacccgtcagggcattggccctattaccgcctctgccttggtcgccacggtcggcaacgcacatgacttcaagaacggccgtcaatttgccgcctggcttggtctagtccctcggcaatattcaacgggtggcaagacccgtctcggacacattaccaagcgaggtgatccgtacctgcgcacgctgctcgtcatgggtgctcgagccgtcttgcagaacgctgcgcggctgaatgatccgctctcccgctgggcacttgccgttcagcagcggcgcggctatcaccgagcctgtatcgccatcgccgcgaagaacgcccgcgtcgcctgggcactactggccaaggacactgccgtcgccacttgatcgcggcgacaaactgaatgggataacaacctggaggatcacacgcactgcactcgttgagcaaacaggtcagaccggcgctcgcggaaccagatcaaccttcgagcggaaatcgctgcctaacgatcgaggcgcgagcgcgcggcttacacgcgggcccgagtgcatagcactcatcagtggccgattagagttacgcagtctgtccttcctcgctcgacaacgctcagcaaaagaaacaggaatcagcaaaaaatatgttgacacaacggggaagtctttaga

SEQ ID NO: 3916 - DNA, 1418 bp, unidentified
  source 1..1418: mol_type = unassigned DNA; note = element_5e354bc
  misc_feature 1..3: note = core
  misc_feature 4..135: note = LE
  misc_feature 136..1149: note = CDS
  misc_feature 1150..1418: note = RE
  misc_feature 1175..1414: note = bridgeRNA
agatggtatggacgcctccccccggaaacgggccgtcgtggaagtgacggcccgggcgcgggagacttggcacgcgtcagtctgcgtgtgccaaagtaagggtgcccgtaaaccgtgcgtcaaggagaaccggaaatgaaacccacccttatcggaatggacattgccaagcaggtattccagcttcatgcactcgacccgcagagcggccagatcgaaagactcaagctaaagcgtgcacaggttctcgagttcttcgccaggcgcgcaccttcgattgttgtgatggaagcgtgtggcagcgcacacgactgggcgagacggctgcagcagctcggtcatgatgcgaggctcatctccgcccggtcggtgcggccgtttgtgttgcgtaacaagaccgacgcggccgatgcccgagccatctgcacagcggcgcagcagccggacgcgcgctttgttgctatcaagagtgaagctcagcaagccatcctggcgatacatcggatgcgtgcccaactcatgaagttccgcatcatgcaaaccaacgcgttgcgcggtctgctgtacgagttcggcgaagcactgcccgagagttatcgggccttcaccaaagcattccctgccacgcttgcaggagtcgctgaacgtctgccagcaatcctgatcgacagcctgcgtgagcaatggaatcgcgttcaggccaccgacaaggaaatcgccgtgcttgagcggcggctcgctaccgcctttcgtaacaacggggactgccagaaggtcgccgacatccctggcgttggccttctcacggccaccgcgacggttgcatctataggcgatgcgcgaacgttcaaatccggccgtgagtttgccgcctggctgggtctggtgccgaggcaaacgggaacgggtggacgggtacgacagatgggcctgagcaaacgcggcgacacctatttgcgcacactgctaatgcacggcgcccgctcggtcattatccaaggcacacgatcggcgtggattgacggcctgctcaagcgcagaccgtttaatgtcgccgttgccgctgtcgccaacaaactcgcacgaaccatctgggcggtacttgcccgaacgcagggctatcaggcttcaccgcccgctgctgcgtagacttcatgttatgacgggttcctgaaaccttcctcaaggagcgcaagcaagtgctgcatgatggctaacaggttggaccggggcgaggaaaacccgatagggaagatgaaccattgtgttcgatttgcagatgaggacctcgccagcgaattccattagggcctgcaggcgcataacgacctgcgaaaacgggccggacataagcgtgctgcctttacctgaaagccaaaaatcgcaacactgtttgcaatccgggaggcgtccacata

SEQ ID NO: 3917 - DNA, 1355 bp, unidentified
  source 1..1355: mol_type = unassigned DNA; note = element_5e3687d
  misc_feature 1..2: note = core
  misc_feature 3..74: note = LE
  misc_feature 75..1100: note = CDS
  misc_feature 1101..1355: note = RE
  misc_feature 1124..1352: note = bridgeRNA
ttaatgagatggtccccctccaccctgcaagatactaatcttgtggggtgtgttctttctgaacggaggccatcatgcaagacgttactcttatcggcatcgatctcggcaagcacggctttcacgtgcatgggcaagatcagcatggcaaggcgctgttgcgtaggaaattcgaccgcaagcacctgatcacgtttcttgccaacttccagcgctgcacgatcgtgatggaagcttgcgccggcgcccactggatggtgcggcagctgtcagcactcgggcacgaagccaaactcatctctcctcagttcgttcgtcccttcgtcaaagggaacaagaacgactttatcgatgcagaagcaatctgcgaagcagccggccgtccatcgatgcgcttcgtgacacccaagaccgaaacccagcaatgcctgtcggccttgcaccggacgcgtgaatcgctgatgcgcgaccgggtcaaggcaatcaaccaggtccacggcttcctgctcgagttcggtatcggtctgcccacgggcccggcaatcatcaaacgcttgccttccgtgatggcagagcacgctctgccagcacggctggtgagcctgatcgaaaggctgcgtgctcacatcaagtatctcgatgagcaactcgatgacctcgaaaaggagctgggtacgcaactgcaggacgatgacctgggccagcgcttgatggccattcccggcgtcggaccaatcaccgccagcgtcttgtcggccgagatgggcgatggcaagcagtatcgttgcgggcgcgattttgccgcctcgcttggccttgtgccgcagcagcacagtactggtgggcgagcgaacctgctcggtatcagcaagcgcggcgataaaaatatccgacgcttgctggtgcaatgtgcgcgatcgtacatgcagcacctggaccggcacaccggccgactggggcaatgggtccgatcgatgctgctacgacgtcactccaatgtcgtggcctgcgcgctggcgaacaagctggcccgtactgcatgggccttggcggctcaccacaccgaatacaaaatgcaggaggccgccacatcgctgtgacggcctcccgagcttgctgtacccaaccacctacctggttttgcgacgctgatactggatgacgtgaacggcacaccggcctgacggagaacctggcataaaaatcggctcatgaagccgcgggctttttaaggacccatcaggcgcgaactctcatcgtggcgcggagcaagtctccaaatacgacgccggatagatttgagcaagccacacaatcatacaaaaatcagcttgcaaaaggagggggaccataga

SEQ ID NO: 3918 - DNA, 1348 bp, unidentified
  source 1..1348: mol_type = unassigned DNA; note = element_5e39219
  misc_feature 1: note = core
  misc_feature 2..66: note = LE
  misc_feature 67..1071: note = CDS
  misc_feature 1072..1348: note = RE
  misc_feature 1115..1345: note = bridgeRNA
taatgagatggtcactccctccttcgcagcagtatgctaagagcatacttaaaatggagaaccgccatggaaaacattacgctcattggtattgatctggggaaaaattcattccacattcattgtcaggatcatcgtgggaaagcggtttatcgtaaaaagtttaccaggcaaaagctgtttgaatttctggcgacataccccgctacaactgtcgtgatggaagcctgtggtggtgctcattttatggcgcgcaggttgaccgccatgggccatacagcaaagcttatttctccacaatttgtgcgcccgttcgtcaaaactaacaaaaacgattttattgatgcggaggcaatctgtgaagccgcatcccggccatccatgcgttttgttcagccacgtacgggatcacaacaggaaatgcatgccctgcaccgggtcagagaatcgctggtcagggataaggttaaaacaacaaaccagatgcatgctttcctgcttgaatttggtatcagtgttccgaaaggagctgcagttataaaacggtttcacgatattctggcgggaaatgagttacctccttaccttaccagattactgctgaagctgcgcgagcactatgattatctgcttgagcagataggtgatctggaatctcagcttaaaaaagcactggaggacgatgttacaggccagcgtttactgacaattccctgtattggcccactgactgcgagcctgctgtccactcaactgggtgacggaaaacaatatggcagcagccggaattttgcagcttcaacgggccttgtaccacgcgagtacagcacgggaggaagaaccactttattgggcatcagtaaacggggtaacaaaaagttacgggcattgctggtacagtgcgcaagagtatttttacggacactggagcaccagtcaggaaaacttagtgactgggttagagagttgttgcttcgaaaaaataacttcgtggtgacctgcgccctggcaaataagctggcaagaatttcctgggctctggcaacaggacacagtacttttgaatgctgacagcagataacatcttacctttaattgtaagagactgatttttttgagttgcatatctggttttgcgaatactgacaattgatgatatgaacggccagacggcctggtgaaaaacctgtggttaggatagtccatcagaggacgttcaatttttaaggttcatcaggcgcggagctcatcgaggcgcaggcaaacagccataaagacgccggatagattcaggcaagccaacaatatcttcaacaccggtattgcaaaaaagggagtgaccatagat

SEQ ID NO: 3919 - DNA, 1375 bp, unidentified
  source 1..1375: mol_type = unassigned DNA; note = element_5e39252
  misc_feature 1: note = core
  misc_feature 2..87: note = LE
  misc_feature 88..1116: note = CDS
  misc_feature 1117..1375: note = RE
  misc_feature 1136..1365: note = bridgeRNA
tatgggatggcccgccccttatctctccgacaccgaaaactggagcgctaagctgtcagggcaaccggagaaacaggagctgggctaatgcagattgcagtattgggtatcgacctcggcaagaacagctgcagtgtcgtggggctagatacaaccgggcgcgttgtcctgaagcgtcgcctccaccgtgatggcgtcctgaagcttgcagcgagcatgcccagctgcgtgatggcaatggaggcctgctgtggggcgcaccatcttggccggatattgcgcgatcaaggacacgaggttcggctgatgtcgccggaatatgtccgaccctacgtcaaggctcagaagaatgatgaccgggatgccgaggcgatcgccgaagcggcaacgcggccgactatgcggttcgtgacgctgaagagtgagacacagctcgacatgcagagcctgcaccgtgcccgcgaccggctggtcggcgagagaacggctctgatcaaccagctgcgcgccatcctgcttgagcgtggcatcatcgtgccgcagggacgacgtaagatggaactgcacctcgaggcgcttttagccggagaaggcgttgggctgagtgcaagaacccggttgctggtcgacgatctgcgtctcgagtggggcgagctggatcgccgtatcgagggttttgacgccgaattcgcagcaaaggcgcgcaccgacgagaccgcccgcctgttgaccacgatcccgggtatcggcccgctgaacgcgacggcgctggcggccgccatcggcaacgcccagactttcggacgtggacgcgacctggccgcctggctggggctggtgcccaagcagatgacgaccggcggcaagccgaagcttctgggaataaccaagcgcggcaacggctacctgcgcaagatgctgatccacggtgcgcgtgcagccttgccgtcgctgtccaagggtgagaccgcgatgggtggctggttacgcggcttgctcgcgcgagcgcacgtgaacaccgtagtggtggcgctggccgccaagctggcacggatcatctgcgcagtgcttcggagcgggcggaagttcgagctcacgactgcaacggtgtcataatcaatagaattggctggtcgcgctcacccggcgcggacggttgatggggtctgcgggtggttaatgcgagatggcctgacagttgatcggcgttctggaaacctggttcaaaaaatggcgctcgacgccgatgtttttatgaggaccgggacgtgcggatctccatcttggccgggacaatgtcccgagaccggatacgttggcgtagactgaccagatcggatcgcaaagatcgcttgcagagggggcgggccatacg

SEQ ID NO: 3920 - DNA, 1242 bp, unidentified
  source 1..1242: mol_type = unassigned DNA; note = element_5e436b2
  misc_feature 1..2: note = core
  misc_feature 3..249: note = LE
  misc_feature 250..1227: note = CDS
  misc_feature 1228..1242: note = RE
  misc_feature 6..211: note = bridgeRNA
cttgtatctcgactaacgcctcacaaaaggcgatagttctcgactgatcatcgaggaagagaagtgaagccgggcagcggctaaagccttgagcttgttccgtagatagtgctcctcctcttcacattcactcgttaagcccgaacggtatctagggcctgccactggcatgagctcgaattcacaaggcagagcagagtgatttggtgatcgggaattagggttaaagagattcaagagggaggattcatggtctgcttcgttgggatcgacatcgccaaaaacaccattgatgtggcaacgcatttacccaatggcaagcaccgcactcgcggaaagctggccaacaacccagccggttttgtcgagttggacagctggctgctcaagcacgccgagccaggtgcagtggtcgtgatggaggccaccagtgtctatcatgaggctgtcgcagagcatctttacaaccagggctaccacgttcacgtagtcaatccgaaagccgtctaccactatcgtaaaagcgagatgacgggcgtaaagaccgacaaggttgacgccaagttgatcgctgacttcgccaaggacaagcaccagagaaagcctctgcgggcttggaaaccagagcctgtcgcgcgtcgccgtttacgtgcgctgcttcgccggcttgaggacttgcagcagatgctccagatggagcgcaatcgcctcgacgtatcggacaacactgtccacgcttcgatttgctcggtgatcaaccacatcgaacaacaaatcaaagagacccagcaagccatcaaggatcacattgatgacgatccagatctgcgcggcaaacgtgatctgatggtcagcattgatggaatcggcgaaaaaactgcagccgttatcttgggcgaattaggggatcccctggactacgacggtcccaggtcgctcgttaagttcgccgggctgaaccccgaactcgctgagtctggcaactacagggggccaagcccaataagccgagcaggctcccccaggctgcgcagtgcgctgtatttgccttgcgtgactgccatcacctacaaccctgtgatggcagcaatggccaagcgcctgaaggccaacggcaaagttggcaaacaggttgtctgtgccgtcatgcggaagatgctgcatataatctatggcgtgctgaaatcgggccagccttttgacccgaaattagctcttgctcggtgacggccaagacggtat

SEQ ID NO: 3921 - DNA, 1485 bp, unidentified
  source 1..1485: mol_type = unassigned DNA; note = element_5e4499f
  misc_feature 1..2: note = core
  misc_feature 3..243: note = LE
  misc_feature 244..1464: note = CDS
  misc_feature 1465..1485: note = RE
ctaataagggttgctgggttggccgtgcggcagactcggtgcctggtggccgccggcgggtgagcactggtgttacctgggccgtgagccctgggcaaagatcgtgcccctgccggttgccgggagagctgtattgctgctgggatgtcgtgcctgcccgctgggtgtgagcactgttttattaggtcgccgaggttctcctgctggctgctggcgttgtctggtgaagctgagggagtgctggtgcggctgttcgtgggtgatgactgggcggaagaccatcacgacgtcgaggtgatggacggggccgggaaggtactggccaggaaacggctgccggagggggtggccgggatagcccagctgcacgcgctggtcggtgacctgctgggtgagaacgccgatgacggcgaggtcgtggccgggatcgagacggatcacgggccgtgggtgatggcgctgatcgcggcgggctaccgggtgttcccggtcaatccgcagcagtcggcccggttccgggcccggcacgccgtgtcgggggccaagagcgatgccggggacgcgcacgtgctggcggacatggtccgcaccgacgcccaccagctgcgcgaggcggcgggggacagcccggaggtggcggggatcaaggtgctggcccgcacccacaagacgatgatctgggaacggaccagggagacccagcggctgcggcatcagctgcgcgagtacttccccgccgccttggaggccttcgctgacctggccgccccggacacgctggaactgctggccaaggcccccggcccggcccgggcccgcaggctgacccgggcgcagatctccgcggcgatgaaacgggcccgccggcgcgacatcccggccaaagccactacggtcctggccgcgctgcaccgcgagcagctgtcccagcccccggtcctggccgccgcctacgccgccaccgcccggtccctcatcgccgtgatcacggcgctgaatgagcaggtcacggccctgcaagggcaggtggctgagtattttggccggcacccggacgctgagatcatcatgtcccagcccggcatgggagcgatcctcggcgcccgggtgctcgcagagttcggcgacgacccgcaccgctaccgcgacggcaaagcccgccgcaactacgccggcaccagccccatcacccgcgcctccggcaaacggaaagtggtcacagcccggttcgtgcacaacggccggctcatcgacgccctgaccgcccaggccttcgccgccctgaccgcctcacccggcgcccgcgcctactacgaccagcagcgcaccgccggccacgagcacaacgacgccctccgccgcctggccagccgcctcgtcggcatcctccacggctgcctcaaaacccgcaccccctacaacgaaaacaccgcctgggcccaccgccaccaccaagccgcttgacacactaagcccctgggatgt

SEQ ID NO: 3922 - DNA, 1525 bp, unidentified
  source 1..1525: mol_type = unassigned DNA; note = element_5e4ca28
  misc_feature 1..2: note = core
  misc_feature 3..239: note = LE
  misc_feature 240..1433: note = CDS
  misc_feature 1434..1525: note = RE
  misc_feature 9..259: note = bridgeRNA
ttcgtattatataagagtagagattaatacctctattcttatttttttgttatgatgagtttgattggctgacgtaagttcagttgggacatcacgcccgtagctaaacctgtcagccagctctcattatcgtacattcgatttagcaggttgggacatggctcccgcataactaacgaacctgagtcgatacttgagaagttgggaccaatcataataaatccaaaggaggaagtatcatgatagctgttggcattgatgtatccaaatccaaaagcactatcgcaatcgttgattcatcgggagaaatccttatgaaacccactgattttatgcacaatgaaagttctttttctcatcttgctacaattcttcacagttactctgacgatgtaaaaatcgttatggaagcaactggacattatcatcaacccgtccttaaatatttgctacaggaaaacttctttgtgtgcgttgtcaatccatatgtaataaaaaaatatggtgacaatgaccttcgtaagagcaaaacagataaaaaggacgctattcgcattgcattttatacacttgaaaaagcttattctcttacgccgtacacgattcttgaccaaaaatatgatgagttgaaatttttgtccagacagtataatcaatgtgtctcaatgcgtgtaaaagcaagagtacaactttctaacttattagatgagttaatgcccggaatccaaaacattttaaattccagaaccgctgacccggaagataactttttgtatcattttatagaaaagtatgaatcttatgaaaaaatccgatctatgtccgaaaagcgattcatcaatagctatgttaagttttccaataaaacacacgctaggaatccagaatcaaaagctttaaaaatatacgagacggctcaaaacaatttgtatactcgcaccaatacactgagtacagaaattgctatgaagcagtgcatcgaacttcttaagcagacagagttggctgcaaatgctattatgcgtcaaatgcaatctatagcaacgacattgccagaatatcctgttgtaacggcaatgggtggtgttggtccacgacttgcacctcgattaatcgctgaaataggagatacacggcgtttcaagagcggaaaagctcttaatgcttatgctggaaatgatgcaccaccatatcaatctggtcaatatgaatccaccaatcgacatatatcaaagcgtggatctgcaagtttaagaaaagcttgctacgaagttatgcagtgtctaaaaatgcataagcctcaagatgaccctgtttaccttttcatgattaaaaaggaatcagagggcaaacctttaaatgtagctaaaatggcaggtgttaataaattcctgcgtatttactatgcacgtgtaatggaagtatataagtagctttttaactctttatttcaagagctttattaaagtcgccctttttttaggtgaatttttctttaaaaaactcttgacatttattagcaggg

SEQ ID NO: 3923 - DNA, 1356 bp, unidentified
  source 1..1356: mol_type = unassigned DNA; note = element_5e4da7a
  misc_feature 1..3: note = core
  misc_feature 4..79: note = LE
  misc_feature 80..1099: note = CDS
  misc_feature 1100..1356: note = RE
  misc_feature 1093..1342: note = bridgeRNA
tgatggggtggatggccccctcacggcatcgatgtgccaaagttgggttgtcgaaaacaccaacgaacgggagccatccatgaaggaagttagcacgatcggcttggacctggcgaagaaggtcttccaagtgcacggagtcgacgcggccggtgaggcagtggttcagcgcactgtgcgccgctcgcgggttgtggcgtactttgcgaagctgccgccatgcctgatcgggatggaggcgtgtgcgacggcgcattattgggcgcgtgagctcggcaagctcgggcataaagtgaagctgatcccgccggcctacgccaaggcctatgtccggcgcaacaagaacgacgcggcggatgcggcggcgatctgcgaggcggtgagccggccgtcgatgcgctttgtcgaggtcaagacggaagcgcagcaggcggccgccggcgttcacaaggtacgggagacgatgatgaagcagcgcaccatgctgatcaatgcgttgcgcggtctgatggcggagttcggcatcgtggtggccgaggggacgcgtcacgtcggcgagctggaggcgatcttggccgatccgcaggagcagcggattccggcaccgctgcacgacggcctggtgagaatggcgcagagcctgcgtggcctcgaacggcagctcgagagcatcgacaagcagatcgtggactggggccgcgcgaacgcgacctgccggcatctgatcaccgctcccggctacgggccgatcctgtcgagcgccatggcggcgatggtggtcaagcctgcggtcttccgcagcgggcgggacttcgccgcttcgctcggattggtgccgcgacaagacggcaccggcggcaaggtgaagctgggtccgatcagcaagcgcggcaacggctatctgcgccgcctgctggtgaacggcgcgatgtcggtgctgaacagcaagcgggccaagcaggatccgtggctggtcaagttgcttgccaacaaggagcgcaaggtggcggccgtcgccttggccaacaagatggcgcgcatcggctgggcgctgatgatgcgccaggaggacttccgggccacgccggcggcggcctgaaccgccgccgccggtaggctcggaaggcttgcgagggtgaagacgcgtgatggcatcgtcggtcaatcgacggatcgagagcgacctttgtcgggtcaaggggcaacgcgaccccgtgggcttgatcaggcctcgatccacggttcccatcagggccagcggcttcggccgcgtgaacaggccggacacatgaccgcaagtggctgtcgatccagacacgcgaaaaaacccttgccagcccgggggccatccacaca

SEQ ID NO: 3924 - DNA, 1417 bp, unidentified
  source 1..1417: mol_type = unassigned DNA; note = element_5e4e603
  misc_feature 1: note = core
  misc_feature 2..94: note = LE
  misc_feature 95..1138: note = CDS
  misc_feature 1139..1417: note = RE
  misc_feature 1181..1409: note = bridgeRNA
caatgggatggactcctccctcctcaagcggcatcgacgtgccagactgaaaatgcgcatcacgttcagtcaatgaagaaagaaggagtccgagatgaagattacgcgcatgggcattgacttggcaaagcagatttttcaggtgcatggggtggacgcgcaaggcagacaggtgctcagacgccagttgcggcgtcatcaggtgttggcgtttttcgccaacctccccccatgcctgatcggcatggaagcatgtgcgagtagccactattgggcacgcaagctcggcgagcaggaccaccaggtgcggctgatcgcgccgcagttcgtcaagccctatgtgaagggcaacaagaacgacgccaacgatgccgaggcgatctgcgaagcggtggggcggccgaacatgcgtttcgtggcagtcaagtcggtggcacaacaagacatgcaggcgttgcatcgggtgcgtactgaactggtgcgccagcgcacagccaaggtcaatcagatccgcgggctgctgggcgagtacggcatcgtgattgcccagcgggtgacgcagctgcgccgggcgctgccggtgctgattgaggacgccgaggcggtgttcagcgaaccgtttcggtggctgcttgaggggctgcgcgaggatctggtgtatctggatgaacgcgtgcaaacgctggatgggcgcatcgcccgtctggccaccgaggatgaagccgcacgccggttgctacgcctacgcggggtgggcccgattaccgccacggcgctggtggccagcctcggcgatggccggcagttcaagcgcgctcgcgacgtttcggcgtgggtgggtctggtgccgggccagtacagcagtgggggcaagcaacggctacttggcatcagcaagcgcggcgatgcctacctgcgcacgctgctcatccatggtgcccgggccgtgctcaggtactcggcggacaagaatgatcccttgagccgctgggtgcagcgtctgtgtgcgcggcgcaacaaaaacatcgctgccgtggcgctggccaacaaaaccatgcgtatggcctgggcgctgctcagtcggggcgtcgaatacgagccgatgcctgggacagcgccccaggcggttgcagcctgacaaggacaggcctgctactgaaacagtgatgtaaggagacaaccctttctcgattgcgaagccaaagatcgttgatggcaaaacaggtcgaacctgcgttggcccaacctgcctctagcgctgtgccccagagcacgataggtcgatcaggcgccaacgcgcgaatagcccatcatggcccgggcaaatgcgcccaactgacaggccggatatacgtgtgcagtcgatcctcaatgcctgagacgaaaagtggcttccaaaacgggaggagtccatata

SEQ ID NO: 3925 - DNA, 1136 bp, unidentified
  source 1..1136: mol_type = unassigned DNA; note = element_5e52a49
  misc_feature 1..2: note = core
  misc_feature 3..177: note = LE
  misc_feature 178..1128: note = CDS
  misc_feature 1129..1136: note = RE
  misc_feature 20..184: note = bridgeRNA
cttgtatgtcgcacaattcggtctggatgcatcagatcgatgaccccatggtctgggcggtagcccaagttcgagggagagcgaggatcggtgcatccatttcttggtagcgtttagcctaagcccgaacggttgtaaggcagcacgccgcattgacacaaggatgggacaagccaaatggatatcaaggcagtaggaatcgacgtcagcaagacgaccctggatgttgacacgcttcccgagcggggagcccgccagttcaccaatgacgaggccggcattgacgcattgctggcctacctggctcagcataatggccagggtcagatcgagcgagtcgtgctggaggcgaccgggggctttgaaacccgggtcagcatcgcgctggctggcgcgggcctgccggtggtggtcgtcaatcccaagcaagtgcgggacttcgccaaggcttgcgggatcctggccaagacggacaagctggatgcgcatgtgttggcgcggtttggccagcagatccggcctccggtgcgcgcgctgccaagcgaggcgcagcgcgagtttgccgatctgctggaccggcgcagccagttggtagcgatgcgcgcgcaggaaaaggcgcgggtcgtcacggcgccggttgtggccatcaagagcttgaaggagcatatcgaatggctggacgcgcggatcaaggcgctggacatcgatatgacccatgccttgcgcaccagcgaggcgtggaagcagaaagtggaactgctcgacagcatgccgggcgttggcaaggtgacggtgttcacgttgctgggccggctgccggagctgggccaactcaatcgccagcagattgcggcgctggtgggtgtggcgccattcaatgatgacagcggcaaacgccgaggccagcgctatatccgtggagggcgcaccgaggtgcgtaacgtgctgtacatggcggcggttactgccatccgccacaatccggccatacgggaattccatcagcgcctgaaagcggttggcaagccgtccaagcttgccatcaccgcctgcatgcgcaagatcctgacgatcctcaactcgatggtcaaaaccggccaaccgtgggaaaacagattgcctgcttgacacggttg

SEQ ID NO: 3926 - DNA, 1690 bp, unidentified
  source 1..1690: mol_type = unassigned DNA; note = element_5e5525a
  misc_feature 1..2: note = core
  misc_feature 3..321: note = LE
  misc_feature 322..1578: note = CDS
  misc_feature 1579..1690: note = RE
  misc_feature 48..297: note = bridgeRNA
ctcgtataatatgtgtataagatcgtaatgattttatacacttttattttttaaatcttttaagctttatttattagaaggtcctagtgctataatgaagatagatatagctaaggaaagtgctgtcaccccttgcggtcaaaccgcttgtaaagcgtgcaaacctgcttatcatatgtaattctttacccggttgttgtttgaatgtccactactcattgaatccacgtggccaggaaattcttatgtgcgaggctggaaccgtatgataaggctaggacctttttatatctaatttattcgattggcggtgataataatatgactcaagaattatcaactttatatgtcggtatagacgtatctaaagaatcaaattatgtctatattacagactttcatcaatcttttcaccaatcatttaataccgtgaataatattcatggtgctgagttaattgaaacgaaattactagaaattctttatgattcggattactcgaatatcacttgtgtactcgaatcaactggaatctattctgctcacattgcgacgtacttatctgcttctgagaaactctttaggtataatgtcttggtatactgtattaatcctaagatatctcgtaattatcgtgctagtttttctgatatggataaaacagatccaaaagactcttatatcctagcggacatcgcaagggtcggtagaaccaagggtctcacgccttttaaaggttctcaaaaacttgcgcttcaacgtcttacacgacatcgagtccatcttgctgagttactttcaaaagagaaaacttatgtattaaccaacatctatttgaaattctcagaatttggtaaaccggatgccaagtttacttctaataattggagtaatactgccttatctgtcttagaagaattctcttcacctgaagaaattgtgaatacttctttagaggatttggttgccttcatcatgaagtcttcaaaaaaccgtttctctaaccctgaggacgttgcgacactcttaaagaaagcagctagagcttcttatcgacttgacaaagttgcttatgaaccaatcaattacgccatctcttctagtttgattatcattcgtacttatgaaactgaaatcaagaagattaatcagtcaatagaagaattaatgagaggttttgccattaatgagtacatatctttacgttctattcccggtattggaccagtatatgcggcaggtattctttctgaaataggatctattcatcagtttaaaaacgaagaatctctcgcgaaatacgctggaattacctggcgtaagaatcaatcaggaaaatttgaagcggatgatacttctatgactaaaacaggtaaccactatcttcgttactatttaattgaggctaccaatctagttaaaaactacgtgagttcctacaatacctattatcaaaagaaatataacgaggtgaataatcatcaacacaaacgcgcactcgcactcactacccgtaaacttataaggttgatctatggattaatgagtaatggtcaactgttcaataagaattactaaccgttaccaatattttgtgaaccacctaaccccgttaggtcttttgattatgcctagattaaaaaatctagctttttttatttattttctctcttgacatcattaccggttg

SEQ ID NO: 3927 - DNA, 1421 bp, unidentified
  source 1..1421: mol_type = unassigned DNA; note = element_5e55e69
  misc_feature 1..4: note = core
  misc_feature 5..201: note = LE
  misc_feature 202..1407: note = CDS
  misc_feature 1408..1421: note = RE
  misc_feature 1..189: note = bridgeRNA
ttccgtaagactgaagcggcccgggggaactgggcgtggctgaggtcgccttgcgtcttgtcgcttactgggaatgtccacccagctccccggggcgcccctggctgctgaattgagatttgcgcttggtcgctggttacggacgtgtcagcggggtgctccacgggtggtcagacaacccaatcggagcaggaggcgtacgtgaccgtagaaggagacgggacatggatcggtgtcgacgtcggcaagacccatcactgggtttgcgcggtcgacgagcgcgggcaaaagctgttgtcgctgaaggtcctcaacgacgaggctcagatcctcgagatgatcaccgcggtcagtggcctggctcagagccgggtgtgggcgatcgacatcctcggcactccctcggctttgctgctggcgctgctcgcccaggccggcgagtcggtgcgctacgcctccgggcgtctcgttgctgccatgagcaccgcctacgccggtgaaggcaaaaccgacgccaaggacgcttacgtcattgctgagaccgcccgcatccgcacggacctcgccgtggtcgacaccgataccgacgtggtgcggactttgggcgtcttgaccggacaccgcgcggatctggtggccgatcgggtccggatgatcaaccggttgcgggacctgctgaccagtgttttccccgcgctggagcgcgagttcgacttcgcttcctgcaagggcgcactggtgctgctgaccggctacgccacccctgaggcgattcgccggatgggcgaagcgaggctgtcgcgatggctacgccagcgccgggtccgcggatatgccgatgtcgcggctcgggctgtcgccgcggctcagagccagcacacggtgctcgtcgggcaagacgtgaccgccagcatcgtcgccgagcttgccagcaccgtcctgtcccagcacgaacgactcaaggccttggacgagcagatccaggacaccttcgcccagcatccccaggcggcggtgatcgagtcgatgcccggcttcgggcccgtcctcggcgcttcgctgctggtcgcagccggcgacctggccgctttcccgactgcggggcatctggcggcggccgctgggctggtgccggtccccaacgactccggacgccgcgtagggaacctgcacaaaccgcggcgctacagccgaccgctacgacatgcgctctacctctctgcacagacctcgatgatgcgggccggcccgaaccgggactactacctcaagaagcgtgatcaaggccgtacccacagccaggccgttatcgcgctagcgcgccgccgcatcgatgtcctgtgggccctgttacgcgacgaccgcgcctggaccgccgccccacccgcgagggctcatgccgcttgacaacaacattgaga

SEQ ID NO: 3928 - DNA, 1245 bp, unidentified
  source 1..1245: mol_type = unassigned DNA; note = element_5e58be3
  misc_feature 1..2: note = core
  misc_feature 3..264: note = LE
  misc_feature 265..1227: note = CDS
  misc_feature 1228..1245: note = RE
  misc_feature 6..214: note = bridgeRNA
cttatatctcgattctgtcttctacaagaggcataatccccgactgatcatcgggagggagatggagaagtcgtaacatcccttaggtcttgagcctggattgcagattgaactctccatctcccacactcgcccttgaaagttcgaacggtatgcgtaggccccgcttggcggatgagcctggatgaccataaggttgaaccgggcgcgtggtccccaagagatcacaacccattgtcaccacttttttgccggacttcaatcatgactacacattacgtcggcgtggacatctccaaggtcaagttcgatgccgcccgcctcagcgcggagggcaagtacaagcacaagaaattcgacaacaacgccgatggcttcgccgccttcaccgcgtggctggtgggcttcggggacgagaagccgacgattggcatggaggcgaccggtgcctacagcatccccctagccgattttttggtcggcgagggctacgccgtcagcgtcgtcaaccccaccaaaattcacgccttcgccaggaccgaactgggcagggccaagaccgacaaggccgatgccaagctgatcgcacgcttcatgcaggaaaagaagccgcccccttggaacccaccgcccgccaacatccgcgacttgcaagccctgctgcgccgggtcgagcacctgtcggagatgcgccaaatggagcagaaccgactggacaccgccgcccccgccgtcgccgagtcgatccgggccatcctgggatcgctcgacaaggagttgaaagccacccgcgaacgcatcctccgacacatcgacagcgaccccaacctccgggcgaggggggacttgttggattccatccccggtgtcggcgaggccacccgcgcccacctgctagtggcgttgagcgaacactacggcttcggcaacgccaagcaggccgttgcgcacattggccttgaccccaagatcaggcaatcgggccagtgggtcggcgagacgcatatctccaaggcgggcgcaccgctgctgcgcaaggcgctgtacatgcccgccgtggtcgccaagcggcacaaccccgccattcgcgccttctgcgaacgcctcaaggccaacggcaagaaaggcaaggccatcatttgcgccgccatgcgtaagctcgtccacatagctttcggcgtgttgaaatcgggcaaaccgttcgatccgaaattaggacttgcatgatgggcggaaagacggtat

SEQ ID NO: 3929 - DNA, 1418 bp, unidentified
  source 1..1418: mol_type = unassigned DNA; note = element_5e5913e
  misc_feature 1..4: note = core
  misc_feature 5..201: note = LE
  misc_feature 202..1404: note = CDS
  misc_feature 1405..1418: note = RE
  misc_feature 1..187: note = bridgeRNA
ctccgtaagttgttgggcggcccgggagggccgggtgtggctcaagagcttctgccttcagtggctcgccaggagtggccgcctgactctccggggcgccctggctgctgattgagatgtgcgcttcggtcgctgattacggagatgacagcggggtgttccttgggccgacggcccgctgttggaagtgaggaggggcaagtgagggagcgacggtcccgggtctgggccggcatcgacgcgggcaaggttcaccactgggcggctgtggtcgacgcgaccggcgcgactctgtggtcgaagaggatcgagaacgatgagtcggcgatcctgaccgcgtttggagagatcctggagatcgctgatgaggtccggtgggcggtggacatttccggcacgtcctccgcgctgctgttggccctgctcgcggcgcacggccagcaggccgtctacgtgcccggccgcaccgtcaaccgcatggccggggcctaccggggcgaggcgaagactgacgcccgtgacgcctacgtcatcgcggagaccgcccgtcagcgccgggacttcgccgccatcgacgtacccgcccaactggccgccgagctcgcgctgctgaccgcccaccgctctgacctggtcgccgaccgcgtgaggatgatcaataggctccgcgacgtgctgaccggagtcttccctgccctggaacgggccttcgactactcggctcacaagggcgccctggtgctgctgaccggctaccagaccccggccgccatccggcgccgcgggcgggcccggatcacggcctggctggccaaccgcggcgtgcggggcgccgacgcagtcgcagccaccgcgctgggagccgcccaggcacagcagaccgcgttgcccggcgaggacgtcgccgggcagatcgtcgctgacctggcggcacagatcctggccctggacgaccgcttgaagcggatcgacaagccgatccgtgagacgttccgcagtcacccgcaggcccagatcatcgagtccttgcccggcatgggcccgatactcggcgccgaattcgtcgtcgcggccggcgacctggccgcctacgcggacgccggccacctggcctcggcggccgggctggtgcccgtcccacgcgactccggacggcggaccggcaacctccaccgccccaagcgctacagccgccgcctgcgacgggtgttctacatgtccgcgcagaccagcatcatccgcgagggcccgaaccgggacttctacctcaagaagcgcggcgagggctgcaagcacgtccaggccgtcatcgctctggcccgtcggcgggccagcgttctgtgggctcttctgcgcgacaaccgggtcttcagccccgtcctgccggaaacgcaagcggcttgacttcgtcattgaga

SEQ ID NO: 3930 - DNA, 1449 bp, unidentified
  source 1..1449: mol_type = unassigned DNA; note = element_5e5d2ed
  misc_feature 1..2: note = core
  misc_feature 3..232: note = LE
  misc_feature 233..1432: note = CDS
  misc_feature 1433..1449: note = RE
  misc_feature 1..236: note = bridgeRNA
ccgttacctttttcgtggttcctgatcaaggagctgtggtcgccaggttcggtatgactgatgcccccagtcgaggtcatgatccggggggtggtgtcgccgggcctggtggcatcgggggaccgctgaatagggacacggccacccttggggtaggtctcgtcgcaggcgtgggtgccggccatcgatgccctgaccggcgaccacccgcgacggatgaaagacactgtgcatgaccagcagttatggcgtgttcctcggcctggatgtcggcaagggcgaccatcacgccgtcgctctggacgcgaccgggaaacggctgcacgatgggccgctgcccaacaccgaacccaagctgcgggcgttgttcgacaagctcgccgttcacgggccgctgctggtcgtcgtcgatcaaccagccacgatcggggcactgccggtcgcggtcgcccgcgcctgcgggcatcaggtggcctacctgcccggtctggcgatgcggcgtattgccgatctctacccgggcaatgccaagaccgacgcccgggacgcgttcatcatcgccgacgccgcccgcagcctgccccacacgctgcgcccggtcgacaccggtgacgaggccctggccgagctggaggtcctggtcgggttcgacgacgatctggccggtgaggccacccggctgggcaaccggatccgcggcctgctcaccggcatccatcccacgctggaacgtgtcctgggtccccgcatcacgcacccagcggtgctggagatcctgtcccgctgcggcggcccgacaggcatccgcaaagccggacgccgcaaggtcaccgccatcgcagcgactcacgcgccccgcctgggcgagaaactcgtcgccgacatctggaccgcgttgggcgagcagaccgtcaccgtcccgggaacggccgcagccgacaccgtcctgccccgactcgccgacagcctgaaaaccgtgcttcagcaacgcaaccaggtcgccaccgaggtggaggacatacttgatgctcaccctcttgccggggtcctgacctcgatgcccggcatcggggtcaggaccgccgcccgcatcctgctcgaggtcggcgacgcctccgccttcaagtcctcggcgcatctggccgcctacgccggcatcgcccccgtcacccgcagctccggcaccagcatcaaaggcgaacaccccacccgcaacggcaaccgcaaactcaaacgcgccttcttcctcgccgccttcgccgccctgcacgaccccaccagcagggcctactaccagcgcaaacgcgacgaaggcaagaaacacaacgccgccctcatctgcctcgcccgacgccgctgcgacgtcctctacgccatgctccgcaacggcacccactaccgccaccccgaccccgcccccgccgcggcttgacaatcacatagggacac

SEQ ID NO: 3931 - DNA, 1404 bp, unidentified
  source 1..1404: mol_type = unassigned DNA; note = element_5e5e6ac
  misc_feature 1: note = core
  misc_feature 2..18: note = LE
  misc_feature 19..1134: note = CDS
  misc_feature 1135..1404: note = RE
  misc_feature 1170..1394: note = bridgeRNA
taatggcatggaccggccgtgctctccgggggaacatgggaggacgggattctcccgcaggcaaggagctatgccatatcaaaccagactgcgcctgagtgcatcatcaccacgatcggaatcgatctgggcaagaacacctttcacctcatcggcatggatgcacgcggcaagatcgtgctgcgccggaaggtctcgcgcgggcagctgctgccctgcctggccaatgtgccggcctgcctgatcggcatggaggcttgcgcgggcgcccatcacgttgggcgccagctcgctgccctcggccatgacgtgcgcctcctgccggcccagtatgtgaagcctttcctcgaaggacacaagaatgactaccgcgatgccgaagcgattgccgaggcggcacagcggccgaccatgcggccggtgccgctgaagtcggccgagcaactcgatctgcaagccctgcaccgggtgcgcagccggctggtcgggcagcgcacggcggtggtcaaccagatccgcggcttcctactcgaatgcggcatcccagttcgaaaagggccggctggtctgagggaagccctgccatcgcttctcgcccagcgcacggacgtgctctcgccgcgcatgatccacctgatcgaggatctggcgggagactggcgcgggttggatgagcgcattgacgccatcacccgggacatcacggctctggctcgtcaggatgtgggatgccagaggctgatgggcattccgggcgtgggcgtgatcaccgctagcgccatggtagcagcagtgggaactggagctgccttcgccaaaggccgcgattttgccgcttggctcggtctcgtgcccaagcagatctcgaccggcggccgcaccatcctgggtggcctgtccaaacgcggcaaccgctacttacgcatcctctttgtcggaggagcgcaggttctcctgcagcgacagcgccactgggatgggcacggcttcgggcgctggctgcaagcggcaggaacgcggctgcaccggaatgtgctcgccgccgccctggccaacaagcttgcgcgcatcgcgtggggcgtgttgtcccacgagaacggttatgatccggagtttgccgcacggacggcctgagccagctcagacggccgacagttcgaggatagagttcccgccgaggttcgcgaggaggatgtgacaggatggaggaacggttgcccggcgcaccgcaagcctaatgaaaaaaatggccctttgaggtctcgcgtctaagtaggctcggtgcgcgcggattcccatgatggcccggagctcaggctccacccagaggccggatagattgatgcgaaccgtcactcacccatctgccacaaccctcttgcaacgcacggccggtccatagat

SEQ ID NO: 3932 - DNA, 1188 bp, unidentified
  source 1..1188: mol_type = unassigned DNA; note = element_5e7928a
  misc_feature 1..2: note = core
  misc_feature 3..213: note = LE
  misc_feature 214..1173: note = CDS
  misc_feature 1174..1188: note = RE
  misc_feature 20..207: note = bridgeRNA
cttgtatctagcgatcagttgattctggcgtagttctgatcagggcgccagctcgatgccgtctgggtggcaaacaccgtgcgttagccagagcggcgtacctgatcattcgtcgtgagagcccgaacagttgcgggggccggccaccgcgtcgagcccgaattcttacaaggacgggcgcggacgacgcttcctgagcggtcggaggggcagatgtttgtcggcatcgatgtggcgaaagccgagttggtgatcagcgtgctgccgagtgcagagcgattcaccgtggagaacgatgaacggggcgtgcgtacgttagtgcagcgcgtcgcctcgaacagaccgcagttgatcgtgctggaggcgaccggcggatacgagctgctcgccgttgccgcgctcgccgcggcgtcactgcccgtggtggtggtgaatccacgccaggtgcgggactttgcgaaggcgacggggcagctggcgaaaacagatcgcattgacgccgacatcctcgcgcgcttcgccgacgtcgtccgaccggaagtgcgcctcattccggacgccgccgcgcacgagctggatgcgctgcttacgcgacggcggcagctgttggagatgctgcaggcggagcgcaatcgcgtgggccaagtgttcggcacgggcaaaaagcaggtgcgcaaaagtctcaagtcgcacatcacattccttgagcgcgagttgcgctcgacggacacggatcttggcgagatggtgcggcagagtcccgtctggcgtgagcgcgatgagctcctgcgcagtgtgcccggtgtcggccccgtgctgtcacggacgctcctcgcggacctaccagaactcggtcgcttgtcccgtcgcgccattgcgaagctcgtcggcgttgcaccactgagtcgagactccggcaccatgcggggtcgtcgattcgtgcaaggcggtcgcgcgacggtgcgtggtgtgctgtacatggcggccctcgtcgctagccgtcgcaacacggtcattcgcgagttctacctgcgattggtcgccgccggaaagcccaagaagctcgcgctcgtcgcgtgtatgcggaaactgctcaccatcctcaatacgatgatgcgaaccaaaaccacgtggagcgcgaaagccgcgacagcgatactcgtagtcgcttgactttcaagacagttg

SEQ ID NO: 3933 - DNA, 1423 bp, unidentified
  source 1..1423: mol_type = unassigned DNA; note = element_5e7a6c6
  misc_feature 1: note = core
  misc_feature 2..225: note = LE
  misc_feature 226..1410: note = CDS
  misc_feature 1411..1423: note = RE
  misc_feature 14..240: note = bridgeRNA
ctgcttgttccattgacctaggactggtgcctggcgaggctcggtccaggcgcccgggttgtcgttctcatttcggctgcccacgctggtcgtgtggctctcatctggcctgcgcagcccgggcgtcgtcagggcccggagaggctcaagaggggtttgcccagctcgaagcagcgttgccctcccggctcgccaaccgaataggtcagagcatcggaggaaggcgtgagcacatcagttccagcacgagtagtgatcgggatggacccgcacaagaggtcggcaacgatcgaggtgatgacagccgacgaagcggttctgggtggcggccggttcgctaccgacagcgagggctatgcgcagatgctgcgctacgccgggcagtggcctgaccgggtctgggctgtcgagggctgcgccggcatcggcaaacacatcgcggtccggctcctcgccgacggcgagcaggtggtcgatgtcccaccgaaactgtcggcacggacccgggtcttctccaccggccagggacgcaagaccgatgagaccgacgcgcactcggtcgcggtggtcggcacccggatgagcggactaaggccggtcgtcaacgacgaacagctcgcggtcctgcggctcctggtcgaccgacgcaggtccttgggcgaggagcacacccgcaaggtctcccaactgcaccagctgctgctggaactcatccccggtggggcaaagcgcgatctctccgcggcccaggccaaagccctgctcgcaggagttcggccacgcgacatcgccgggaagacccgccgccgggtcgctgccgagctcatcgcggacctcgagaagatctacgcccgcaagaaggccgcgaacaaagagctcaccgaactggtcaccgaaaccggcacgaccctgctcgatctccacggcatcggacccaccggtgctgcccggttgttggtcgaggtcggtgacatcacccggttcccgaacaaggcgcacttcgcgtcctggaacggcaccgcaccgatcgacgcttcctcgggcgacaacgtccgccatcgactctcacgacgaggcaaccgccagatcaaccgggtcctgcacaccatggccagagtccagctccgcaacccgacacctggacgtgagtactacgaccgcaagaaggccgacgggaaagctccgatggaagcgatgcgctgcgtcaaacgtcggctctccgacatcgtgttccaaacgatgctcaacgacgccgtcgccgcacgcccgaggacaggcccgggaggacaacggggaaacgtctctgaatccagcgcgaccggctcacatccccgaaccagctcttcggacaagtcacttcccggacccgtcaccgccaaccctagaaccccaataccggctgcgtcttgacacagaggggtgc

SEQ ID NO: 3934 - DNA, 1206 bp, unidentified
  source 1..1206: mol_type = unassigned DNA; note = element_5e7b9d0
  misc_feature 1..2: note = core
  misc_feature 3..190: note = LE
  misc_feature 191..1174: note = CDS
  misc_feature 1175..1206: note = RE
  misc_feature 12..199: note = bridgeRNA
cttgtatctctcttgttagcgtgatgagctatcactataacgcagaactgagagagtttgtatccaccctaagagcttagactctgtttcgtagattaaaccctcagttctattttatcttaatatactggatggtatccaaggcgcctttcgaagaaagtgatgctgcatgtacaaggggagttatgagatgagttattttataggtattgatattgcaaaagataagtttgattgcttatggttaagagacatagagacgcttaaaatcaaaacaaaggtgttagctaatacacctgatgggtttaaattattacgtcagtggtttgaaaaaaacatcacgcacaacttaagtgatatccatgtctgcatggaggcgacggggatttaccatgaagcactcgcttacgcattacatgagatgggtataaaagtgagcgttatcaaccccgcttttatccgtgattttgcaaagtcattaggcgtaagaagtaaaacagataaaaaggacagtatggtcattgcgcgttactgtgctttgatgaggcctcgactttggcagcctgaaccgaaaaacattcgcgtgcttaaggccatgttagcacgccttggcgcactagagaaggatatgcagcgggaattaaaccgcttagaaaaagcacaagtgagccaggcctctgtggacgttattgagtcaattcatattatgactgaaggactaaagcaagaaataagtcgagttcaaaagcagattgatcttcatattgatcaacatccagacttgaagcaaaacaaagaaaagctccaaagcataccgggaatcggtgatgtcgtatcgcgagaaatgctagcggtgttactcagtcgcgacttcaaacgcgccagccaagccgctgcttttatagggttagtgcccaagctttgggaatcgggaaagatgaaaggacgaacgacgttatgtaaaaacgggcctggacgattacgcgccaaactttatatggctgcgattgtggctaaacagcataatccggatataaaggcgcaatatgagcgtttgttattggccggtaaaacaaagatgcaggcactgggtgcggcgatgagaaaattagttcaaatttgttttggtgttattaaacaccaatgtgaataccagcctcaattaattaaataataatgattgaagcgggttcggagagatggtat

SEQ ID NO: 3935 - DNA, 1952 bp, unidentified
  source 1..1952: mol_type = unassigned DNA; note = element_5e7c22e
  misc_feature 1..3: note = core
  misc_feature 4..133: note = LE
  misc_feature 134..1438: note = CDS
  misc_feature 1439..1952: note = RE
  misc_feature 1610..1870: note = bridgeRNA
aggagcttcttgtataattcaaatataaggaattccgagaaagaaggttgagaaaaaaatacctcagagtaaaataagattactgactttgcacggttagtaaaaaatcttattgaacagagaggtatctgaaatgaattataacacacagaacgcaaaaattgcatctattacggaaaaaactttaatcgccaaaactttaatcgttggtattgatgttggaagtgaaactcattatgcaagggcctttgactggcggaattatgagtactcaaaaaagccgtttgctttcaacaacgatgaagccgggtttgctgcatttaaggcatggatggaagacatggcagacaaacatggtaaagaggcggtgattccaggtatggaacctaccggtcattactggctgaaccttggagcgtacctgcaggaacagggaatgaagccggtgcatgtgaatccgcatcatgtaaagaagtccaaagaactggatgataacaacccgaataagaatgaccgtaaagatccaaaaacaattgcgggactggtaaatgaaggaagattttcgtatccatatatcccaacagggatatacgcagagatcagaaatctgtcaaatcttcgtattcagacgcaggaagaacttacaaggatcaaaaaccggattgcccgatggttcagtatttattttccggaaataaaagacgtttataaaaacccggatgctgtaagcgggatgatggtgatcaaaaaggcaccgttgccatgtgacataaaagaacttggcgtagatggtgtaaatcaggtatggagggatgcaaagctgaaaggcgctggcttaaagagggcaaggaccctggtatcagctgcggagcacagcatcggaagtacagaagcacctggaagtgccagaatagagatccgcaacctgctgaacgattatgaagtatataaaaacagaatggatgatctgatgcgggagatagaagcgaaactttctgagattccatacattgataaactgatggagatcaacgggatcggtttaaaaaccgtaagctgttttattgcagaggtgggtgacattcgtcgttttgataacccaaagcagctgcagaaactggcaggttatgccattgttgcagacagttccggcaaacacaacggagaaagccgcatcagccacaggggaagaaaacgcctgagatatgcattgtatgaggctgcgatatctgtgataggaaagaataaagagtttagagaaatccatgactattacaggacgaggaagcaaaatcctttgaagaagatgcagtcagtcatagcgattgcgtgcaagctgatcaggatcttctacacgatactgacaaaaggtgtagattatgatggtcagaagatgctgagtgatatcgtaagtccggaaactataatggcagcataaaaatatcaggaagcagtatatcgtggttggtttgagcatttgagtaaagaatgcttgaatgctgagaccagccacggtagctggaagtataaaaatcggaatgcaataggaaaacgtccactgaaagtgctgttgcaggaaggaagaaagtcagtaataaaacatacaaagaatgagccagtagtcggcaggaatatattccagagggcatgaccctgtaaaggagctgagctgacaccctggttatggacaggcgggacgagagaagttaggactcggcatagactgatgatcctggtagacatgggaggttcgctgccgtagatggatgggtacacacaaggccatgtaaaatgaaataagaagacgttttacttcgtgcacccaaaattcactattttcgtagcagatacagagaaatgtccatttctatggctccttcttctgagatatttattgatgaaacactaaaaaatccttgattttcaaggaaaaaagacttgactatataggg

SEQ ID NO: 3936 - DNA, 1509 bp, unidentified
  source 1..1509: mol_type = unassigned DNA; note = element_5e7e24c
  misc_feature 1..2: note = core
  misc_feature 3..129: note = LE
  misc_feature 130..1179: note = CDS
  misc_feature 1180..1509: note = RE
  misc_feature 1230..1481: note = bridgeRNA
agacggtatgggtgactccccgatggtgtgttggggggggttgcgggccggagcctcacgcacaaagactcgtgggttaccgagcaggaggcgcctgcccggcctatccgacatttgtgggaggccccggtgtttacagagcgtacgagtgtaggactcgatgtgcacgcacgatcgatcgtcgcggctgctcttgacggccaaacaagtgagcttcatcaggcgcggctgacgccgtcgtttgagcacgtcagatcatggctggcgacgttgccaggccctgtcgcggtggcctatgaagccggtccgaccggcttcgggctgtaccgggacctgaccgcggcagggatccgctgcgaggtggttgcgccgagcaagctgcagcgtccggtcggtgaccgggtcaagaccgatgtgcgcgactcgattcacctggcgaggttgctgcggcttggcgagaccacttcggtgtgcatcccgactgtcgcccaggaagccgcgcgtgatctggtcagggcccgcgaggactgtcggggtgatttgatgcgggcacgtcatcggttatcgaagctgttgctgcgtcacggcctggtctatgacggtgggacggcctggaccggcgcgcatgaccggtggttgcgaacagtcgcagcgtcggcgttgaccggggcggccacacgggtggccttcgatgccgattacgaacacgtattgacgatgaaagctcgacgtgaccgtttggacgtggcgatcgtagcgatggccggtgatagtgagttcaccccgatcgagcggcggatgtcgtgcctgcgtggagtgagcacgctgaccgcgttcgcgttgaccgtggagatcggtgattgggatcggttcaccggcaacagcattggctcattcgtcgggttggttcccagcgaatattcttcaggaatgtcgcgggtgcagggggcgatcaccaagaccggcaacacccatgcccgccgattgctcgtcgaagcagcctggcaccatcgggcgcgctatcacgtcggtgcggtgatgcgggaacgctgggaacaggctcccgcagcggctcgggtgcgtggcgatgaaggtaaccgtcgcctccatcagcggtgggtgaacttccttgaccgccggaaacgccccgtcattgccaaacgtcgccatcgcgcgtgagttggccggctggtgctggtcgttggccgtgatggactgctgacagcaattggcctgctttatgagccgatcggtggtgacagcgcgtggatcgacccgcgatacaactatgagcaaacccggtcacgggttgacgctcgaccctagacacgcggtcgcgatccagccgaaaccccgtcctgcggtacccaatccgcgaatatcagtctgaccgcgcgtcgtgatacgacacgctcaccacacagatcgctcatgaagcacagaggtaccgccgggatagcttcccggcggtacctcgccctgcgaacttgacaaacttctctacatatc

SEQ ID NO: 3937 - DNA, 1161 bp, unidentified
  source 1..1161: mol_type = unassigned DNA; note = element_5e8c61c
  misc_feature 1..2: note = core
  misc_feature 3..192: note = LE
  misc_feature 193..1146: note = CDS
  misc_feature 1147..1161: note = RE
  misc_feature 7..160: note = bridgeRNA
catgtatcttgccccctgagggaggccctaccgccctggttgccgggcacccacgcccgcgggattgatgggtagccacccgccccggcctccccgccgcacagtatcccggtcgtgaaagaccgcatccacatggaaggcccacagggtcgggtggccacctccctcaggttaccaaaaaggagagagcccatgaccttcgccggtattgacgtcagcaaaccccacctggacctggccctggtctccaactcccccaaacccacccgcctccgcttccccaacacccccgaaggccgtcaagccctcctcgccgccctcgcccaccacaaccccgcctgggtcgccctggagcccacgggcccctaccacctccccctcctccgcctcctggccgaaaagggcctccccgtggccctggtcaacccctaccacctcgccgccttccgcaaagctaagggggaacggaacaagacagaccgccaggacgccctcctcctcgcccgctacgcccaggtctaccacgaagacctccgggcctacaccctacccccagaaaccctccagaccctcaaggccctggtgggctaccgggaggacctggccgggcgggagcaggccatcctcaaccaaatggaggcggcggagtgggcggggagcagggaggtcctcgccctcctccagaaggagctgtcgtgcgtgaaagcgctccttggggaggtggaggccaggatccaggccctcctcgccgccctccccgaggcggaggtcctgatgggcctgcccggggtggggccccaggtggcggcggcggtgctggccctcctgccgccagagctttggggccgggcgaaggcggcagcctcctacgcggggctcatccccgagcgggaggagtcggggaagagcgtggagaggggtcggctttccaggaaggggcctccccttttgcggcggaagctctacatgggggccctagtggcggtgcgccatgacccagagatgcgggccttctaccaccgcttgctttcccgagggaagacaaaaaagcaggcgctcttggccgtggcccacaagctcctcaggcggatgatggggcggctcagggagtactacgccggtcagccagcccaaggggtggcttgacaggcaagacagtat

SEQ ID NO: 3938 - DNA, 1513 bp, unidentified
  source 1..1513: mol_type = unassigned DNA; note = element_5e92b71
  misc_feature 1..2: note = core
  misc_feature 3..242: note = LE
  misc_feature 243..1493: note = CDS
  misc_feature 1494..1513: note = RE
  misc_feature 6..238: note = bridgeRNA
ctaatgagatcagccgggccacctatatgggaggctcagccgcagcagcggccggcaggtcagcactcacggaaaccggccgcttcggaggcctactgacagaccgtgcgcctgccggttcgccggtgactggactgctgatgggatgtcgtgcccgcctcggcgtgagcacttgatcattaggttgcaggggtccccgggtgctgtgatcttgttggccggacacgaaggagttgctgcgggtgctgttcattggggacgactgggccgaggaccaccacgacgtcgaggtcgtggacgaggacggccgccggctggtccaggcccggttgccggaggggttggagggcatcacccggctgcacgcgttggtggccgagcatgccccggccgcctgggcggagctgccgcccgagcaggtgacgggccaggtggtggtcgggatcgagaccgaccgcgggccgtgggtgacagcactgcgggcggccggctacttggtgttcgcgatcaacccgctctcggcggcacgatatcggcagcggcactccacctcgggcgccaagagcggcgccggtgacgcgcacgtgctcgccgagatcgtgcgcctggaccgtgatcaccaccgcccgatcgctggggacagcgagctggccgacgcggtgaagctgctcgcgcgtgcgcaccagaccgcgatctgggagcggacccggcacgtgctgcggctgcgctcgacgctgcgggagttcttccctgctgcgctggaagctttcgaggatctggcggccagtgactcgctgatcttgttggagcgggcaccgagcccggcgctggcggcgaagctgacgcgcagccagctgactgccgcgctgcgcacggcgcggcgccaccacgtcgagaccaaggccgtggcgctgcaggagattctgcgggcaccggcgctgcggcagccgccggtcctggacagcgcgtacgcgacgatcgtcgtcagccaggtgcggctcatcgccgcgctcaacgcccagatcaccgggcttggtgaggtgatgggcgagcattttgatcgccacccggccgctgagatctacctcagccagccgggcctcggggtcgtgctcgcctctcgagtgatgggcgagttcggcgacgacaagactcgcttcaccgacgcccgggcacgcaagaactactccgggcagagccccatcaccagggcctcgggccgcaagaaggtggtgctggcccggtacgccaccaacaggcggctgggcgcggcactgcacatgcaggcctacgccgcgctcacgggatccccgggcgcccgcgcctactacgacacgctgcgcgaccgcgggatcggccaccacgccgcgctacgccagctcgcgaaccgcctcgtcggcgtcctgcacggatgcctcaaaaccggcgccctctacgacgaggacacagcctggcagcaccatcgcgccgacaccgcgaacatcgccgcttgacaaaattcggcatgggatgt

SEQ ID NO: 3939 - DNA, 1147 bp, unidentified
  source 1..1147: mol_type = unassigned DNA; note = element_5e9bc82
  misc_feature 1: note = core
  misc_feature 2..216: note = LE
  misc_feature 217..1137: note = CDS
  misc_feature 1138..1147: note = RE
  misc_feature 33..198: note = bridgeRNA
ttgtctctcaaatctatgctttactgagggggaagctgggatcgagccccgggatggccatcccggggctcgcgcggcaaagcgcccgtacaggaataggtgtcaacgaccgacctcatgaagggactttgccgctccagcttcgcatcgcttgctgacttgaatgggctatccgaaggacacgcccgcagacaattcgaagcatggagcccaattatgatggcagaacccgccgaaatccagtgcgtcctcggcctggacgtctcccgcgacaccgtcaccctgtgcgacggtagacgccacaccgtaaccgtcgccaatgaagccgatgcgctgcgtgccgccctgcagccgtatcagggcacgactaccctcgccgtgtgcgaggccaccggcggccatgaggataccctgctcggtgtgctcctggaattggccattcctgcccatcgcgccgatcccgccaaggtcaaagcctatatcgcatccttcggcaagcgcgccaagaacgacccgatcgatgcgcgatggctgtcccgctatggtcgcgaccgcgccgccacactgccccgttggcagtcggccgatcccacccagcagaagctcgagctgctcgtcgcccgccgtctcgacctcgtcgccatgcgggtgcaggagcagaaccgcctgaaagccccgcgcagccgcctcatagccgataatatccgcgatcatctcgccgaactggagcgccatatcgaagccctcaatgccgagatcggtgctctgatcggcgaaagccgcgatctggcactgcgggccgaacaactgcgttcggtgccgggcatcggcccggtcttggtgccgctgctcctggccgtcatacccgaactcggcaccctcaaccgccgccaggtggcaagccttgccggtgtcgccccgcatcccaaagacagcggcaaggccaactggcaccgcagcaccaccggcggacggcgccagatccgaccggcgctcttcatcgccgctctcgctgcctgccgcggcaacaagcgcgtcgctctcacggccatcatgcgcaagatcatcaccatcgcaaacgcccgtgtcagggacgccctgccacaccaaaatgaaataatgccgatcaacgcataaactgacttgg

SEQ ID NO: 3940 - DNA, 1323 bp, unidentified
  source 1..1323: mol_type = unassigned DNA; note = element_5e9fcf3
  misc_feature 1..2: note = core
  misc_feature 3..67: note = LE
  misc_feature 68..1093: note = CDS
  misc_feature 1094..1323: note = RE
  misc_feature 1094..1317: note = bridgeRNA
ttaattatatggtccgccccattctaagccgttaggcttaggataggcttttaaagaggtgaaccatatgtctactatccacatcttaggtatcgatttaggtaaacactgctttcatgctgtcgcacacaattacgcaggtaaagaagtgctacgtaagaaatataatcgaagccagcttcttaagttcctctcaaatttagaaacaaccactatcgcatttgaagcatgtggtggtgcacattggttagcacgtaaatgtgctgatttgggacatcaggttcaactcattcctcctcagtatgtaaaaccttatgtgaaaggtaataaaaatgactttattgatgctgcagctatcgctgaagcagcaagtcgaccttccatgcgctttgttgctgttaaatcagaagaagcacaagttattgctgtcattcatcgtatccgtgatggctttattaaagagcgaacagcctgtatgtctcgtatcggagcaattttgttagagtttggactgagcttgcctacagggcatgcgaaaatgaagatgctttttcagtggatagcagaccaaaaatatcaaactcttccacaaagtcttatgtacgaattaagcttaattcacacacattatttgtatcttaatgagcagataaaaatacaagatacgaaattgaaacagcttgctgagcatcatgaactggctaagttattaaaaactgtgcctggcatcggtgatttaacagcaaccctgtgtgtggctgatgttagtgccgccagtaatttttcaaatggaaggaatatggctgcttggttagggttagtgcctcgacaatactctacaggaggcaaaacaaagttacttggtgtgagtaaacgaggaaataaacatcttcgggcattatttattcacggcgcaagatcggtcttatcaaggatagagacaacgggaaaagtatttggacaatggctagtagatttaagagccagtaagccattcaatgtggttgttgtcgcattggctaataaattagcaagaatagcttgggcggtgttataccaccgccaagcgtttaagactgcatcgcagtcataaccgagtttgcaacgacaatgcaagtgatgacattaacggtaaatcggccagattaagaacctgatattaaaaacagcaataaatgctttgggctttttaaggataatctggcgcagatatcatcgtggagctaggacattaatatgcctaatttcgactccgaatacattagcgcaaaccaactccgttattactaatattgtagttgcaataacggggcggaccataca

SEQ ID NO: 3941 - DNA, 1212 bp, unidentified
  source 1..1212: mol_type = unassigned DNA; note = element_5eaafea
  misc_feature 1..2: note = core
  misc_feature 3..192: note = LE
  misc_feature 193..1182: note = CDS
  misc_feature 1183..1212: note = RE
  misc_feature 8..198: note = bridgeRNA
cttgtatctctcagtgataaatggctagctaccactttatcacatgaagccagtcaggctgagtcgctccgaagcactcgatgctgccatgtagatgatgcccctggcttcagtcttatcttttaaaactgaatggtatccaagcactctgattgccagatgatgctgcatggacaaggggagattacaaagatgcgtgagtttacaggcgttgatattagcaaagagaaagttgacatcggctggttacgtgatgttaaaacgggcaaaaagaagaccaaggtcttcaaaaatacggctgcgggccatcaacacgtagccgattggctgctgaagaacctgaaggtaccggcgggagagatcctggtcacgctggagcccacgggcgtgtatcatgaggccttgatgtactttctgcatgatcgtggctttcaagtcctgctggtgaatccgggcaaagccaagaagttcgcggaagcgctcaatcaggtgcataaaaccgacaagctggattgcataaatctagccgagtacgggcacgctcaataccaccagctcacgctgtggcaacctgaagcgcccgaactgcgcgaactcaaagcaatgatccggcgcctggatgcgttggaaaaggacctgcaacgcgagcacaaccgccaggaagcgacgcgcgtgagcctgtcgtcggatcgggtggcgcaatcactgcaggacatgatcgccacgctcaaggcggaaattcagcgcttgcagcaagacatcgatgatcatattgaccgttttcccgagctgaagcgcaaccgggaattgctgcagagcatcaaaggcatcgggccggtgatgtcacgtgagctggtgtatttatttgccagtaagcgcttcaagagcgcccgagaagcggccgcctatttgggattaatccctaaactgaaggaatccgggaagcgtcaaggccacacgacgttgagtaaagtgggcagtgcgcgtatccgtgccaaattgtacatggcggccgtctgtgccagtacgtacaacccggatatcaaggcgcaaaaagcacgcttgttgaaggccgggaaagtgaaaatgcaggcattgggtgcggctatgcgcaagttaatccagatttgttttggtgtcatcaagcaccaaagtgaataccagccccaactcaatttctaaggggttgaggctgggtttgagagatggtat

SEQ ID NO: 3942 - DNA, 1356 bp, unidentified
  source 1..1356: mol_type = unassigned DNA; note = element_5eaf248
  misc_feature 1..2: note = core
  misc_feature 3..69: note = LE
  misc_feature 70..1098: note = CDS
  misc_feature 1099..1356: note = RE
  misc_feature 1118..1346: note = bridgeRNA
ttatggaatggcccgccccaaccctccgacatcggatacgatgccggtgctagcagagagggacggaccatgaccattgtgatgatcggtgtcgatttaggcaagaacagctgcagcatcgcagcgctcgacgagcggggtgctgttgtgcttcggaggcggatgcgacccacgagcatcgtggagtttgctgctaaatatgcaccttgcacggtggcgatggaggcatgctgtggcgcccattatctggggcggcagctcatcgctcgcggtctcaccgtgaagcttatgccgccggaatatgtgcgcccgtatgtgaaggcacagaagaatgacgaccgggacgccgaagggatcgcggaagcggcaacacgcccaacgatgcgctttgtcgagttgaagagccaggaacagctcgatatccagtcgctgcatcgtgtgcgatctcggttggttggttcaagaacgaccctgatcaaccagatgcgcgctctgctactcgaacgcggcgtcacgattgcgcaaggtcgtcgcaagttcgaacgcgctgttgatgctatgctcgcggatgaagccgcgcttacgcctggtcgactgcgcgatctgctcctcgacatgcgtgcggagtggaccgcgctcgatagccgtattggtgctctcgatgaggagttcgtccagctcgcccgcaccgacgaggtcgcccgtcgtttgacatccatccccggtgtcggcgcgctcaacgcaacggcgctggtggctgccgtcggtagagccgaagcgttcgatcaggcacgagatcttggggcttggctcggccttgttccgcggcagcatacgaccggcggcaagccgcgtttgctcggcatcagcaagcggggaaacacttatctccgaacattgctgatccatggcgcccgagcggctctgccgactttggcgaaagccgacacaacgctcggtgcatggctgcgcggcctccaggcgcgctgtcaccccaatactgtggtggtggcgctcgccaacaagcttgcccggatcgcttgggtgttgatgcggcgagacacgatgttcgccacccagcgtgtggcgatcgcctgacggtatcggtcagcagcggcaaaacggccggctggcccacgagatgtctgcgggaggaattttgaagatggcctgacggtataccgacgccccaacagcctgaccaaaaaaatgacactcgatgtcgtgaagtttatgaggcctggagcgtgcggatctccatcttggcaacggcttagccgctatgccgtatacgttgatgcagacctgtcagttgccgatcagataaacactcttgcggacggggcgggccatacg

SEQ ID NO: 3943 - DNA, 1304 bp, unidentified
  source 1..1304: mol_type = unassigned DNA; note = element_5eb47dd
  misc_feature 1: note = core
  misc_feature 2..263: note = LE
  misc_feature 264..1256: note = CDS
  misc_feature 1257..1304: note = RE
  misc_feature 62..252: note = bridgeRNA
cctttggtctatcaaagactatttattagcaattattattattagaatggggggtccaggggggtgttaataacctaatcttttgtggaaattgttaaattcaaaaaggcagggtgaactatttccgatgttagccttttagggcttccgatagtataagtccctgcctttttgtgttgcccaaggccaaactagaatactttttccgagcaatcaaaggtgatcggcaaatggcaactattttaaacgattaatacaaacttatgaaaaaatgggaagtaattctgggtgtagatgtatcgaagctcaccctagacatcagctatgctgaacagcatcttcatctgcggatcagtaatgacagtaaaggttttgctgtctttaagaaatggtgcagggaatacaagttcgaactcgagaataccctggttgtcatggaacatacgggtggctatgaataccgcttcatgcagttctgttcttctttgggacttagttattgtcgccttgcaggattggaaattaaacaatctatgggtatccagcgaggaaaaaatgatcaagctgattcttatagaatcgccacctatggccaggaaaagatccggcggctaaagccctctgagcctgttaaccaacagattatggaactcaagcagttgctcgcttttcgtaaaagactggttcgtgaaaaagcaggcctacaagccacactgaaagaacgtgcccatatgtacggacatcgtaaaggagacaccatcaccttgttgtcacgacaaaagatgaaagatgcccaaaagtatatcgctaaggtagaagcagaaatcagtgaacttattgcctcagatggccagctattgcagaactacaagatcctaaccagtattaagggggttggcccggtcaatgcttggatgactctggcctatacagcaaacttcaccttattttctgatgcccgtaagtatgcggtttatatcggtgtagttccctttagtcattcatccggaaccagtatcagaggcagggcgcgggtgagccacattgctaataaagaacttaaacaggaactcaaccaagcagccaaagctgcaataacacacgataaagacattggtgaatatgcggctcgaaaaaggctaaccaaaagctatgccctagtcctgaataatgtcaaattcaaactgattttacggatgttctcactcattaaaaggcaggaattgtatgtggataactatagaaaagcagcttaagaaaaaactattttaaactaaatttggaaataagttaaacctagaata

SEQ ID NO: 3944 - DNA, 1386 bp, unidentified
  source 1..1386: mol_type = unassigned DNA; note = element_5eb67b3
  misc_feature 1..2: note = core
  misc_feature 3..85: note = LE
  misc_feature 86..1114: note = CDS
  misc_feature 1115..1386: note = RE
  misc_feature 1085..1373: note = bridgeRNA
agatgggatggttgccgccctccccagacggcatcgccatgtgccaatgtttcgcagaggaaccgatttggaggagatcagaactatgaaagacctgattatcggggtggacttggcaaaacgtgtttttcaggttcacggaacgaaccaggccgggcatgaaaatttccgcaagaagctgacacgcgatcaatttcgcgtcttcatggcaaaacaaccgccttgttcggtcgtcttcgaagcctgcggaagtgcaaactattgggcccgagaaatggcggtgctgggacatgaggctcgactgatcccaccgcaatacgttcgtccgttcgtgaagcggcagaagaacgatgctgctgatgccgaagcaattgtcgtcgcggcgcgtcaaccggaaatgcgatttgtcacgcccaagacagaggagcaacaagcaaaagcagttctctttcgcagccgtcagcgcttggtcaaccagcggactgaactggtaaacgccgtacgatctaccctctacgagtatggctacgtgttccctgttggcttggtccacctgaagaggatcgaggcagtgatagaggatgtggcctccgggctgccaacgatcatcatcgaggagtgcaaggatcttctggcacagatcgctcaaaagactgaaagtattgccgtcagaaacaagcagcttcagaaaatcgcagcagcgtccgatacggcgcgtctgcttcagaccatgccgggcgtcggcccactgatcgcccttgcggttgaagccttcgcgccggatatggcccagttcaagcgaggaagagacttcgcggcttggttggggcttgtgccaaggcaatactcgtccggaggcaaggaacgcctgggaaggctgtcgaaggcaggacagtcggacattcggcgactcctcgtcatcggggccatgtcccgatttgtcggaccagcgcgacaaaaagtcggcgctaacagctggatcggccgaatgctggataggaaaccgaagatgttggtggcaatagcgctggccaacaagatggcccggcagatctgggcgatgatgacgacaaacagcgactatcgggatccggtgcaggtggctgcggtttagacgacttgctgcagcattccgataccggacagacgggggtgtgagaagacgaagacctgaatgggcaaaatgatcgaacagatcgggatcaggaaaaccaggcgagccctgcgagtttgaagctcggcatccagatttggaccagatccgctgatcaccataccggcccgcggcttttggaagtgccgcactttgaggcctgacagaagaccgcactcgatcacttgcacaaaaggtgagaatcctcttgcacaacgggcggcaaccacaga

SEQ ID NO: 3945 - DNA, 1352 bp, unidentified
  source 1..1352: mol_type = unassigned DNA; note = element_5eb764f
  misc_feature 1..2: note = core
  misc_feature 3..79: note = LE
  misc_feature 80..1111: note = CDS
  misc_feature 1112..1352: note = RE
  misc_feature 1111..1339: note = bridgeRNA
tgatggggtggacggccccctacggcatcgcgatgtgccagaatgaggttgttgcaaatctcagacaagggagccgtccgtgaaccagattatccgcattggaatggataggtcgaagcatttttttcagctgcatggggtggatgccgccgagcggccggttttgcgcaggaagttgcggcgcaacgaggtattggcgttttttgccaagctgccgccgaccgttatcggaatggaggcgtgcggcgcggcccattactgggcgcgggagttgcgcaaactcggccacgaggtcaagctgatggcgccgcaacacgtgaaggcctacgtcaagcgcaacaagaacgacgggcgggatgcagaggcgctgtgtgaggcgatgagccggccgacgatgcagttcgtgccggtgaagaccgaagagcagcaggcggccctgatgctggcgggagttcgccagcagctgatcgcaaggcgcacccagctcagcaacgcgatccgcggctatgcggcggagtttggcctgacagcagccaagggtctcgacaagatcgagccgctgttggcgcggatcgcgctagacgagagtttgccgacgctggcgcgcgagctgttggcgatgcagggtcatgactacgcgcggctgcaggccgagttgaaggcgatcgaggccaggctgatggcctggcaccgcgccaatgccgatagccggcgactggcgcagattccggggatcggactgatcggcgccacgacgctggtgatgaagacgccagatccgcgcgcattcgcctccggccggcactttgcggcctggctcggactgacgccgaaagaccattccaccgccggcaagaccaggctcggcaagatcacccgcgccggcgacgagatgttgcgcagtctgctggtggcaggggcaaccgcggtgatccaacagatgaggcgcggccgtggccgtccgtcgccgtggctcgtcgcgttgctggcgcgcaagccgccgaagctcgcggcggtggcgctcgccaacaagattgcccgcattgcctggaagctaatgacgacgggcgagagttacgacggcgcgcggatgcatggtgccgccgcttaagaaatcggccggtcggcggttcgccgcaccggccgagccggagctgcaagaggagagcagatggtaggatcgatcgatccgaggtgcgagacagtccgtggaatccattggccggagctcgcgtcgcggaaaccatcttggccagcggcccaaagcgaccgcatcaacaggccggacatatggatgcaagcgatccgatcagaccaagaaaaactcttgtggcacgggggccgtccacata

SEQ ID NO: 3946 - DNA, 1478 bp, unidentified
  source 1..1478: mol_type = unassigned DNA; note = element_5eca986
  misc_feature 1..2: note = core
  misc_feature 3..79: note = LE
  misc_feature 80..1207: note = CDS
  misc_feature 1208..1478: note = RE
  misc_feature 1216..1465: note = bridgeRNA
tgttgggtggacggcgcccgacggcatcaatgtgccagagtgaggtccgttaggagatctcaaacatagggagccgtccatggagaagcttatccgtattggcatggatacgtccaagagtgttttccagctgcatggcgttgatgctatggagcgacctgcgctggtgaaaaaacttcatcgccggcaagtgattgcgttcttcaagaagcagccgagactgaaggtcggtttggaggcctgtggcggagcgcatcattggggacgcgaactcggagcgctcgggcatgacgttttcctgatcccgccgcagcatgcgaaggcgtatttgcggcgcggcaagcacgatgccgccgatgccgacgcgatctgcgaggcgatgagccggccgagaacgcgctttgtgccggtcaagacagccgagcagcaggcagcgcagatgttggctggtgtgcgcgatcaattgattcggcgacgcacccaactttccaacaccatcagaggccatgccacggaatttggcctgattgccccgaccgggcttgccaagatcgagccactgcttgtccacatcgcgactgaagagtcggttccggcgctcgctagggagctgttcgaagtgctggccgaagattatcgcgctgttggcttgcgcatcgcgaaggtcgacgcgaagttgatggccttccatcgacaggacgaggtctcgaggcggctcgcgcaagtgccggcgattggacctatcggcgcgacgcttctcagcatcaaggtccctgacgccaaactattccgatcgggccgcgactttgccgcctggatcggtttgacgccgaagaaccattcgaccgccggcaagacgcggcttggagcgattacgagggccggcgatgcaaagctcagaagcgtgctcgtcgtcggcgccatggcggtcattcagcagctgaagcgacgcaaagaaccgccgccaagctggctcggcgaattgctcaagcgcaagcccgcgaagctcgccgcagtcgcgctcgccaataagaccgctcgcattgcctggaagctgatggtgacaggagaacgctatgaccctcgccccaacccggcgacggtcgcgcggtgctcggcgccgtcaaggccgcttcgcgccgctgatcgcggtggccaggggccagccttgaccgcgcctgcgctccgcgcgccggcgtatccttaggtcgggacgaagaaacggtcgcagtcaaacaaagaaacggaacttacgagcttgcatgagaaggagatggcgtgatcgatcggtccaaaacgcaagacactccggcccacccagcggcacacgatgccggccgcctgtttggaacttgcgttgcgagacccatcttggccagcggtcctatgtggtccacatcaacaggccgaacatatgatcgcaagcgatcgcttcaacgctcgagccaactcattgcaaggcgggcgccgtccacata

SEQ ID NO: 3947 - DNA, 1427 bp, unidentified
  source 1..1427: mol_type = unassigned DNA; note = element_5ed1668
  misc_feature 1..2: note = core
  misc_feature 3..217: note = LE
  misc_feature 218..1411: note = CDS
  misc_feature 1412..1427: note = RE
ctgatatacagcctagtggggtcagaattcgcctgacctcgcggggagaccgacagtcggctatccggccaagaccgttggatctagatgtcggccctcgcccttcgtcgacagcggagattgggatccgacggctaagaccggcgatggagcatcagcacacgcaaggcggaggtcagcgagcacccctggggtcgaccacgaagaggaggtcgccatgagtcaggtggtcggcatcgatgtcggggcgtacaagcacgccgccgcgatctgtcgctcgggtgagcgaacagcgactaaacgggtcttccgttatgcggcgacgcggccgggattcaatgagctcgacctctggctcgagcggcagggcgcagtcgacatggtggtcatggagtccagcggtcactactggtggcccctggctagccatctgcatcgtcgcggcattccggtcgctgtagtcaacccgctggaggcgaagtactttgccaaaagccggctccagcgctcgaagtcggaccccgccgatgcgcgcacactggcagcgctgggaatgaccgagcagccgcgcacccgtgaaccgttactgggcgccgaggtcaaagaagcggcccgcttttgcatgcgcctggtgcgcgaccaggccaacgtctgccagcggctgacccgactgatagagattggctttcccgaactcaaggaagcgttcgaagacccgacctgcgacaccgccttggccgtccttcgacaggcgcccaccgctcgcaccgcggcacgccggcggttgaacaccctggccgacgcgattcgccctggtggccgccggcggttgggcgaaagcaaggcccgccggatccaggagctggccaaggagaccatcgctccgcccgaaatggacgagcagatggcattcgaggtcggcctcttgattcagcagtacgacctgctggccaagcaaatcgagctggccgaaactcgggtgacacaactgctcgattccgagctggcgcagcggctgcagacgattcccggcgtgggcgcggcaaccgccgccaccctcatcgcggagattggggatatttggcgcttcagtgacttcgaccagctggccgcctatgccggcacccatcccagggagcagagctcgggccgccacggtgagaagccggaaaccagctggcggatggccaagactggcaactcctacctgcgctcggctctatatcgaatggccgtggtgggcattcaacacaacccgatcatcaaggagcactaccaacgcaaacgtcagcagggcaaggcgccgatgaatgccataggtcactgcatggcgaagtcgctcgccatcgtctggggcgtctggcggtcgggccagagcttcgaccccaacaaaggaggccgaaggccttgacaaggccctatgggat

SEQ ID NO: 3948 - DNA, 1492 bp, unidentified
  source 1..1492: mol_type = unassigned DNA; note = element_5edb232
  misc_feature 1..2: note = core
  misc_feature 3..248: note = LE
  misc_feature 249..1472: note = CDS
  misc_feature 1473..1492: note = RE
  misc_feature 14..230: note = bridgeRNA
ctaatcagttctgggagtaagccatccggcagactccttggtggtagccgccgacaggtgagcactcccggttcctggacgttgagtcctgacgaaagaccgtgcccctgccgttggctgggagagttgatcgctgatgggatgtcgtgcccgcccgcgtgagcgtgagcactgcttgattaggtcgctgaggttctcccgccggctgctcagggtgatcgggatctggatcgagatcgggaggatcgttgcgactgttggtgggggatgactgggccgaagaccatcacgatatggaggtgatggacggttccggccggcggctggccaaggcccggctgccggagggcgtggccgggatggcccggctgcacgcgatcgtgggtgagctggccggggacgaggccgacgaggtcgaggtgctggtgggcatcgagaccgaccgggggccgtgggtgcgggcgctggtcgcggccgggtacacggtgctggcggtcaacccgttgcaggcctcccggttccgcgaccggctcggcgtctcgggcgccaagagcgatgccggtgacgcgcacgtgctggccgacatggtccgcacccacgcccacgagctgcggccggtggccggggactccgccgcggccgaggcggtcaaggtcgtggcccgcacgcacaagacgctgatctgggaggggacccggcacacccagcggctggggcacgcgctgcgtgactacttcccggctgcgctggtcgccttcgaggacctggacgctgccgacagcctggagctgctggccaaggcccccaccccggcgcaggccgcccggctgacgatcgggcagatcagcaccgcgttgaagcacgcccgccgcaagaacgtggccggcaaggccgtggcgatccaggctgcgttgcgcgccgagcagctcggtcagccgcaagtggtgaccgacgcctacgccgcctccgtccaggcgctgatcgccgtcctggaggtgctcaacactcaggtcaagacgctgcaagggcaggtcaaggcccattttggcaagcacccggccgctaagatcatcctgtcccggcccgggctggggacggttctcggcgcccgggtgctcgcagagttcggcgacgaccccggccgctacgccagtgccaaggcccgtaagaactacgccgggacctctccgatcacccgcgcgtccggcaagaagaaggtcgccctggcccggctcatccacaacgaccggctcatcgatgccctgctcacccaggccttcagcgccctgagactctcgcccggcgcacgcgcctactacgaccggcagcgagcccgcggctccggccacaacgccgcgctgcgccagctcgccaaccggcttgtcggcatcctgcacggccgcctcaaaaccggcaccgtctacaacgagacgaccgcttggtcgcatcacgcagaatcggttgcggcttgacatctaagctcctgggatgt

SEQ ID NO: 3949 - DNA, 1477 bp, unidentified
  source 1..1477: mol_type = unassigned DNA; note = element_5eddf1e
  misc_feature 1..2: note = core
  misc_feature 3..48: note = LE
  misc_feature 49..1206: note = CDS
  misc_feature 1207..1477: note = RE
gaggtggcatgaaagaggccgctcccatcgagagaacggatttctgagatgcagatgatcttaggacagtcacgctttgcgccgtttggcttacctttggtgggttttcgcgaactcagtgaaggagagcaaagcgtgactgcaccttatgattatcacattggggtggattaccacaaaagctacagccacctggtcgtgcaggatggggcggggaagacgttgcgatccggtcgagtgaagaacgatcgtcagtcgctcggctcgttcctggagcggtatcgggagaacagccatgcggtggtggaagccacccgtaactggatggtgatgtatgactggctcgacgatatctgcgacgatgttgtcctggcgcatccgctgaaggtgaaggcgatcgccgatgcgaagatcaagacggacaagatcgacgcgacggtgctggcgcacctgctgcgcgccgacctggtgccggaagcctgggcgccgagcgagaaatcacgggagcttcgcgtggcgctgcgtgagcggatgttttacgtgcggttgcggacgatgaccaagaaccgcatcgtcacggtgttcgaccgttacccggagcagatagcccagctgaagaagctgggcgacctgttcggcaaggccgggcgtcagcaacttgccgcgctcaatgtgtcggagatcgaccgcattcagatcaaccgggggctggagttcatcggcgacatcgacgggcggatcaaacagtctgaagcgacgatccgagcgatgacgaagaccaacagcaatgtgaagctgctcaagaccatccccggtattggggagttcttcgcccggctgatcgacgccgagatcgacgacatctcccgcttccgcaacccgaagaagcttgccgcctatgccggcctggtgccctcgacctattcctccggcggcaagacctatcacggtaagatcatcaagcagggcaacaagtggttgcgctgggcttttgtcgaggcggtcgcgccggccgtcgccaccgacccgcagcttcgggctcagtacgaacatctgaagttccgaggaacgaataaagcgcgcgtcgcgatggcgcgcaaacttttgacgatcgccttccagatcctgcgtgaccagcgcccctacgagcggcgcggcgcaaacagtgaggaaggtgcatcgtcgacgacatcccggctgtcctgatgacggtttagcgagcccggcaaggctgggctgcgctctttcaggagaatgggaagccgggagccgaacgccactctgtgaccgaagccgaaaagccgatcggcgttagggtcacgaattggagaatggttcaagaccgcagggcggcaaagccccgtccagcgaacgcggaagatttagccgatcggccaaaacaccgatcaagtcataaccgaacccagggaaagccacgcaaaacaagcgttttttgtccttgtgttctttcattgga

SEQ ID NO: 3950 - DNA, 1395 bp, unidentified
  source 1..1395: mol_type = unassigned DNA; note = element_5ee4888
  misc_feature 1..2: note = core
  misc_feature 3..88: note = LE
  misc_feature 89..1120: note = CDS
  misc_feature 1121..1395: note = RE
  misc_feature 1091..1381: note = bridgeRNA
agatggggtggttgccgccctcccagacggcatcataatatgccaagatagtagcgtttacagccactgagcggaaaggacggcaaccatgacgaaagatacaatgattggagtggatctggcaaagaatgtttttcaactgcacgcggcctcgatgacggggcagccacagttctgcaagaagctgtcgcggcagagtttcaccaggttcatggctgagcagccgccggcggtggtggtgatggaggcgtgcggcagcgcgcattactggacgcgcgagatgatccggcttggtcatgaagtgaagctgattgcggcccaatatgtgaggccatttgtgaaacggcagaagaatgatgcagcggacgccgaggcgatcgtaatcgcggcgcagcggcccgagatgcgtttcgttgagccgaagtccgccgagcagcaaagcagagcaattttatttcgtgcccgcgaacgactcgttcatcagcgcaccgaactggtcaatgctttgagagcgagcctctatgaatatggccatgttgttccgcaggggatccgccagatcaaccggattgcagagatacttgatgcgcccggcagcgatttgccagatttaatgcgcgaagaatgtcaggatttattggaacagattgccgaaaagacggtccgcattaatagccgaaccatgaagataaaaacgctggcggccgaagctgcaacagcgcggcgcttgcaaaccatacccggagttggcccaatgactgcgctcgcggtggaagcttttgctccgccaatggagaactttcagtgcggccgtgactttgccgcctggctcggtctcgtcccacgacagttctcctccggcggcaaagagcgacttgggcggattttcaaggcagggcagtctgatatccgcaggctgctgattatcggcgcgatgtcgcgcttgaactggctgggcagtaaatcgatcccggaaggttcgtggctcgcacgcatggcagcacgcaagcctcggatgctcgtggcgatcgctttggccaacaagatggcgcggacgatttgggcgttgacgacaaaaaacgaggactatcgagctccggcgcaggcggtagcagcatgatcaacatgcggcgaaatctacctgacgccggataaggggagtgtaagaaggcgacgacccgaatgggcaaaaagatcgagcagatctggatcagtaaaaccaggtgaatgacaagagcttagagctcgacggttagatttgcacttgatccgcagatcaccataccggccagcggcttctcgaaaatgccgcatatataggccttacagaagaccgcactcgattacttgcacataggtttagaaacttcttgcacaacgggcggcaaccacaga

SEQ ID NO: 3951 - DNA, 1489 bp, unidentified
  source 1..1489: mol_type = unassigned DNA; note = element_5ee56b5
  misc_feature 1: note = core
  misc_feature 2..89: note = LE
  misc_feature 90..1124: note = CDS
  misc_feature 1125..1489: note = RE
  misc_feature 1260..1481: note = bridgeRNA
taatgggatgggtgcccccacccgccgccgcatcgtgccacagtacgtcgacgggtttggactcaaccagttgacaaggagcttctgcgatgaacatcaccacgatcggcatcgatttggcgaagaacgtgttcgctgtccacggcatggatgcgcagggtcataccgtgctcaagaagctgcttcgacgagatcagttgacgaacttcttcgccaacgttcctgcgtgccgggtcggcatggaagcgtgcggcggagcccaccactgggccaggcagttgcaagcactcgggcatgacgtccgactgatcgcgccgcagttcgtcaagccgtttgtcaagagcaacaagaatgacgcagctgatgcgcaggccatctgcgaagcggtggctcgacccagcatgcgtttcgtgcctgtaaagacgctcgagcagcagtcaatcctagcgctgcaccgtgcgcggcaagggttcgtcgaagctcgtactgcccaggcaaaccagattcgtggccttctcgctgagttcggattgattctgccgcagggcatcgcgcatgttcgggagcgtgtaccgaatctcgtggacgagcatcgagacgaacttccgggcccgttcgtcgaactcatctcggcgttgttggagcacttcaggatgcttgatgtccaggcccgcgcgctggagaagaacatcgagcgctgggcgaaggagcaagatgattgccgccggctgcagacggtgccaggtcttgggccgatcaccgccagcgcgttggtggcgagcatcggcaacgccagcgcatttacatccggacggcaactggccgcctggcttggattggtcccccgacaacattccagcggcggcaagaacatgcttctcgggatgagcaaacgaggcgacagctacctccgtacgttgcttatccacggcgcgcgtgcagtcatccacgccatccagcgtaggccgccggcgcatggttggattcaatccctactcgggcgccgccacgccaacgtagctgcggtcgcgctcgcgaacaagaacgcgcggatcgtctgggccctgctgacgcacaggcgaagctatatgcccgggttcgagccggtgccgatgcaaggatgagcgccatgcgaggccgcactccaaacgcctctgcttgttggtggagcccggccagccgggctccaccaacaagccccagtacaacccgcgtgtaacacacgtagtggcgatgtcgacgtatgcagtggtttcttcaacgattgcttcaggcgatcaagcagtgatggcggaacaggtcagaccggggttggtccaatctgatacatgcagtgagcgcgaagctcgacaagttgttcagactccgacccgcggattccatcagggcccgaggcaatgttcgcctgcgaggccggatgtatggctgcaatcgactcatgtcccaccgtctcagtttgaacgccttgcaagccgggggcacccatgta

SEQ ID NO: 3952 - DNA, 1792 bp, unidentified
  source 1..1792: mol_type = unassigned DNA; note = element_5ef7c61
  misc_feature 1: note = core
  misc_feature 2..402: note = LE
  misc_feature 403..1689: note = CDS
  misc_feature 1690..1792: note = RE
tcgtataataagtgtataaccaatagaaatgatggttatgcacttatcccttctatagatttatagatgatctgagacacctgggataatccctttccatctcatctatattggttattcattacagggttatcctgtggtatgatatcagcagagtctgatgtctagaggcactgcttcgtctcctttcagcccgaactccggtgtctgcttgagaaagcgttcagcctgattcatatgtcatatgccgcttacgcagatgtttcatcccccggcgaagcaccagcaaaagagctgctggggtgcatgctcattacgcgaggtttcggtcagcatatgaatcccaggataagcctttgtcattaggctccaggaatctatggtcggaaaggtggtgagatcatgttaaagattaacccattatctacgctttacgttggtattgacgtcagttctaagtccaatgtcgtttgcactatggacttttacagaaataaatatgttgagtcttcctttgctaacaatcagcctgggactgatgagttggtacaaaagattcttgggtgtttaaaggaacaccctgaccttcatacggttgttgctgcattggaatcgacttccgtttacagcatccatgtggcaaactccctctcatcctgtgaggcacttcttaaattcaaaacgtatgtctttgttttgaaccccaagaccacggcgaattacaaaaagtcctttatcggtcttggtaaaacggatcccatcgatgcgttcgttattgctgattatgcaagagccggatgcattgagactgagccctggagaggctgtcagttcttagcgttaaaacgtcttacacggcatcgtctgcaccttgttgagtgcatcactcgagagaaagcctatcttgtctctaacctgtacctgaagttcagtgagcttcagatgcttgataaggatgagcagcctttctgcgatgtatatggtgcaacctcttccagtgtacttactgaatatctttccccggaggagatcgtaagcgcctcggaagagcaacttctctccttccttgctgaaaagagccgtaaccgcatcaaagatgtaagcaagactgccgttcttcttaaaaaagctgcaagggactcctatcgcttggataaggctttatatgagcccctcaatgtttcgattgccagctcatttaactgcatcgaaaccttcaagaatgaaatcaaagccattgatgtcgctatcgaacgcgaaatcaaaggattaaatccaaatgcctttattatccttcaatccatcgacggaatcggtcctgtctttgctggcgggatcatcgctgagataggcgatatatctgccttccattcatcggatgctcttgctaaatacgcaggcctttactggaaacacaacgattccggtgattttacttctgaggataatcctatgagcaaagacggaaaccggtatctcagatactacctcggagaagctgccaacagtatgaggacacacaatgctgaatacggagcgtactatcgaaaaaagtacatcgaagttccgaaacatcagcataaaagagcactcgcgctgacttcacgtaaattcgttcgtttggtttatggattgctggccaaaaaccaactgtactccggcgtatcgctggatatttcaatcgaataaccctttttaaagcgcatttttcaatgggtctatttaatatgcgccctttttatactaaacgcttcaatatccttctgaatttcctcttgacatatcaccagat

SEQ ID NO: 3953 - DNA, 1203 bp, unidentified
  source 1..1203: mol_type = unassigned DNA; note = element_5efcd0a
  misc_feature 1: note = core
  misc_feature 2..142: note = LE
  misc_feature 143..1180: note = CDS
  misc_feature 1181..1203: note = RE
tcttaagtttacaatctctaattttagataataaaatagaaagaacaaaagagagaaataaggttagtatacacggtgaagcaaagacttcgacaacattgataaccctctctcttttcctactaagatttcgttcagttctgtgagtattaaaactcgatttcaagttgttgaaacgtcagtagctcgttctttccaaaatacagttcttatgaataaatatagcgaaatttacggaattgacattagtaaaaatgtctttgatgtttatggttccaagacaggacataatcagtttaaaaatgatgagcaaggttttaaaagctttttgaagagcttaccacaaggggctttattagttatggaagctacaggctattatcattatcgtttagcacagtttttataccatgaaggtgtttttgtacctgtagtaaatccgttatccgtaaagcgatttatacagatgaaattagccaaagttaagacagacaaaagtgatgcaaaagctatctgcgaatatgggcaaatgaatgatgttccattgtataatgccttgacagatattcagagtgagtgtttacaactctttaggttattggatagttacctaaaacatagaacagccaccaagaacaagctaaaaggagaagaagtattgggtgtgccctccaagtttgtttataggtctttaaagcggaatttaaagcatttaaacaaggaagtagaagttttggaggcacggttactagaattggtaaaacaagaccagcaatatcaattaacgttattaaaaagtatcccaggtatgggcgtaaagaccgctttatttttaatagtagtaaccgatggattctataagtttgaaacggcatcacagttatgtagttatgttggtattacacctactatacgagaatcaggtagtagcgtaaaagggcggagcaggattagtaaagtagggaataagaaattaagaaatctactgtttttatgtgctttttcagcctgtaaacacaacaaggcttgcagagagttatgcgaaaggatagtaactaaaggaaagagtaaaaagttagcattaatagcagtggcaaataagctattaaaacaagcttttgctattgcaaaatcaggaagaccttatgatgaaaactttgtttcaaaattagctcaataatgcttgttttttaactcagttct

SEQ ID NO: 3954 - DNA, 1368 bp, unidentified
  source 1..1368: mol_type = unassigned DNA; note = element_5f035b3
  misc_feature 1..2: note = core
  misc_feature 3..166: note = LE
  misc_feature 167..1099: note = CDS
  misc_feature 1100..1368: note = RE
  misc_feature 1107..1355: note = bridgeRNA
tgatggggtggacggccccactgcgacatcatcgtgccaagatgaggtcgttgatcgcgacatcccatcaaggagccgtccatggagcaagttatcacgatcgggttgggaccttgcgaagaacgtcttccaggttcatggcattgacgcagcagacaaggtcctggtgcgcaggcagttgcgccgcggcgatgtcctgcggtttttcggcagattaccgcgctgccttgtcggcatggaggcctgcgctaccgctcatcactgggctcgtgaactcaccaagctggggcacacggttcgattgatgccgccggcctatgtcaaaccatacgtgaagcgcggtaagaccgatatcgccgatgccgaggcaatcgctgaagcggtgacccggccgacgatgcgctttgttgccatcaagaccgctgaccaacaggcagcgctaatgctgcacaaggtgcgcgagcttttggttcgtcaacgaaccatgctcatcaatgcgttgcgcggacacctcgcggagtttggcatcgtcgccgcgcgcgggcctggcggcgtgaccgcggcaatcatcgcgctgcatgaggcgcaggatcgtctgccagagttagccagagtagcgttgcacggcctcatcgatcagctgcgcattgtccgaggcgagatcgcaagggtcgagaagcgtatcgtggcgtggcaccgcgccagcaatgccagtcgccgacttgcgacgatcccgggcatcggtccgatcacggccagcgcaatcgctgccgccgtgccggacgccacgctcttccaatccggtcggcaattcgcagcctggctcggcctgacgccacgggcacgcaacagcggcgggaaagaacgactggtcggcatcagcaagcagggcgacggttatatccgacgcctcctcgtcaccggcgcaaccgccgtgatccggcttgcacgccaaggtaatgccagcaaaacctgggctgccaaactgctcgagcgcaagtcggccagattggtatcagtggcgcttgccaacaagaccgcgcggatcgcctggacggtactcgcgcgcaaccagtcctacgtggctccggccatgtagccgaggttccgctcggctggctgcattacgctggtcaagggggagtgcaaaggtggtgagacgtgatgacgaaccggtcgaactggggatcggagaaaccctcggggtccaggcgcttcgtgcgcgttgaggtgatttgggatccgatccgcggacttcatcagggccagcggccataggcgccgcgtcaacaggccggacacatcgctgcacccgaccgcgcagcggcatcaccgatttcctcttgcaccagaagggccgtccacaca

SEQ ID NO: 3955 - DNA, 1606 bp, unidentified
  source 1..1606: mol_type = unassigned DNA; note = element_5f09577
  misc_feature 1..2: note = core
  misc_feature 3..269: note = LE
  misc_feature 270..1487: note = CDS
  misc_feature 1488..1606: note = RE
  misc_feature 12..289: note = bridgeRNA
ctactacaatgtatttggtcgatgttcttgaccgccagtcaagaaatcgtccatcttgttgcttaagctgttagaatggggatgcaaccggtctggccgatacctccaaggactcccgtccgtgattaagtctgctaaccggctcctcattcgcagcgttcgttttacgcaggttgaaccgcgtgttcgtgtgaatcacccagtagattgaataggcaatgagagaagtcgatctcggccgttgcaattcattcaaaggagatagtttcatgaacgcagttggtatcgatgtttccaaaggcaagagcactgtcacgattcgccagccgggcgatgtagttgtcctggcgccacgggattaccgtcacacacaatcctccatcaatgatctcatcaccaccatcaaatgcttggagggtgagacaaaggtttgtatggagcataccggcagatactatgagccgatggcatcctggctctcggcagcaggaattttcgtcagcgccgtcaatccctggctcatcaaggattttggaaacgaatccattcgcacaccgaagacggacaaagccgatgcaaagataattgcacgttttgctcttgaccgctgggcgaaattgccgcaatatagtcgtatggatgaattacgaaaccaactgaaaaccatgaatcggcaattcggcttctacatggatcagaagaccgctatgaagaacaatctcattgcgcttctcgaccagacgttccccggagccaactgcttcttcgacagccctgcccgcagtgacggcagccaaaaatgggtggattttgtctacacctactggcatgtggattgcgttcgcagcaaatcccttgaagccttcactgagcactataaaaactggtgcaagcggaagggctacaatttcagtgccgccaaggcagaagaagtctatctcgcagccgccgatctcatcgctgtattccccaaggatgactacaccaagctgctgatccgtcaggccgttgccatgcttaatattgcctccgaaacggtggaaacgcttcggattaagatggatcagacggcgtctcagctcccagagtatcctgtcgtcatggagatggacggcgtcggtgccacgctggggccgcagctcattgctgagatcggggatgttactcgctttaagcacagaggggctctgacggcctttgccggtgtagatcctcgtgcgaatgaatccggagattacaagtgcgtgagcaaccccacgtcgaagaaaggctcgcctcatctgcgaaaaacgctcttccagatcatggacggtcttatccagcgttctcctgcagataaccctgtctatgccttcatggacaagaaacgagcacagggcaagccttactacgtctacatgactgccggagccaacaagttcttgcgaatctactacggaaaggtgaatgcttacctgtctccaactgagggagcagaagattcctaagcttattaccattccttttcaggccagcgttctgcggtggccttcttttcatgcccgcttttcaacctgcatggacttcacatttttctgcaatttcctcttgactttttatttgcaga

SEQ ID NO: 3956 - DNA, 1651 bp, unidentified
  source 1..1651: mol_type = unassigned DNA; note = element_5f0a813
  misc_feature 1..2: note = core
  misc_feature 3..232: note = LE
  misc_feature 233..1636: note = CDS
  misc_feature 1637..1651: note = RE
  misc_feature 16..207: note = bridgeRNA
gtcctaccttccaagcgtgggtctgagttggtcattcgtaagatcagcgggcccaggggttctgggtatggctgtgagcttgtcgccgttggatggctcaaagaacttggccgcccggagccccgcgacgactcgaccgctaattgggatacgcgactcgatcgctgtgtaggacaacgtcggcgaggtcgtctgcgggttcgatgatgacgacgagctggcggaggtgaccgtgccccagatctgggccggagtggacatcggcaaggaacaccaccactgcgtagtggttaacgagcggggcgaacgcctcctttcacgccgagtcttcaacgacgaatcggccctgctggagctgatcgcagacgtactcgcgctctccgaggacgccctgtgggcggtggacataaaccacggtggcgccgccctgctcatcggcctcctcctcagccacaaccagccgatggtctacatcactggcctggccgtgcaccaggcgtcggcggcctaccgcggtcagggcaagacagacgagaaggacgcgttcgtcatcgctgatcaggcacgcatgcgccaggaccttggtcccttgcggcctggtgacgagatagccgtcgacctgcgcaccctgaccgcccgccgcctcgatctggtcaacgaccggacccgtcagaccaaccggctgcgggctcaactgctgaagtttttcccagcgttggagcgcgtgctgaacctgagcaaaaagggtccagtcgtcctgctgagcggctaccaagtgccggccgcgatccgtcgcagcggggccaggcggatcggaacctggctgaagaaccgcaaggtgaagaacgccgtcgcgctcgccgagacagctgttgaggcggccagggcccagcacgccgcgctgccgggagagagcctcgcggccgccatggttgcccgcatcgctaagggcgtgctggccctcgacgaggagattgccgaactcgacgcgctcatcggggcccggttcaacgaccaccgacatgcaacggtgatccggagtctgcccggcatgggcaccctcctcggcgccgagttcatcgccgccaccggtggcgatctggaggctttcggcacggccgaccgactggcgtccttcgccggcctctcacccgtgccgcgggactccggccgcgtcagcggcaacatgcgccgcccgcgccgatggtgtcccttctcgtggtgtagccgatcaaggtggcggaatccccaggtcacggatcgaatcgccctccctggaggcgctgttggagctcaccgagccgataccagcggcgatcgccaggaagcccgcagtggcaggcaccggacggctccgaagcggagccgacagaccgtgatcggctacaccaccacgagagacacggcccccgcgccgctaccaccgcggcctgctccgcgccttctacctctccgcgatggccagcctgagaacctgctccgcctcccaggcttactacgggcgcaagcggaacgagggaaggggcacaagcaggccctgctcgctctggcccgccgacgagccaacgtcttgtgggcaatgctccgcgacggagagtgttacgaggccctaccaaccgtcacggcagcggcttgacatcgtcattgggaa

SEQ ID NO: 3957 - DNA, 1169 bp, unidentified
  source 1..1169: mol_type = unassigned DNA; note = element_5f0c15e
  misc_feature 1..2: note = core
  misc_feature 3..161: note = LE
  misc_feature 162..1163: note = CDS
  misc_feature 1164..1169: note = RE
  misc_feature 1..200: note = bridgeRNA
cttgtatgagcgcgaatcattacactgcgtacgttccgtgaggaacgacccggcccaggtggcctcctgggccgggtcgccgatcgtcggatcgtggcccatcgcagccttaagggctgatagtcgtagcaagatcgcgatcggcacttcatcggacccggatggttgaaggaaccgtgggttcgcatcacaaggaagggtcgacgaagatgcgcaagcctagcatgatctgcgccggaatcgataccggcaaacgcaagctcgatgtcgcgttggacggcaagccggatgtcctgcaggttgacaactcgccggccggacaccgctccttatcggcttggttgcggcggcgtcgcgtgacgcgcctcggcatcgaggcgagcggcggctatgagcaagaggtcgtgtcgcagttgcgtcgtgacggctttgtggtcatcgtgtttcagcccgcgcaggtgcgagcctacgccaagtttcatttgcagcgggccaagaacgaccggatcgatgccgccttgattgcggcttgcacggcggcgaccaagaaggtccagccaccgccggacccgcgtttggcgccatttgccgggcatttgacgctcatcgaacagatcgccgaggacatcgcgcaatgcaagacccggcgcgagacctgccgcgatcgtcgcatccgggcgttctggacgggtgagatcgctcgcttcaaggctctgctgcggggcgagctgaaggcgctcgttgcggccatccgtcagcatgccgatctcgccaaacggctcgatctcattgccagcatcgacggcatcggactgcgaaccgccgtcgccatcctggcgcgcatgcccgagatcggccgcatcacgcgcgaggaagccgccgcgctggtcggccttgcgccttacgacgacgacagcggcgaccacctcggcgctcggcatatcgagggcggccgggagcgactgcgcaaagcgctctacaccgccgcattggccgcggcgttccactggaatcctcaactcaacgccatctaccgccggctgatcgccgccggaaagccccacaaagtcgcgctcgtcgcctgcgccaggaagctcctcatctacgccaacaccgtcgtcgaacgcggtactccttggaccacaaatccggccgcgacttaatggttg

SEQ ID NO: 3958 - DNA, 1420 bp, unidentified
  source 1..1420: mol_type = unassigned DNA; note = element_5f0e99a
  misc_feature 1..3: note = core
  misc_feature 4..121: note = LE
  misc_feature 122..970: note = CDS
  misc_feature 971..1420: note = RE
  misc_feature 1171..1372: note = bridgeRNA
agatgggatattcggcttgagcccattcctggaagctgggtgctgaggtgctgcgcttcgagctgatgatagaacgtggtctgtttggaacagccacaagcatcaggaaaggaagcgcagcatgaaatattatgccggattggacgtctcagtaaaagagaccctcgatatgcatcgcgcgatctgccgcgagctcaaggttcccagccacccggaagatctcgtccggaccttgaaaaatcccgaatggcgtcttgtccggatcgggcttgaagccgggccgttgtcgcaatggctgtttagcgggttggcggaggcgggcctgccggcgatctgcatagagacccgacatgcgaaagcattcctgaaagctcaggtgaacaagaccgaccgcaacgacgcgcggggcatcgcgcagatgatgcgtgtcaatctgttccggccagtgcatgtaaagacgctgacgagccagaagcgtcgcgccctgctggccgcccgcaagctgctgcaggaaaaagcgatcgccatcgagaatgatatccgtggtctattgcgcaacttcgggctcaaggtcggtatcattggcacgatcgggttcgacgatcgcattcgcgagcttgtcgatggcatgccggacctcggcgagatcatggagcctttgctggcggcacggcaaaagctgcgtgagacattcatggccctccaccgcaagctgctatcgatcgtccgtgacgacgaggcatgccgacgcttgatgacgatccccggcgtcggtccggtcacctcgctagccttcaccagcaccatcgatgttccggcacgcttcagaaactctcgcgccgtcggcccggcgctgggattaaccccggtgctcaatcaatccggggaaagccatcgcgtcggccgcgtgtccctctgcggtgacgacatgatgcgagcctgctttacgaagtggcccaggtcatgttgagccgcgtgaagaaatggtcctggctgaaagcctgggcaatgaatgtcgccaagcggcgaggccggcaaaaggccatcgtcgcactcgcacgccggctggccgtgatcatgcatcgcatgtggagcgatggcaccgagttccggtgggcaagggagagcacgcccgcagccgtctgaacggactgccgggaagaagacgataaagttccgcctgccggtggaaagacgtccttcgcgggacgatggatgaggtgagttcgcttgggctcttgtatcgatcgcatcgttggcgatcagaacgcgagtcagattgggccgcctcattctactgatcccatgatgggagggccaaatagctgatcccgaagagaagcgaggacccgcgaaagacgttagatgccgatgcagcaaaatgctcgaaaacgcttgacctcaacgcgccgaatagaga

SEQ ID NO: 3959 - DNA, 1328 bp, unidentified
  source 1..1328: mol_type = unassigned DNA; note = element_5f10b46
  misc_feature 1: note = core
  misc_feature 2..67: note = LE
  misc_feature 68..1072: note = CDS
  misc_feature 1073..1328: note = RE
  misc_feature 1096..1325: note = bridgeRNA
taatgagatggtcactccctcctttccagcactatgctgaagacaggctttcattcggagaaccatcatggaaaacattgcgcttattggtatcgatctgggtaaaaactcattccatatccattgtcaggatcgtcatggcaaagcggtttaccgtaaaaaattcaccagaccaaagctgtttgaatttcttgcaacatgtccgacaacaaccatcgtgatggaagcctgtggtggtgctcattttatggtgcgtaagttgctcgagttggggcatacgccaaaactaatttcaccccaatttgttcgtcccttcgtcaaaagtaacaaaaatgactttgttgacgctgaagcaatctgtgaagccgcatcacgaccctctatgcggtttgttcaacccagaacggagtctcaacaggcgatgcacaccctacaccgtgttagagaatcactggtcagggataaggttaaaacgacgaatcagatacatgcctttttactggagtttggtatcagcgcaccaaaaggaccaaccctgataaagcgtttagcggaaattttggaagagaatccacttccaccctatctcgtaagattgctgcagaaactgcgagatcattatgattatcttattgaacaaattaaggagctggagtctcagctaaaaatatcactggacgaagatacaactgctcagtgcttactaacgatcccttgtgtcggtcctttgactgcaagtctgctttctactcaattaggtgatgggaagcagtacggtagcagtagggattttgcagcttcgacagggttagtcccccggcaacacagcacgggaggtcgaaacactttactgggtatcagtaaacggggcaacaaaaagctccgggccttgctggtacagtgcgccagagtgtatctgcgaacactggagtaccgttctggccaacttgccgactgggtcagagagttattactgcgcaaaaataactttatcgttacctgcgctctggcaaacaaactggccaggatagcctgggcgttgaccacccggcataaagcctttgaagcataattattgccgattttctagggttaaacattcacttatctggttttgcggatactgattactgatgatataaacggccaatcggcctgatgaagaacctgtggttaggagaggccataaggccgttgaatttataaggctcatcaggcgcggaactcatcgaggcgcgggcataatgcctattcagacgccggatagattcatgcaagccaacaatatcttcagtatcggtgttgcaaaaacgggagtgaccatagat

SEQ ID NO: 3960 - DNA, 1383 bp, unidentified
  source 1..1383: mol_type = unassigned DNA; note = element_5f15c2c
  misc_feature 1..2: note = core
  misc_feature 3..86: note = LE
  misc_feature 87..1118: note = CDS
  misc_feature 1119..1383: note = RE
  misc_feature 1150..1371: note = bridgeRNA
tgatgctgtggacggctccaccacccggcacgtgagtgccatggatggggggctgttagagctcccaacatttggaggagctattcatgcaagcgatcacgacaatcggactcgatatcgccaagtctgtcttccaggtacacggcgttgatggcgctggccaagtcgttattcgccgacagttgaagcggcgtcatgttctggcgttctttcagaagctgcggccttgtttggtgggcatcgaggcctgcgcgtcatcacatcattggtcacgcgagctctcggcattgggccatacggtccggctgatgccaccgggctacgtaaaaccctacgtcaaacgacagaagaacgacgcgacggatgctgaggcgatctgcgaggccgtgggcagggccaatatgcggttcgtgccaaccaagacgccagagcagcagagtggcctggtgctccatcgcacgcgacatcttttcattcgccagcagacctccgtcatcaatgcgatccgggctcatttggccgagtttggcatcgttgcgccggtgggccgccaaggggtcgagcaactgctcgaagccgtggccaatcccaacgaccagctcatccctgagatcgcccgtggctgccttttagccctcggagctcaattgcgcaggatcaagcagcaggtcctagagttcgaccgcatgatcagagcttggcaccaatccaaccagacgtgccggcggcttgatgactgccccggcgttggtccggcattggcgaccgccattgtagccagcgttgctgatcccaaggtcttccgatcgggtcgcgacttctcggcttggattgggttggtgccaaggcagcactcaagcggcggcaaagagcggcttggcggtatcagcaagcagggagatcgctacctgcgaggcttgtttgtggtcggcgcactcgccgtgatccgttacgcgaagatccacggcaccaagcatcggccatggctcaccgcgctgctagcacgacgaccgaccaaggtcgcagccatcgctctggccaacaagatcgcgcggatggtttgggccatgatggccaagggtgagcgttacaaggagcctgtggctctggccgcgtaatcacagatcgcgccggacacccggcgtgatgtgaaggttgggagggcgaacagcacgtaatgcagagccggtcgatccggcgatcaggataacccacatgtgccaccgcatcgtttgaatgcgtgcttttgaccgggacctgatccgcggagggcattatggccagcggtcatgtgaaccgcatcaacaggccgaacacatggctgcaccgaccaattgctgcgagcgtgaagaaagctcttgccaacgcggtgccgtccacaca

SEQ ID NO: 3961 - DNA, 1373 bp, unidentified
  source 1..1373: mol_type = unassigned DNA; note = element_5f1f957
  misc_feature 1..2: note = core
  misc_feature 3..75: note = LE
  misc_feature 76..1119: note = CDS
  misc_feature 1120..1373: note = RE
  misc_feature 1092..1361: note = bridgeRNA
tgatggggtggacgccccccgacggcatcgatgtgccatagtggaggtgttgaacaccactagaaggaggcgtccatggcagaggttagcacgatcgggttggatattgcgaaggctgtttttcatgcgcacggcgcggatccgcgcggtcagatggtgttcagccggcggctgacccgtgcgaagctgctggagttctttgccgcgcaaccgcgctgtgtggtggcgcttgaggcctgcggcggggcgcatcactgggcgcgcgagatcgcctcgcttgggcatgaggtgaagttgatcccgccagcttacgtgaagccgttcgtgaagcggaacaagaacgatgcggttgatgccgaagcgatctgcgaggcagcccagcgcccgagcatgcgctatacggcgatcaagaccgaagcgcagcaggcggccgggatggtgttccgcacccgcgatctgctggtgcgccagcgaacgcagctgattaacgcgatccgcggtcatctgaccgagttcggatgggtagcgcccaaagggccatctcacatcgacgtgctcgccagcctgctcgaagagggcgaggagatcggtgcatcgctgcccgaggcggcgcgcgcgatgttcctggtaatgacagggcagctcgagcagctgaacgagcagatcaagctgctcgacaaggagatcgccaggcgtgcccgcgaggatgaggctgcccggcgattgatgaccatccccggcatcgggccgatcgcggcaaccgcgttgctggcgcttgccccacccgtagaaggctttgcgaggggccgcgactttgcagcctggctcgggctaaggcagcactcgaccggaggcaaggagcggctcggcgcgatctcgcggatgggcgagcgcacgctgcgacggctgttgatcatcggcagcagtgccgtcgttcgacaggccagcaggcgcggcgccccgcgcggctcatggctcgagcagatgctggccagaaagccgcgcatgctggtcacggtcgcgctggcgaacaagaccgcccggatcatctgggcggtgctgatgaagggtgaggattaccgcgaaggtcacagggctccggtcgcggcagcagcgtaagctgaggcggaccagaggtcgtcggtagaggcaagagaccgaaggagggtatggcaccacagtcggcgagacggagccggacaaccagtgcaatccacagtgcctcagagcacgcctgggtgatgtggatccggttcgcgaactcccatacgggccagcggcatcacgcccgcgcaaaaaggccggacagatggcagcatccgactaccgccaatacccaaatctagtcttgcatcttctggggcgtccacaga

SEQ ID NO: 3962 - DNA, 1166 bp, unidentified
  source 1..1166: mol_type = unassigned DNA; note = element_5f2197f
  misc_feature 1..2: note = core
  misc_feature 3..204: note = LE
  misc_feature 205..1140: note = CDS
  misc_feature 1141..1166: note = RE
  misc_feature 60..199: note = bridgeRNA
cttgtatataaaatagaagatttaaaaaacaagcaactgaggatagaatactatcgattgagagaggtgtggcagaccgtcgaccccttggtttttaaaaaccgtaattgagcatgggtcgccacaccatcacctgattaacccgaacaatggccaggacctaaagagtccgcatctaacaaggccgggagatgaggtatttctatgaactcagaagcatatatcggtgttgatgtttccaaagatctattagatgtaaaagttttacccagtgaacaaacccagcagttttctaatgatgaccctggggtcaagaatttgattacatttgtaaaaaagatccatccccaattgattgtgtttgagtctactggtggtttggagatgctcgccgtcagtagtctcgttgaaaaacatttgccgacagtggttataaaccctcgccagataagagactttgccaaagcaactggcagattggcaaaaaccgattccatcgatgctgataccatcgcacgtttcgcgcgtgatattcgcccggagatccgtccgataaaggatgaacacacacagcttttatcggccttgaatgccagacgaaggcaaatcgttgacatgcttgttgctgaaaaaaaccgtttatattcggcgcccaagccgaatataaagagtatccaaaagcacattcagtaccttgaaagaacactggaagatatcaataacgatatcaataaaacgattaaaaaaagtccgacgtggcgcgaaaatgacagaattttacaaagtttcaaaggtgttgggcccgtattgtccgccacgttgctgtgtgatttgccggaattgggcactctgaaccgaaaaaagatagctgctttggttggcgttgccccactcaactgtgatagcggtcgatttcgtgggagacgtcgcatcaaaggaggcagagctgatgtgcgccgaaaattgtacatggcagccgtcgcatcgattcgtcataatccaaggatgaaaaacttctatcacaaattaattgatgccggcaaaccacccaaactagccttaacggcatgtatgagaaagatccttactattttaaatgcaatgataaaaaatcgaacttactggatcgctacatgttaatttttacttgacgtccaatacagtgg

SEQ ID NO: 3963 - DNA, 1518 bp, unidentified
  source 1..1518: mol_type = unassigned DNA; note = element_5f263cb
  misc_feature 1: note = core
  misc_feature 2..119: note = LE
  misc_feature 120..1136: note = CDS
  misc_feature 1137..1518: note = RE
  misc_feature 1186..1484: note = bridgeRNA
gaatgaaagggacttccccgtcccgggtgatccgcgcagttgcggggtacggcaacacagtgccacgatgggaagttcgatctctcatcaactcactcgtttgttggaaggggaagtccatgagcattgtcaccatcggaattgatcttgccaagaacgtctttgccctccacggcgtggacgccacaggccaagcggtgttggtccgccccaatgtaccgcgcgccaaactgcttgaactcatcgcctcgctgccaccgtgcctgatcggcatggaagcgtgctccggtgcccatcactgggcgcgcgagtttcaggccttcggccacaccgtgcgcctgatggctcccaagttcgtgatcccctaccgcctctcgggcaagcgtggcaagaacgatgcggccgacgccgccgcgatctgcgaagccgtcacccgccccaacatgcgcttcgtgcccgtcaagagcatcgcgcagcaaggccaactgctggtgcaccgcgcccgccaggggtttatcgaacagcgcaccgccacgctcaaccgcatccggggcctgctctctgagctgggcatcgtgctgcccttgaaggcggccgtcgtgcgccgcgaggcgctggtccgcctggaggacttgcccggttgggccaacaccgtgatcggtgatttgctgagtgaggtcgcccggcttgatgagcgcatcgcgcagtacgacctccacatccgcgcgatggcgcgccagagcaccgaagcccagcggctgatgcagctatcgggcattggtgagaccaccgccacggcgctgctgagcaccatcggcaatgggcgtgacttcaaatgcgggcgccaactgtgcgcctggctgggtctggtgcccgggcagtacagctccggcggcaagcagcgcctggggcgcatcaccaaggcaggagacccgtacctgcgcagcctgctggtgctgggtgcgcgagcggtactggccgccgccaagaacaagaccgacccgatcagccgctgggctgtggcgctggcgcagcgccgtggctactggaaggctgtggtggccatcgcagccaagaacgcgcgcatgtgctgggcagtactcagccggggtgaagatttcaggttgcccgcctgagccccggccgaacaccagctcgtatcactcaaaggagccttgttcgatttccaccaccgcgtgcagccagcgttgatgagtcatgggttggacctgcgcggggcgtgaccgtttaactcaaggagttcagggccggtggcaacgccggccatcctcggctaacgaatgggtcccccgcgcgcgtctttcatcagggtccgctgtcattgagcagcattcatgaccgtttgtagtttcgctgtccgcatcccttgctcggtgagcaatgcaggcctggcgctgaagttggaaaaccgtcaatccaaagtctgttccgtgatccatcgcgacgcgatgcatcacggctggatcggtgtttgacttttggggggaagcccttgta

SEQ ID NO: 3964 - DNA, 1112 bp, unidentified
  source 1..1112: mol_type = unassigned DNA; note = element_5f27fe7
  misc_feature 1..2: note = core
  misc_feature 3..167: note = LE
  misc_feature 168..1103: note = CDS
  misc_feature 1104..1112: note = RE
  misc_feature 1..169: note = bridgeRNA
cctgtatgtccgggctgtgtcatgatgcttgcgggacggaggccgttgggcccctggtcgttgtgagaccgtagaccggcatttggccccgccccgcttcgcatgatcaacctgaacagttgcacgaggctggttgcaacagacctcgcatcacagggacaggcctcatgactatattcgatcgctacgtgggatgcgatgtttccaaggagtggctggatctcttcgacccggccgagggccgtgtgcggcggatcgacaacacggctgcggccgtgcagaagtgggccggacatctggcgcggacgaactgcctcgtcgtcttcgaggcaaccgggagttacgaccggatcctgcgcgagcacctgcaccgggcaggcgtcgccagcgcccggctcaaccccaccctggtgcgccgctacgcccaggcgcgcgggcgcaaggccaagaccgatgcgctggacgcggtggtgctggccgatctcggcgaacggctcaggccggagcccgacgccccgccctgtccccaccgtcttcgcctggcggagctgagtgcgcgccgcgaccagatcgtcgccatgcgcgtcatggagaagaaccgtctctcccagcccgaggacccgttcgtgcgcgaggacctcgaagctgcggtcacccgtctcggcgaggccatcgcccgcgtggaggcggagatccagcgccatgtgcaggcgcagcgggagttgcgcgatcaggcccgcctcctggccagcgcgccgggcatcggcccggtctctgcccaggttctgctggcactcatgcccgagctcggcaggaccgggcccaagcggcttgcggcactggccgggctcgccccgttcaatcacgattccggaaaactcaaaggacagcgctgcatcgccggcgggcgcagccgtgtcaggaaggcgctctacatggccgcgctgatcgccgcgcggacctgtcccgatctcaaggccttcgccgaccgcatcacccaaaccgcgaaagcccgcaagatcgccctcatcgccaccgcacgaaaactcctcatccgcctcaatgccatgctacgcgacaacgtcccctatcgcatcgcatgaacacagttg

SEQ ID NO: 3965 - DNA, 1365 bp, unidentified
  source 1..1365: mol_type = unassigned DNA; note = element_5f35c81
  misc_feature 1..2: note = core
  misc_feature 3..83: note = LE
  misc_feature 84..1103: note = CDS
  misc_feature 1104..1365: note = RE
  misc_feature 1137..1351: note = bridgeRNA
gatggtgtggatggctcctgcaccatcggcgtcgaatgcgccataatgcagttgttagaaactgcttaagaggagccacccaaatgcacgttacaacaatcggcctagatttggccaagaacatttttcagatccacggtatctacgaagacggtgaagttgcgttcaaccgcgctttaagaagagcacaggtcctgtcattttttgaaaagcttgaaccatgccttgttggcattgaggcttgtggaaccagccatcattgggcacgtgaactgatcaaactcggtcacaacgtaaaactgatatcgcctgcttatgtgaaaccgtatgtcaaacgcggcaaatcagacgctgccgatgcagaagcaatttgcgaggctgtcactcggcccacaatgcgctttgttgaagtgaagacacccgaacagcaggcgatattggcagttcatcgaacgcgtgatcttatcgttcggcaacgaacgcagacgatcaatatgctacgggcacaactggcagagtttggtattgttctgccacaagggatttatcatgccctccagttcgccaaggattgtttgaatggagagcaagctgacctgcctgaagtcgcaggcgatgtaatttttgaactttgtgatcagcttctttttttacattcaaagatcttacggtgttctcgacagatgacgcagatcgccaagcttgaaaagcgcattgccttgcttcggacgatacccggtgttgggccgattacagcgtcggcaattgttgcaacggttggcagcggtaggcagttcaataatggccgggagtttgctgcctggttgggactaacaccactcaacaaatcaagcggtggaaaagaacgcttggggcacatctcgaagatgggggatcaatacatccgccgattattggtcctcggtatgatttcccgtattcgctcaatcagggcaaaaccagagaaatttgacccttggtttacagacatcctgtcacgcaagccaagcagagtggcagcagttgccatggccaacaagacagcccgaatgatctgggcagtgcttacccgcaatgagccttacaaagtgagggccgtttgagaacaaagaaacagaacaaagtgaaatagaaacaagagattgcaagaccaatgaagtgatggaaaattgtcagccctaaaaccaagacaccccgtcaaaggtccagaacgtttactgttcgataagcggaatgggacttggttggtggaaaccatcagggccagcggccaagtgcgtcgcgtcaacaggccgaacacaagactgcttctgacaatgtactaatcacaaaaaaggacttgcaaaaagggagccatccacacag

SEQ ID NO: 3966 - DNA, 1350 bp, unidentified
  source 1..1350: mol_type = unassigned DNA; note = element_5f4504e
  misc_feature 1..2: note = core
  misc_feature 3..87: note = LE
  misc_feature 88..1107: note = CDS
  misc_feature 1108..1350: note = RE
  misc_feature 1122..1337: note = bridgeRNA
tgatggggtggatggctcctgcttcaatcggcgtcgcaatgcgccatactgcaggtgtcgatgtctgcataagagaggagccaccccatggaagttactacgatcggccttgatttggccaagaacgttttccaagttcacgggatcactgaaggcgaagaggttgtcttcaaccgccctttgagacgggcgcagctattgccattcttttccaagattgaaccctgcctcattggcatggaggcttgcagcagtgcgcactactgggcgcgagagctgacagcgttgggtcatgaagtccggctaatcccaccgatgtatgtcaaaccatacgtcaaacgcggtaagtcagatgccatcgatgcggcagccatttgtgaagcggtgacgcgtccgacaatgcgctttgtcgcgatcaagacggttgagcaacaagctctgctctcgcttcatcgcgcacgagatctgcttgtccgccagcgcacgcagctgatcaatggcttacgtggtatggtcgccgagtttggcgtttacatcgcaagaggcttggcgcgggtcatcgggtttgcagaggatattctcgcaggtgaagttctggacctgcccgagattgcgaatgaggtgatccacaatctgtgcgaacacctgatggcactgcatgcacggatccgatggtatgaagaccggctgaaggttgttgccaaggaagacactcgggttcggctattgcgcaccatcccaggcgttggcgcagttacggcgtccgcaatcatcgccagcattggtgatggtcatcagttccgcaatggccgggagtttgcagcttggctgggtctgacgcctgcaaacaaatccagcggcggcaaagagaaattagggcgcatcaccaaaatgggtgaccaatacttacgatcattgcttgtcgtgggcatgacgtccctcgtccgacaaacgaaatcgcatccggaacgcgctagcaaatggttgaccggattacttgaccgcaaaccagcacgcgtcgcgactgtcgctatggccaacaagaccgctcggatcgtctgggcagttttgacccgcaacgaaacttactcaccccactctgcctaagaagaaaagaaacaacgcgttagcaagacctgcgagatgatggtgcataagtctgccgccaaaaccaagacactccgccgaatggctcgggcattaaagcccgcaaagctgatgggaacttggtttgcggaacccttcagggccagcggtcaaaaccgcgcaaacaggccggacacatgactgcttctgacaaatgcacaaatctgatcaaaaatgtcttgctatgcaggagccatccacaca

SEQ ID NO: 3967 - DNA, 1403 bp, unidentified
  source 1..1403: mol_type = unassigned DNA; note = element_5f45959
  misc_feature 1: note = core
  misc_feature 2..226: note = LE
  misc_feature 227..1390: note = CDS
  misc_feature 1391..1403: note = RE
  misc_feature 13..241: note = bridgeRNA
ctacttgttctatgagcccacgatcgatgcctgcgcaaggctcggtccaggtgcccggcccgtcgctctctttgcggctgcccacgattcgtcctgtggctctctcatggcctgcgcgggtcgggcactgcctgagtagggagaggctcaagaggggtctgctcagctcgaagtagcgctgccctccctgctcgccaactggtccggcgacagcaggaggacaggcatgacgcgagtggtcatcgggatggacccgcacaagcgatcggtcacgatcgaggtaatggcgctggacgagtccgtcctcggcggcggccggtacggcaccgacgagcccggctacagcgccctgcttcgagacgcggagcagtggccggaccgggtctgggccgtcgagggctgcagcggcatcggccgccacgtcgccatccgcctggtcgccgacggcgaacaggtcgtcgacgtcccacccaagctgtccgcccgggcccgggtcttctccaccgggcagggccgcaagaccgacgccaccgacgcacactccatcgcgctcgtcggcacccgcatggccggcctgcggcccgtcgtcgacaaccagcaactcgcggtcctgcgcgtcttggccgaccggcgaaaggcactcggcgaagaccacacccgcatggtctcccagctgcaccacctgctgctcgagctcatcccaggcggggcgaagaaggacctgtcagcagcgcaggccaaggcgctgctggcgcaggtgcggcccagggacctccccggcaagacccgcaggcgcgtcgccgccgagctcatcgcggacctcgagcggatctacgcccgcaagaaggccgccgacaaggagctgcgcgaactcatcaccaacaccggcacctcgctgctgaccctcaacggcatcggcccgtccggcgccgcccggctgctcatcgacgtcggcgacatcacccgcttcccgaccaagggccacttcgcctcctggaacggcaccgcgccactcgacgcatcctccggcgaccgcgtccgccaccgcctgtcccgggccgggaaccggcagatcaaccggacgatgcacatcatggcgaccgtccagctccgcaacccgagcgaggggcgcgattactacgaccgcaagaaggcggccggcaagacctcgatggaggccatgcgctgcctgaagcggcgactgtccgacgtcgtctaccggcacatggtcaacgacgccgtccgctcgatgacgggcccgggaggacacccaggagcgactacgaagtcccgcgcgaccggctcacatccccacaccggctcttcgaacaagtcacttcccggacccgccaccaccaagcctaggaccggcctccccgccgcgtcttgacacagaggggagc

SEQ ID NO: 3968 - DNA, 1369 bp, unidentified
  source 1..1369: mol_type = unassigned DNA; note = element_5f4e001
  misc_feature 1..2: note = core
  misc_feature 3..72: note = LE
  misc_feature 73..873: note = CDS
  misc_feature 874..1369: note = RE
  misc_feature 1081..1357: note = bridgeRNA
tgatggggtggacgccccccgacagcctttatggcaaagtggaggtgttgaagcaccactgaggaggcgtccgtgtcacaggttaccacaatcggtctggatatcgccaagaacgttttccatgcgcatggcgctgacgagcggggtgcgatggttttcagtcgcaggctgacgagaggcaaactgcttgagttcttcgccggtcagccagcctgtgtggtggcgctcgaggcgtgcggtggcgcccatcattgggcgcgtcagctacagacgatggggcacgatgtgcggctgatcccgccatcttacgtgaagccattcgtgaagcggaacaagaacgatgcgattgatgctgaagcgattgccgaggctgcgcagcgcccaggcatgcgcttcgtggcggtaaagagcgaagagcagcaggctgcggggctcgtgttccgcacacgtgacctagcggtgcggcagcgcactcagctgatcaacgccatccgcgggcacctagcggagtatggttgggtagcaccgcgcggcacagcgcatatgacaatgctcgctgacctgctcgaggatgaggaaatgacttcaagtctgcctgcagcggcgcggcccatgttcaagctcatggtcgacatgctggccgatctcgacaagcaggttgccgtgctggaccgtgagatcgcacggcgtgccaaggaggatgaagcagccaggcggctaatgaccattccggggatcggtcctatcgcggcgaccgccatcatcgcgctggccccgccggtcgagacgttccgtaagggccgcgacttcgcggcttggctaggcctcgcccccccgtcagcactcgaccggcggcaaacagcggctcggtagcatatcgaagatgggcgagcggacgatcagacgactactgatcatcggcggcagctcaatggtacgccaggcatgccggtttggcgcgcctgccggctcgtggcttgatcggatgctggcgcgcaagccgcgcatgctcgtctcggtagcgctcgccaacaagatggcgcgcatggtctgggcgctgctaaccagaaaggaagattacagagctccgacagctgtcgcggcgtaagccaagactgcggtcagaggcgtcggggacgtaggcggtcgaaggagggtatggcacaacagtcggcgagacggggctggaagaaccagggaatggcagagcgctagccaagcgcgtaaaactgtaatggatccagtccgcgaactcccatactggcccgcagcttatggcgctgctcatcgaggccggacagatgacagcatccgactacgtgccaacataccccgatttactgcttgcgtccggaggggcgtccacaga

SEQ ID NO: 3969 - DNA, 1436 bp, unidentified
  source 1..1436: mol_type = unassigned DNA; note = element_5f4e365
  misc_feature 1..2: note = core
  misc_feature 3..230: note = LE
  misc_feature 231..1421: note = CDS
  misc_feature 1422..1436: note = RE
  misc_feature 16..207: note = bridgeRNA
gtcctacctttcaggcgtgggtctgctccggtcactcgtaggatcggagggcccgggggctccgggtatggctgtaaaggctgagccgctggatggcttacgggacttggccgcccggagccccgcgacgactcgaccgctgattgggagacgcgactcgatcgctgctgtaggacaacgtcggcgaggtcgtctgcgggatcagttggagacgactgccggaggggaacttgcctgagatttgggccggtgtggacatcggcaagactcatcaccacgccgtggtgatcaacgcagcgggcggccggctgctgtctcgccggatccagaacgacgaatctgagctgctggcgctgataggcgatgtgctggcgatatccgaagacgtgttgtgggccgtcgacctcaaccatggcggcgctgcccttctgatcggcttgcttaccgcccatgatcagccggtcgcctatttgaccggcctggcagtccaccgggcctccgccacctaccggggtgaggcgaagaccgacgcaaaggacgcctttgtcatcgccgaccaggcccgcatccgccgggacctgggcctgctcagacccggagacgagatcgccgtcgatctgcgcaccctgactacccggcgcttggacgtagtcttcgaccgcacccggcagatcaaccgtctccgggcccagctgctggagctcttccctgctttggagcggtcgctggacttgaccaacaagggtccggtgacgcttctgacgggctaccagactccggctgccatccgccgcgccggcgcgaagcggatcgagacctggctgaagaaccgcaaggtcaaaggcgccgcctcactcgcgcaaaccgtcgtagaagccgcccaggcccaaagcaccgccctgcccggcgagaagctggccgcggccatggtggtccgcctcgcgaagggggtgatggctctcgacgaggagatcgcggagctagacgcactcatcgaggctaggtttcacgagcatccgcacgccgaggtgatccgcagtctccctggcatggggcccaggctcggcgccgagttcatcgctgcaacgggcggtgacatggacgccttcgggaatgccgaccgcctggccggcttcgccggcctggcccctcagccccgagactccggccgcgtcagcggcaacctgcgcagacctcgccgctaccatcgcggcctgcttcggaccatgtacttgtcggcgatggccagcctcaagtcctgcccggcctcgaaggcgtactaccggcggaaacgaagcgaagggaaaggccacaagcaagctctcctctccctcgcacgccgacgtatcaacgtcttgtgggcaatgattcgtgacagagagtgctacaggccttcacttccggtagtgggaacggcttgacatcagcattgggaa

SEQ ID NO: 3970 - DNA, 1547 bp, unidentified
  source 1..1547: mol_type = unassigned DNA; note = element_5f57c5e
  misc_feature 1..3: note = core
  misc_feature 4..243: note = LE
  misc_feature 244..1431: note = CDS
  misc_feature 1432..1547: note = RE
  misc_feature 8..223: note = bridgeRNA
tttcgtattattaggtcaaccggaatttctggttggcctatttttgtaggtatattaagatggcggtagccgggagaacgtgcggcttttagggggaaaaccccggaataaaaactgttctcccactacccccaatgaccatgtttgagctggttgagacattgaagatctcgtatcacaagcgaagctatgggtttggagccatcgtgggcgtgccggcgagtatttagtaaggagggtattatggaaccggtaataggaatggatatatcaaaaggaaacagtgtcattcaagcttttttacggcgaaatgaaccctacgggaaagcagaacagatttatcataacgagcaaggattagagaggctctgcacattatgcacagaactaaaagcaaggacaggcacggagccagtagttattatggaagctacgggacattatcaccgtggacttgtttgttacttggctcgggaagaaatccgtcatatcatccttaatccgttacagtccaagcgagcaaaaggaatgggactttgtaaggtgaaaaccgacgaggcagatgcttggaacttggccgaaatgttttacagaggagatgctttgccacaccgaatctgggatgaggcgtacatggaacttcaacacgctaccccccagcatgagtttgtcacatcattatatgtacaagccaaactcaataccagggcattgttggatcaagtaatgccggcttatgaaggagtgtttagtgacctgtactcggctacatcactagaagtgttgcagagctgtttacaagggcaaatggatgaggtggagattatagagaaagtcctaataaaacatgctgggagatctcgcagtcaaagctggataagagagaagtcgatacgattagaagaggtctcaagcaagtggaaggaagggtgggcaagtccatctcaaacggcggcactgaaagggatggtggcgttactcttaacatttcaagcccaattgaagcaattggagcagcaaatggaggaaatatctgttcatctaccggaggttcatttattgaaatccattcctggaattggggaaaagtttgcagcggctatagtggcggagataggagatattagacagtttagacatgctaagcagctagtagcctatgccggactagatccgagtgtatatagttcagggaaatttacagctagcagcaaccggatcacgaaacgcggctcaaaacgtctgcgcagatcgttgtatcttgctgtacaatgtggacttcggcaaggaagtaatagacggttagtatcgtactacgaacgaaaaaagaaagaaggcaagccttacaaggtaacggtgatcgcttgcgccaacaagctactacatcacatttacgctctcttgaatagaggccagccttaccaagcataaacttattcaattctaaaaaaactccacgccaatggagtttttttgccatgctcaaaaaccagtatatcagtaattcattaaatcaccaagggtgcagcttgacaaacattagctgg

SEQ ID NO: 3971 - DNA, 1105 bp, unidentified
  source 1..1105: mol_type = unassigned DNA; note = element_5f59367
  misc_feature 1..2: note = core
  misc_feature 3..165: note = LE
  misc_feature 166..1092: note = CDS
  misc_feature 1093..1105: note = RE
  misc_feature 1..160: note = bridgeRNA
cctgtctgttgaaaatgtgagaatgtgatcgtgcggaagggagcccgtccccccccccgagggtcaggagcccgtgcgggagcaagggtcccttccgcgtctgcttgaccctgaacagttgcttgggaccgcagatcccgcacgacatggacaggagctttcaccatgccacagcccgttgtcggctgcgatctttcacgcggcttcatcgatctctgccgtctgccctcggccaaggtcgagcgcatcgccaacacgccggaggccatctcggccttcctcgacacgctcgatcgcgacgtcctcgtcgtgttcgaagccaccagcggctgcgacggcgacctcatcgccgccttggccaaacgcagccaccccttctcgcgcgtcaagccccgtcaggcgcgcgagttcgccagagccaccggcgttctcgccaagaccgaccgcgtcgacgctcgcgtcctggcacagatgggctcctccctcagcctgccaactaccgtcccgctcagccgggcccgtgctgaactctccgactttctccggcggcgcaggcagttggtcgacatgcggaaggccgagaagctgcatcgacacagcgccgggcaggacgagatcgccacggccatcgacgccatgatcgaactgctcgcccggcagatcggcgatctcgaccgacgcatcgcggacctgatccatgcggaccagactctcgccgagcaggcgcgcctccttgccgccgtgcccggcataggtccaaccgtgctggctaccctcctgggcgagctacccgagctcggcacgctctgccgacgccgcatcgcctcactcgccggtctcgccccgcacgcgagggagagcggtacctggcgcggggcacggcgcatctggggtggacgacggaaggtgcgcgaggtcctctacatcgcggcactcagcgcttcacgccgcgtgcccgtcctcgtcgccctcaaagaccgcctgcgcctcaagggcaagccacccaaaacgatcctgatcgccgtcgcccgtcagctcctcgtcatcctcaatgccatgctgcgatccaaaacaccgatcgcgctcgcttgagcgaacacagttg

SEQ ID NO: 3972 - DNA, 1353 bp, unidentified
  source 1..1353: mol_type = unassigned DNA; note = element_5f6a74e
  misc_feature 1..3: note = core
  misc_feature 4..157: note = LE
  misc_feature 158..1099: note = CDS
  misc_feature 1100..1353: note = RE
  misc_feature 1124..1340: note = bridgeRNA
tgatggggtggacggcccccgctccgagcggccctgtcgtagagtggctggcggcgcaacacccatccggagccgatcccatgtcagtcgtaccgtcggtatcgatctcgctaaacaggtcttccaggtccacggcgtcgatgatgcgggtcggccggtgctcaaaaagcgccttcgccgcgccgagctgcgggccttcttcgccgggctctctccttgcctgatcggcatggaagcctgcgcctcggctcactattgggcgcgcgagctggcggccgtcggtcacgaggtccggttgatgccgccgtcctacgtcaagccttacgtgaagcggcagaagaacgatgcggccgatgccgaagcaatctgcgaagccgtcacccgccccaccatgcgcttcgtgccggtgaagtcggaggaccagcaggcggttctgatgctacatcggacgcgcgacctgctgatccgccagcgcacggccttgagcaacgcgttgcgggcgcacctggccgaactcggcatcgtggagcgccagggcgtcgccggcctcgacgccctgatggcctcggtcgagggtgagactgagatcccgcctctggcgcgaaaggcgctcgctctactcatcaaggagctgcggtccatgaaggagcagatcaaggcggtcgagaccgagatcctcgcctggcaccgcggaaacgaagccagccggcgtctggaaacgatcccgggtgtggggccgatcatcgcgagcgcactggccgccaccatcgctgatccgagcgtcttcaaatcgggccgccagctcgcagcctggatcgggctggtgccgcgtcagaactcgagcggaggcaaggagcggctcggccggatcacgaaacagggtgagccctatctgcggcgcctgctggtgatcggagcatcggccgtgatccggttttgcaagaccgacgggtcggctctgggaggctggatcacggcccttcgtgcccgacgccccgccatggtggcgacggtcgggatggccaacaaaatggctcggatcgcctgggcggtgctgagccgaggaaaggaattcgagatgcgtcccgccatggcgtgacagggcgcagcctttcgagttccacgaacgggtgaggtgatgatgacatgatggcgaaccggtcgagccggggatcggagcagcccgaaatcgggtcggcgctttgagcgcgcgggattgatagggaaccgatccgcggacttcatcagggccagcggtcatgtgtgccgcatcgacaggccggagacatgactgcacccgaccacctcgcctcaccgtcaaaatcttcttgccccgcgggggccgtccagaca

SEQ ID NO: 3973 - DNA, 1385 bp, unidentified
  source 1..1385: mol_type = unassigned DNA; note = element_5f725cc
  misc_feature 1: note = core
  misc_feature 2..59: note = LE
  misc_feature 60..1085: note = CDS
  misc_feature 1086..1385: note = RE
  misc_feature 1164..1379: note = bridgeRNA
taatgggatggtccgccttccttgcttccggaggagcggaatataagaggaggcatcctatggatcttcacacaatcggtattgatcttggcaaaacgatttttcatctggtaggtctgaaccagcgaggcgaggttatggttcgcaagaaattctcgcgagcacaactgctgcgcttcacagccaaccgacaagtccatttgattggcatggaagcatgcggtggctcccattttcttgccaaagcgctccaacagcagggacacgaggtacgcttgattcctccacaatatgtgaagccatttgtgaagacgaacaagaatgatttcatcgatgcagaagcgattgcagaggcggtgggacggcccagcatgcgctttgtgccaatcaaaagcgatgatcaactggatatgcagtcattgcatcgagtgcgcgagcgctgggtaatgcgccggacggcagtggtcaaccaaatccgtagtttactgctggagcgaggcatcacagttccccaaggatggtgccatctcgaggcgcttttgccggcgattctgacaggcaccgagatgaagctatcgggagtagtacgcttactggtcgcgcaattgaaattagagctagaccaattggcagcacgcctggaagaggcggacgcgctgattgagcagactgcacaggagaatgaggcctgtcgacgcttggatgcgatccccggcatcgggccagtgacggcaaccgcactgctggccgcaatcgggaatggagcagcgtttcgcaaaggtcgagagttcgcagcttgggtgggcttagttccacgagaacattccacaggaggcaagcagaagttgctcggtattagtagacgcggaaactcttacctgcgaaaactgttcgtgcaaggtgcccgtgctgttttgcaattcaaagagaagcagtcatcgggtctgaaggcttggctaaccaacgtgtcctggcgtacccactacaatgtcgtcggtgtggccttggccaataagctggcacgtaccgcatgggcggtactggccaaaggtgaagtctatcggcctcccgtgctggcctgctgatcggcgcgaactcgacctacaaatcagttgaaagtgattctaacgaggagctgttactgaagagtttatgatttcctgccaggtctgctggcgaaacaatgagatggcacaacggtcaaacccggcgttcttgaaacccgtactcggaagaagtctttcaagactgcccaactaaatgggaagagagcgcagcgcattccatcctggcccggagttctttgctccaacaaaggccgtatacatttgcgcagaccaacctgtcatccatttttcgcttgcgacgaggcggcggaccataca

SEQ ID NO: 3974 - DNA, 1423 bp, unidentified
  source 1..1423: mol_type = unassigned DNA; note = element_5f74d74
  misc_feature 1: note = core
  misc_feature 2..130: note = LE
  misc_feature 131..1138: note = CDS
  misc_feature 1139..1423: note = RE
  misc_feature 1193..1415: note = bridgeRNA
caatgggatggacgcccccaccctaaacggcattgaaatgtgccaaagtggagttgcgtaacaaccacttaaaccgaataggagcgtccgacatgaaggttacaacattaggccttgatttggccaaaacgtgtttcagatccacggcatcaatgcgttgggcaagccggtcatcaagaaacaactcaaacgcaaccagatggccgagttcttcgtcaacctgccgccctgcttgattggcatggaagcgtgcggtggcgcccaccactgggcacgcaagctccaggggttcggccatacggtcaaactgatggccccgcagttcgtcaagccctacgtcaagaccaacaagagcgacgcggccgacgcagaagctatttgtgaagcagttgcacggcccaatatgcgctttgtgccgatcaagaacgtcgagcagcagtccgtgctggcccagcaccgcgtgcgccaaggctttgtgaaggcccgcaccgctcaggccaaccagattcggggactgctggctgagtttggcctgatcattccccagggcatcggccacatcgctaaccgggtgcctgaactcatcgaggatgccagcaatgagttgccgggagcgtttcggctactcgtgcaacgcctgctcgatcacctcaaggagctcgatcatcaggtgggtgaattggaaacgcagattcagcagtggcaccgcagcagtgatgtcagcagcaaactggcccaaatcccaggcattggccccatcaccgccagtgccctggtggcatcactgggtgatgctaaaaactttgataacggcagacaggtcgcggcctggctgggattggtgccccgccagcactccagcggtggcaagcaaaacctgttgggcatcagtaagcgcggggacacgtatctcagaacccttctgattcacggggcgcgttctgtcatctaccgggctgggcaaaagagcgagcccaataaaacgtgcgcctgggttaacgcagtggtcgagcggcgcaacaagaacgtggctgcggtagctctggctaacaaaaatgcgcgaataatctgcgccttgctgacccatgaccggcagtacgaggcggggtacacaaaacacatggcaacagcactctgagggcagactggagcctacacacaacaacaacgacagatgagggagaactgaaccaccgattgctcaggcgatcatgaagtgatggcaagacaggtcagaccgtggttggcaaagcccgtgttacccgaagcacccagagtgcgaaaaatcgatcgaggcgtcaaccagcgaatcccatcagggacagtggccaaaagccacatcaaaagtccgaatgtacgggtgcaatctttacctttgagccgtcatgaattgaaagcttggcataccgggggcgtccatgta

SEQ ID NO: 3975 - DNA, 1183 bp, unidentified
  source 1..1183: mol_type = unassigned DNA; note = element_5f7b60c
  misc_feature 1..2: note = core
  misc_feature 3..160: note = LE
  misc_feature 161..970: note = CDS
  misc_feature 971..1183: note = RE
  misc_feature 40..157: note = bridgeRNA
cttatataaaacatattagtcagatctgtgtaatacagatctgactggggtgtaggccgtgacgctccttgggcttaaagcccgatggggagcttggccgcctccaattcggaccggaagttgggcaaaaagcccgaataaaacataagggtgagtatacatggaggccccagttgcaggaatagatgtatcaaaagataaattaatcgtgtattttcaaggtaaactctacgagtttactaatgataggcaggggtttgaggagataaggaagatcttgcctagtggttgcaaagtgggtattgagagtactggagtttaccacgttaacctagcaaagtacttgaataatgagtatgatgttaggattattaatccctttatactcaagaagttcaagggttttaggggtaagaagagtgataagaatgatgctaaaaagctagcagaaatagttgtaagtatgggtagtgggtttgtaacaagtgatgctagggagttaacaagccagtgggattttgttattaggagtattgctagggttaagaataggttgaggagggatttggtacttttaggctatagggatagtttgtctaagaaaaacttggaggaggttttgaggggtggtggggatagtgttgtcttgtctgaggttaggtttcttttggaggagcttgagaggcttgagggtaggaagagggagattgagaaggagcttgaggattttgttcccaaggatagtttgattttcaccattcccggtattggtaaaaccttgggttgtattattttggctagggttggtgatgttaggcgctttagtgataagaagaggtttgttgcttattgtggtctcgacccagttgttgagtctagtggtaagagtgttgtctcaaggggtatatccaagaggggtgatgctgtttttgaggagggctttttacttggcagctttgactgctattaaggttaatcttattatcaagcgtttttatgaggagcacaagggtaggcttaggggtaagaagttgattgttgcgtgtgctagaaagttggctgttattacttgggctgtgctgtattataataagccctttgatgctagtgagtaaagcaggtttcattgcgtaagtagtgtgaattatgctcgattttcaaggaaaagtttttataccggaag

SEQ ID NO: 3976 - DNA, 1504 bp, unidentified
  source 1..1504: mol_type = unassigned DNA; note = element_5f8724d
  misc_feature 1..4: note = core
  misc_feature 5..263: note = LE
  misc_feature 264..1286: note = CDS
  misc_feature 1287..1504: note = RE
  misc_feature 81..239: note = bridgeRNA
atagctatctcttaggtttgcagaatgaaattgaattttgaaaagcgaggtttttttctttcttttgttgtataaaagcaaggaattaaccgactgtcagaggtaaactaccgatagctataaagataatttatttcccgaataagaccctgacagtcaagctaattaacaccaaatagagttctggtatttaaagaccaataagagtagtagtgcaattagcaatcggttaattccaagcaaaaattttaaagcgtaaagttatgaaaaaaatttttattggtattgatttttcaaaattaaaatttgatgttgccatttataatggcgaaatgaaccagaaaatgggttcacaagagtttgataataagttaagtggatttaaagagcttctaaaatggatcatcttaattgctggatcaaagtataatgaatggattttttgcggagaacatacaggactttattcctatgctcttccagtatttcttagtgaaaaacacattgatatttgtttagaatctggattgcagataaaacggacgttgggtattcaacgaggtaaaacagacagtgtggatgcaattcgtatagcagaatacgcctatcgtcacaaagataaattgcagttatttaatcctttatctgatgtgttggatggtttaaaagatttgttagcttaccgtgagcgtcttattaaagcaaaaaagatgtttcagatttccagtaaggaattgaaatcagttaagaaaaaaggtgtaatttctgagtatatagttttggatagcaattcagaaatggtatcacttgaaactaaattaaagagctgtgaaattcaaattaaagagctgataaaaagcaagttgtgcttgctggaaaattacgagtttttgacgtctataaaaggaataggaatggtaaatgcagcagctgtattagttatcactgctaattttactttgttcacggatccaagaaaatttggttgttattgcggggttgtcccatttaaacatagctcaggcacaagcgttaagggtcgaactaagataagtaattttgcaaacaaaaagataaaatcattattaacccaggcagccagaacttgcgtgatgcacgatttggaaatgaaaacatattatcaaagaaaaatagcagaaggaaagaaggatagaattgttataaataatgtgaggaataagctgattcacaaaatgtttgcagtgatttctaacagaacaatgtataacccgaattatatgaatccgttaaaacaggcatcctaacataatttttcccgacttaatatttttgtaaacaaccaataaatgaagaaaataaatatggcaagactttttgaaaaaatactacccggtagggtggagattttttcaaaaaccgaaggcttggtcttgactttttattttcgaaatttacctttgtgcacaaaagtattaaaacacaataaacagagtatttttaatataaataatttggaataacc

SEQ ID NO: 3977 - DNA, 1433 bp, unidentified
  source 1..1433: mol_type = unassigned DNA; note = element_5f8830f
  misc_feature 1: note = core
  misc_feature 2..92: note = LE
  misc_feature 93..1133: note = CDS
  misc_feature 1134..1433: note = RE
  misc_feature 1196..1428: note = bridgeRNA
taatggaatggacgcccacttcctaaaacggcatcagagtgccaaagtagtggtggctttatcaaccactaaaatagaaaggggcgtccaaaatgaagattactacgataggcgttgatcttgcaaaggagttgttccagattcacggtgtagatgctcacggcaaggcagtgctgcgcaaacaattacgtcgaggtgagatggcgaagttctttgccaatcttgagccgtgcctgatcggcatggaagcatgtagtagtgcgcatcattgggcaaggaagcttggcgagttcgggcatacagtgaagctaatggcaccgcaattcgtcaaaccctacgtcaagacgaacaagaacgacatggcggatgcggaagcgatctgcgaagcggtgagccgccccaacatgcgcttcgtgccggtcaagaacgtcgagcaacaagcgattctgtccgtgcatcgggctagagaggggtttgtgaaggccagaactgcacaggccaaccaaatacgtggcctgctctccgagttcggcatcgtcattccgcaaggcattcgttcgattgccaaatgcatgccgggcatcttggaggatgctgaaaacagtttgccaggaaccatgcgcaggttgctggaaaggctgaatgaccacctcaaagagttgggtcgccaagtggaagagctggagttacagatcaagctgtggcacaaagaaagcgaggccagccgcaaactggaagctattcccggtatcgggccgatcacggcgagtgccattgtggcaacagtgggaaatgcaacggaattcaagaacagcaggcagctggcggcatggatgggattggtacctaagcaacactccagcggcggcaagcagacattgcttggcatcagcaagcgcggcgacacatacctgcgcaccttgctgatccatggtgccagatcgatcattcgttttgccgagaacaaggccgagccggagagctggctgcgtaaattgatggctcggcgtaacaagaacgtcgctgcggtcgccttggcgaacaagaacgcacgcatcatatgggcgttgctggccaagggcagaacatacgaacagaattacgccccggcacccaaggctgccacggcctgagcgggccggatgaacaggcacgtattggaacggtacgtatcggaaacaagtttaaggagaaaggcttccaccgattgcacaggcaatcatgaaatgatggcgagacaggtcagaccgtggttgggaaagctcgtttgagtcaaagcacaccaagtgcgtcgagttgatggagccccgaccagcgtattccatcagggacagaggcaaagcacctcacacaaagtccggatgtatggctgcaatctttacctactctcaaaatcatcaattgaaagcttggcaaaagtgggcgtccatgta

SEQ ID NO: 3978 - DNA, 1110 bp, unidentified
  source 1..1110: mol_type = unassigned DNA; note = element_5f9248e
  misc_feature 1..2: note = core
  misc_feature 3..162: note = LE
  misc_feature 163..1104: note = CDS
  misc_feature 1105..1110: note = RE
  misc_feature 1..164: note = bridgeRNA
ccctgtgtgtggaagttctgtcatgatggggtgggcgggaagccgttgggtccttggcgcatgacgccgtgagccggctcggtctcccgcccgtttcatccatcaacctgaacagttgcacgaggctgcgcgaacagacctcgcaccacagggacaggcgccatgatcataccccttcgctgcgtcggaatcgacgtctccaaacatcatcttgatgtctttgatgagaccattggtgcgcccgaacgcatcgccaacgtgccacacgccatcacagagctggtggcgcgttggcgatgcgatgcgtttgtcgtcttcgaagccacaggtgtctatgaccgcgaactccgcgaggccctgcatcaggccggcattaggttcagccggatcaatccggcccgtgcccgcgacttcgcgcgcgcgagcggccagcttgccaagaccgatccgatcgatgcttgtatgcttgccgcctttgcgcgcgccatgcggcccgcgaccgagcaagtctcgacagccgcccgcaacgctttggcacggctggcaaaacgccgggatcaactggtcctcatgcgagcccaggagaagaaccgtcgcagcgaagtcgacgactgcgctatggccgaacgaatctctcgcctcatcgaggtcttggatcacgagatcgccgggatcgaggccgagatcagcgtgctcatcaaagccgagccggagctctcggaagatgcgcaactgatgcgctcgctgcctggcgtgggtcccgtaacctgcatccagctcatcacccagatgccggaactcggacacgtcggacccaagcaggcggcggccctagcgggcctggctcccttcaacgtcgacagcggcgcccacagaggcaagcgtaaaatcggcggcgggcgcaagcgcgtccgcgatgccctctacatggctgctctaaacgctgtccgccgcgcgcacccattcaaggctttctacgcaaagctgcgccaagccggaaaaccggccaagatcgccctaattgccgtcgctagaaagctcctgaccatcctcaacgctatgctccgcgacaggaaagaatatacgatcacccaagcgacataacagttg

SEQ ID NO: 3979 - DNA, 1516 bp, unidentified
  source 1..1516: mol_type = unassigned DNA; note = element_5f9d38c
  misc_feature 1..2: note = core
  misc_feature 3..250: note = LE
  misc_feature 251..1495: note = CDS
  misc_feature 1496..1516: note = RE
  misc_feature 48..246: note = bridgeRNA
ctaatgagagctgccggggcctgccgtgaggcaggatcgggtctggcagccgctggcgggtgagcactcctctgacccggacttcgagtccttaagtcagatcgtgcccctgccggtggtccgggagggctgatcgctgatgggatgtcgtgcccgctgctctcgggcggcgtgagcacttgttcattaggttgctgagatccttcctgctggctgtcgagaggagttcgtcgagcgaaaggagtgggtcgtgcgggtgcttttcgtcggggacgactgggccgaggaacaccatgacgtggaggtgatcgaccaggccgggcaggtgttggcccgggcccggctgcaggagggtgtggccgggatgagccggctgcacgcgctgatcggtcagttcaccgcggatcttgtcgatgacgcgaccggcgagccggtggagccggtagtgatggtcgggatcgagaccgaccggggaccgtgggtgcaggccttgatcgctgccgggtatcgggtgtacccgatcaacccgttgcaggtggcccgctaccggcagcggttcgtggtctcgggtgccaagagcgacccgcaggacgcgcacgtgctggccgacatggtccgcaccgacgcccaccagctgcggcccgcggccggtgacagcgacgtggccgaggccgtcaaagtcgtctcccgtgctcacaagaacctgatctgggaacggacccgacacacccaacggctgcgtaacgcgttgcgggagttcttccctgccgcgttgcaggcatacccggacctggacgccccggacgccttggagttgctggccaaggcccccgacccgcgatccgcggcccggctgacctgcccccagatcgaggccgccctcaaacgcgcccaccgccgtaaccgcgccgccaaggccgtcgagatccaggccgcgctacgcagcccccagttgggtcgcaccccgctggtcaccggcgcatacgccacggccgtccgagctcaggtagcgatcctgaccgtgttggtcgagcaggtcacggccatggagacggcggtgaccgcccattttggtcaacacccggacgttgacatctacctgagccaacccggcatgggcagcgtgttgggcgcccgggtgctggccgagttcggcgacgacccacaccggtacgccgacgcccgagcccgcaagaactacgccggaacctccccaatcacccgccaatcggggaagaagcgtctggtgatggcccggtacatccacaacgaccggctcctggacacagtgacccgccaagcgttctgcgcgctgcaggcatcccctggagcgcgcgcctattacgacaagcaacgcgcccgcgacgtcgggcaccacgccgccctgcgccaactcgccaaccgcctcaccggcatcctgcacggctgcctgaagaccggcaccccctacgacgagaacaccgcctggaaccacaccacccacgccgccgcttgacaccgaagcaccatgggatgt

SEQ ID NO: 3980 - DNA, 1285 bp, unidentified
  source 1..1285: mol_type = unassigned DNA; note = element_5fb0e5d
  misc_feature 1..2: note = core
  misc_feature 3..283: note = LE
  misc_feature 284..1273: note = CDS
  misc_feature 1274..1285: note = RE
  misc_feature 18..249: note = bridgeRNA
ctgacttgttgaatgacagccggatgccgcgaggctcttgatcctcgtagcgtccgagggtgccggatggcactggctcgcactgctccttgccgcccgatgggctggctcattgatagcgtgccaccgccgtccggcaccctcgcggtgtggttcgacagaggcatgcaagtagaccgacttgaagtcaggatgcccaccgcgcacgccccatcccaacgagcgcgaggacggcctgtgatcctgatcggcatcgatccgcataaatccactgcacactgcagtggcaatcgacagttccggcaacaagattgcccaccgtcgattcccggtcaatgccggcactttcggccaactgatggcctggtcccaacgctggcccgagcgtcgattcgccgtagagggcgctcgcggtttgggccgcggtatcgctcagcagctcgctgctgacggtgagcatgtcgtcgacgtaccctccacgctctccgcacgggcgcggatgctggccaccggtgggggccgaaagaccgacgccgcagacgcacttcatgtcgcgcacgtcgcgttgttccggccagatctgcgccaggtgcgctccgaagaccaggccacgatcctgcggttgttgaccgaacgccgcgacgacctcgtcaatgagcgcacccggctgctcaatcggctccacgtcctgctgcgcgatctggttcccggaggcgccccgatcgacctctccgccgaaaaggccgcccaacttcttcgacgggtccggccagtcaccgccactgactgttgccggcgagacctcgcccgagacctccttgccgacctgcgccgcctcgatcgcgccatcaaagacaacgaacatcagatgcgagatgccgtcgacgccagcagaaccacgcttaccaacctgcccggggtgggcatcgtcctcgctgcgaaaatcctcggccatgtcggcaacatcgaccggtttcctaccgagcatcacttcgccagctacaccggcagcgcaccgttggaagcctccagcggcaacaacacccggcatcgactgaacactggcggtaaccgatccctcaactgcgtgctccacatcatcgcgacgtgccaaatccgagacatcggacccgggcaggactactaccggcgcaaggtctccgaaggaaagacgcccgctgaagctcgccgagccctcaagcgcaggctctcgaacgtcatctaccgcacaatgagacgcgaccaacggaacctccttcccgaggccgcttgacacacagaggcg

SEQ ID NO: 3981 - DNA, 1230 bp, unidentified
  source 1..1230: mol_type = unassigned DNA; note = element_5fb309a
  misc_feature 1..2: note = core
  misc_feature 3..210: note = LE
  misc_feature 211..1227: note = CDS
  misc_feature 1228..1230: note = RE
  misc_feature 39..204: note = bridgeRNA
gtcgtacatttgtacgttggttaataattcgataatttatacctttgatataggcatggacaaagaccgattaaggggtggttcaagaaaccgggtttaacgttcagtccccatgcctttacatctgaaatctggatagttcgttgggacttatgatcccgtgttggcgacgataggttacaggatgtattcaaccaaattaaagacgttatgacttacattggaattgacatcagcaaggacagcttcgtagctgcttttccgacagtatcgggttgtcagacccaaacttaccctaataccgtaaaaggtatcaggaagttcatcggctcgctttccgtaacagaacatcattgtgtgaaggaagccaccggcaattacggctttctgcttctttatctgcttgacaagcaaggaatagcttccagtatggtaaatcccaaacaaatcaagcacttctcacgcatgatgatgaccgtcaccaagaccgaccccaaagatgcctgtatgattgccatgtacggggagaaaatgaatcctcccgtttacaagatgccctctgaagccgtcatgctgctgaagcagaagaaaacgattatcaggcagttgaagaaacagcttacggcgagcaagaacctgaaaagctctctcgtagtgcttccgttccaagacaagaacgggatgaaagccttggataagactatttcttttttggcaagccaaattgagtctttggaatctgaacttgcagacttggcttcatctgagtttgacaggcaggttaaactactcacatccatcaaagggattggcattactttggctacagccttgattgtcgctaccggaggattctcctatttcaacaatgcaaagcaggtttcccgttttatcgggatatgcccgacttaccagcagtccggaacatccgtacacatcaaaggtgggattaaccgaaacagggatgcgagcctgcgttctttgttttatgtcgcctcgtggtctgctttacgtggaaacacaacctgtaaagaatgctacgcacggttgaaagtcaacgggaagccttccaaagtggctcttatcgctgttgctaacaaactcgtcagacaagcatttgccgtaattaaatcagatacaccttatgtggatggattcgtttctacccatcaaacaaataacctatggtggaatttttgctctcattttatttgcttattaatatagttc

SEQ ID NO: 3982 - DNA, 1450 bp, unidentified
  source 1..1450: mol_type = unassigned DNA; note = element_5fbacae
  misc_feature 1..2: note = core
  misc_feature 3..131: note = LE
  misc_feature 132..1172: note = CDS
  misc_feature 1173..1450: note = RE
  misc_feature 1199..1405: note = bridgeRNA
agatggggtattcggctcgagcctcatcttccaatgccggtgggtctgtagagaggaggtgctgcgcttcgagcgatgataaaacgtggtcttgtattgcagcagccacaagcatcggaaaggagcgcagcatgaaacactatagcggcctcgacgtttcggtgaaagagacgtccatttgcatcgttgatgaaaccggcaggatttgccgcgagatcaaagcggtcagccatcccgacgacctggtggcggtgttgcgagatcctgcctggaatctggaaaggatcggtcttgaggccggccccctatcgcaatggctgttcgaaggccttgccgtggccgggctaccggtaatctgcatcgagacccgccataccaaggcatttctcaaggcacagccgaacaagagcgatcgcaacgacgcccgtggcatcgctcagatgatgcgcgtcaatctgttccggccggtgcatgtgaagacgctgatcagccagaagcgccgcgcgttgctgacggctcgcaaattgctgcaggggaaggcaatcgccattgaaaacgacatccgcggcctgttgcgcaattttggactgaaggtcggtattgtcggtgcgatcaagttcgaggagcggatccgggaactggtggatgacatctccgatatcggggaaatcatggagccgttgctggcggcaagacagaagctgcgtgacgaattctcccggctgcacaaaaaggttctggatatcgcccgtaacgaccttgaatgccgtaggctgatgacgatccccggtgtcggccccgttgtttcgctcgctttcaccagcacgatcgacattcctcaacgatttagaaattcgaaagtggtcggcgctgtactgggattgacgccgaaactgaacgagtcgggcgaaagcaaacgcatcgggcacatctcctgttgcggggacgcaatgatgcgggtgctgctccatgaagccgcgcagagcttgttgtcagtcaccaggaaatggtcgtggctgaaggcctgggcgatgaacgtggccaagaggcgagggcgccaaaaggccattaccgcattggcgcggcgcctggcagtgatcatgcaccgcatgtggagcgatggcaccgagttccgctggtcgaaggagggattgccaaccgtgcacgcataacccgatccttgatctcgacacgataacagtttccgcttcgtgcggagaagaagtccctcgcgggacgacggatgaagtaagttcggccctccccttgtaccggccgccgcaggcaggcggtccaggacgtcggtgcagattgttctgcttcattcttctgaccccatggtgggagggcccgcaaggccgatcccggagagaagcaagaccccgcgatggatttccttatgaaggagaaggagctcgacgacgcttgagctccacccgccgaatagaga

SEQ ID NO: 3983 - DNA, 1110 bp, unidentified
  source 1..1110: mol_type = unassigned DNA; note = element_5fbc5b9
  misc_feature 1..2: note = core
  misc_feature 3..161: note = LE
  misc_feature 162..1100: note = CDS
  misc_feature 1101..1110: note = RE
  misc_feature 1..163: note = bridgeRNA
cctgtgtagttcaagtgtgcgaagatggtcgcgggcgggagaccgttcggtccctggtcctgagaccgtgatccggcctggtccccgcccgctttagtgcacccacctgaacagttgcacgaggccgttgccgcggacctcgcatcacagggacaggctcgatgaccatacaccctgatgtggtcgggatcgatgtgtccaagcatcatctcgacgtattcgacgcctcgctggggcgtggcgaacgcttgaccaacaccgctgacgccatcgccgttctggcggggcggtgggcgggatctggccgcaccgtggtgttcgaggccaccggtcactacgaccgagccttgcgcgaaggcctcgaggcggcggacgtggcctatgcccgggtcaatcccaccaaggcgcgcgacttcgcccgcgcggccggcttcctggccaagaccgatgcggttgacgcccgcatgctggcggccatgggcgctgcgctgcgccccgatcgcgccgcgccgggcgacccggcccgcgagcgcctggcccggttgcataaacgccgcgaccaactggtggccatgcgccagcaggaacggacccgttgggccgaggtcgaggccgaggacgacacgcttggccaagcgctggacgctcacctggtctggctcgacgccgccgtcgctcgcctggacagggacatcgccaacttcgtcgccgagcagccggcgctcgatcgagccagccgcctggtccgctcgatcccaggcgtgggggtcgtcaccgccgtcaccttgctggccctcgtgcccgaactgggcgcgcgctcgcccaaggccctggccgcgctcgctggcctggccccgttcaatcacgactccggaaagttgcgcggaacccgagccatacgcggcggccgaaagcgcgtccgcgacgccctctacatggccgccgtctccgcctcgcggtccaacagccgcttcaaggacaactacaaacgcctgcgtgacgccggaaagccccccaagctggccttcatagccatcgcccgaaagctgctgatcaccgcaaacgccgtcctgcgagatcagcagcccttccgagcgtgagacacagttg

SEQ ID NO: 3984 - DNA, 1478 bp, unidentified
  source 1..1478: mol_type = unassigned DNA; note = element_5fc25b0
  misc_feature 1..2: note = core
  misc_feature 3..181: note = LE
  misc_feature 182..1210: note = CDS
  misc_feature 1211..1478: note = RE
  misc_feature 1227..1473: note = bridgeRNA
agatgtggtaacgggccggccgccttgtcctgccagccgctcgctcgctacggcgctatgtggtggcgcgctcgctcgcggctggcggccttggcggcaaggtggtcgtccctcaatctgatggtgtctacgattcggagtcggcattgggcctgctccaaagcatcatcgagggacgaccatgaactactatgcaggaatcgacgtgtcattggaatgctcgagcgtggcgatcgtcgacgcgaccggcaagatcattcgtgaagggaaggtggcgagcgatccggtggcgctgatcgcgtggtttcgtgtgtttgggctgaacgtgcttcggatcgggctggaggctggaccgctgtcgcagtggctttacgcggcgatgaaggaagcgaatcttgcggtcgagttgttggagacgcggcacgtgcgcaatgccttcaagacaatggcggtgaagacggaccgcaaggacgcgcgcgggatcgccgagctggtgcgggtcggctggttccgcccagtgcattgcaagtcgatgaacgcgcaggagacgcgcgcgatgctgaccgcgcgcacgctggtgcaatcgaagcttcacgacatcgaggcgagcctgcgtggcattctgcgcggcttcgggctgaaggtgggaaagatcacgtcgaaccgctttgcgcggcggatcaacgagctggtggtcgagcatccgaccttgcaaatcatcgccgaggcgctgctggcggcgcatgaagtgctgttgcgccagttcaaaggcttcgagaagcgggtacggatcatggcccgcgaggacgcaaaagctcggctgctgatgacggcgacgggcgtcggggcgatcgtgtcgctcacctgtagctccggcatcgatgaccccggacggttcaagaagtcgaagacggtcggggcgcattacgggatggcgccgaagaagtatcagtccggcgaaaccgattacaccggcaggatctcgaagaccggcgacaagagtgtgcgcacggcgctctaccaggccgcgcatatcatcctgaccaagccggtcaagggttcggtgctcaagagctgggccatgcggctcgccaagcgcatcggcatgaagaaggcgaaggtggcgctcgcccgcaagcttgcggtgatcatgcaccgcatgctggtcgacggaaagccgttcaatcctgccgccggcgcggcggcctaaagaggagagatcgagagttttcgggcgggtcacgacaccagccttcccgaagcgaagtcccctcgccgggacgatggatcaggtcagaccgctgcccaccaagtggcactacgaccacgcacccgtagattggtcggcctgtcctcttcagaaccccatcaggtggcggcctcggccaactcggccttgcgccgaccccgtacagaagcgagtccccggcgagtggatggagcaaattggggcttgaccatttgtggcccgttacaga

SEQ ID NO: 3985 - DNA, 1391 bp, unidentified
  source 1..1391: mol_type = unassigned DNA; note = element_5fc713e
  misc_feature 1: note = core
  misc_feature 2..93: note = LE
  misc_feature 94..1137: note = CDS
  misc_feature 1138..1391: note = RE
  misc_feature 1163..1383: note = bridgeRNA
caatgggatggactcctcctcatccacaattcggcatccaggtgccagactagttttggacccactagtcggggaatgaaggaggagtccaggatgaagattagaagagttggcgtcgatttggcaaaaaacgtgtttcaggtacacggcgtagaccagcatgagcagcccgtctggcagcgttccgtgaagcgtgcacagtggctgggagagattcagaagcatgtccctcaaacggcggagatcggtatggaagcctgcgccggcgctcaccactgggcacgcgcgctcgagtcccggggctaccgtgtgaagctgatcgcgccgcagtttgtgaaaccgtatgtgaagagcaacaagaccgaccgcaatgacgcggaggcgatctgcgaggcaatgagccgtccctcgatgcgcttcgtggctatcaagagcgttgagcagcaggatatccaggccgtgcaccgtgtccggtcggagttggtcagccagcgcacgggcaaggcgaaccagatacggggcctggtgggtgagtacggtctggtggccccggttcgcctgggccagctacgcatggcggtgcccctttggctggaagatgcagagaacggactgacgcctcgcttccgccgcgtgctggccggtttatggcgcgaccttacggcgctggatgagcgtgtgggagagctggaccaggagctcaaagagctggctgaggagcatcctgcagcgcgtcggctacaacagttgcggggtgtggggccggtgattgccacggcgctggtcgctgccctgggcgatggcagcggattccggaagggccgcgactttgcggtctcgctgggcctgacgcccagacagcacagtagcggcggcaaggcccacctgatgggcatcagtaaacgcggcgatagctacctgcgccagctgctggtgcatggcgcgcgtgctgcggtccgcacagccaagctccatgatgacgcgctcagctgctggatacagaatctgaatgcacgcaaacacaccaacgtcgtggtggtcgccctggcgaacaagacagctcgcatggcctgggcaatgatccacaacgacgtggactatgagccccagttagcggcgagcgcagcaactagctaacgtagagaagcaaaggaggcaccgatacctcagcgattgcacagtcactggatgatggcacacaggtcgaaccgacgctggcaaaacccgtttcccgcggagtgttacgaactcgcgttcccgttggggagtcagcgtgcggatagcccattaaggtcccgtgcagttacgcacgattgagagaccggatacacgtgagcagtcgaaccttcgggtcacagccagagacttgcaaacgaggaggagtccataca

SEQ ID NO: 3986 - DNA, 1372 bp, unidentified
  source 1..1372: mol_type = unassigned DNA; note = element_5fce928
  misc_feature 1: note = core
  misc_feature 2..74: note = LE
  misc_feature 75..1100: note = CDS
  misc_feature 1101..1372: note = RE
  misc_feature 1134..1369: note = bridgeRNA
tactgagatggacccgacgcctcccttcgggggacactaacggactcaaccggacgtctggatggaggttcatcatggaaatcgatattctcggcattgatctcgccaagcaggtattccaactccacggggccgatcgtcgcggaagagcagtgcaccgggcgaaggtatcgcgtgggtcgctgttcgaagcagtgcgcaccctcgcgcccggagtggtcgtgatggaggcgtgcggcaccgctcaccactgggcacgacgtttccagtcgctgggcatcgaggtccgcctgatcagcccgcagtacgtgacgccgttcgtcaagaccaacaagaacgatcgcaacgatgcagaggcgattgtggaagccgcgagccggcctaccatgcgctttgtgaccgtcaaatcggtcgagcagcaggatatcctggccgcgcaccgcatgcgcgccatcctgattcgccaccgtaccgcgctgatcaaccagatgcgcggtctgctcggagagcgcggcttcacgatttcccggtcaccggaagccttcaagtgtgcgatcccggaactgctgcgcacggctggcgacgaactaaccgccttctgccagacgctgctgtccgaactgctgcagcacctgactgcgattgaagatcgcattcatctcatcgacacgtcgatccagacgttcatgaagcattccacgttatgcaagaagattgccgccgtcccgggcatcggccccattaccgccacggcaattgtcggcgccgtcggcaatgccacgcagttccggaatggccggcatcttgcagcgtggctcggtcttgtgccacgtcagtattcctccggcggtaaatcacgattgcaggggatcagccggcgcggggacacctacctgcgcacgctgttgatccacggcgcccgcgcagtcctgagatatgtgaagggcaagaccgatccacatagcgtctggctacaacagatgattgcccgacgcgggcacaactgcaccgcggtcgcgctggccaacaagaacgcgcgaatcatccaggcgctgctcagcggcgaggccagttacgttgcaccaggcactacggcataggcaaacagttctcaatggagagtaccaccagcgtaggtttgcgaagcttctcaaaagcgatgacgaaattggttgaaccagcatcctgaagcctgtttttcgtgccggctgctcttttaggcaagccgcgattttgctaaggacagggtgcgcggatctcatcaaggctgcgggcgtgcttcggctatcgtccaactgcaagccggatacatgcatgcagaccgtttcgacatcacgaacaagaagcttgcaaaaggcgccgggtccataca

SEQ ID NO: 3987 - DNA, 1544 bp, unidentified
  source 1..1544: mol_type = unassigned DNA; note = element_5fe0f45
  misc_feature 1..4: note = core
  misc_feature 5..268: note = LE
  misc_feature 269..1534: note = CDS
  misc_feature 1535..1544: note = RE
ctcactggtgcaccatccgtgtttcagtgattccagatggattgctgatgcgcccgaggtgccgccaggtcatcgccctgctcgcttgacacggttgatgtccagcatgagatctgcgagatctggcggttgcccgggacgtgcggaccgtcgacagggctgagcgcctccgagcgccgatcagtgagcgaaccggcagcaacgtcccggaaccatgagcactataagcgggcgcctccccactgggactagcagcgaggaggctgacgtgaagtctgccagcactaccccgaacacccaactgcccgaaacgccgccgaacgacgtgaccggaggtctggactgggcccgtgatgatcacgcggtcgcggtcgtcgacgcccgcggccgcgaggtggtccggcacagcgtcgagcacaccgcggccggactggtcgagctgatcgacgtgctgcgtcgcgccggctgccgggaggtggcgatcgaacgacccgacggccccgtcgtggacgctctgctcggcgccgggttgacggtggtggtgatcagcccgaaccaggtcaagaacctgcgcggccgctacggctcggccggcaacaaggacgaccggttcgacgccttcgtcctcgccgacacgctgcgcaccgaccgggcccggttgcgtgccctggtcccggacaccccggccaccgtcgcactgcgccgcacctgccgcgcccgtcgagatctcgtcgcccaccgcgtcggcgtcgccaaccaactgcgcgcacacctgcgggcggtgtttcccggcgctgtcggcctgttcgccgacatcgactccccgatcatcctggcgttcttgacccgcttcaccacccaggagcaagccgactggctcagccccgcccgcttcggcgcgtggctgagcaagcagggctactccggcaaggtcgaccccgccgtgctgcaccaacgactgctcgccgcgccccgcggcgccgtcggccccgaagccaccgccaacgcgcctactacccgcgctctcgtcgccgtcctggtcaccctgctcgcccagatcaagaccctcgctgccgagatcgacacccagctcgacgcgcacgccgacgcgcacatcttcaccagcctgccccgggccggccgcgtccgcgccgcacggctgctcgccgagatcggcgactgccgcgcccgctttcccacccacgaatcgctgacctgcctggcaggcgtcgcaccctccaccagacaatccggcaaaatccgcgccgtcagcttccgctgggcctgcgacaaacaactgcgagacgccgcctgcgacttcgccggcgactcccgccgcgccaacccctgggcccaagacctctaccagcgagcccgcaacagaggccacgaccacccccacgccgtccgcatcctcgcccgcgcctggctcgacgtcatatggcactgctggcaagccggcgaagcctacgaccccgcccgccacggcgcgctccaacgcctgctcaaccaagatcaaatcgcggcagcttgacacagggctt

SEQ ID NO: 3988 - DNA, 1348 bp, unidentified
  source 1..1348: mol_type = unassigned DNA; note = element_5fe44e7
  misc_feature 1..2: note = core
  misc_feature 3..85: note = LE
  misc_feature 86..1123: note = CDS
  misc_feature 1124..1348: note = RE
  misc_feature 1147..1343: note = bridgeRNA
tgatgtgatggacgacccctttttcagcggcaaatagtgccctctttctttccgatgcactgaatttttcgggagagaacctatcatgaatacgatcaaagtcgttggcattgacctcgccaaaaacgtttttcaagtctgtgtctggatggcggacggttctgtcgcctcgaaccgaaaaatctcacggcaaaaattgcttgataccgtgcgctcttttccgcccggcactgtcattgcgatggaagcttgtgcaacatctcactactgggggcgaacgctgcaagcgatgggatataccgtcaggttagtcccgactcaacacgtcaaggccttcagccatcatcaaaaaaacgctgccaatgatgcgctggctatttgtgaaactgcctgtcgtccaggtcttcattttgttcccgtcaagaccgtggaacagcaagatatcaaggcactgcgtagtgcccggcaactcatggtggaacagcgtaccgcacttgctaaccaaatgcgggcttttctagctgaatcgggactgattgtgcctgccggcattcaaaaacttcaacagcatctcgctgagattctggaagatggcagcactaacctgtcttatgtactgcgtcgtttattgcataccttatgggaagagatgcagaatttgaacaccggcattcatgacatggataacgaaatagcggcactttcccgtcagcaaccgggttatgagcatctgctcacgatccccggcgttggtcctcttatcgcggccgccttcgtgagtgacgtcagggcatcccaatttgccaatggccgacaactgtctgcctggtgtggactggttccccggcaacacagttcaggaggaaaaaaccgtctgtcttccctgagcaaaaatggccatcgtcatctgcgaacgttaatcattcacggtgcccgtgccgtgatgcgttgtgttcaaagacgggatgattatctgggagagtggctgagaaaactgattgaccggtgcgggttcatgaaagccacggtggctttagccaacaaactgacccggattatttggcgtgttctgcgggataacgtggattttaatatgaaaaaagcttttctgtccgttaattgagtcacctaaaacgggcattttatcgagtttgcaaacactgatgagaaaacggctcccgtccctgccatagcctgatattgaccaaggtagtgatataccggtgtagtgataaggaaacagggtgcggatgacatcatggcgcggacaaatgagtccataatgacgccggatatatggtcgcaaaccgtatcaatttagtgcttgcacaaccggggcgtccatata

SEQ ID NO: 3989 - DNA, 1414 bp, unidentified
  source 1..1414: mol_type = unassigned DNA; note = element_5fe7a54
  misc_feature 1..2: note = core
  misc_feature 3..84: note = LE
  misc_feature 85..1110: note = CDS
  misc_feature 1111..1414: note = RE
  misc_feature 1132..1400: note = bridgeRNA
tgatgtggtggacggtgcccgctcccggcaacgaactgccttagggtggtcgttgtcaacgaatcacatcagggagccatcgacatgcaagtcaccacgatcggtttggatatcgccaagaacgtgttccaaattcacgcgatagatagtgacgacaaagtcgtcgtccgaaagcagcttcggcgctgccaagtcttacggttttttcaggaactgccgcggtgccttgttgggttagaggcctgtgccacatcgcactattgggccagagaactcaccaagctcggtcatgaagtgcgactgatgcctgcgaaggacgtaaaggcctacgtcaagcgcaacaagaatgatgcggccgacgccgaagcgatttgtgaggcggtgcgccgcccgaccatgcgtttcgttcaggtgaagtctgccgagcaacaagctcagctgatgcaacatcgcgcccgcgatcttctgatgcaccagcgcacgcagctgatcaatgccctgcgatcccacttggctgagcttggcattacagccccgcaaggacgcgaagggatcaaagagctgctggcgatcatcgcagatgatgccaatacacacttgccgaacgatgcccgggcaagcctgatggtgctggcggcgcagcttcaggccatgcagacgacgatcggggcgattgagaagcggatcaccgtgcagcatcgcgccaccaaagagagtaagcgacttcagaccattcctgggatcggggttattggtgcgtctgcaatcgccgccacggtgacgaatcccaagattttccgatccgggcgcgactttgctgcctggattgggctggtaccgcgacaaatgtcgaccggggggaaaccgaaactcgggcctatatccaaacagggcgaccgatacctgcgacgcatcctcgtggtcggagcggtttctgtcctgcgccgggccaagcacaacccgcagaaatttccgtgggtcacacggcttctggcacggcgaccgttcaaggttgtcgcggttgcgcttgccaacaaaatggcccgcatcgcctgggcgctgatgatcagcggcaagacctgccgatctgcttggtttgccgcagcgtgagcgggagcttgccgaggggagtatgagattgcgtgagtgcattgaggaactgcaagggtgatgacgacattgatgcgaaacggtcgagaccgtcgattgggaagacccgcttatgggccacgcgaggcaagaacgcgtgaaattggttgggacccgatccgcggattacatcagggccagcggccactgcggctgcatcgcgatgaggcaagcctccgcgcgaaaacaggccgtatacatggctgcacccgaacgcttcgcaaaaagtcggatttgctcttgcaacgcgggcaccgtccataca

SEQ ID NO: 3990 - DNA, 1356 bp, unidentified
  source 1..1356: mol_type = unassigned DNA; note = element_5ff063d
  misc_feature 1..2: note = core
  misc_feature 3..323: note = LE
  misc_feature 324..1100: note = CDS
  misc_feature 1101..1356: note = RE
  misc_feature 1076..1346: note = bridgeRNA
tgatgatgtagacgcctgccgctggctcagatgtgccaaggtaggttttgtttcaatgctattttgaggcgtcgatgtcagaagttcatacaattggtttggatttggcgaaatcggtatttcatgctcatggggcagactcatcaggaggagttgttttccgcaggcgcttgcggcgtagccaggttttgagtttctttgcggcccaaccaaagtgcttagttgcgatgtaggcctgtggcagtgcccactattggggacgcgagcttacccgtttgggacacgaggttcggttgataccgcccatttacgtgaaaccattcgtgaagcgtcagaagaacgatgttgcagatgcggaagcgatttgtgaagccgcgacccgcccgacgatgcgatttgttgctgtcaagagtgaagagcgtcagggcattgccgtcatattacggacgcgcgagctattgatccggcaacgtacacagatcatcaatgcgctgcggggtcatctggcggaatttggggtcatcgtccctaaaggcgtgagcaacactggtaagttgatggatcacatctgcgacccggcaatggctcttcccgaaacggcccgtgatgctttgagccatttgaccgatagcctgtcccggttggatgatcacattcagggtctggatcgcgaaatcacgcgtcgtgcgaaggcgagcgggacggcgaggcgactgatgacaattcccgggatcggacctttgattgcagttgccatagtagccttggcggctccccctgcaaccttccggcgtggtcgagattttgcagcttggctcggtcttacgccaaagcagaattcgacaggaggaaaacagcgattgggagccacgacaaagatgggagagcgctcattgcgacgattgttgattattggcgcaaatagtgtggtcagctggcgagcaaagaagggggcaatgtcagggtcgtggctcgaacgtatgctcgctcgcaagcctgcgatgctggttcgggtcgctctggccaacaagatggcacgtattgtctgggcggtgatgtcaagcggtcagacatatagggctccggctgctcaagcttaaaacgggagcagctacggggacggcggcgcaagagaggtctttagaagtttggcgtaacgatcttgggatgaggtcaggaaaaccagtttgcgacacagtgcctttgagcacgtgggcttgattttggacctgacactcgaacaccatacgggcccgcggcaagtcaaaagccgcatcaaaggccggacacatgtcagcacccgaccgtgcgatcaaataaccaaaaaaatcctcttgcaatcagggcgtctacaca

SEQ ID NO: 3991 - DNA, 1391 bp, unidentified
  source 1..1391: mol_type = unassigned DNA; note = element_5ffc09a
  misc_feature 1..2: note = core
  misc_feature 3..82: note = LE
  misc_feature 83..1114: note = CDS
  misc_feature 1115..1391: note = RE
  misc_feature 1153..1379: note = bridgeRNA
tgatgctgtggacggctcctccaccggcatcgcgatgtgccaaaattgcggtgttttaggaaccgctagagaggagccatccatgaatgagattagcataattggtctggatattgcgaagaacgtctttcaggtgcacggcattgattgttcgggggaaccggttgtccgccgtcagttgaagcgcgggcgggtgttggctttcttcggcaagctgccgcccattcttgttggcatggaagcttgtgcgacctcccaccactgggcccgggagatcgagaagctgggtcatcaggtgcggatgatgccaccgcgttatgtgaagccttatctcaaacgcaacaagaacgatgccgctgatgccgaagccatctgcgaggcggtgcagcgaccgaccatgcgctttgtgccgatcaaaacgcctgtgcaacaatcagtgttaatgttgcaccggacccgtcagttatttgttcatcaacgcacgaccctgatcaatgcaatccgggcacatatggcagagtttggcattgttgccggtgttggccgcaatggcgttgaggcgctgctgaagattgttgctgaggattgcgatgagcgcatcccaccggcagcacgcgagtgcctgttggcattggccacccagcttgagctggtgaagcgccaaatccttgaagccgaccggcgggtgcttgcttggcaccgggccagcaaggtgagcaagcggcttgaagcaattccgggcgtcggcccactggtcgccacggcactcgttgccagcatccctgatccgcacgccttcaggtccggccgggacttgagcgcctggatcgggctggtgcctaaacagaactcaaccggtggcaaggagcggttgggcaacatctccaaggcaggcaatcgctatctacgcaagttgcttgtcattggcgctttgtcggtgatcaggcgagccaagatattgggctatacaagacacccttggctggtcaggcttatggaacggcgatcaacgatgattgccgccatcgcgctcgccaacaaaatagcccgcatggcctgggccatgatggcacgcaacgagacctatagaacgccgctggctcagccggcatagaaagaacaacgatcaggcgggccccagctcccgcacaacgaggttggaaagggcaataattcgataacgcacccacgccagtcggcccaaagatagggacaacccacaagtgccattgcgcctaaagagcgcgtgctagtgaccgggacccaatctgcggagagcattatggccagcggccacgtgtagtgccgcacaaacaggccgaacacatggcagctccgaccagcagggcgagatcagctaaaacccttgacagcaaggggccgtccacaca

SEQ ID NO: 3992 - DNA, 1353 bp, unidentified
  source 1..1353: mol_type = unassigned DNA; note = element_5fffe37
  misc_feature 1..5: note = core
  misc_feature 6..241: note = LE
  misc_feature 242..1306: note = CDS
  misc_feature 1307..1353: note = RE
  misc_feature 32..227: note = bridgeRNA
cttttatttttatagagaattagttaaaggttgattacattgttgttatacaaaatgtaattgacttgtgcgtgaggcatgttggggctagataagcaaatcagctatatcgtaaaaaaggactttcccacgcactttctattctcatgagtttgaacagtacttaaggcggacaagatccagcttgaataaaacaaaaggaaagacgaaggaggattagtcaataactaaaaacttctttatggaaaccatcaaacaatgcgtaggtatcgatatagcaaaagatagcttcacagcttgtatcgcttctatttcggttcaatcagagattatttacagtgaaatcaggactttcacaaatgaaaagccagggtttaatcaattatcacgttgggttagaaaacaacgagagaagaatacaccacttgtctttttaatggaggccacgggtgtctattacgaacaattggcgcatcaccttgtttcaatcaaacaaaccgttcatgttgttcttcctaatacgagcaaacatttctttgcaagtctaaatattaagaccaaaacggatgaagttgatgccaaaatattaagtcgatttggtgtcgaacgaaaacataagagctgggaacctccacgtaagtcaatactccatttgaggaatttgacacgttattacgttcaattacaggagcaaaagactgcactaggtaatattaagcacagtaaagaagcctcacacgatattcaaaacctcatactacgaagcaatcgcacactgatacgacaaatcgacaaacaaatcgatcagatcaaagcgcaaatcgaactgttgataaccaaagatgccgagcttaaacgaaaagttgatttcatcttaaccattaaaggtgttggtctaattacggtggctaccattatagctgaaacactaggatttgagcacgtcaaaaatgttaagcagttggtgagctatgccggttacgacgttgtacaaagagaatcgggaacctcaataaagggaaagactagaatatctaaaaaaggaaaccgatacatcagaaatagtctttacttcccagctatggtggcttgtaggtataatgaaaccctaaaagcaaactatatcagaatcatacaaaaaaagccttctaaaatgatcggacaagtagcaatacagcgtaaattactcatcttaatatatactctatggaagaaccaaacagtttatcaaaccaattataaaaaggtagtcccgccaaaaagcgagactacacaagatagatctccccaaggagaacttctttgaattacaaaaatacttttttgtcttttacttggttttaataacagtac

SEQ ID NO: 3993 - DNA, 1359 bp, unidentified
  source 1..1359: mol_type = unassigned DNA; note = element_60068f7
  misc_feature 1..3: note = core
  misc_feature 4..79: note = LE
  misc_feature 80..1102: note = CDS
  misc_feature 1103..1359: note = RE
  misc_feature 1081..1346: note = bridgeRNA
tgatggggtggatggcccccttgcggcatcgacgtgccaaactggtgtttcgaagaatcaccaggaacgggagccatccatgagcgagattacgacaatcggcctagatctagccaagcatgtttttcaggttcacggcattgatgcgcagggtacgacagtactgcgtaagcgactgcggcgcgggcaagtgctggcgttcttcagccacattccgcgctgtgtggtcgggttggaagcatgtgcgacgggccattactgggcgcgcgagctgcgtgcgcttggacacgaggtgcggctgatgccggcgcaatacgtgaaggcgtacatcaagcgcaataagcacgatgccgctgatgccgaagcgatttgcgaggctgttgggcgcccgacgatgcgatttgtgccagtgaagacggcagagcaacaggcaacggcgctgctgcatcgcggccgcgagcgactggtgcgtcagcgtacgatgctggtgaacgcgttgcgggctcatctggcggagttcggaatcgtggcggcgcggggcttgcgcaatgttggccagctgatcgccattgttcgcgacgatgccgacatccgcctgcctcctgtggcgcagcaggtactgcaggtgctggcgtctcagctcgagcagatcgaggcggcggttgcagcactggagcggcaactcctgacgtggcacaaaacgaaccccgtgagtcagcggctggccagcattccggggattggaccgatcatcgccacagccattgccacgacggtggcggatgcgaatgagttccgctcgggccgcgagttcgccgcctggttgggcttggtgccgcggcagaattcaaccggtggaaaaatccggctgggcggcatcaccaagcgcggcaaccgttatttgcgtcggttgctgatcaatggggcaagcgccaatctgctgcgatcgaaagcgaccaaagccgatccgtgggtgatcggtttgcgtcggcggcggccgccgctggtcgtcgccgtggcgctggcgaacaagacggcgcgcatcgcctgggcggtgatgctgcgcgagaaggaataccagcccagggctatggccgcttagtcgcccacggcactggggctggagcttgcgagagagcaatgacgcgtgatggcacagtcggtcgatccgacgcaaccgagagaagcctgccggttcatcgggacatcgatcccgctcgaatgatgaggcctcggttcgcggactccatcagggccagcagtccatccggactgcaccaacaggccggacacatgactgcaagcgacttctgtgcggcacgctacattttctcttgccaggcgggggccatccacaca

SEQ ID NO: 3994 - DNA, 1425 bp, unidentified
  source 1..1425: mol_type = unassigned DNA; note = element_600a6e5
  misc_feature 1: note = core
  misc_feature 2..70: note = LE
  misc_feature 71..1111: note = CDS
  misc_feature 1112..1425: note = RE
  misc_feature 1202..1419: note = bridgeRNA
taatgagatggtccgccgtccagatcagccctgaagtgggatgatcttgggccacacggaggatcatcgcatgaacgctgctgttatcgcttcgatcggtatcgacctgggcaagactacctttcacctggtcgctttagattgtcacgcaggagttacggtgcgcaagaagttctcgcgctcacagttgttgacctacaccgccaaccttccctggtcgctgatcggcatggaagcctgctccggcgcacacttcctcgccgccaagctgcgcgagcagggacatgaggtgaagctcattccagcccagttcgtgaagccctaccgcaagtcgaacaagaatgacttcgtcgatgctgaagcgattgccgaagcggttacccgccacaacatgcgctttgttcccatcaagaccgacgatcaactcgatctgcaggcgctgcaccgcgtgcgcgaacgtctggtgcgtcgccgcaccgcgctgatcaaccagattcgcggcttcctgctcgaacgcggtctggtgttcgcacagcgcccagcgaatctgcgccggcagctgccactcgtgctcgaaggtgccgatgcgaaactgacgccgcgtctgcgccggctgctcgccgacctctggcaggagtggaagcaagtgcaagtcgatatcgccgctctcgatgaggagatggagcagatctgcatgggtgatgagaactgtcagcgcctgcgcgagatcccaggtgttggtccgctggtcgccactgccatcgtcgcggccatcggcaatggcgccgctttcggcaacggacgcgagttcgccgcctggctcggcctggtgccgcgacaatactccaccggcggacgaacgcgattgttcagcatcagcaaacgcggcaatgcctatctgcgacgcatgttcatccacggtgcgcgtgcggtgctgtggcgtgtaaagtacgacctcggcgcgctgcgagagtggacgacccagttgcagtcgcgagccgccaagaatgttgtcgtggtggcgttggccaacaagctggcgcgcatcgcatgggccgtgctgagtagcggagagcgctatcggctgaaacccgctgcaatggcggcctgaaccggcggtggaaaagatcgctgtgcttggaaaacgctccgcgtttcccactttcccaccgcacgacggcgactagaaagttatccctttcagggtctgcaagagaacaacggaatgaaaccacagtcaaacggcgtgccggaaaacctgatgttggaaatggttgagaaaaccgtcggatttatcaggaccggcacgcgcgcatcctcattatgcgcccggagctagcgctccaactagaggccgaatacatttgcgcagactacgtttccttcccaacgttccactcttgcaaacggacggcggaccataca

SEQ ID NO: 3995 - DNA, 1499 bp, unidentified
  source 1..1499: mol_type = unassigned DNA; note = element_601129a
  misc_feature 1..2: note = core
  misc_feature 3..243: note = LE
  misc_feature 244..1479: note = CDS
  misc_feature 1480..1499: note = RE
ctaataagagttagcgggtccgccgtacggcagactcggggtgaggtggccgccggcaggtgagcactgttgcctcccgggctttgagccctgacgaaagactgtgcccctgccggtgaccgggaggattgatcgctgctgggatgtcgtgcccgccgggtggcgtgagcactgctttattaggtcgctgatggttctcccgctggctgctgacatgtttcgacatcgttgacgggagtgccggtgcggctgttcgcaggtgatgactgggcggaggaccatcacgatgtggaggtgatggacgaggccgggaaggtgctggcgaagcggcggctgcccgagggtgtggccgggatgacgcagctgcatgagctgatcggccggttcgtgcctgaggacgcaggtgacgtggaggtggtgatcgggatcgagaccgaccgcggcccgtgggtcgcggcgctggtcgcggccgggtacaccgtgtatccggtgaacccgctgcaggcctcgcggtaccgggagcggcacggggtgtcggggggcaagagcgatcagggtgacgcgcacatgctggcggacatggtgcgcaccgactcccaccagctgcgcccggccgcgggtgactccccgcaggccgcgggcatcaaggtggtggcccgcacgcacaagacgctgatctgggaccgcacccggacggtgcagcggctgcggcaccagctgcgcgagtacttccccgccgcgctggcagcgttcgaggacctggacgcccccgacgtgctggaactgctgggcaaggcccccgacccggcccgggccgccaggctgacccgggcccaggtcagcgcggcgctcaagcgcgcccgccgccgcggcatcgccggcaagaccgacgcgatcctggccgcgctgcgcggcgagcagctggcccagcccgccgccctgaccgcggcctacgcagcgaccgcccggtccctgatcgcggtgatcaccaccttgaacgagcaggtcaaggccctggaagagcaggtgagggagcattttggccggcacccggacgctgagatctaccagtcccagcccggcctgggcgcgatcctcggcgcccgggtgctcggcgagttcggcgatgacccgcaccggtacgccgacggcaaggcccgcaagaactacggcgggaccagcccgatcacccgcgcgtcgggcaagaagaaggtcgtcgccgcccggttcattcgcaacgaccggctcatcgacgccctcatgtcctgggccttcgcgtcgctgaacgcctcgcccggcgcccgggccttctacgaccagcagcgcgccaaaggactcgaacacaacgacgcactccgcaggctcgccaaccggctgatcggcattttgcacggatgcctgaagacccgcacccgctacgacgaggccaccgcgtggggtcaccgggaaaaactccctcaatcttccgtcgcggcttgacatttaagctcctgggatgt

SEQ ID NO: 3996 - DNA, 1344 bp, unidentified
  source 1..1344: mol_type = unassigned DNA; note = element_603435d
  misc_feature 1..2: note = core
  misc_feature 3..87: note = LE
  misc_feature 88..1119: note = CDS
  misc_feature 1120..1344: note = RE
  misc_feature 1142..1339: note = bridgeRNA
tgatgtgatggacgtccccttttccagttgcagacagtgtcgcctttaacttgatactgagtgcgctgtatttcggagggttcttccatgaacacaatcaaagtagtgggcattgatcttgccaaaaacgttttccaggtctgtgtttggttaactgataactctgttgcctggaacaaaaaggtctcacgacaaaaattgctggatacgctcagcgcgtttccacccaatacccttattgcgatgaaagcttgccagagtgctcattattggggaagaaagctccaagccatgggctataaaatcaggcttatcccgactcagcatgtcaaagcgctctgtaagaatcagaaaaatgatgccaatgatgcgctggctatttgtgaaacggcctgtcgccctgagattcattttgtccctgtcaaaacgattgagcaacaagatatcaaagccctgcgtagtgtccggcaactcatggtggaacaacgtactgcactggttaatcaaacccgggcgctgctcgctgagcagggaattgttattcctgcgggcattcaacaactccggcaggctctgcctgatattttggaagagggaaataacgcattatcctttgtcctccgacgcctcctccattcactccaggaagatatgcagcggtttgatgcccgtcttcacgaaatggataaagaaattcaggcggtttcaagccggcaatcgggttatgcccacttactgaccatccctggcgtgggaccgttgattgccgccgcttttgtcagtgaggtcaacgtagaacaattctcacatgaccgtcagctttctgcctggtgcggtctggttccgcgccaatacagttccggagggaaaaaccgtctggctggcataaccaaacagggcaacaaccgtcacctgcgaacgttaattattcatggtgcccgtgcggtgatgcgctattctcaaagacgtgaggatgccttgggtgagtggttaagaaagttaattgcccgatgtggggtcatgaaggcgacggtcgcgttggtcaataaactggttcgtattatctggcgcattttgaaagatgatgttgattttatgatgaagaaagcggtgaattaaccggttaaaaaagacgttttattgagtttgcaaacactgatgagaaaacggctaccgtccctgtaatagcctggactagaccaaggtactgagatacctacgtagtgataaggaaacggggctcggatgacatcatggcgcgggtgatttaacccacaatgacgccggatatatggtcgcaaaccgtttcaattcaatgcttgcacaaccggggacgtccatata

SEQ ID NO: 3997 - DNA, 1405 bp, unidentified
  source 1..1405: mol_type = unassigned DNA; note = element_60350e9
  misc_feature 1: note = core
  misc_feature 2..59: note = LE
  misc_feature 60..1112: note = CDS
  misc_feature 1113..1405: note = RE
  misc_feature 1184..1399: note = bridgeRNA
taatgggatggtccgccgcctgaagccctgcggatataagggtgagcaaggaggttcccatgaagctgcatgtgatcggtattgatttgggcaagacggtgtttcatcttgttggactgagccagtccggaggggctgtagtgcggaagaagttctcgcgtacgcagcttcttcgcttcaccgcgaacgtcgaagttgatctgatgggtatggtagcttgcgccggctctcattcccttggcaaggctttgtgcgaccaaggacatgaagtacgcctgatgccggcacagtacgtaaagccattcgtgaaaaccaacaagaacgatttcatcgatgcggaggccatcgccgaagcagtgacccgtccctcgatgcgctttgttccgatcaagaccgacgagcagctggatatgcagtctctgcaccgagtgcgtgaacgctggatcatgcgacgtacggcagtggtgaaccagatccgtggtctgctgctggagcggggcatcacagtgcggacaggaagatgccatctggatgcagccttgccccatatcctcgaagacaactcgacatccctgtcgggagcacttcgcttcctgctggtcgaactgaagcaggaactggaacagctggccgttcaaatcgaacaagccaagacgctgatccagagagccgcccagcagagcgaggcctgccaacgcctggacgcgatcccgggtatcggcccactaacggccacagcgctgatcgccgcgatcggaaacggtggtgcattccgcaagggacgggagttcgcggcctggctcgggctggttccctgcgagcactccaccggaggcaagcagaagctgcccggcatcagcaagcgcgacaactgttacctgaggaagttgttcgttcagggtgcacgtgcggtcctccagttcagagacaaacagtctcccggcctaagaaaatggctgcaagaactcttcgctcgtacccattacaacgtcgctggcgtggcactggccaataagctggcacgcatggcctgggctgtactggccagtggcgatatctaccggccacctgtcctggctgaaacgactggtctacagatggcggctgtctagcgacagccttggaaatcgctgcgcgattccacatccgcaaaccagcgacgactacgaagttaagaaccctgccaggtctgctggcgaactatgagatggcacaacggtcgaacccggcgctccccaaacccgaacccggaagaagtccctcgagactgcgtaactaatggggaacggagcgcagcgcattccatcctggcccggagccacggctccaacaaaggccgaatacatttgcgcagaccaacctgccgcattcatttttcgcttgcaagacggcggcggaccataca

SEQ ID NO: 3998 - DNA, 1368 bp, unidentified
  source 1..1368: mol_type = unassigned DNA; note = element_6036628
  misc_feature 1: note = core
  misc_feature 2..74: note = LE
  misc_feature 75..1127: note = CDS
  misc_feature 1128..1368: note = RE
  misc_feature 1134..1359: note = bridgeRNA
taatgggatggtccggccgtgctcctagtggctagccgtatgctggctagaggcacccagacaaggagcacgccatgtcccaaattctcagcacggtcgccgtcatcggcattgatatcggcaagaactcgttccacgtcgtcggcctggatgatcgcggcgctattgtgctgcgtcagaggtggtcgcgtggtcagatcgaaacacgcctggccaacatgctgccgtgcctgatcggcatggaagcctgcgttggtgcgcatcatctcagtcggaagctgaaagcatttggtcacgacgcccgattaatgccagcgaagtatgttcgcccgtactcgaaggggcagaagaacgacttccgtgatgccgaggcgatcgcggaagcggtccagcgcccaaccatgaagtttgtggcgacgaagaccgccgatcagcttgacctgcaggccttacaccgtgtgcgggagcgactggtcagtcagcgcaccggcatcatcaatcaaatccgcgcctttctgctcgagcgcggcattgcggtacggcagggcctccggttcttacgcgcggagctgccgcgcatcctcgccatgccggccgatgtgctgtcgccacgcatggtaggcctcatcgaagggctagcagaagattggcgtcgactcgacgagcgcatcgatcgcctatccggcgagataacagccctggcacgtcaggacgccggctgcgaacggctggtgagcgtccccggcgtcgggccgattatctccagcgccatggtggccgcgatcggcaccggcgaggccttctccaaaggccgcgactttgccgcctggctgggccttgtgcccaagcagatctcgaccggcgaccgcaccattctcggcaagatatcgaagcgaggtaatcgttacctgcgcgttctgttcgtgcaagccgcctgggtcgtgctgatcaagccccagagctggcagcgccacgggctcaagccctggatcgaggccgccaagagacgcctgcaccgcaatgttcttgcaatcgcactcgccaacaagctggcacgcattgcctggagcgtgctggcacgtggtagaacgttcgaagtgagatcagcgatgatgccagctgcttgacgctttacctgccgaggtctgcgagagaacgagacgagatggaggttcggtcttcccggcgcgtgcgaacactggtgacccaaatggcccgctaaggcctgtccgttaagaagatcgcatgcgcgctgatacccatgatggcccggagcacgccgctccaactcgaggccggatacattgatgcaagaccgctcaccgccggctcgtcaaagtctcttgcaacgcacggccggaccataca

SEQ ID NO: 3999 - DNA, 1110 bp, unidentified
  source 1..1110: mol_type = unassigned DNA; note = element_6038e48
  misc_feature 1..2: note = core
  misc_feature 3..162: note = LE
  misc_feature 163..1104: note = CDS
  misc_feature 1105..1110: note = RE
  misc_feature 1..164: note = bridgeRNA
ccctgtgtatcgaaatcctgtcatggtggagtgggcgggaagccgttgggtccttggcgcttgacgccgtgagccggctcggtctcccgcccgttccatctatcaacctgaacagttgcacgaggctgcgccaacagacctcgcatcacagggacaggcaccatgatcatacgccctcgttacgtcggaatcgacgtctccaaacgatatctcgatatcttcgatgagagcctgggcgtgccggagcgcatcgccaacgcgccgcaggccatcacacagatcgcggcgcgttggcgatgcgatgtgctggtcgtctttgaagccacgggcgtctatgaccttgagcttcgtgaggcgctcagccaggccggcatccgctttgcccggatcaacccggcccgggcccgggactttgcgcgcgccagcggccagctcgccaagaccgacccgatcgatgcccggatgctggcgagctttgcccgggccatgcagcctgccgctgagcaggctgccaatcctgcccgcaatgccctggcggggcttgcaaaacggcgggatcaactggttctcatgcgtgcccaggagaagaacaggcgcagcgaggccgaggaccgcgccatggccgatcgcatcggtcggctcattgaagtcctcgacaatgagatcgccgcaatcgaggccgatattagcgcactgatcaagactgagccggaggtctccgatgatgcgcagttgatgcggtcacttcccggcgtgggccccgtaacctgcatgcagctgatcgcgcagatgccggaactcggaaaagtgggaccgaagcaggtggccgcgctcgccggcctggctcccttcaacgtcgacagcggcgcttaccgcggcaagcggaagatcgtcgggggccgaaagcgcgtccgcgatgccctctacatggccgctctcaatgcggtccgccgggccgatccattcaaggccttctacgctcgactgcgacaggccggtaaacctgccaagctcgctctcattgccgttgccaggaagctgttgacggtcctcaacgccatcatccgcgatcgaaagccgtacctgtacactaggccaacataacagttg

SEQ ID NO: 4000 - DNA, 1534 bp, unidentified
  source 1..1534: mol_type = unassigned DNA; note = element_6046924
  misc_feature 1..2: note = core
  misc_feature 3..241: note = LE
  misc_feature 242..1417: note = CDS
  misc_feature 1418..1534: note = RE
  misc_feature 3..221: note = bridgeRNA
cttgtattatagagtagtagttattagagcccctctccaagggctgtgctacactgtagaggatgctgtggattggtttagttctcctaccaccagatggttcttgaaaggctccaaccacagtcctttgcaggtttgttaatcagttagataccgccagacggtttattttgaacaaggttacaagagcaaagtgtcctgtggatacagcagcatcaaatatactgtcggaggttttattatgatttgcgtgggaatagacgttgccaaggacaagcacgactgcttcatcatcagctcggaaggggtagtcctcgcggatgtgttcaccattcccaataacagggagggtttcaactgcctgctgggaagaatccaagcctgcgctatgcccggaaacgaaattaaagtagggcttgaggctaccggacactacagctgcaacattcttgggtttctgcttgacaacggcctggacagctttgtcattaaccccttgcacaccaacctgtaccggaaaagcctcagtctcagaaagacgaagaccgaccgtgtcgatgcacgaacgattgcggctatgcttatgtctgatgtgggcctcaagccctacacagacacagcttaccacaacgaggagctaaagtcactgacgcgatacagattcgacaaggtgaaggaacgcgcccagctcaagcagtcggtggccaggctcgtgtgcatcctgttcccggagctggaaaagctggttccaacactccatatggcctcagtttatgcgctgctggacgaatttcccggagcacagcagattgccgacgcccatctgacacatttaaaagctgtcctccatgacgcctcaaaagggcgctacggccgggacagggcaattgagctgcgcgaggctgccagagcatctattggttgcagaatgccggcaaagtcattggaacttcgtcataccatccgcctcattcgggaactggacgctgaaattgatgaaatcgagtccgccattcagcaaatcatggatgaaatacattctcccattactaccatacccggtatcggtacccggatgggcgctatgattctggccgaggtgggcgacttctcccgctttgattcacctgataagatcctggcctacgccggtctgtcgccctccacataccaatcggggcagcttactaattgctatgcccatatggagaagcgtggctccagatatctgcgctttgctatctttaacgccaccaagtatgtttgcctttgggatccaacctttgctgcttacctcgctaagaaacgagcccagggcaagcactacaatgttgccatctcccacgctgccaagaaactggtgcggctcatatacgccttggagaaatccagagagccttaccatcaggcagcttgatttccttacaatagctgatgcgacgttctaccgaacgtctgctttgctatgccgttctgacccatctgtttctttggcatttttcatcattttgaggcttgacttttaatagttagt

SEQ ID NO: 4001 - DNA, 1437 bp, unidentified
  source 1..1437: mol_type = unassigned DNA; note = element_60559cd
  misc_feature 1..2: note = core
  misc_feature 3..84: note = LE
  misc_feature 85..1185: note = CDS
  misc_feature 1186..1437: note = RE
  misc_feature 1256..1376: note = bridgeRNA
taattggatggacccgcccaagccgaggcgtctgtagcgccacggtggcattctaatgaagccaacgacagcgagggcgagcccatgaaaaagcatacgatcaaaaccaactccttgtcttctgccgatctgtctgcttgcacgacagtggcggtggatcttgccaaaaacgtattccaggtcgctggagaagacgccctcggccaggtcaaatacgaggagcggatcaagtcccgagaggccttccttgcgttcctgtacaagctgcccaacaccgtgacagtgctcatggaaacaggccctggtgctcaagcgtgggcgcggatcctgcaggcgcaggggaacctcgcgcggatcctgccggcacagcgcgtagccgagcatcgtagcggcgcaaagaatgatcgtaatgatgcgctggccattctgcgtgcgggtcgagacagcttgatcatcgccgtgccgatcaaaaccgcagcccagctagccatgcaggcgctgcatcgggccagacagggctacgtgcgccgacgcaccgccatgagcaatcagatccgcggtttgctgcttgagcacggcattgccatggcgcaaggtgagcttgccctcagccgcaacgttgcgcggatactggaagacgccacacaaccgctgccagaatcgttgcgtgagctgatcgacgaaatgttgggtgaatggcgtcatctgggcgagcgcgtgaatgtgctaaccgcacgcctggaaaccgcagcgcgcgaagacgagacggcaaagcggctaatgacggtacgcgggatagggccgatcatcgccacggcgctgctagccaagcagaccgaacctgaacgtttcccgaatgcacgcctgttcgcggcctacttcggcacggtgccggagcagaacagcagcggcaataagacccggctggggaaaatgtgcaaacgcggcgatgcctacctacgcagcctggcgatccagggagcgcatgcggtactgaggcaggtacggcccgattctgaacatccagacgaccaacgactgcaacgctggctaagccgtcatggccagaaaggcgccgctgtgcgcttggccaatcgcaacctgcgtatcgtctgggtgctactgcaaaacgaccagacataccgtcgccagcctatgggtaatcaggaggcggcggtgcattaatcgacagagttctgccaccggggtgctgagtcacctcaaccgctgctgaagaacattgacccccaggtcagaccgtcgcggataaatgtctatgctcctactggccttcgtggcctcaatgtaatcgacatttcgcgagctcacccaatgttggccagaagcaaatagtgcttcctcgaataggcctgatacatagatgcaaccgggtagcagtgttcaaaagcgtgttgacagggtgggcgagtccataca

SEQ ID NO: 4002 - DNA, 1386 bp, unidentified
  source 1..1386: mol_type = unassigned DNA; note = element_606fd66
  misc_feature 1: note = core
  misc_feature 2..90: note = LE
  misc_feature 91..1131: note = CDS
  misc_feature 1132..1386: note = RE
  misc_feature 1160..1381: note = bridgeRNA
caatgggatggactcctcctcaccttacggcatcggtgtgccaaactgagattgacgtttcagttaacggtgagcatgaggagtccacacatgaagattagtcgagtgggtgtagatttggcaaaaaatgtgtttcaactgcatggtgttgatagccgaggaaaggcccgctggaaacggcagctacccagggataagtggttgcgggtattaacggagaccgttgatcctggcaccgaggtcggcatggaggcctgcgctggcgcgcatcactgggccaggttgctgattgcccaagggtttcgtgtcaagattattccgccacagtttgttactccattcgttaaaagtaacaagaatgacgcgaacgatgcggtcgccatctgtgaggccatgctcaggcccaacatgtacccggtgagtgtgaaaactgttgagcaacaggatctccaggccattcaccgcattcgcgaggaagtcaaaacgcaccgtgtcgccaaggccaatcagatccgtggattggtagcagaatatggattagtcgcacccaagcagctgtcatccttacgtgtagctattactgactggctagaggatgcaagcaatggtctcaccgacttcttcaggcaactacttaatgggttgcgtgaagacctgagtattctggatcaacgcatggccatgctggatcagcagatcgccgagatagcgagcaatcaccccacagcaaaacgccttcagcaactacgcggcgtaggccccctgattgcaacagcattagtggctacaatcggcgatggcaagcaataccgcaagggtcgtgatatggccgctgctattggtttaactccgaggcaacacagctcgggtggtaaagaccggttgctgggcatcagtaagcggggcgatacttatctgcgctgcttattggtacacggtgcgcgttcagcgatacgcacaatgaaagacaaagatgaccgcttaagccgttgggtcaccagtctgcaggctcggcgacacaaaaatgtggtggccgttgccatggcgaacaagctggccagaaccgcctgggcgattatgagcaaggatatagattataatcccgatatgaaccacgcagtaccacactaaacaaggaaagaggctctgccagtcaattaacgattgcgaagtaagctgtgtaatggcaaacaggtcgaaccggcgccgataaaacccgagaatgtccgagtgtgtaataacacgtcaaagcaatggggaatcggcgcgcgaacaacccattatggcccggcatcatcgtatgccacctgaagaggccggatatacgtatgcagtcgagcctaccgccactcacagattacttgcaaacgaggaggagtccatata

SEQ ID NO: 4003 - DNA, 1111 bp, unidentified
  source 1..1111: mol_type = unassigned DNA; note = element_607c7e6
  misc_feature 1..2: note = core
  misc_feature 3..165: note = LE
  misc_feature 166..1092: note = CDS
  misc_feature 1093..1111: note = RE
  misc_feature 1..167: note = bridgeRNA
cctgtgtgtttggtgtgtgtcatgattggagcgggcgggaagccgttggatcccaggtggtgaacaccgtgttccggctcggctcccgcccgcctttgcagaccccatcctgaacagttgaccgaggccgcttgcaccggacctcgcagcacagggacaggcaccatgaccatacacccctgcttcatcggttgcgatatcgccaaaagccatctcgacctgttcgatgagacgagcgggacgagccttcggatcgccaatacgagcgaggcgatcgcggcctggctgtcatctctcgacgcccaggcctgcttcatcgccttcgaggcgaccggcccctatgaccgcatgctgcgccaggccctggagcaggcgggctgccgcttcgcccggatcaacccggggcgcgcccgcgacttcgcccgcgccaccggccgcctggccaagaccgatacgatcgacgccgagatgctcgcggcgatggcgcgcgccctcgcgctcatgcccgacccggcttgcgaccctgcccgcaacgctctggcgcagcttcacaaacgccgcgaccagctcgtcgagatgcgcgccgccgagcgcgtccgccacagcgaaggacaagatccctccggcagtctggcccgtcatctcgcctggctcgacgccgagatcgtcacgctcgagcgcctcgtcaatgaagccctgcaggccgacgagacgctggccagggcgcaagccctgctgcgctcggcccctggcgtgggacccgtcaccgccgccaccctcatcgccctgatgcccgagctcggacacgtctcgccaaaggccgtcgccgcactcgccggcctcgcccccttcaataacgacagcgggcgcaggcgcggacagcgcatgatcaagggcggaaggcggcgcgtccgcaaagccctctacatggcagccctcgcagccatccggacatcgtcgcgcttcaagaccttctacgacgccatccgcgcccgaagcggcgccgccaaggtcgccatcatcgccgtcgcaagaaagctcctcgtaaccctcaacgccatgctcaaaacccgcaccgcattccaatcatgaccaccaaacaacacagttg

SEQ ID NO: 4004 - DNA, 1612 bp, unidentified
  source 1..1612: mol_type = unassigned DNA; note = element_607e27e
  misc_feature 1..3: note = core
  misc_feature 4..286: note = LE
  misc_feature 287..1498: note = CDS
  misc_feature 1499..1612: note = RE
  misc_feature 11..306: note = bridgeRNA
tttggtacaatattagcatagtcaactgctgacgacagttagtttgtaggctatgcttattttagttataataagaaggtaatggtctgacgatcctcgctttgaacttagcgttcgttgtagaaagagtcaaccgccttcttgttataaagattcgattaagcaggttgttctgcttggcattgaggttaacctcaatgccaagtgcgttcgtgtcactaaccaaaatgaatcgtaataagctttggtggaaacattacacatctcaaatgaaagaaggaatgttatgattagcgttggaattgatgtatctaaaggcaaaagcacagtttgtattatgaaacccggtggtgaggttttgtctgcaccatttgagattactcacacaaaatctgaacttcttgaccttattaacataattaaatctcaaaatgaagaagtacgagtcgttatggaggataccggacactatcacttgccggtggcaacactgcttgttgataatgatatatttgtttgttctgttaatgctttgcgtatgaaaaagtattgttctcaaagcatacgcagagctaagactgacaaaattgattctgtacatatcgcttcttatggtattgcttattggaatgaacttcaatctattccttgctctgacgatatatacaaggaattgcagctgttagcaagacaatattatcagtcagttgctttgcttgttaaagctaaagtcaatttcagtaatctgttggatagagttatgcctaacattcaaagcattattacggataacagttcaaattcaaaacttactgattttgtcgctcgatattggcatttttctcgtatacttgaaatgggcgaaaaacgatttatttccgattactgcaaatgggcaaagaaaaaaggataccgtatgtgcgaatgtaatgcaaaagaaatttttgctttagctcaaaacggtatccctgtgcttccttcatctcaatcaaccaaaattgtcatcacggaagctgtacgagtgattcacgaacttgaatcatctcgtgacaccattttagcacaaatgcagtcttttgcaaagactctgcctgaatattctgttgttcgtgagatgccttgcatcggcgatgtattagctcctcgtattattgcagaaattggcgatgttcgccgatttaaaaacaagcactcattaattgcttatgcaggcattgatgcgccgccttaccaatccggtagttttaatgcgactgaaaggcatatatccaaaagaggcaactcttatctcagaaaaacaggttatgagattatgcaaagccttatcaagcacaaacccgaaaatgactctgtttacgatttcattgttaaaaaacgctgtgaaggtaaatgcgcaaaagaggttatgattgccggtcttaacaaatttcttcgtgtttattacggtaaggttaccgaactctatgacaaccttgaatactgcaatttaacagcttaattgattctatatttatttagccgttgaaaaaactttcattttcaacggctttatttgctatacccattttgttttataattttttaaatttttctcttgactttatttagcagg

SEQ ID NO: 4005 - DNA, 1412 bp, unidentified
  source 1..1412: mol_type = unassigned DNA; note = element_6088069
  misc_feature 1..2: note = core
  misc_feature 3..239: note = LE
  misc_feature 240..1289: note = CDS
  misc_feature 1290..1412: note = RE
  misc_feature 3..218: note = bridgeRNA
cttgtattatagagtagtagttattagagtccctctccaaggactgtgctacactgtaagggatgctgtggattggttatgttctcctaccgcaagacggttcttgaaaggctccaaccacagtcctttacagtattgttaatcagttagataccgccagacggtttatgtagaacaaggttacaagagtaaagcgtcctgtggacccagcatcaaataaacataccggaggtaccatcatgatttgcgtgggaattgacgttgccaaggacaagtacgattgctttatcctcagctcagaaggcgaagtccttgcagatgtatttaccatcccaaacaacgcagagggctttgacacgctgctgcaaaccaacctttaccggaaaagcctgagccttcgcaaaaccaagactgaccgtgtcgatgcgcgaaccattgcagctatgctcatgtctgatgtggacctcaagtcctacacagacacagcttaccacaacgaggagctaaagtcactcacaagataccggtttgacaatgttcgtgaacgagcgaagctgaagcagtcggtttcccgtctggtcacaattttgtttcctgaactggaaaagctggtttcaacactgcacacggcatccgtttacgcacttctcagcgagtttcccggcgccaaacaggttgccggagcgcacttaacgcatttgaaagccgtcttatacgacgcctccaaaggccgctacgggcgggatatggcaacaacgtttcgggatgctgccaggtgctctgtcggctctgtcatgccggccaagtccctggaactgcggcatacgatccgcctgattcacgagctggacgccgagatcgaggacattgaggctgctatccagtccatgatggacgaaatacaatctcccattactactatccccggcatgggtgtccgcatgggcgctatgatccttgccgagatcggtgacttctcccgcttcgactcgccggataaaatccttgcgtatgctggaatgtccccatctacttaccagtccgggcagctttctctgtccggagcctactcgcacatggagaagcgaggctcccgttatttgcgctacgcgctttacaacgccaccaaatatgtctgcctttggaacccaacctttgctgcttatcttgccaagaagcgggctgaggacaaacactacaatgttgcgctctctcacgcggcaaagaagttggttcgcctgatttacgctttggagaaatccaaacggccatacagcacagccgcataacagcttttctctcacatgcttagctgggcgtccaaccggacatttgctttgctataccctttttgagccgtctacattttctcaccatcccatgcagttcaggcttgacatctaatagttagt

SEQ ID NO: 4006 - DNA, 1155 bp, unidentified
  source 1..1155: mol_type = unassigned DNA; note = element_608b61f
  misc_feature 1..3: note = core
  misc_feature 4..204: note = LE
  misc_feature 205..1143: note = CDS
  misc_feature 1144..1155: note = RE
  misc_feature 37..210: note = bridgeRNA
cttgtcttatgacttttcttgctgattgggacagattggcaccgccggcgggagttcgcgctcccggaccggcggcgagggtcggatcggttaatcgcaggaggtttgacgctccgagctaaagtttgatcgccctcgtctttcccatcggcctgaacggatacaggggctttgaggcccgcatgacaagcagaggcaagaaagatgattgagcataccatcggcatagatgtttcgaaagatactctcgatgtccaccttcacccggcgggcgaccaccgccagttcgagaacacgccaaaaggcttccgggcgatcctgaaatggatcgctggcaggcccgtcgcccgcctcgtcttcgaggcgacaggcccttatcaccgtgccttcgagcgcgcgatgggcgaagccggcctgccactttgcaaggtcaatccgcgtcaggccaagcgcttcggcgaggcgatcggacaactcgccaagactgaccggatggacgccgccatgctggcgcgcttcggcgcgctgattgaacccagcgtccgcgcagcgccgtcgaagatcatcagtgatctcaaggacctgcacgtcgcccggatcgcccttgtcaaggatcgaacagccgccaagaaccgcgagaagaacctgacttcgtcactcctgaagaaacatgtccgccagcgcctttcttccattgaaagccacttgaaagagatcgaggaggccatccgtgccctgatcgatactgacgatcagctgcgccgcaagttcgaaatcctggtatccatacccggcatagccgatcgttctgcctttgccattctgatcgacatgcccgaactcggcactctggaagctcaggaagcggctgctctatcgggcaccgcgccaatgacccgccagtcaggcaagcgaaccggaaaggcattcgtctcaggcggccgggtaaatgtccggcaagcgctttacatgcccgcactcgtcgccgcccggttcaatccagacctcagagataaatacaaagagttcaccgctcgcggaaaaccgcccaaagtcgccatcaccgccatcatgcgcaagctggtcatcctggcgaacgcactcatcagggacgaccgcgaatggtctccgaaagtggcttgatcaagacggata

SEQ ID NO: 4007 - DNA, 1315 bp, unidentified
  source 1..1315: mol_type = unassigned DNA; note = element_60905ad
  misc_feature 1..2: note = core
  misc_feature 3..61: note = LE
  misc_feature 62..886: note = CDS
  misc_feature 887..1315: note = RE
  misc_feature 1098..1302: note = bridgeRNA
ttatgggatggacgcctccctccgaaccttcagaatgaaaggccaaccaaaggaggaagtcatgacattcgaattgctcgcaatcgatctcggaaagtcgtcgtttcatctgcacagcattgcttcagatggcgctattctgtcgcgcaaggtcagcagatcgaagttggccgagactgttaacgcactcgcaccaaagacgattgctatggaagcgtgcgccagtgcgcatcactggggacggcaattcaaagataatgggcgagaggtcctgcttatcaaccctcgctttgtgaagcccttcgttcgcggctccaaaaacgacgccgtagatgctgcggcaatttatgaagcggcgacccggccgaccatgcgatttgtgccggtcaaatcgatcacacagcaagacgttcagtcgctgcatagagttagagaacgtatgatcatccagcgtacatcgctgatcaatcatgcacgcggtcttctcgccgaatatggcatcgtgttgccgcaaggagcatggcgttttgtatcccaggcacccgcggctgttgagagcgctgatctctccgatctcgggcgcgagctattcctcgaactactcgaccaactcaccgatgtgaatgaccgaattgccaagattgataggaagattagcgagatttgccgcgatcgagaggattgccgtcgtttgtccgaactgccaggcgtcggtccgatcattgcaacggcactcgttgctagcgttgaggacggacgtcactttaaatccgggcgagagctggcggcttggatcgggctggtccgcgacaatactcgactggcggcaaaccacgccttggcggaattggccgccgagcgaaccattatctacgtcgccagatgattcatggcgcacgtgcagttatcagtcgacttgccagtcacgatgatcgtcgatctcaatggctgaaagagctcgtctctcgccggggttataacaaagcgatcgtagcgcttgccaataagaccgcgcggatagcatgggccctgctcacacgacaggagcgatacgccgcacaatagtcatttgccaatcgttgccgatgaggcaatgatgaatgcgggtaagaactgatggcgtaacggcacggaccgcagcttcggatcctgatttacgacaaggccataaaggtcgatcatgttatgaggacagaggtagcggactcccatcaaggccaggagcgtgatcgctccagcgataggccggatagattcacgcatccaatgccgagttgccgccaaatgttcttctcgcccgggaggcgtccataga

SEQ ID NO: 4008 - DNA, 1428 bp, unidentified
  source 1..1428: mol_type = unassigned DNA; note = element_609d3a4
  misc_feature 1..3: note = core
  misc_feature 4..136: note = LE
  misc_feature 137..1201: note = CDS
  misc_feature 1202..1428: note = RE
  misc_feature 1142..1415: note = bridgeRNA
agatggggtggttgccgccctccccatacggcatcgcagtgtgccagagtcgtgatcctttaaggatcacgcagcacggcatcgcagtgtgccagagtcgtgatcctttaaggatcacgcagcagagaggacggcaatgaaggttacaatgatcggggtagacctggcaaagaacgttttccagcttcatggcgcatcgatgacgggcgaagtgctgttccgtaagaagttgtcgcgcggccagtttctgcgtttcatggagagccagccagccgctgtggttgtcatggaggcctgcggcagcgtccaccactgggcgcgtgagttgataacgctgggccatgaggtcaaattgatcgcgccgcaatatgtgcgccctttcgtgaagcgccagaagaacgatgctgctgatgcggaagccattgtcattgcagcgcggcagccggaaatgcggtttgtcgaacctaaaacacgtgatcagcaagcgcgggctattctatttcgggcgcgagaacgcattgtccatcaacgcacagagctggtgaacgctctgcgcgcaatgctctacgagtttgggcatgttgttcccgtgggaatcgggcacgtcaagcggctggaagcggtgctgaacgacaagaccaataatctgcccgaactcgtgtgcgaggagggcctggatctcgtggcgcagattagcgaaaagaccgccagaatagatagcaagactcaaaagctgtcctctctcgccaagcaaaccgatgtggcgcggcgtcttcagacgatgcccggcatcgggccgatgaccgccgtggccgtcgaagcctttgcgccggctatggaaaatttcaaatcggggcgcgactttgccgcttggctcggcctcgtgccgcgacagttttcgtccggcggcaaggagaggttaggcaaggtctcgagggccggtcaggttgacattcgtcgactgctaatcatcggcgccatggctcgcgttaattgggcaagccgcaaggaaacatccactgatccctggatgatccgcatgcttgggcgaaagcctcgaatgctggtggcgatcgcgctggcaaacaagatgggcgcgtacgatctgggcgatgctgacgcggcagaaagattatcggaatccggcgctgacagcggctgcataaacgcggctatcgtcaatgttggcaaagaggtgtgagaagtcgatgacctgaatgggcgcaagatcgaacgatccagatcgggaaaaccagtactgctcttggagctccgagctcgggaacaagatttggacctgatccgcagatcaccataccggccagcggcttttgaaaatgccgcaaataaaggcctgacagaagaccgcactcgatcacacgttcagacagccaaaatacttcttgcgcaatgggcggcaaccacaga

SEQ ID NO: 4009 - DNA, 1303 bp, unidentified
  source 1..1303: mol_type = unassigned DNA; note = element_609f099
  misc_feature 1: note = core
  misc_feature 2..301: note = LE
  misc_feature 302..1288: note = CDS
  misc_feature 1289..1303: note = RE
  misc_feature 7..293: note = bridgeRNA
ctgtgagtcttgaactggctggtctgggatcagctggcagagtaggagccagccgtccattccgtggtcgtggctcaaaccggatctgacccgcaaggtgtctttgtcttgacttgtccgaccatggggtggccggccggcgcctgcccggcccacctcggtaacttgatcagaaggctgcccgccgccagtggcggcgtggctcatcacagtattgttccgaagtgacttctccccggaccggtgccggccgtaaacggtcgccgccccctgtccgctaagagaagagtttggaaccgcaatgtccattgtctcgccaacctacgggtttgtcgtgggggttgacactcacgcgaaaaatcatgtctatgccatcatcaatgccgccaccggcgaacacctcgatacccgcgatttccccactaccgttgccgggatcaaccgtgcaatcacctgggcaggcaagcgcaccggcggagacgccgaaacactctgggtcatcgaaggcacggcttcctacggcgcagtcctggccggcaccgtctccactgcgcgataccgggtcaccgaagcacccaggatgagtgccaaggcccgccacggggtcggcaagtccgatccgctggacgcccgccgtatcgccaccgccgccttgccactgcctgccgatcaactgcgcataccccggttgaacgagggagtccgcgccgctctgcgggtgctgctgaccgcccgcgattcaatgaccggagaaaagatcatcgcggtctctaagtggcgtgaacgcgatgaggccttggccgaggccacggcccgggccgaagcgatccggttggccaaacgcatcatcgacctcgacgaccagttgaaagccaacgttacccggatcaccgagctggtctctgtcagtgaggccgcagcgttgttggaggaaacaggattcgggccggtcaccgcagcggtctgcctgaccacgtggtcccaccacggcagggtgcgctcggaagccgcctacgcgtccctggccggggtgaaacccatcccagcttcctcgggcaataccgtaaggcaccggctgaaccgtggaggggaccggcaattgaacaaggccctgcacattgttgcgatggtccgtatgacccatgatgaggaaacgagaaaatacaccgacaaacgcacacaggaaggacgcaccaccaaagagatccgcaggtgcatcaaccggtacctctccagaaaggtctaccgaatcctgaacgccgggactacagccacgagtcccacttgacagatatagaagggt

SEQ ID NO: 4010 - DNA, 1478 bp, unidentified
  source 1..1478: mol_type = unassigned DNA; note = element_60a1e20
  misc_feature 1..2: note = core
  misc_feature 3..205: note = LE
  misc_feature 206..1219: note = CDS
  misc_feature 1220..1478: note = RE
  misc_feature 13..191: note = bridgeRNA
cttgtatgtaatggcgatgtggtggttagctaccactacatgaagcggagcgagccagtcccccccctaaaggtatcaccttgattagcagctgatagccctccgtttccctttcacgccagcattgatcttgaacggttaccaagagcacgactctgcatgtacaaggcgaacaggcgtgatggtcaggtgaaaggagaacaaaatgtatcaattaggaatcgatgtcagcaaagcaacgctggatatttgtttgcttctcgatggtgttcgagggcgaataaaaaccaagaaactgaagaatgattatcgggctgtacatgtcattctggcctggcttcaacagcagaactgcaagcctgaagatgtccataccataatggaagccacaggggtgtaccacgaactgttggctaccgggttgcatctggctggagtaaccgtttcactggctaatccccatcgcagccgggagtttgccaggggaatggacatattgataaaaactgacaaggttgatgcgtggatgcttgcctgttacggtgcgctgaaagagccagagccctggagcccgccgccagaggaaattcgctatctcagttcccttcttaaacgcagagatttacttgttgcggatgccgttcgtgaaaaaaaccggctggaaaaatatcggtctaccaacacgccagaaatccttatccagtccgcagaaaaaatgctgttgcggctgaatgaagaaatcgccgttcttgaatctttgttgaaagaacatatagatagcaatgcaagtttgaaagaagacctggcacttttgacctcaataaagtcagtcggacaacagctggctttaaacatgctggtgattatgcgatcacatgaatttgactcagcggaacaggcagccgcatttctgggtgtggttcccgtagagaagcgttccgggacatcagtccgtggacgtaccaagatgtcgaaaattggcccccctaaaatgcgcgcaaaattgtatctctcagcgctgtgtggcctgcgctttaacccgctgatgaagtcaatctatgagcgactttgtctttcaggcaagcccaaaatggtggctgtcggtgcactgatgagaaaacttatccattggtgctttggcgtactcagaacccgccatccattcgacataaattatcagagggttgatgcgcaaagcgcatgtaaggcggcattctgaaagaacatagtgcactgctgggtggccgccgaagcccggcgtaagccggtgacggatcattatggatcctgtatccccctcccgtcctgcctgacaatacgtgcttatagcgagtaaataagtgaattaagcccttttaaccccgttagcgcggcgtagccgcgatgtatcggggacttagtgctggcagcttgctgacagcgcttagggggctgtactccgaaatctgaagcgattttttcttgacggaacacggtag

SEQ ID NO: 4011 - DNA, 1430 bp, unidentified
  source 1..1430: mol_type = unassigned DNA; note = element_60a8f81
  misc_feature 1: note = core
  misc_feature 2..91: note = LE
  misc_feature 92..1132: note = CDS
  misc_feature 1133..1430: note = RE
  misc_feature 1194..1425: note = bridgeRNA
taatggaatggacgcccactaccctaaacggcatcgaagtgccaaagtagtggtgcagtaaagcccactaaacaagagaggagcgtccgacatgaagattacaacgataggcattgatttggcaaaagaagtatttcagattcacggtgtggatgtacatggtaaggccgtgttgcgtaagcaactgcgccgcagcgaaatggcgaggttctttgccaatcttgagccttgcctgattggtatggaggcatgcggtagctcgcaccactgggcgagaaagttgggcgaatttgggcataccgtcaaactcatgtcgccccagttcgtaaagccctatgtgaagaccaataagaatgatatggcggatgcagaagcgatttgcgaagcagttaaccgaccgaatatgcgctttgtaccgatcaagaacgttgaacaacaagcaatcctctcgatacatcgcgccagacagggttttgttaaagccagaaccgcgcaggcaaatcagatgcgtggtttgctctctgagtttggtatcgtgatgcctcaggggatccgatccatcaacaaacgtatgtcggatatactggaagatgccgagaatggtttaccaggtaccctgcgcaagctgttggaaagactgaacgaccacctcaaggaattgaatcgccaggtggaagagttggagcttcagatcaagctgtggcataaacagaacgaagccagccagaaactggaagccattcccggtgtgggcccgatcacagcaagtgccattgtggcaaccgtgggaggtgccgcggaattcaagaacggcaggcaactcgcggcatggtttggattggtcccaaagcaacgatccagtggtggtaagcagatattgcttggtatcagtaaacgtggcgacacttacttgcgcactttaatgatccacggagcacgagcggtcattcgttttgctgagaacaagactgaaccggagagctgggtgcgcaagctaatggcacggcgcaataagaacgttgccgccgttgctctggcgaacaagaacgcacgaatcatctgggcgctactcgctaaaggcactacattccaccccaaacacacttcggcagcgcctgctaccggagcctgatcgaggcggctgaatagaaacgtatcggtaatgttgcaacaaaaaggaatttaaggagaaaaactttcaccgattgcacaggcaatcatgacatgatggcaagataggtcagaccgtggttgggaaagctcgttctggtacaagcacaccaagtgcgtaaaagtgatagagccccaatcagcgtattccatcagggacagaggcaatgagcttcacataaagtccggatgtatggctgcaatctttaccttctcaaaatcatcgactgaaagcttggcataacgtgggcgtccatgta

SEQ ID NO: 4012 - DNA, 1553 bp, unidentified
  source 1..1553: mol_type = unassigned DNA; note = element_60aa052
  misc_feature 1..3: note = core
  misc_feature 4..240: note = LE
  misc_feature 241..1440: note = CDS
  misc_feature 1441..1553: note = RE
  misc_feature 8..221: note = bridgeRNA
tttcgtattaataggtcaaccagagtttactggttggcctattttaatggtcgttttatgatggcagtagccgggagaacgtgacagcctctggggatttaccccgtactaaaaactgttctcccactacccccttctaccatgtttgagctggttgaggcattgacctcgtatcacaagcgaagctgtggagttggaaccattgtgggattaccggtaaatagataatggaggaacaatatgagacccgtcattggtattgatgtagcaaaaggaaaatcagtcatacaagcattcataaaacgtaatgctccttatggtcgagatcaagtgatctggcatacgccaaatggcttagaacgactacttcaaattttagccgaactagaaatgacgactaagacgaaaccagttgttatcttagaaccaaccggacattaccatcgtactctcgttcagcgaatacaaagcgaagggtatgacatcatacttgttaatcctttgcaggcccaaagagcccgaagaacaagtttgcgtaaagttaaaacagatgcttcagatgcttggcacttaggagacttatactaccaagaggaagattggttagtccatccttgtcgggaagaacatctcatggatttgcaatttctaaccaggcaacatgagttcatcaccagcctttatgtacaagctaaattaaacatgcgaacgttgctagatcaagtgtttccaggctacgagggggtttttaaggacttattttctaaaacctctcttaacctgttagacctgtgtttgtcacatgagggtatccagaacagagatgaagaagactggattcagacagtgagggaagcgacaaaagcctctcgttccgaggcctggatgaatcgtaaagtagacaacttaaaggcggctgtgctccagaaccctgtaacacaggtttcctttggattagaaacagccctacgcagtatgttgaaaacggtacgtgggtttcaaatgcaactcactgaacttgagaaaaccattctggagttgtcggcaatgattgaggaagtaaagctactagagactatccctggggtaggcacgaaaattgcagctgccattgtttcagaaattggcgacgcgacacaattccgatatcctaaacaattggtggcatatgcagggctagatccaagtgtctttagctctggaaagtttacagcgactcaaaataggattacaaaacggggatccaaacgattgcgacgcgctgtatatttagccgtcacctgtggtttacgggtaggtattaaccttcgaatgcgtgaatactatgacaagaaaaaaagtgaagggaagccccataaggtagctgtgatcgcttgcgccaacaagttactacatcacatctacgctatgctcaaaagaaggcaaccctacactttataactcattaatgccataaacttccattcatatggaggtttatttgtggtacttatttttcagtataacaaatctttagcctttcaaaaagcttgacttgacataccattagctgg

SEQ ID NO: 4013 - DNA, 1451 bp, unidentified
  source 1..1451: mol_type = unassigned DNA; note = element_60aeccb
  misc_feature 1..3: note = core
  misc_feature 4..396: note = LE
  misc_feature 397..1434: note = CDS
  misc_feature 1435..1451: note = RE
  misc_feature 11..236: note = bridgeRNA
cccgttacatttattccgtccccgaaggtcggggatttggtcgctggacctggtatgactttcttgccctgtcactgatgatccggggggtgttgtcgccaggttcggagacacgcgttgactgctgatagggacacggccggctcctttcgcaggggccaggtctctttgtaacgtgggtgccagcatcgggtgtcgtgactgcggccagaagtggtgcaaaggagcgccggatggacgaaggttacgaggtctactgcgggcttgaagttggcaagtccgagcatcacgccgcggcgttgaacgcgaccggtgagcgggttttcgacaagccgttgcctcaggatgaggggcggctgcgcgagcttttcaccggcctgcagcaggcacggcagggtgctggtgatcgtggaccagcccaacaccatcggcgcactaccgatagccgtggcccgggactgcggctgcactgttgcatacctgcctggcttggcgatgcgtaaagccgctgacctgtacccgggaaagtccaagacgaacgcgcgggatgcgttcatcatcgccgaaacggcgcgggcgatgccacacacactgcgggccgttgaccgggacagcgaggtgcttgcggcgctaaaggtcctctcgggattcgacgccgatctgacccatgagtgcaccagggcgatcaaccgtctgcggtccctgctgctgcagatctttcccgccctggaacgtgtcttccccggaaccgtgctgacccggtccctggtcttggagctgttcatcaagtacgccgggccgaccggcttgcgtgtggccgggcggtccaacgtgctgcgctgggccaggaaccacagccgcaaggacccggtgaacctggttgacgccatcttcacggcactgggcgagcagacggctaccgtcatcggcaccgaagccgtcgaactggtcatcccccgcgtcgcagcccagattaaagaactcaaacaccagcgagccatcgtggccgaagaagtcgaaaagctcctcgacgacttccctctttcccgggtcttgatgtccatgccaggagtaggcatcaagaccgcagcgacgatactcctgaccatcggcgatgccggcaccttcacctccgctggacacctcgcggcctactcaggcatcgccccagtcacacgacgctcaggcagctcgatccgcggtgaattcgctgcccgatcaggcaacaagcagctcaagaacgcactgttcagatccgcttggatcgccagctgccaccacgcggcctcgaaggcctactaccaaaagaaacgggaccaggggaagaagcacaacgccgccgtcatctgccttgctcggcgccgctgcgacgtcatctactcaatgctcagaaacggcaccctctacgaggaggaacccgcccaagccgcttgacgaaaagcatagggaca

SEQ ID NO: 4014 - DNA, 1364 bp, unidentified
  source 1..1364: mol_type = unassigned DNA; note = element_60b1ca8
  misc_feature 1: note = core
  misc_feature 2..69: note = LE
  misc_feature 70..1095: note = CDS
  misc_feature 1096..1364: note = RE
  misc_feature 1124..1358: note = bridgeRNA
gaatgacatggattccccctcccgaggaactgccacacttaagtggtatacatttgcactggaggcaccatgtctgattattcttatttttgcgggattgatttagctaaaaaccacttcagcattcatgctgttgaccagcacggcaaagttctacttcataaatcagtcactcgctctaaattactgactacaaaagcaaatatgccacctatgcgaataggtgtcgaagcgtgtggtggtgcacattattgggcgagaacattacgcaaattcggtcacgatgctcgtattatggcggtcaagtacgtcgcaccttatcgaaccaaaggaaaaaatgacctcaatgatgcggtcgctatatgcgaagccgtacaaaggcccactactcgctttgttcctgtcaaatcccctgagcaacaagctatcttatcggttcatcgaatgagagagcattgggtgcgtgaacgtaccgcattgatgaatcgtatccgtgcactactttctgaattcggactaatcatccccgttggtcgcgcttcgttaatgaggctagtacctgatatgcttggaaaccctgagaacgagcttcctaacttagcacgtgcaacgctagctgatgcattcgagcaccttaagtctctcaaccagaatatcgataacacagaaatcactttcgatgcgttcgctaaagtcagcacaaacgtccaaagaataatgaaagtaagaggcatcggtcctcaaaccgccactgctatcctcgcctccatcggcaatggggctcaatttgataagagccgtgatttctctgcttggctaggtttggttccaaaacagtactcaacaggcggaaaaccgaggttaggacgcatcacaaagcatggcgataagtatctgcggacactgcttgtccatggtgctcgaacagtcatcgccaacttaggtgataaacaagacaggcttagccagtggtgccgaggcgttttagaacgaagaggtatgaatcgtgcggtggtcgcattggcggcgaaaaacgctcgaataatctggtcattgatacacaaccaaacggagtatgagaattactctgcttaagctttcgttaactcaagcagagtaagcgttttacccaccgggtcatagcagacgcaatggatggagataggtgaagaccacgagcggagagcctgttaatgcggcggacacattgaatgtcatctaacgaataaggcaccgcagtcgcgcaaagtcatcagggtcacgatgtatgcgaatcatcgataagtagaccgaatgtagagcggcagtccaaaacccatcacttgaagtttagcggatgtttgacaaccgggggaatccatgta

SEQ ID NO: 4015 - DNA, 1382 bp, unidentified
  source 1..1382: mol_type = unassigned DNA; note = element_60b3442
  misc_feature 1..2: note = core
  misc_feature 3..86: note = LE
  misc_feature 87..1118: note = CDS
  misc_feature 1119..1382: note = RE
  misc_feature 1151..1370: note = bridgeRNA
tgatgctgtggacggctcctccaccggcgcgtgagcgccacggaagtgggtgctgttaaggcccccacgattcggaggagccgagcatgcagacgatcacaacaattggtctggatatcgcgaagtcggtctttcaggttcacggcgttggtgctgacgggcacgtggtggtccgccggcagttgaaacgtcgatacgtgttggcattcttccagaagctaccgccatgcctgatcggcatcgaggcttgcgcctcggcgcaccactggtcacgcgaactgcaatcgcttggtcacaaggttcgactgatgccgccggcgtacgtgaagccctacgttaagcgccagaagaacgatgcgaccgatgcggaggcgatctgcgaagccgtgagccggccaaacatgcggtttgtggcgaccaagtcggccgagcagcaaagctgcctgatgctccaccgcacgcgccatctcttcattcgccaacagactgcggtgatcaatgcaatccgcgctcatcttgcggagtttggcatcatcgcgccggtcggacgcaatggtgtcgagcagttacttagtgtcgttgccgacgcgggtgacaagcgacttcccgaggtcgcacgcgcctgtattgcggctctcggcgcgcaactgcagacattgaaggcgcaggttcttcagttcgaccgcttgatcaccgcttggcaccgctcaaacgaggcaagtaaacggctcgatgcgatccccggcgttggccctgcgctggccaccgccttggttgccagcgtcgccaatccgcatgccttccgatcgggacgggacttctcggcatggattggactcgtcccaaagcagaactcgagcggcggtaaggataggcttggcaacatcagtaagcgaggtgatcgttatctgcgcagcctgttcacggccggcgcgctcgccgtcatccgctatgccaagatccgtggcaccaagcatcggccatggctcaccgcattgttggccaggcgcccgacaaaggttgctgcgatcgcgctcgccaacaagatcgctcggatggcctgggcgatgatggccaagggcgagcactacaaggaacccgccgcgcttgcggcgtaacgagatcgcgtcggacaacatccggcgtgatgtgacggttgggagagcgaacagcacgtaatgcagagccggtcgatccggcgatcaggacaacccactagggccacagcatcgtcgaatgcggggttttgaccgggacctgatccgcggacggcattagggccagcggtcatgtgaaccgcatccaaaggccgaacacatggctgcaccgaccaaccctgcattcgtgaagaaagctcttgccaactcggagccgtccacaca

SEQ ID NO: 4016 - DNA, 1468 bp, unidentified
  source 1..1468: mol_type = unassigned DNA; note = element_60b4b62
  misc_feature 1..2: note = core
  misc_feature 3..258: note = LE
  misc_feature 259..1239: note = CDS
  misc_feature 1240..1468: note = RE
  misc_feature 45..241: note = bridgeRNA
ctcatatctttgttatagttacaaaatgataaaatacttatctttaaaatagtaataattgataaacaaaatgaagttgcaaaattctatcggggccagatacgtttagtacgatattgtaagttaggttaatcaacttcattttaattacatttcaagtcgcaatagtacttaagcactaggtttttaatttagatgcagtataactaatgagccaagacccatgtagttttttgtttgtcttaaacagccaatgttatgactttaaagtattctgtaggattagatgtttctagtaaaaaaatagacggatctatttgtgtgatcgaccaaaatcagcaagttcagtttatgtctaaaattacatttaacaacactgtctgtggttttaaaaatttagactcttggataacaaaatggcataaagctacggagttacctttggttgtttgcatggaagccacaggtgtctatcatgaaaattgtgccttatatttatttgaaaaaggataccaactatctattgttttacccaataaggcaaagaaatatttagaatgcttaggtttaaaatcaaaaaatgatagtattgacgctagagggttagcacaaatgggagctgaacaatgcttaggactttggcaaccgctaggtcggtattattatgaattacgcaattacactaggcaacatcaaaatatacaagagttaaaaacagttataagtaaccaaattcatgcattaaagcacggtatgtatccttgtgaaatgacaattgaacaacttaaaaccactttagccctttttgattctcagttgaaagagttaagtaaaaagatgaaattacatttaaaatcagatgatgtggtttatagaaaatgcttaaatattctagcaatgaaaggcttaggttatttaacaattgcaactttaatagcagaaactaatggttttgaactattcgaaaattataagcaattggtatcttatgctggttatgatgttgtagaagcccaatctggaacaagagtaggaaagactaaaatatcaaaaaaaggtaattcaagaataagaagagcacttcatatgccgtctttagtggttataacgtgtaaagaaaaaccgtttttagatttatataataggacatttgaaaaacatgctataaaaatgaaaagttatgtagcggtacaaaaaaaaaatattagtgatggtctatcatttgtggaagaaaaatgagcgatacgattctgattatcaaataaatattcaagaaaaggagcaggagctttcttctctgcttgcctttgaaaaaggcacaaacgcaaaaacggataaaaaaattagccccaaacaagttgaggctaaacaaggtaaacattcaacgaaaaatcgcagtacgtttcctctctgctaatccaaatatattgaaaataaattaaaacaaattaggttttaaagatagtac

SEQ ID NO: 4017 - DNA, 1364 bp, unidentified
  source 1..1364: mol_type = unassigned DNA; note = element_60b5fc2
  misc_feature 1..2: note = core
  misc_feature 3..84: note = LE
  misc_feature 85..1113: note = CDS
  misc_feature 1114..1364: note = RE
  misc_feature 1129..1352: note = bridgeRNA
tgatgcggtggacggctccccctggcggcatcgcgatgtgccaaagttggttgacgttaaacaaccacaaggagggaaccgaccatgggcgagattatcacgataggggttgatctggcgaagaacgtttttcaggtgcacggggttgatgccgagggggcagtgatcgtccgtcgccagcttaggcgagcacaggttctgccgttctttaccaaacaacccgcctgtcttgttggcatggaagcgtgcgcgaccgcgcatcactgggcccgcgagctaaccgggcttggtcacgcggttaaactgatgccgccgcgctatgtgaagccctatgtaaagcgcaacaagaacgatgcagccgatgcggaggcgatctgtgaagcagtaacccgcccgaccatgcgctttgttgcggtcaagagcacggatcaacaaggcgtgctgatgctgcatcgaagccgagagctgctggtgcggcagcgaaccatgctggtcaacgccatccgggcgcacatggccgagtttggtatcgttgtgcctgcggggatccagcgggtaaagacgcttctggttgtgatcgctgatgcggaggatgaccggctgccttctgttgcccggttctgccttgagggtctggcgcggcagctggcctcactccacgaagagatcaccgtgcttgagaagcgtattcacgcctggcaccgctcaagcgaggtgagccagcggctgcagaccatccctggcattggaccgatcaccgccagtgctctggtggcctctatcggtgatccgtctctcttcaagtcgggccgtgagatggcagcctggatcgggttggtgccaagacagaactcgagcggtggcaaggagcggttggggcggatctccaagcagggggaccaatatattcgctggctgctggtggctggcgccatgtcggtggtcaagcaggccagaatgcgggatacgccatcctggctcacccagatgatcgccaccaaaccagccaaggtggtggccgtggcgcaggccaacaagaccgctcggatcgtctgggcattgttacagcatgggggcatctaccaggcaccaccccttaagcaagcggcctgaagaccacaggctgacagaagtttggcagagtaagcgagaggtaatgcacaatcggttggaccgtgggtcaggagaacccgtgttagccaaggcgcataacagcgcgcgcttttgactgggacctgatctggcggatcgcattagggccagcggcaacgacacgccgcatcaacaggccggacacatggcagcacccgaccaaccagtatcaacctcaaataatctcttgccaaacaggagccgtccacaca

SEQ ID NO: 4018 - DNA, 1427 bp, unidentified
  source 1..1427: mol_type = unassigned DNA; note = element_60c137e
  misc_feature 1..2: note = core
  misc_feature 3..137: note = LE
  misc_feature 138..1163: note = CDS
  misc_feature 1164..1427: note = RE
  misc_feature 1180..1423: note = bridgeRNA
agatggtatggacgcctccccccggcagcgggccgaccgccgcactgtgcacgacaagcggatctcgcggccccgatatacaagtgtcaaagtaacgcgtgtgaacagcaagaacacctctaacaggaggatccaccatgaaacagagtgtgattggtatggacatcgccaagaaggttttccaactgcataccgtcgatcagcgctccggaaaaatcgaacgtttcaagctgcggcgtgaagaggttttggcgtttttcgccgagcgtcagccctacttggtagcgatggaggcttgtggcagtgcgcactggtgggcgcgccagcttcagcagttggggcatgaggtgcgcttactggctcctcgctcggtacgcccattcgtactcaggaacaagaccgatgcggctgatgcccaagcgatatggacagcagtgcagcagcccgacgcccaccaagtcgcaatcaaacaagctgatcagcaggccatcctctcgctgcaccgcatccgcgctcaactgctgaaatttcgcattatgcaaagcaatgcattgcgcggcttgttctatgagttcgggattgtgttgccggaaggctacaccccgctgaccaaggcggtgcctaacgccttcgtcgatgcggaaaatcaagtaccccatgtgctgttggaaagtctgcgcgagcagtgggcacgggtaatccggctggacgaagaaatccaagcgattgaactccgtttgaaacactgcatgcgtgagcgtctcgattgtcaaaaaattgcagaaatccccggagtaggcttgttgacggccacagccgcagttgcctcgctgggcgatgccaaaacctttcgctccggtcggcagtttgccgcttgggtgggactggttcctcgacagacaggcacaggtggtcgagttcggcaactggggctgagcaagcgcggtgacacctatctgcgaacactgtttatgcatggtgcccgctcaatcattgccagggggcagaagtctgagtgggttgagcgcttgcttgccaggcgaccgtataacgtggtggtggccgcagttgccaataaactcgcgagaaccgtttgggctgtgctggtcaaaggctcccgatatcgcgcagaactctttacggcatgccctgtagggcattgaaaaagcttatagacaaaaggcttcacaaggagcgcacgcggtagatacgtgatggcgaaataggtcagaccgtgacgaggtaaacctggtagggaatatgagctatgggcacaccatcagctcgattttcagatgagggcctcgtcagcggattccatcagggccagtaggcttgtcggcctgcacaaacaggccggatataagactgctcctacctatacgtcagcatgactaccccattgagcttcgggaggcgtccatata

SEQ ID NO: 4019 - DNA, 1218 bp, unidentified
  source 1..1218: mol_type = unassigned DNA; note = element_60c74d9
  misc_feature 1..2: note = core
  misc_feature 3..246: note = LE
  misc_feature 247..1203: note = CDS
  misc_feature 1204..1218: note = RE
  misc_feature 35..238: note = bridgeRNA
cttgtatggttgagtctccatcaaccaaacttcaagaaagggcgaggagccgggatggagggacatcgacaggcttcggccgttgcttaagacccaacggaccgactaactgagtcacaaccccatccctgcgccgagcgtcaataaggaacctggcgacgtcttctgctcaatgcagtctcgatcgccaattcttgcaagctcacgccgacagcagggtccaccccggcactcgtattttgagcgatgaagaaccaacaagctactgaatttgttggcgtggatgtagcaagcgcccacttggatgtcgccgtgtacgggcagtccagcgtgcaacgatatgacaatacagtcgaaggcatcaccaaactgctgcgcactctgcgccgtggctgcgtgctgggacttgagtcgaccggccgctatcacacggcgctggcacaggccgcacatgctgcgggcctgcgtgtttatgttctcaaccctctggatgcgcgccgctacgcgcagtcagtcggccaacgcggcaagaccgaccgcatcgatgcgcttgtcctggcccgctacgtctgccgcgagcatgagcaactgcgccagtggcagccgcccacagccagccaagcccaactgcgtgagctcattactcaccgggcgaccttggttcgccagcgcagcgcactgaagcaggccggcagccacaacgagatgctcacgcagctgaacgcgccggtgctcaaggcgctgaaggaagctatcgagcacatcgatacgcaactgaccgcgatcatcaaagctgacccaccaagccgccaggcattcgagcacatcacctcggtgcccgggctggggctggtctgcggatcgctgctggtaatgctcttcgggagcatgcagcagcccagtgccaatgcggtcatcgccttcaccggactggatccgcgccccaacgactcgggtaagaagacgggccaacggcgcttgtccaagaggggctggccggagagccggcgccttctgtacgtagctgcgatgtcagccgcccgtaccaagacctggaaggagttctatcttgcccagcgcgagaaaggactgagcacgacagctgcgctgatcgtgctcgcccgaaaactcctgcgcgtggcgtattcgctgttcatgcagcaaaacaacttcgatggctcacgggtggccattaagggttgacgaaaaccatagaac

SEQ ID NO: 4020 - DNA, 1354 bp, unidentified
  source 1..1354: mol_type = unassigned DNA; note = element_60caec3
  misc_feature 1..3: note = core
  misc_feature 4..78: note = LE
  misc_feature 79..939: note = CDS
  misc_feature 940..1354: note = RE
  misc_feature 1088..1341: note = bridgeRNA
tgatggggtggatggcccctttgcggcatctctgtgccaaagttgggttatcgcaacaccaacgaagaggagccatccatgaataggattagcaccataggtctcgatctcgcgaagacaatctttcaagtccacgcggttgacgcatctggcgcggtggtgctgcagcgggcgctgagacgcggcagggtgctggagttcttcgccagcctgccaccctgcctgatcggcatggaggcctgcgcgacggcgcactactgggcccgggaactgagcaggctgggccacaaggtgcggctgatcccacctgcctacgcaaaggcgtatgtgcggaggaacaagaacgacgcggcggaggcggcggcgatctgcgaagctgtgagccggccgaacatgcgctttgttgttgtgaagacagagggtcagcaagcggcagccggcgtacacaagacacgagaattgcttgtgaaacaaagaactatgatcatcaatcatctgcgcggcatgatggcggaattcggcatcgtggcggctgccggaccgcagcacgccgccgagctggtggcagttctgctcgatccggcagaggcacacctccccgtgccgctgcggcagacgctgagggtgatggtcgatctgtttgccgccattgaacggaagcttgaaggcatcgacaaacagttgctggactgggggcgtaacaaccaaacctgccgcaacctggtcacgatccccggctatggcccgatcctgtcgagcgcgatggcagcaatcgtggttgatcccaaggtttttcgcagcgggcgagagttcgccgcttcgctcggtctggtgccgcgacatgaaggcaccagcggccacatcaagctcgggccgatcagcaaacgcggcaacggctacttgcgccggttgctggtgaacggcccacctcggtgctgaacagcaagcgaggcaagcaggatccgtggctgagcaagctgctcgcgagcaaggcacgcaagctggtggcggtggctttggcgaacaagatggcgcgcatcgggtgggctgtcatgatgcgccaagagggcttccgggccgcggcagcggcctgagcggccggggatggggcgcccgggaggcttgcgagggtgaagcagtgtgatggcaatgtcggtcaaccgactgatcgagcgagacctgactatcgtcgtgggacaacgcgatcccgtagcaatgatcagaactcgatccacggttcccatcagggcctgcggtccacaaccgcgccaacaggccggacacatgaccgcaaggtgccgccaattgcactcacgcgcgacaaaacccttgccagcggggggccatccacaca

SEQ ID NO: 4021 - DNA, 1385 bp, unidentified
  source 1..1385: mol_type = unassigned DNA; note = element_60ce20f
  misc_feature 1..2: note = core
  misc_feature 3..90: note = LE
  misc_feature 91..1119: note = CDS
  misc_feature 1120..1385: note = RE
  misc_feature 1093..1372: note = bridgeRNA
agatggggtggatgccgcgctcccctaacggcatcgcgatgtgccatgcttgtgatgtcaaagcacaagacagaataggagacggcatccatggaagaggttactatgatcgggatcgatctggcaaagaacgtgttccagctacacggcgccacggcggaagggcagcctgtattccgaaggaagctcacgcgtccgcagttccagcgcttcatggctgcgcatccggcctgcacggtggcgatggaggcctgcccaggcgcacactactgggcgcgggagatggagcggctgggccataccgtaaagatgatctcgcctcactatgtcacgccctacgtcaagcggcagaagaacgatgcagctgacgccgaagcgattgccgaggctgccacccggccgcacatgcgtttcgtagaaccgaagtctgccgaccagcagagccgtgccgtggttttccgtgtccgtcagatggccatcgcgcaacggaccgagctggtgaacgcgctacgctcgcatctatacgagttcggctacatcgcgccagtcggcgtgcggcatctgccgaagctgattgcgatggtcgaggacgagcgaagcaatctgcccgggcccgcacgccccgcctgtcgagcgatcctacgccagattgagagcctcgatcacgagattcgcgcgctcgatgcgcaaatcgcggaactgtctaaggaaagccactgcgccgaacttgtgcagactatgtcaggggtcggcccgattaccgccatggccatcgaggccttcgcaccgcccatggagagcttcaagcgcggccgcgactttgccgcgtggctgggtctcgtgccacgacagaactcgtccggcggcaaggcgcggttgggcaaggtctcgaaggccgggcaacacgatatccggagattgctgatagtgggcgccatgtccgcaatagtgggggcttccaggcgtggaatctccgaaaacacatggttgggacagctgatgcttagaaagccccgcatgctcgcggccatcgcgctggccaacaaaatggcacggcgcatctgggcgatgatcacgaagggtgaaagttaccgggatccggcactggcgatgacctaacaggttgctgccggtccgccggatatcggggatgtgaggaaggcacgagctgaatggacaactgatcgaccggatcggggcagggaaaaccagataatgcgtaagggcttcaagcccggtgagaagtattggacccggcccgcgaaccaccatcccggcccgcggcgcatgtgaagagccgcaatcagaggcctgactcaagcacgcactcgatcacagtctcacgaggttcaatctgtccttgcactccgcgcggcatccacaca

SEQ ID NO: 4022 - DNA, 1596 bp, unidentified
  source 1..1596: mol_type = unassigned DNA; note = element_60d6ac1
  misc_feature 1..2: note = core
  misc_feature 3..423: note = LE
  misc_feature 424..1458: note = CDS
  misc_feature 1459..1596: note = RE
  misc_feature 1..222: note = bridgeRNA
ccgttaccttgagggtatccccgataatggggatagtcgctgggcccggtatggcttattgcccctgtagttaccatgatccggggggtgttgccgccgggctaccaggacacccgttgactgctgatagggacacggacgaaccaatcaggttcagttctctttgtaacgtgggtgccagcatcggatgtcgagacaccagcgacaacgttccacctgtcactgttgctccgacaccacaaggaggccgaccatgaccaccggcaccatcgacgtcaccatcggattagacgtcggcaaaaccgcccaccacgcctgcgccatgctggccacaggcgagatcatctacgacaaacccctacccaggacgagggccagctgagaaaggtcttcaccgacctccaggcccacggcaccgtcctgatggtcgttgaccagcccaacaccatcggcgcactcccgatcgcagtggcacgcgacgcaggctgtctggtcggctacctgccgggactggcgatgcgtaaagccgctgacctgtaccccggccggtcgaagaccgaccgtaaggacgcattcatcatcgccgacacggcccggacgatgccgcacaccctgcgggccgtggaccgggacgatgaggtcctctcagctctgaagatgttgtcgggcttcgacgatgacatcgccaaagactgcacgcgcaccatcaaccggctgcgtagcgttctgacccagatctacccgagtctggaacgcgcgctacctggcagcgtcatcacccgacccctggtgctggacatgttgatccactacggcggccccacgaagctgaagaaagccggctaccaccgggcactggcctggatgagcaaacgagctacgaaggaccccacgacgttggtggacgcgatctttgagggactcaaggctcagaccgtcacggtgcccggtaccgcggctgctgagatcgtcatcccgcaactggccaccaacatcaaggccctgctggaacagcggaaaaccattgctgagcaggtcgaggagttgcttcaagacttccctctttccgaggtcttgatgtccatgccgggagttggcatcaagacggccgcgaacatactcctggctgtgggtgactgttctgatttccggtccgccggccacctggccgcctatgccgggattgcaccggtgacccgaagatcgggaacgtccatccgtggggagttccccgccagggctggcaacaagagactcaagaacgcgttgttctactccgcgttcgcatccatccggttccatgaaccgtccaagacctactacgagcggaaacgggccgagggcaaacggcataacgctgcggtgatgtgtctggccagacgccggtgcaacgtcatctacgcgatgctgacccgggccgagttctttagggagatccccgccagagttgctgcgtagcccaccttcaccacgatcagctggtcgacgcgagtacgccggccagctgctcaaccacgcccatcatcagaatcgggagctacccccgaagtgctttcctgaatacagggcctaccccttgacaaaaacatagggaca

SEQ ID NO: 4023 - DNA, 1389 bp, unidentified
  source 1..1389: mol_type = unassigned DNA; note = element_60dd69e
  misc_feature 1..2: note = core
  misc_feature 3..120: note = LE
  misc_feature 121..1128: note = CDS
  misc_feature 1129..1389: note = RE
  misc_feature 1159..1384: note = bridgeRNA
agatggtgtaacgggcgggaacccagcccgccaggtttgattgcctggtggtcgtcccccacaatgatggcgtcgcggagtcaggagtgacctgctccatagcagcacggagagacgaccatgaagcaatatgccggcatcgacgtatcattggaatactcaagtgtgtgcgtggtggatgcggatggccgcgtcgtgcgggaaggaaaggtacccagcgagcccggtgcgctgatcgcctggttcagcgattgcggggtggctttggagcggatcggtctggaggctggccccttgtcgcagtggctccatgccgggatgatgggtctgacggtcgaactgattgagacgcgccatgtgcgtgccgccttcaagacgatgccggtgaagaccgacaagaaggatgcgcggggaattgcccagttgatgcggcttggctggttcagagcggtccagtgcaaatctcttccggcccaggagatgcgagcgcagggcaagctccatgatatcgagatgagcatccggggcattctgcgcggcttcggcctcaaggtaggaccgaccacccgacgcgcctatgcggcacggatcagcgagctggttgaaggtcatccgaccttggaggcaatcgccgcttctctgttgaaggtgcgcgatgcgcttgcgggtgaatttgcgggttttgagcgtaaactacgtgtcatggcccgtcaggacgataacgcacgtcggctgatgacgatgccaggcgttggcgtgctggtagcgctgacattcgtgtcggccgtcgacgtgcccgagcgcttccgatcatcacgagcggtggggccacacttcggattgacgccgaagaaatatcaatcgggcgagaccgattatagtggccgcatctcgaaggtcggcgatgcaggagtgcgaaccgcactctacgaggcggccaacgtcattttgacccggccagtcaaaggctcggatctcaaaagctgggcgctggcggtcgctaagcgtgcaggacccagaaaggcacgtgttgcattggcccgcaagttggcggtggtgttgcaccacatgctccggaatgggaccgatttcattccccgcagggcggtggcagtcatgaccgcttgaacaaggaaggacgaaacaagacgggctttcggatgggcactgccatcagccttccggagcaaggtcccttcgccgggacgatggataggttaggccgtagaactggacgcagcaatttgtgactgcgctattagagagattggccagccggtcctcagcagaccccatagagcagcgacccggcgtcgactgcggacagaagcaagcactcggcgagggattaagctcaaaagggattgacttgggaaggcccgttacaga

SEQ ID NO: 4024 - DNA, 1428 bp, unidentified
  source 1..1428: mol_type = unassigned DNA; note = element_60de799
  misc_feature 1..3: note = core
  misc_feature 4..139: note = LE
  misc_feature 140..1159: note = CDS
  misc_feature 1160..1428: note = RE
  misc_feature 1196..1427: note = bridgeRNA
agaatgagatgaacgcatcccaactatgagagctgacgcacgaatggtgatgagaataagtgtggagcctcacagatttccggcatcatagtgcccaatacgggatgcataaagctccctcagactggagactccacaaatgaaatatacaccggttggcgttgatatagcaaagcatctgattcaggttcacttcattaatcagcatacgggtgaagtggtcgataaacagatacgtcgtcaggattttttgacgttcttcagtaatcgtgaatcctgcctgattggcatggaggcctgtggaggctcacaacactgggcacgtgaactgaaaaaacagggtcatgaagtgcggttgttacaggggcgttttgttaaggcattcgtcatgggcaacaaaaacgacgtgatggatgctcgggctatctggatggcggtgcagcaacccggtaaggagattgccgttaaaaccgaggagcaacagtcggtgctggttctgcatcgctcacgcaaccaactggtgaagttcagaaccgcacagattaattctctgcacgggacgttgctggaatttggtgaaactatccacaaaggccgggcagcgatggatcgggagtttccggctgctctggagcgaatgaagacgaaacttccgccgtatcttatcactgtgctggaagaccagtacaacaggttaagtgaactagactcgctgataaatggtttggaaaaacagattaacagtgtagcgcgacagaatgaaacctgtcagcgactgatggaaataccgggcattgggccgctaattgccacagcagcggtcgccactatgggagaggtatcgtcgtttaaatcgggaagagagttcgcggcttatgtcggtttggtgccaaagcagaccggctcagggggaaaagttcgcttgctgggaataagcaaacgtggtgatacctacctccggacattgtttatccacggtgcaagagcagcagccctgctgtccaaagagccggtaccatggataacggaactgaaaaaacggcgtccgaccagtgtggcaattgttgccatggcaaacaagctagcacggacagtatgggcaatagccgctcatggtcataaatacaacaaggatcacatcagtatcaggccatattaatcgctgatactgataaatactaactcttaaaaaagggtgaatgctgaaaggttgctttggcggccgacgtgatgacaacgacaggtaagaccgtgacctgataaacctgaatactctcttggacataaagtccgcaaggagaatgaggctcaggtcagcgaatctcatagtggcccgcagctctgactgcaataaggccggatacagagctgcaactactcgtcgatgtcagaacaacggaagccttgcaaacagggatgcgttcatac

SEQ ID NO: 4025 - DNA, 1542 bp, unidentified
  source 1..1542: mol_type = unassigned DNA; note = element_60e239d
  misc_feature 1..2: note = core
  misc_feature 3..235: note = LE
  misc_feature 236..1414: note = CDS
  misc_feature 1415..1542: note = RE
  misc_feature 10..214: note = bridgeRNA
ttgtattatagagtagtagtttttagtgaccctctccaaggtcatatgctatactgtaggggatgctgtggattggttaaaactcctaccgcccgacggttttcgaaaggctccaaccacagtcctttgcagttttgttaatcagttagataccgcccgacggtttatgtggaacaaggttacaacgcaaagtgttctgtgaacatagcatcatattttccaaggaggtaccgttatggtttttgttggtattgatgtggctaaagataaacacgactgcttcatcctcaattcggagggagaagtgttgaccgacgtgtttaccgttgccaacagtcgagagggattcgaactgttgctgaaacgtattcgctcctgcacacgccctgctgatagaataaaagtaggacttgaggctacaggacattacagcaataacatcgtccgttttctcctcgacaatggcttggcccccgttgtcattaaccctttgcacaccaatctctaccgtaaaagtctcagcttgcgacagacaaagacggacagaatcgatgcaaggacaattgcgatgatgcttatgtctgatgtggacctcaagtcctacacagacatattatatcacaacgaggaactaaagtcactcaccagatatcgctttgacaaggttcatgaaatgtcgaagctgaagcagtccgtctcaaggctcgtaaacatcctgtttccggaactcgaatcgctcgtgtcgtctcttcatctgacatcgatttacgctattcttagcgaatttcccggtgcaaagcaaatcgcggattcgcacctgactcacttcagggctgttcttaagaatgcttctaaggggcgctatggtcgcgagaaagccgatgaaatccacgcggcggctgcgaagtcaataggttctgtgtctcaggcgaaatctcttgaactcaaacataccattcagcagattcgtctgcttgacaaagagatcgccgaaaccgaggcttcaatcagggaaatcatggatggaatggcgtcgccgattctttccataccagggataggctatcgcatgggggcaatgatcctggctgaaatcggtgacttctccaaattcgagtcagccgataaaatactggcttatgccggtttatccccgtcgatttatcagtccggaaaattcaacgcgaccggggcttacgcacacatggaaaagcgtggttcaagataccttcggtatgcgctcattaacgccgccaaatacgtgtgtcactgggatccagtatttgcggcttaccttgaaaagaaaagaggtgaaggcaagcattacacggtagcaatctctcacgctaccaaaaaactggttcgcgtaattttcgctcttcagactaccggcagttcttacaaggctgcctgaaagccgtcgattccagcgtcaggcggcgcccgttcagccggacgcttatttgtttgcgccacttaggagattgttcatctagtccataaaaatcctccgttttagacttgacatttaatagttagtct

SEQ ID NO: 4026 - DNA, 1110 bp, unidentified
  source 1..1110: mol_type = unassigned DNA; note = element_60e63d2
  misc_feature 1..2: note = core
  misc_feature 3..162: note = LE
  misc_feature 163..1104: note = CDS
  misc_feature 1105..1110: note = RE
  misc_feature 1..164: note = bridgeRNA
ccctgtgtctggagagtctgtcatgatggggtgggtgggaagccgttgggtccttggcgcttgacgccgtgagccggctcggtctcccgcccgttccatctacaaacctgaacagttgcacgaggctgcgtcaacagacctcgcatcacagggacaggcaccatgatcatatcccttcgttacgtcggaatcgacgtctccaaacaccatctcgatatctttgatgaggccgtcggagtgccggagcgcatcgccaacgcgccacatgccatcacagagctggtggcgcgttggcgatgcgatgcgttggtggtgtttgaggcgaccggggtctatgaccgcgaactccgcgaggcattgcgccaggccggcatccgcttcgcccggatcaacccagcacgagcccgcgactttgcccgcgcctgtggacagctcgccaagaccgatccgatcgacgcgcgcatgctcgccgcctttgcccgcgccatgcggcccgagaccgaagccgtcatcacgccagctcgcgaagccctcacatggctggccaaacggcgtgatcaaatggttctgacgcgcagccaggagaagaaccgtcgcagcgaagccgctgaccgtgccatcgtcagccgcatctcccgcttcatcgactttctcgacgaggagatcgccgagatcgaggccgagatcagcgcgctcatcaaggccgagcccgagatctcggaagatgcccagctgatgcgcacggtacctggcgtggggccggtcgcatgcacgcagctgatcgcccagatgccggaactcggccgcatcgggcccaagcaggcagctgcccttgccggactggctcccttcaatgtcgacagcggtacctgccgtggcaagcgcaagatcggcggcgggcgcaagcgcgtccgcgatgccctctatatggccgccctgaacgccgtccggcgcgccgaccccttcaaggtcttctatgcaaggctgcgccaggccggcaaaccggccaagcttgccctcattgccgttgctcgaaagctgctcaccatcctcaacgccatgatgcgcgacagaaagccctatcggacagccccttcaacataacagttg

SEQ ID NO: 4027 - DNA, 1389 bp, unidentified
  source 1..1389: mol_type = unassigned DNA; note = element_60ea839
  misc_feature 1: note = core
  misc_feature 2..240: note = LE
  misc_feature 241..1122: note = CDS
  misc_feature 1123..1389: note = RE
  misc_feature 1170..1384: note = bridgeRNA
caatgggatggagtcctccccaccctaccccggcgccgatgcgccacactgagagagtgaggctgcctgctgaggagcgcatcccatgggcatttcacgcgttggtgtcgatattgccaaatccgtctttcatgtccacggcgtcgatcgtcatgatcaggtccaatggcgcggcatgtaccagcgtgacaagtggctggacgccatcgtcaagcgcgtccccatggggccgagatcagtatggaggcgtgtgcctccgcccaccactgggcccgcgagctgcaggcgcgcggctatcacgtcaagctgatcgccgctcagttcgtcaagccctacgtcaagagcaacaagaacgatcgtgtcgatgccgaggcgatctgcgaggccatgggccgcccccacatgcgcttcgtcgccgtcaagtcggtcgcccagcaagatgttcaggcggcgcatcgcatccgcagtgaactggttcagcagcgtaccgccaaggccaaccagattcgtggcctgatcggcgagtacgggctggtggcgcccaccggcatcggccagctgcgagcagccttgccacgctggctggaggatgccgagaactgcctgactgatgacttccgtgtcttgttggcaggcctcgccgaggatttgcgccacctggatgcgcgcattgtcacggtgacagaaggcatcgagtgccacgcccagaccgatcccatcgccaagcggctgatgaccctgcgtggcgtcggcatactcaccgccagtgcgttggccagcgctctgggcgatgcccaggctttcaagcgcgggcgcgattttgccgcctccctgggcctgacaccaagacagcatagtaccggcgggcgcgaccgcctgctgggcatcagcaagcgcggcgacggttacctacgcaccttgctgacccatgatgagcgcgccgtgctgcgctacagcgagggcaaggaggacaacctcagccactgggccaggcagctggccgagcgcaaacataccaatgtggcggtgattgcccttgccaacaagacggcgcgtattgcctgggcgatcacgcgccacgatcaggcctatgaccccgacctggcagcgcaggcagcgtgacaccaccccataaattcaccaacattacagcgagatagcccaccatcgacgattgctgagtgtgctgcagatggcgaacaggtcgaaccgacgtcagcaaacccctgtatgcctaagagcgagttgctcgtaccaccgattgggagctgacgtgcggatagcccatcagggtccgatgcccatggcatcattcaagagaccggatatacgtgtgcagtcgtaccgcccatcaagtcgcatgcttgcaaacggggaggactccatata

SEQ ID NO: 4028 - DNA, 1362 bp, unidentified
  source 1..1362: mol_type = unassigned DNA; note = element_60ed130
  misc_feature 1: note = core
  misc_feature 2..70: note = LE
  misc_feature 71..1108: note = CDS
  misc_feature 1109..1362: note = RE
  misc_feature 1119..1352: note = bridgeRNA
tatggaatggctcgcccctccctcccacatcgtgcattttgcatggagagatttaacaaggagcagagcaatgcagatagctgtgttaggaattgatcttggaaagaatagctgcagtgtggttggacttgacgagcgtgggcaagtcgtacttcggcgacggttgcgtcgagagggtgtcatcaaactcggctcaactctgccgacgtgcataatggcgatggaagcgtgctgtggcgcccaccatgttggtcgccaacttcagtctcaaggtcatgatgttcgtctgatgtcacccgaatatgtgcgtccttacataaaggctcaaaagaatgatgaccgcgacgcagagggaatagcggaagcggctacgcgtccgacgatgcgtttcgtcgaaatcaaggacgaaaaccagttggatatgcagaccctccaccgtgcgcgtgaccgtctcgtcgcggaacggactgctttgatcaaccacctgcgggcgatcctcttggagcgcggccttaccgttccgcaaggtcgtcgtaagctcgagatctggcttgacatgaaaactgatgaaggaaagcccgccctcagtcgccggacaataaccctcatagcggatatgcgtgcgcagtggagtgagatggaccgccgcatcgcagcatttgacgatgaattcaaagcccatgcccggtctgatcagccatgccggcttctagccactatccccggcattggacctctgaacgcaactgcgttggttgcgtcagttgggtatgcgcaatcctttggacgcggcagagacctggcggcttggctaggccttgtgccacgacagataacaaccgggggaaaaccgaaagtacttggtatcaccaaacgaggaaatggatatctaagaaagatgctcatccacggcgcgcgcgcagctcttccaatgctttccaaatctgagacgcctcttggcgactggttacggggtctacttggtcgccctcacaagaacaaagtgatcgttgcactcgcagcaaagttagcgcgtatcgtgtgggctgtgttgcaaagcggccgtccctacaaagaaaacggcttgggttcggtaatccaagcataaccaaataatcagcaacgatcgccgctggcggacgctgctgaagatatctgcatgtggttgtgaaagatggcctgactgtcgaacggcatttcgaaatcctggttaaaaaaatggcgcaagccgccgaggaagttatgaggatcgaaatgcgcggagctccatcttggccagggttttccctgagaccggatacgttggcgcagacttgttcaaacatcgatcataaagcgcttgcagacggggcgagccatacg

SEQ ID NO: 4029 - DNA, 1152 bp, unidentified
  source 1..1152: mol_type = unassigned DNA; note = element_60f6cc3
  misc_feature 1..2: note = core
  misc_feature 3..192: note = LE
  misc_feature 193..1137: note = CDS
  misc_feature 1138..1152: note = RE
  misc_feature 21..191: note = bridgeRNA
cttgtatctcgcgccttgtggcacgatgctacggctcatgatcaactggggcatgatagaccgttggttccgtggtcctcgacagaccgagtgtcagcatgggtcatcatgctccttcacctgcacagcccgaacagttgcgagggcccctgagcccgcatttcgcaaggctgggcacgacaggaggctgctatgagtccactcgtcttcgtcggtatcgatgtctcgcaggctcgcttggatattgcggtccgtcccggcgcttcgttttcggtcacgcatgatgagtctgccattgccacattggtcgaacacctccgcaccctcagtccgaccctgatcgtgttagaagcgaccggcgggatggaaatctcactcaccagtgccctcgcaaccgcccagttgcccgtggtcgtcgtaaatccccgtcaggtgcgtgactttgctaaagccagtgggcatttggccaagaccgatgccctggatgcccagaccctcgcccagtttgccgaggtcatgcggccgacgccgcggtccctgccggatgcggcggcgcgcgccttggccgccgtgctggcccgacgccggcaactcgtcgagatgctgaccgccgagaagaatcggctgctcaccgcgccgctggcaacccgcaaaagtctgcggactcatatcgcctggctcgaacgggagcggggacatattgaaacggacttggctgcgaccattcgccggagtcccgtctggcgcgaaaaagaggagctgctgcgcagcgtccccggcgtcggtcccgtgctcacctccacgttgctcgccaatctgccggaactggggaccttgactcataagcagatcgccgcgctggttggcgtggccccgctcaaccgggatagtgggacattgcgcgggcggaggacggtgtggggcgggcgcgcccaagtccgggccgtgctgtacatgaatgcgattgttgccgcccgcttcaacccggtaatccgcaccttctatgagcggctctgcggcgcgggcaaacccaagaaggtcgccctcaccgcgtgtatgcacaaactgctcacaatgctcaatgcgatgctcaaacatcactcaccctggcgtcaggaggcagcgcaacatgcatgatcagcaagacagttg

SEQ ID NO: 4030 - DNA, 1366 bp, unidentified
  source 1..1366: mol_type = unassigned DNA; note = element_60ff686
  misc_feature 1..2: note = core
  misc_feature 3..75: note = LE
  misc_feature 76..1107: note = CDS
  misc_feature 1108..1366: note = RE
  misc_feature 1083..1353: note = bridgeRNA
cgatggggtggacgcccccgacggcatcgctgtgccaaggtagaggtgtcgtgaaccgctacgagggggcgtcctatggcgaaggctagcatcattggggtcgacttggcgaagcatgtgtttcagatacacggtgctggcgccgacggatcggtggcttttcgcaagaagatttccagacttaaattccttccgttcctggcgtcgcaaccaaggtgtgtggtggcgatggaggcctgcgccggcgcgcatagttgggctcgcgatatcctagcccaaggccacgaggtgcgtctgatagcaccggtgtacgtgaagccgtttgtgaagcggcaaaagaacgacatggcggacgccgaagcgatcaccgaggcggcggcacgtccgacgatgcggttcgtcgcggtgaagagcgctgagaagcaggcctctggcatggtgttcaagacgcgggacctgctggtccgacaacgaacgcagacgatcaacgcgctgcgcggtcacttgacggaacacggcattattgcaccgcagggggtctttcacgtcggccggcttgctgccgaggtggagaacgtgaacagtcgcctgccgagcatcgtgaccgagctctgtaagctgttgctgcggcacatcgccatactcaacgagcagatcgcaacgctcgaccggcggatccgtgatcgcgcgcgagaagatgaaagagcgcggcggctgatgacgattcccggcgttggtcccatttgcgcaaccgcgctggaagcgctggcgccgccgtccgagacgtttgcgaagggacgcgacttcgcggcctggcttggtctcacaccccggcagaattcttcgggcggtaaagcgcggctcggccgcatctcgaggatggggcaacgagacctgagacggctgctgatcgtcggtgcgatggccgtggtgcgatcggctgccaggcgaggcgctcccgcaggatcatggcttgctcgcatgatggcgaggaagcctcgaatgcttgtagcgattgcgctcgcaaacaagattgctcgggtcgcctgggctctgatgacgaagggtggcgtttatcagatttcggctgcagccgcgctcgcgtaacggggctgtcggagccgtcagtgggtgtggtgggtcactggaggattatggcaaaatggtcaagaaggcggggtcgggaaaccagttcaccgggcagtgctctgagcacgcgtaaccgttatggacccgattcttcagacttccataagggcccgcggcatgtgctcgccgcaacttgaggccggacacacgtcagcacctgaccacatgttccataatcgccgcagattccgcttgcatccacaggggcgtccacaca

SEQ ID NO: 4031 - DNA, 1380 bp, unidentified
  source 1..1380: mol_type = unassigned DNA; note = element_6106874
  misc_feature 1..2: note = core
  misc_feature 3..1121: note = CDS
  misc_feature 1122..1380: note = RE
  misc_feature 1120..1367: note = bridgeRNA
tgatggtgtggacggccccctacggcatcaattgtgccagaatgaggttgttgaaatctcagacaagggagccgtccgtgaagcagattatccgagttggaatggatacgtctaagaatatttttgagctgcatggggttgatgcggccgaacagccggtgctgcgcaaggggcttgggcgcaagcagatgatagagttttttgccaagctgccaccgaccgtggttgggatggaggcttgcggcgcatcgcattactgggcgcggaagctgggagaactcggccacgaggtgaagctgatcgcgccacaactggtaaagccctacgtcatgcggaacaagaacgacggacgggatgcggaggggctgtgtgaagcgatgagccggccgagaatgcggttcgtgccggtgaagacgaccgagcagcaagcggcgctgatgctggcgggcatccgcgaggggctgatagcccggcgcacccagctgagcaatacgatccgcggctatgcggcggagttcggcatcacggcagccaaagggctcgacaagatcgaggggctattggcgcagatcgcgcaagacgagagcgtgccggggctggcgcgcgatctgtttgcgatgcagggccgcgattacgcgcggttgcaggtggaggtgaaggcgatcgaggccaggctgatggcgtggcaccgcgccgacgccggtagtcggcgtctggcacggatcccgggagtagggccgatcggcgcgacgacactggtgatgaagacgcccgacccgcgcgcgttcccttccggccggcattatgcggcctggctcgggctgaccccgaaagaccactccaccgccggcaagacccggctcggcaagatcacccgcgccggggatgagaggttgcgcagcgtgctggtggcgggagcgaccgccgtaatccagcaagcaaggaaaggccgcggccatccgtcgccctggctgctcgctttgctgaaacgcaagccgccaaagcacgcagctgtggcgctggccaacaagattgcccgtatcgcctggaagttgatgacgacgggcgagagttacgatggagcgcgcatgccgatagcatcggcaaacgccgcgtcatagagatcggacgggttggcgggctcgccgaccctgccgaggcggagctgcaagaggagcagatggtaggatcgatcgatccgaggtgcgagaaaatccgtgggacccattggccgaacaaaggtcgcctggttgtttggaactcgcgtcgcggaaaccatcttggccagcggtccccgaccgcatcaacaggccggacatatggatgcaagcgatccgatcagaccaagaaaactcttgtggcacgggggccgtccacata

SEQ ID NO: 4032 - DNA, 1417 bp, unidentified
  source 1..1417: mol_type = unassigned DNA; note = element_610e3cf
  misc_feature 1..2: note = core
  misc_feature 3..125: note = LE
  misc_feature 126..1160: note = CDS
  misc_feature 1161..1417: note = RE
  misc_feature 1177..1412: note = bridgeRNA
agatggtgtaacgggccggcggagcagccaacctcttgaggttgggcggtcgtccctcaaactgatggtgtcatcagcaacggcgtcaggtttgggcctgcgccaagcaccagcgagggacgaccgtgaagcactatgccgggattgatgtgtctttggaatgctccagcgtttgcgttgtcgatgcggagggtcggattgtgcgcgaggccaaggttctgagtgaaccggaggccttgatcgcttggttcgccggtctggaccttacgctggagcggatcggcctggaggcggggccgctgtcgcaatggctctatgcggcgatgacggccgcgggcctggtggtggagttgctggagacccgccacgtccgcgccgccttcaagaccatgccggtcaagaccgaccgcaaggacgcgcgcggcatcgcccagctgatgcggatgggttggttccggccggtctggtgcaagtcgcttgcagctcaggaggttcgagcggtgctgactgcgcgcaagcttgttcagggcaagctccacgacgtggagatgtctctgcgcggcgtgctgcgcggctttgggctcaaggtgggcaagacgacgcccaacaccttcgaggcgcgtgtcctgagcctggtcgaggaccatccgaccttgcaggagatcgccacggcgctgctgaaggtccgcagcatcctcgaccaggcgttcaaggggttcgagcggcgggtcggccagctggcccgccaggaccagaacgctcggcggctgatgagcacccccggcgtcggcgtcatcgtcgccctgacctatgtgtccgcgatcgatgatctggagcggttcaaatcctcaagggcgctgggcccgcatttcggcctgacgccgaagaagtaccagtccggggagaccgactacaccggccgcatctccaagcacggcgacgccagcgtccgaaccgccctctacgaggcggcccacgtcatcctcaccaagccggtcaaaggctcggacctgaagacctgggccctgggcgtggccaagcgatccggcatgccaaaggccaagatcgccctcgcccgcaagctcgccgtcgtcctgcatcgcatgctgcgcgacggctccgatttcgtcgcccacaaggccgtcgtcatggcagcctgaaccaggagaccacaccagatccgggcggggccctcaccatcacccgcctggagccaagtcccttcgccgggacgcgggatccggtcaggccgtcgtcatccaggcagagccattggcgactgcgctactcagatcggccggccgatcctcagctcaaaccatagggcagcggccccgcgccgactgcggacagaagcaagccttcggcgaagcgatgaggatccaaaaaagggattgaccgaagggcccgttacaga

SEQ ID NO: 4033 - DNA, 1427 bp, unidentified
  source 1..1427: mol_type = unassigned DNA; note = element_610e6f0
  misc_feature 1..2: note = core
  misc_feature 3..217: note = LE
  misc_feature 218..1411: note = CDS
  misc_feature 1412..1427: note = RE
ctgatataccgcctcgtgaggtcgatgattgagtcgacctcgacggggagaccggcgcgcgcctatccggcagatgaccgttggaactagtgtccggcccccggcctgcggctgtgaacggtgatcgggatcctgcggcctggaccggtgatgggacccgtcaggcgacgtcggccggagtgctcgggcacccccgagggtcggaagggagtgcccgatggtgacggttgggatcgacatcggcgggcggagccacgcggtcgcccgctgccgtgacggaaacctcaatgcggatcgggagatcgtccgcgtcacgcaggatcggctcgggttcgatctcctcgacacgtggctcgaccgccagggcgagcccgtggacctggtcgtgatggagtcgtcgggccactactggatgccgctggccagccacctgcgccggcggggtgtccccgtcgccgtggtcaacccgctcgcggcgaagtactttgcgaggagccggctcgcccggacgaagtccgacccggccgatgcccggagcctcgccgagatggccatgcgcgacgcaccagacgcgacccgcgacccactcgccggcgtcgagctgcgccaggcggcccggttcgccatgacgctggtcgaggagcaggcgagggtctcccagcgcctgctccggctcatcgacctcggcttcccggagctcggcgaggtgttcgacgatccgacctgccggaccgcgcgcgaggtgctgcggatcgcgccgacagcccggagtgcgacccgccgccggacggcgaccctcgccaacgcgaacagtgcacccggacaccggcgtctcggcacggcgaaggcggaacggatccaggccgccgcggccggctcgatcgcggtgcccgagctcgacgccgaggcggcgttcgagattggcctcctcctcgaccagcacgacctgctcgagcgccagatcgaggcggccgaccggcacatggcatcgctgctcgactccgagcttgcccggcggctccagacgatcccgggtgtcggaccctcgaccgcggccgtgctcatcagcgagatcggcgacatcacccggttcgacgacttcgaccagctcctcgcctatgccggcgtgcacccggctgagcggagctcggggcgcaagggcgcgagccccgagaccgcctggcacatgagcaaggccggcaacacgcacctgcgggcggcggcctaccggatggccctcgtcggcacccagcacaacccggtcatcgccgcccactacgctcgcaagcgcgccgccggcaagtcgaagatgaacgccctcggccattgcatgcgcaaggccctggccatcgtctggggtgtctggcgcaacgggaccgacttcgaccccggccacggggtcgaggcttgacgagaccctatgggat

SEQ ID NO: 4034 - DNA, 1365 bp, unidentified
  source 1..1365: mol_type = unassigned DNA; note = element_6111e8d
  misc_feature 1..2: note = core
  misc_feature 3..81: note = LE
  misc_feature 82..1104: note = CDS
  misc_feature 1105..1365: note = RE
  misc_feature 1080..1353: note = bridgeRNA
tgatggggtggacgcccctcgacggcatctgtgttccaaagtggtaggtgtttgactgccacaacagaggaggcgtccacgatggaagttagcacaatcgggctggatttggccaagaacgtatttcaggcacatggagcgaatgcgtctggcgcggtggttttccgcaagcagctaagacgcggcaaggttctggagtttttcgccaggcagcccgcatgtctcgtcgccatggaggcgtgtggtggttcgcattactgggcgcgtgagatcggcaagcttggtcatacggttcgcttgatcccaccatcctatgttaagccgttcgtgaaacggtcgaagaacgatgctgccgacgccgcggcgatctgcgaagctgcccaacggccaacgatgcgatttgttactgtgaagagcgagaagcagcaggccagcacgatcgtcttcagggctcgtgatctgcttgttcgccagcgcacacaggtgatcaatgcccttcgaggccatctggccgaatatggactggtggttgcccacggcccatcgcacgtcgccaaactcattgaccaggtggaagacccgcatagcaacctaccgtctccagctcgattggttttgggtttgctgattgaaacactgaagaccctcaatgagaggattgcatgtcttgatgttgagatcgcgcgccgcgcccgtgaagatgagaacgcgcggcggctggcgacgatacccgggatagggccggtaacggcgactgctttggtcgcattggcgccagaagccacaaccttcaagaggggccgcgacttcgctgcttggctgggactgacgcctctgcaacaatctagtggcggaaagcaaaagctcggcaagacatcgaagatgggtgagcgaacgctgcagcgtttgctcatcattggtgcgagcgccgtggtgcggcaagcacgcaaacgcggtgcgccggcaggatcgtggctggatcgaatgatcagccgcaagccgccgatgcttgtgattgtcgccctggccaacaagatggctcggatcatttgggcaatgatgacgaaaggaggcgtttatagagctccggccgcagcggcttagccgcccggtcagaggctgtcgaggatgtaggaaggtcgaacggaaaggtatggcgcaacagtcgatgggacgaggtcgggagaatccgatttgcgacaagcgcagcaaagcgcgaggttctgaatggaacccgatctgcgaactcccatacgggccagcgacactcgaaaggtcgcatcaaaggccggacagatgtcagcacccgactacgcgcagcaacggaacgaagattcttcttgcattcaacggggcgtccacaga

SEQ ID NO: 4035 - DNA, 1378 bp, unidentified
  source 1..1378: mol_type = unassigned DNA; note = element_6112637
  misc_feature 1..2: note = core
  misc_feature 3..86: note = LE
  misc_feature 87..1118: note = CDS
  misc_feature 1119..1378: note = RE
  misc_feature 1148..1366: note = bridgeRNA
tgatgctgtggacggctcctccaccggcacggaagtgccatggatgtgggtgctgttaaggcccccacgattcggaggagccacacatgcaagcggtcacgacaattggtctcgatatcgccaagtctgtttttcaaatccacggagttgacgcggcaggtaatgtaatcgttcgccgtcagctcaagcgccggtacgttttgccattctttcagaggctgccgccgtgcctcatcggcatcgaagcctgcgcttcgtcgcatcattggtcacgcgagctcaaagcgctggggcatacggtgcgtttgatgccgccggcctacgtgaagccttacgtcaagcggcagaagaacgatgctgccgacgccgaggctatctgcgaggcggtcaccagggcaaacatgcggttcgtcgagaccaagacgcccgagcagcagagctgcctgatgctccatcggacgcgccatctcttcatccgccaacagaccgcggtgatcaatgcgatccgcgcccatcttgccgagtacgggatcgtcgctgcggtcgggcgcaatggtgtcgaggaactgctcggggtcgtcgccgacccaagtgacaaacgggtgccggagattgcgcgcgcgtgtcttgccgctctcggcgcccagctgcgaatgctcaaggcgcagatcttggagttcgaccgtatgatcaccgcctggcaccgatctaacgagacgagcaagcggctcgatgcgattcctggtgtcggtccggcgctcgccaccgctctggttgccagcgtccctgatccgaaggctttccgatcagggcggaatttctcggcctggattgggctcgtgccgaagcaacactcgagcggcggcaaagacaagctcggcagcatcagcaagcaaggtgatcgctacctgcgcagccttttcacggccggtgcgctcgccgtgatccgctatgccaaaatccatggcaccaagcaccggccctggctcacagcattgttggcgcggcggccagcgaaggtcgccgcgatcgcactcgccaataagatcgcgaggatggcttgggcgatgatggccaaaggcgagcgctacaaggaacccgtcgcactggcggtgtaaacgagatcgcgccggccatcggcgtgatgtgaaggttgggagggcgaacagcacgtaatgcagagccggtcgatcccggcgatcaggacaacccacatgtgccagcgcattgtcgaatgcgggcttttgaccgggacctgatccgcggagggcattatggccagcggcctgtgtgccgcgctaacaggccgaacacatggctgcaccgaccagcctgcaaacgtgaagaaaacccttgccaactcggagccgtccacaca

SEQ ID NO: 4036 - DNA, 1169 bp, unidentified
  source 1..1169: mol_type = unassigned DNA; note = element_61148c0
  misc_feature 1..3: note = core
  misc_feature 4..217: note = LE
  misc_feature 218..1150: note = CDS
  misc_feature 1151..1169: note = RE
  misc_feature 11..192: note = bridgeRNA
cttgtatggcggtagggtaggaacctgtcgggggtggagggacaagacccgcttctgcaagccagacggtaggagacttcccccacccacgcgctcacgacaagcgccgataaggaatccatcggatttgagtagcagctcaaaccgacaatatcagcaagcctgcgccactgtgagccccgacaggtcgaccccatcttcaccgtcggagaacaccatgacaagccaggtcacggttattggaatcgatgttgccaaggaaacactgagcctgtgcgatgcccgcaccggtgaggtgttcgaactgcctaacgaagcccgtgcgatcaaggcctggctcaagacgctgccatcccactgcgccatcgcaatcgaggcaacgggcatctaccacgtgctggttgccagtctggcgcatgcccggaagcaccggatctacctcatcaacggcttccgcctgagcaactatcgcaaggggatcggtgggcgaaacaaggacgaccgtagcgacgcccaactcctggcccgctacctgtcccatgaacaggcgcagttggagccctggcagcccccgagcaaggtgtactgccgtttgcaggcgttgctgcaccgtcgagccgtgctcgtccgtaatgtcacgtcgctgcgtcagagcttctcccaggaccctatgctggcaagggcattgaagccggtcctcaagcgcatggctgtcctggagcaacgcctggagacacagatccagctcgtgctggaggaggccgggctgaaggagcagagcaagcgttgccaggccatcgagggaatcggaccactgacggccgcagcgctgatcctggcatttctgcgagggcatttccgcaacagcgacgccttcatcgcatttctggggctggatgtgcgactcaaggagtctggccgttacagcggccggcggaagctgaccaagcaaggcgatccggaaatccgccggctactgcacaacgccgccatggctgcagctcgcaccaaacgctggagggagctctatcagggctatttggcacgcgggctgaagacaaccgaggccttgaccgtcctggcccgcaaactcgccagaatcgcctttgccctgatgcagacacagacgacctaccaaccccggggataagccgtcattgacatagaat

SEQ ID NO: 4037 - DNA, 1151 bp, unidentified
  source 1..1151: mol_type = unassigned DNA; note = element_6115907
  misc_feature 1..2: note = core
  misc_feature 3..209: note = LE
  misc_feature 210..1139: note = CDS
  misc_feature 1140..1151: note = RE
  misc_feature 13..211: note = bridgeRNA
cttgtcttatgactttccccggcttccttgcgataagggagccgctggccggcacgacatatatgccgggcagcggcgggggacggatcgagcatgggttggccgtcacgggccgcgcggtagtatgatcgcccccgtcttttcttttgacctgaacggataccagggcgtttgggcccggatgacaagcagaggtaaggaaaagacacatgcaggatatcatcggcatcgacatatcgaaaggccgactggatgcattccggctttcggaccgaatccaccggccgtttgccaatgacgacaaggggcatcgggcgctcgttcgctggataggggtggacgtcaaggtcgttttcgaacctacaggcgcctatcatcgccacctcgaagcggcactggcgtcgaagggcatccctttcgtcaaggtcaacccgcgtcaggcccgccgctttgccgaagccaccggcacgcaggccaagacggatcgggtggatgcgatgctgctcgcacggatgggggcggccctcgatcttgcgccttgtgccacgcgcagcgaaactctccatgaactcagagagttgcatgtcgcccgcgtgggtttggtcaaggacaggactgcggcaagaaaccgggcctccatcgccgaacacactgtcttgaaacgccagggcaaggcacgcctcgcgctcatagacaagcagcttgctgaaatcgatgccgtcatgacggcgatgatcgcgcaggacccagcgttggcagcgcgtctggacatcctgatcagcatccccggcgtcgggaccgtaacggctttcgccctgctcatcgacatgcccgagctgggcacgctggacaacaagcaagccgccagcctcgcgggtcttgcgccggtgtcacgacaatccggcacttggcaaggaaaggaacatatccgaggcggcagggcaacactgcggcgcgccatcttcatgccagcgctcgttgctgccagacacaacgcagacctcaagcgaaaatacgaccagttgatcgcgaacggaaagccgcccaaactggccataactgccatcatgcgaaagctcgtcgtcctcgcaaacgcgctgctgagaaaacagcaaaaatggaccgaattacccgcttgaccaagacggata

SEQ ID NO: 4038 - DNA, 1619 bp, unidentified
  source 1..1619: mol_type = unassigned DNA; note = element_6115b9d
  misc_feature 1..2: note = core
  misc_feature 3..296: note = LE
  misc_feature 297..1457: note = CDS
  misc_feature 1458..1619: note = RE
ctggtatattaaagttactcatacaaagagtaataaatctaatataccaattctcctttcttcctgagtcatttggtatcacctcaggatgtgataaaatgtgtaattgtgaatgtggatttgtatttttctccttattgctttgactttccagaaaggatcttaccacttcttcgtatcgcatttattattagttgtatgagtcttttgaattcaaaacacaccaggtttttgatacctttgaagtggctctcatttcacaatcacaaatcattgtaagaaaggacttgatatttatgaaacttgttggaattgatatcgccaaatatgaacatgctgcctatatcatggatgctgctactggcgaatctttatgtgatccttttttcttcaaaaataataaaaatggatttcaaaaactttatatcgaacttaataaatacgcaaaagatgaactttttatcgggatggaagataccggtcattataacttcgatattgaaactaatttattggctaaaggttacaaagttgctttaatcaatcctattaccactaagaaccttagaaaagctgccttaaaatctgttaaaactgataaagaggatgctattttaattaccaatgctctcttagataaggattactatcgtatcatctctattcaagatgagaaattaaaggaagccaaagaattaactcgttatcgtacacaattaaccatcgaaatgaatcgtaagaagaatgtccttcaaaggcacattgacatcgtttttcctgaatttaacacattatttcatgacgaatacaccattacctatttaaatatcttaagaaaatatggtgatgcttatacgattgctcatacagatattcgttctttaagaaaatgttttaaatattgtaattcctttactgcagaagaattaaaaaaattagcttctaattccgttggtattcacgacgtttctatttcttttatcattcaatcggttatttccagtattgatttaatcaattcccaaattgaagaattggataaaaaaatagaagaactcgccatcacacaagattcttctatcacatcaataccaggaatatcaattattactggtacttctattttagccgaactaggtgacattagtaaatactcaaatgcaggaaaattaattaaatttgcaggtgtgaatccatatataagtgaatctggagaattttcagccgataaaacagtgataaccaagaaaggttccaaatatctaaggacaacactttatagagtcattatacctgtaatacgccataaccctgtatttaataactactatcatttaaaacgtagtcaaggcaaaaaacatctctgtgctttaggtcattgtgtaagaaaacttttaagaattatttatcatcttgaaacaaatcatctatcattcgatataaattcacttaaatagttaaaacttttaataacccatatttcattgaaatgagctattttaacgatagttcttttcaacatctttacattcacaatttcaaagatctaatactatattttcaagtattttatatttcatactatttcataatttattacttgactttaatatagttgt

SEQ ID NO: 4039 - DNA, 1564 bp, unidentified
  source 1..1564: mol_type = unassigned DNA; note = element_611b1a0
  misc_feature 1..2: note = core
  misc_feature 3..267: note = LE
  misc_feature 268..1437: note = CDS
  misc_feature 1438..1564: note = RE
  misc_feature 3..244: note = bridgeRNA
cttgtatgataattaggaagccagttatcacacgtttcctttcttttgatattgtggtttaatacattcagatactgtggactttttatgttattttgtagctctgactactcaaaggagtgtattgccaccacttttatctgaatcgtttattagctggatgtgcctcgggatttccacccatgagtacttatttcaatcaagtctacgatgataatcgctagtggatatcacggtatcagactttagaaagggaggtgctacctcatgatgttttacgctggcattgatattgccaaactcaaccatttcgcctcagtcatttcggatgaaggcgaagtactcatcgagccgtttcaattctctaacgacagtgatggcttccagttgctgatctccatcctcgattccttcgagaaggacagcctcatcattggtcttgaatctacggcacactatggcgacaaccttgttcgatacctcgtcgcttctgattacaaagtgtgtgtgctcaaccctatcaggacttccaccctgcgcaaaaccaacatccgcaagacgaagaccgataaagtcgacacatacatcatttgcaaagctcttatgatacaggatcatctccggttcgtttctttctacgatctggatctctcagatctgaaaactctgggacgctttcgacaaaagaccatcaaacagcggactcgtctgaagatccagttgacatcttatgtcgatgaagccttccctgaactacaatactttttcaaatctggcctgcatcaaaaatctgtctatgcgcttcttaaagaagctcctacaccggaagcgatcgcttctatgcatatgactcatctggctcatcttctcactgtgacttcccacggtcactttgataaacggacggctcagcagttaagagctctcgcacagaagtctgtcggtgtcagcgacagtgctatatctattcagataactcaaaccatttcacaaatcgagttactggatagtcaattaaaaaatgtggactctgaaatgactgaaatcgtgaaatttcacgactccgtcatcatgaccattcccggtatcggctatatcaacgggggaatgatcctgggtgagatcggtgatgtccaccgtttctcaagtccgggcaagctgctggcatatgccgggcttgatccttctgtttatcagtctggaaacttccaggccaaacggacaagaatgtccaaacgtggatccaaagtccttcgatatgcacttatgaacgcagctcacaatgtcgtaaaaaacaacgccaccttcgaagcttattatgaagccaagaagagcgaaggccggtctcactacaacgctcttgggcactgtgccggcaaacttgtcaggatcatctggaagatgctcactgacgaagtagaatttaacctcgattagaggtcatctattattgggcaaccctttggaaacgcttcattgggaagctttattaaggttaccctttttaccacgaaaaagaatttttaatttcctgctattttaagcttgacttttcatagctggt

SEQ ID NO: 4040 - DNA, 1356 bp, unidentified
  source 1..1356: mol_type = unassigned DNA; note = element_611d77d
  misc_feature 1: note = core
  misc_feature 2..66: note = LE
  misc_feature 67..1101: note = CDS
  misc_feature 1102..1356: note = RE
  misc_feature 1101..1346: note = bridgeRNA
tatggaatggcccgccccctcccggcaagataagtcttgccggagactcaaacggaggagcggatgatgaagattgcagtgcttggcatcgacctcggcaagaatgtgtgcagtgttgttggtctggacccatccggtgctgtggtcctacgtcggcgggtccggagggataccctgatcgacctggtcgcaaaactgccgacttgcattgtcggcatggaggcatgttgcggcgcccatcatcttggtcgcctgttcgcagctcaggggcacgacattcgactgatgtcaccggagtatgtccgtccttatgtcaaagcacagaagaacgacgatcgtgacgcagagggaatcgccgaagcggctacccgcccaacgatgcgtttcgtcgagatgaaaacagaagaccaactcgatatgcagacactccaccgatcgagagaacggctggtcggtgaacgaacggccctgatcaatcagttgcgcgcaatcctgttggaccgcggcattgtcgtaccacagggcaagcgcaagctcgaccaatacttggtcatcttgatgaacgagcaggatggagagaggctaagcgcgcggatacgcatgctggttgccgacattcgcgcccaatggcaagaacttgatcggcgaatcgaagaatttgatgcggaattcgtacgctgggcgaaagagaacgaagatgctcggcgactggtaacgattccgggtgtcggcgtgacgatttcgacggctctgattgcagccgttggcaaggccgagactttcgaacacggtcgcgatcttgcggcatggctgggcttggttccgcgtcagtcgacgaccggcggcaagccacgactcatgggaatcagcaagcgaggaaacaagtacctgcgcaagctgctgatccatggagcacgagcggcactgccctatgttgcggaaaaggacaccgcacttggccgatgggcgaagagtctgctcagccgtgtccatcagaatgtcgcggtcgtagcgtttgccaataagctagcgcgcatctgctgggccgtactgcgaagcggtcaaaggtttgccgccaagggagcgcctctggtggtttaatcatcggctggacggcgcacatgaggcgctgacgagctgacgatgtttgcgagcggtggaagcgagatggcctgacagtcgaacggcgttctggaaacctggtttaaaaaacggcgctcgacgccgcaaagcttatgaggaccggggcgcgcgtatctccatcttggccggggcgtcggcccgaggccggatacgttgaagcagaccgatcacggcgtactcgacgaaatcacttgcaacggggcgggccatacg

SEQ ID NO: 4041 - DNA, 1409 bp, unidentified
  source 1..1409: mol_type = unassigned DNA; note = element_612d5a6
  misc_feature 1..2: note = core
  misc_feature 3..117: note = LE
  misc_feature 118..1155: note = CDS
  misc_feature 1156..1409: note = RE
  misc_feature 1180..1404: note = bridgeRNA
agatggggtcacgggccggcaaccaaccacagttgtggcagggccgtccctcaggatgatgaagttgggaaacggagttaggctaggcctgctccaagcatcatgtgggggacgaccatggagcattatgccgggatcgacgtgtcattggaaagcgcgagcctgtgcgtcgtcgacgcgacggggcggatcgtgcacgagggcaaagtggccagcgagcccgagacgctgatcggatggtttcgagatttggagtttgccgcaactcggatcgggctggaggccggaccactgtcgcaatggctatatgcggctatgcgcgacgcgggattggcggtcgaattgctcgacacccggcacgtccgaaatgcattcaaggcgatgccagtcaagaccgaccgcaaggatgcacgcggcatcgcccagctgatgcggctcggctggttccgcccggtacactgcaagtcgctaccggcacaggaagtgcgagcactgctgactgcacgcaagctactgcagataaagaaccacgacgtcgagatgagcctacgcggggtactgcgcggctttgggctgaaggtcggcccgacgacaccgcgaaccttcccaggccggatccgcgaactggttgcggatcataccacgctgtcaacagtggctgaggcgctactcgcggcgcgcagtacgcttttcgagcagtggcaaaagctggagaagcgccttcgatccctggcccgcgaaaatggccgcgtgcggcggctgatgacggctcccggtgtgggtcccatcgtcgcgctcacctatgcctcggcaatcgacgagcccgctcgcttcagatcctcgaaatccgtaggcgcgcatttcgggttgacccctaagaagtatcagtcgggcgagaccgacgtcaccggtcgcatttccaaaatcggagacggcagcgtgcgcaccgcgctctacgaggcggccaacgtcattttgacccggccggtgaagggctcgtcactgaagagctgggcgatgcgcctggctgcccgcgcgggcatgcgcaaggcaaaggtcgcgctcgcccgcaagctcgctgtggtgctgcaccgcatgctggccgacgggacgagcttccacgccggtaaagctgcggttgctgcagcccactaacagaaggagattacaggttcgggcggttcggaaagatcggtccgcccagagcaaggtcccgtcgccgggacgatggatcaggccaggccgattacctttcagcagagcctcgctactgcgcgttgtcagattggccgacctgctcctcatccgaccccatcaggtggcggccaagcgccgaccccggacagaagaaagacaccggcgacaggatcatggctcagagggattgaccaactggcgcccgtgacaga

SEQ ID NO: 4042 - DNA, 1397 bp, unidentified
  source 1..1397: mol_type = unassigned DNA; note = element_6137b78
  misc_feature 1: note = core
  misc_feature 2..87: note = LE
  misc_feature 88..1119: note = CDS
  misc_feature 1120..1397: note = RE
  misc_feature 1168..1389: note = bridgeRNA
caatgggatggacgcccccaactcgcaacggcatcgatgtgccaaagtggaagtgtcatcgaccacttgaaccgaggggagcgtcacatgaaggttacgacgatcggcgttgatttggcaaagagcgtgttccaagttcacggtgtcgatgaacgcgggtatgtcgtggttcgtaagcagctgcggcgggaccaggtcgccgtgttctttgccaacttgccggcgtgtctggtcggcatggaggcgtgcggcagtgcacatcattgggcgcggaagctgcaggggttcggtcactgcgtacggttgatatcgccgcagttcgtgaagccctacgtcaagggcaacaagaacgacgcggccgacgcggaggcgatctgcgaagcggtggcccggccgaacatgcgctttgtgccgatcaagacggtggagcaacaggcggtgctgtccgtgcaccgagtgcgccaaggatttgtgaaggcacgaacggcgcaggccaaccagattcggggtttgttaaccgagttcgggctggtgctgccgcaggggatcaccaacgtcttgcggcgggtgccgcagctgatcgatggggcggctgacctacccgcgtcgatgcggcagctgatcgagcggctgctcgagaacatgaaggtgctggatcggcaggtcaaggaactcgaggcgcagatcaaggcatggcaccaaggcagcgagctgagccgcaagctcgagaagattcccggcattggcccgctggccgccagtgcgctggtggcctcgattgccgatgccaggagcttcaagaacggccggcaggtcgcagcttggctggggctggtgcccaaacaggactcgagcggcggcaaaccgaagctgctgggcatgagcaagcgcggcgacacctaccttcgaacgttgctgattcacggtgcgcgctcggcgattgtggcggcgcagcgcaaggataagccgaacgtctggctgtcgggtctgctcgctcggcgccatccgaatattgccgctgtggcgctggccaacaagaatgcgcgcacgatctgggcgctgctcgcgcatgagcgcgaatttcggcccgattacgttccacggcctgtcatcgcgtagccgcagctagcgaacgtaaacgatcaatcaaacgaaggagatcgacccaccgattgctcaggcgctcacgcaatgatggcaaacaggtcagaccttggttggccaaacccaaaacgactgcagcaccgcgagtgcgcgatagcgatcgggagccaaccagccaatcccatcagggacagcggcacgatgccgcacacaaagtccggatgtacgggtgcaatctgttcctttaaaccattacaaactgagcgcatggcaaacccgggggcgtccatgta

SEQ ID NO: 4043 - DNA, 1168 bp, unidentified
  source 1..1168: mol_type = unassigned DNA; note = element_613dd0b
  misc_feature 1..2: note = core
  misc_feature 3..207: note = LE
  misc_feature 208..1155: note = CDS
  misc_feature 1156..1168: note = RE
  misc_feature 19..213: note = bridgeRNA
cttgtaatagcgcgatcgattattgtgggcctattccgagaggaatggcctgccgcggttagcggccgcggcaggccgctggcgatcggatcgaacccatccagagcagtttgtggctgccccgtagcatgatcgcgtcagcacttcatcggacccggatggttgccggaacggttaggttcgcttcacaaggcggggtcgacgaagatgacacagactagcacgacgacagcaggaatcgatacgtccaagcgcaaactcgatgttgcgcttcacggccgggccgggcattggcaggtccccaactcattggccgggtggcgtgagctaacagtcaaactggtcgaggccggggtcggtcgcgtcggcatcgaggcgaccggcggctacgagcgcggcgtggtggagcatctgcgtgcagcggacctcacggtcctggtgctgcagccgatgcaggtcaaggcatacggttgggcgcacctgcggcgtgccaagaacgatgtgctggatgcggtcttgatcgcggcctttaccgcctcgctcgatcggatcaaggctgcgcctgatccacgtctggcggaactggccgaccatctaaccttcctcgagcagatcgaggaggatatcaggcgttacaagaccaggctcgagcacatcggagagcccggcttgcggcgcatggtacttggcgacattgcccggctgaaggcacggcggctcacccagatccgtcaccttgccaagcaattacgcgctcaccgcgatctcgctgtccgctttgatctggtgctcagcattcccgggatcggcgagcgcaccgcgctggcgctgctgatccgcatgcccgaactcggccaagtcagccgcgaggaggctgcagccctcgctggccttgcccctttcgacaacgacagtggtcaacaaaggggccaacgccgcatcgccggcggccgggaccgcctgcggcgctccctgtttgcggccgcgcttccagctgccttccgttggaacaccgcacttatcgcgctctacacgcgcctgatcgctcgcggcaaagcccataacgccgctctcatcgcctgcgctcgaaagctgctgatctacgcaaataccgtcgtccagcgcggtaccccgtggactgaaaaaaccgcttagcttttaatggttg

SEQ ID NO: 4044 - DNA, 1416 bp, unidentified
  source 1..1416: mol_type = unassigned DNA; note = element_6143800
  misc_feature 1: note = core
  misc_feature 2..224: note = LE
  misc_feature 225..1403: note = CDS
  misc_feature 1404..1416: note = RE
  misc_feature 14..238: note = bridgeRNA
ctgcttgtttcattgacgcaggatcggtgcctggcaaggctcggttcaggcgtccgggctgtcgctctcacatcggctgctcaccctcgggtgtggctctcatttggcctgcgcagtccggacgtcgccagggccgggagaggctcaagaggggtgtgcccaagctctaagcagcgttgccctcccagctcgacagcagtccggttcgaggcaaggagcgcacgatggaggagcaacgagtcgatcgcgtggtgatcgggatggatccgcacaaacgctcggtcacgatcgaggtgatgcggcccgatgagtcgatcgcagccggtggccggttcgacaccgacccggctggctacacggccatgctcgagctggcgcgggcctggcccaagcgggtgtgggctgtcgagggctgcaacggcatcgggcggcacgtcgcggtccggctgctcgccgacggcgagcaggtcatcgacgtgccaccacggctgtccgcgcgggtgcggatgttcgccaccgggcagggccgcaagaccgacgccacggacgcccactccatcgcgctggtcggggtccggatggccgggctgcgcccggtcgtcgacgacgagcagctcgctgtcctgcgggtgctggtcgaccggcgccgggcactcggggaggaccacacgcggatggtctctcagctgcatcaccttctgctggaactggtcccgggcggcgcgaagcgggacctgtccgccgcgcaggcgaagaagctgctcgcgacggtgcggccgcgggacgtcgctggcaagacgcgccgccgggtcgcggccgagctcgtcggcgaccttgaacgggtctatgcgcggaagaaggcggcgaacaaggagctgtcacagctgctcgccgcgaccggcacgaccctgaccgggctgaacggcatcggcccctccggcgccgcgcggctgctcgtggaggtcggggacatcacccggttcccggacaacaaccacttcgcgtcctggaccggcaccgccccgatcgacgcgtcctcaggggatcacgtgcgccaccggttgtcccgcggagggaaccgtcagatcaaccgggtgctgcacatcatggccaccgtgcagctgcgcaaccccaccgaaggacgagccttcttcgaccgcaccaaagcccggggcaagacctcgaacgaggccatgcgcctgctcaaacgcagactgtccgacatcgtgtaccgcacgatgctggccgacgtagcacgccagatgacgagcccgggagggcaaaagggtgacgactctgactccagcgcggccggctcacaaccccacaccagctcttcggacaagccacttcccggacccgccaccacccaccctagaaccgccctgccgtcagcgtcttgacacagaggggagc

SEQ ID NO: 4045 - DNA, 1607 bp, unidentified
  source 1..1607: mol_type = unassigned DNA; note = element_6143a5a
  misc_feature 1..3: note = core
  misc_feature 4..275: note = LE
  misc_feature 276..1484: note = CDS
  misc_feature 1485..1607: note = RE
  misc_feature 16..295: note = bridgeRNA
actactactatgtatttaatggttgatattcctatcttccaaataggatgttatccatcttgttgcttaagctgttagaatgatgtggcaatcggtctggccaacttctacttggacttcgcgtccgcaatcgagtcagccaaccagccctcattcgcagcgttcgttttacgcaggttgaacttttcgttcgtgtgaaacactcagtagattgaataggcaatgagaaaaactggtatcgaccattgctaatacattttaaaggagtaggtttcatgaacgctgttggtattgatgtttctaaagaaaagagcactgttgcaatctatcagccgggtgatcaggtcattctcaaacctcgtgactttcatcatacgcaatctgacatttcatccctgatcagtattatcaaaggactggatggcgagacgaaagtatgcatggagcacaccggccgatactacgagcctgtcgctacctggctctccgatgccggtatcttcgtcagtgccgtgaatcccatcctgatcaagaacttcggcgatgattcccttcgagcacctaaaacagataaggccgatgcgaagaaaatcgcccgttatactcttgaccgatggactaacctgaagcagtatagtcatatggatgagacacgtaaccaactaaaaaccatgaacaggcaattcgggttctacatggatcaaaagacagctatgaagaacaacctgatcgcgcttcttgaccagacttatcccggtgccaatactttctttgacagccctgcccgcaatgacggcagccagaaatgggtagattttgtctatacctactggcatgtggactgcgttcgcagaaagtcacttgaggcctttacagagcactataaaaactggtgcaaacgcaaaggctataatttcagcaccgctaaagctgaaaaaatctaccataaatctgccgatctgattgctgtcttccccaaagatgccaacaccaggatgctgctacatcaagccgtggatatgctgaacctcgcgtccaggaccgttgaaactctccgcacagaaatggatcaaaaagcagctacgcttctggaatatccggttgtcatggctatgaatggtgttggccctacgcttggtcctcagcttatggctgagatcggagatgtcactcgttttgaaaaacgaggctcgttgacggcctttgccggcgttgatccgggtaaaaacgattcaggcaaatattctcagaaaagcgtgccaacctcaaagaaaggatctccacacttaagaaaaactcttttccagatcatggatggcctgattaaacgatcacccattgacgatccggtttatgccttcatggataaaaagcgggctcaaggcaagccttaccatgtgtatatgactgctggtgccaacaagtttcttcggatctactacggacgagtcaacgaatatctatccacactttcgaacagctaatcatcgaattactcttcacatgctcaggccagcgttctacggtggcttttttttgatgcttcaagttcaacttgtataaatttttcaaagatcatcattttctacttgattttttatttgcag

SEQ ID NO: 4046 - DNA, 1503 bp, unidentified
  source 1..1503: mol_type = unassigned DNA; note = element_614617f
  misc_feature 1: note = core
  misc_feature 2..90: note = LE
  misc_feature 91..1140: note = CDS
  misc_feature 1141..1503: note = RE
  misc_feature 1269..1501: note = bridgeRNA
taatggaatggtctaccccactttctacctggcctagaataggccatgatgttttttataacaacatcaatacaacagagaggttaggcgatgaaagagaataacgcaacgaacgaagctagagaaataaaagtattggggattgatttggcgaaacaaagctttcaattgcatggcgtggacgggcaaggccgtgttgtcttgacgaagaagctcggccgtaatcaattaagcgcgtttattgccaatctcccgccttgcttgatcgggctcgaggcatgtggcggcgcgcattattgggtgcgccagtttactcagttgggtcattgcgtgcgcatgattgcgccccagtttgtgaagccttacgtcaaatccaacaaaaacgacgccgttgacgctgaagccatctgcgaagctgtccagcgtccggcgatgcgctttgtcccgaccaagagcttatcgcaacaagacttacgaagcttacaccgtatccgtagtcaattagttgccaggcgaaccgcccaagcaaaccaggtacgggggctattattggaatatggcatagtgatccccaaggggatcagttatgtcagaaaagccataccaagcattctggaagacgcggaaaatgtcttaagcgcattatttagggaattgctcagtgagctgtacgatgagttagttcatttagacaaacgcattcatgcactggaacaaaggttagttacgctgagtgccgggcatgatgattgccagttcctgttgacgatacccggtgtgggcttgctcacggcaaccgccttagtagctgccattggcgatgtgtcggtcttcaaaaatggccgggaactggctgcctggttaggcctggtgccgaaacagcgctctaccggtggtaagcagacgctgctgggtatcagtaagcgaggggacagttatctgcgcacattgttgattcatggcggccgatcagtggtcagggtggcgcacaagcaccctgacaaacggaaccgctggatcggtgacatcaagcaaaggcgtggagaaaatatctccaatgtcgcggtggcgaacaaaaatgcacggattgcctgggccttgctgacccgtaaggaaaactaccaagcgaagcaggcctaaccaatgtctggaaaaaagccttagtttaaggctccaatagggggctttgcccctagccgtgcgacttacccctccctcgccggtaaccggcaggggattgattttaaaaacagtgacagggaacgtgactggcaacgaattgcgtggataaattcaaatgatggcaaaaaggtaacacctgcattcctatgaacctgacggcgtcttgggctctttaagaagccgatgacttgatgaggtgggaatgcgcgaattccatcagggccaggggactcgatacctcgacagcaaggccgaatatatgggagcaatattctttttgtcacgaacgaattttttttgcaatacggggtagaccatata

SEQ ID NO: 4047 - DNA, 1390 bp, unidentified
  source 1..1390: mol_type = unassigned DNA; note = element_6146fe6
  misc_feature 1: note = core
  misc_feature 2..69: note = LE
  misc_feature 70..1107: note = CDS
  misc_feature 1108..1390: note = RE
  misc_feature 1141..1385: note = bridgeRNA
caatggtatggaccccgccgcccaacggcggtgagacttcactaccccaagaagagtaggagacataccatggagatcgtacgtatcggattggatttggcgaagaacgtgttccaggttcacggtgggggccccaacgacggcgccatcgtcagaaagacgttgcggcgtgaggcagttgtgccgttctttgccgaactgtcgccatgtctcgtaggaatggaggcgggcagcggtgcccactactgggcgcgggtgctttcggaactcgggcatgaggttcgcctgatctcgccacagtttgtcacgccctatgtgaagtccaacaagaatgatcacaatgacgcagaggcgatttgcgaagccgttgaccgcccctcgatgtgcttcgtgccgccgaaatcgcccgagcagctcgagatacaggcgatccaccgtattaggcagaggctgatctccgaccggacgcggctcgtgaaccagatccgtggtctgctggccgaacatggcatcgtaattgcgcgcgatatcagccgcctgcgtcgcgccctcggccagattgtagaagggtgtcatgccgatgacggcctgacggacatgatccgcgacctcgtgcgggagatccgggaggaattggccgagctcgatcgtcggatcgcgtcgtacaaccgaagggtccgcgcactcttccggaccaatgaggcttgccagcgcattgggcaaatcgaagggatcgggccgatcaccgcgaccgcgctggtcgcggcggttggcgaccggacctgcttcaggaacggacgccagtttgccgcttggctcggattggtgcccaggcagagatcaagtggcggaaaatcccgtctgttcggcatcagcaaacgtggtgaccgatacctgcgcacgctgatgatccatggtgcgcgcgccgttctcggcaaggcccatggcaaggacgatccccgaagccagtggatcggtcgcatgcgggaacgccggcacccgaatgtcgttgccgtagcgctcgcgaacaagaacgcccggatcgtgtggtcggttctgacccgtgacgaagcgtatcgaccggcaagagctaccgccgctggctgaatcggcagcgcaacaaccacaagacggaggttattcacggaacattgcagcaacctggctggggatggtgaaagggtcactcccatcgcttccagaacctgatgtgtggaccgacacggcggacgccgatgtcacgggggcactgaggaggaagcgcgcggaaatccatcggggctcgcggcgacgaatgttcgggccgctcagagaagccggatatacgtccgcaattgtgaactccgacccagagccaacctaaccgttgcaatcaggcggggtccatata

SEQ ID NO: 4048 - DNA, 1338 bp, unidentified
  source 1..1338: mol_type = unassigned DNA; note = element_614fa62
  misc_feature 1..2: note = core
  misc_feature 3..68: note = LE
  misc_feature 69..1097: note = CDS
  misc_feature 1098..1338: note = RE
  misc_feature 1077..1324: note = bridgeRNA
tgatgctgtggacggctccccaccccggttgcagcgtgggctgcaaccgatgagccgggaggggagccatgggccaggtggtgagggtcggcttggacatcgcgaagtcggtgttccaggtgcacggggtcgacaccaacggtgaggtggtgctcaggcgtcggctgacgcgagcgcgggtgctgccgttcttcgcggggctggggccctgtcggatcggtatcgaggcgtgtgccacagcgcacttctgggctcgcgagatcggcagattgggccacgacgtgaagctgatgccgccaagctacgtgaagccgtacgtgaagcgacagaagaacgactccgccgacgccgaggcgatctgcgaggcggtgagccggccatcgatgcgcttcgtcgaggcgaagacgccgacgcagcagagtaccctggtgcttcaccggacccggctgatgctgatgcgtcagcgaacccaactatccaatgccatgcgcgggcacatggccgagttcggcgttgtcgcaccgatcggccgcaagggactacagaagctcgtcttgatcattgccgacgaagccgacgagcgggtacccgcggcagcacgggcctgtctgcgaatgctggccgggcagctcgagctcgtgaatgcgcaggtgctcgacatcgaccgacgcgtcatggcgagcgcgcgagcgaccgatgccggccggcggctgatgagtatcccgggtgtcggacctgtactcgctagtgcgctggtggcgagcgtgcccgacccgttcgcctttcggaacggcaggaacctggctgcatggattggcctggttccgaagcagaactcgagcggcggcaaagagaggctcggcgggataacgaagcagggtaaccgctacctgcgacagatgctcgtgctcggcgcgatggcggtcatccgctatgccgagcgccacggcacgcgtcggccttggctcgtgaagctgatggcgcgtcgcacgaccaaggtcgccgccgtcgcactggccaacaagatggcgcgcatggcgtgggcgatcatgaccagcgggcaaccgtatcgcgagccggtactgcaggccgcttagcgaacagagcttgggaagggcgtagggatgtaatgcgatcagccggtcgataccggggagtgggagaacccagtgggtcaaggcgccttcgagcgcgtgcttgtgatcgggacccgtctccgcggaaggcattatggccagcggcacatgtgcgccgcatcaacaggtcgaacacatggccgcaccgaccaggcgtcgtcagcatccaaatcgcccttgccaacggggagccgtccacaca

SEQ ID NO: 4049 - DNA, 1347 bp, unidentified
  source 1..1347: mol_type = unassigned DNA; note = element_61599a1
  misc_feature 1: note = core
  misc_feature 2..76: note = LE
  misc_feature 77..1093: note = CDS
  misc_feature 1094..1347: note = RE
  misc_feature 1116..1341: note = bridgeRNA
gaatgacatggacatcccctcatcaagactctgccacacttggtgagtctgagtaagaaaacgttcggaggccaccatgtcactttctatttatagcattgatttagccaaacattccttcagtatccacggcgaggataccaatggcaacaccctgatccacaaaacaatatctcgagcaaaagtactcacattctttgccaatttgccgcctgccattgtcggaatggaggcctgtggtagttcccattactgggcgcgggaattaaccaagctcgggcataccgccaaaatcatggcctctaaatatgtggcgcctttcaggacgggtgccaagaacgacctcaatgatgcggttgccatttgtgtggctgtcacccgtccttcaacacgcttcgttaaaatcaaatccgccgagcaacaatccatattgatgctccaccgggcccgcgataactgggttcacgaacgcacagcactccttaaccagatccgggctgtcatggctgagttcggtatcatcgcccccaaaggccgccatgcactgcaagcaaatatcggacacgtactggaagacgccgagaatcagctaccggatttagcccgtgcaatcttagctgactgctatgatcacctgctctctatcaaccaacgcattgctgaccaagaacgctgctttgatatgttggtaaaccacagcaacaatgcacaaaaaatcatgaaggttgcaggtgttggaccaattacggcgacggtcgttatcgccagcatcggcaagggcgagcagttcgacaaaggccgtgactttgccgcttggcttgagttagtgcctacccagtattccaccggcggtaaaccgaggctcgggcggatcaccaaaaaaggcgataaatacctaagaacgttactggttcacggtgctcgtgccgccattaccaatatcggcaacaagaccgatcgcctcagtctctggtgcaaagggcttgtcgagaggcggggcctaaaacgggcgattgtggcacttgcggccaagaacgcccgtattatctggtcgctactgcgcaatgatacggaataccaagtcgctgtttaatcaccaagcgtaagagcaatacaccttcaccgggtcaatgcaatagccaatgatgaaataaggttaagaccacttgcgggaaaacctgataatgcggcgggcacgtcagatgccttctaacgaatgaggaaccgcaaccgcgtagtgtcatcagggtcatggcaaataagccaataaacagaccgaatgtagagcggcagtcccaaaccttatcttatcggcagctgttgttgacaaccgggggagtccatgta

SEQ ID NO: 4050 - DNA, 1186 bp, unidentified
  source 1..1186: mol_type = unassigned DNA; note = element_615ab86
  misc_feature 1..2: note = core
  misc_feature 3..208: note = LE
  misc_feature 209..1171: note = CDS
  misc_feature 1172..1186: note = RE
  misc_feature 6..213: note = bridgeRNA
cttgtatgttcaggccagaccggcgcggtaaagtccgaaggccgttgaggccaccggaccggaccgtgcagcctggtacgcgcttgggcctttgagcccgtggctgagtcgattgcgcacggaccccgcgttggtcttcacgaagcccgaacggttacgcacgccggcccggccgagcgtgcatgcacaagcaagggatccgaagaccatgtccaattcacccgtgatggtaggcatcgacgtcgccagcgagcacgtcgatgtggcggcgatcggcgccgcgatgccccgcgcacgctacggcaacgaccccgaggggcacagtgccttggccgaggcgctggtcgccatcgaggccgcgctggtggtgatggaggccaccggcggctacgaggcagcgctggcctgtgcgctgcaggccgcggggctgaaggtggcggtgatcaacccgcgtcaggcccgcgacttcgcccgctcgatgggccggctggccaagaccgaccgggtcgacgcccagacgttggccgaactggccgcgaccctcgcccgccgacccgacgccgagcgcttcctgcgcccgctgcccgacgccgtacagcaggatctggccgcgctggtcacccggcgccgccagctcctcaccatgctgctgtccgagcgccagcggctgcgcctggccgtggccgtcgtgcgccccagcgtggaagccgtcatcgagatgatccgcaagcaactcgacgacatcgaggcccagatgacggaccacgtccaccggcactacgccgaactggacaccttgctgcaatcggcgggtggcatcggcccggtcgcctcggccagcctgatcgccgatctgcccgagctcggccggctcaaccgccgccagattgccgcactggtcggtgtggcgccctacgccaaggactccggccaacaccgcggccgaagacgcattgccggcggacgcttcgagctgcgccgtgccttgtacatggcgacgctcaccgccacacgccacaacccggccatccgcgccttctacgagcgcctcctggccgccggcaagctcaagaaggtcgccctgatcgcctgcatgcgcaagctcctggccatcctcaacgccatggccaagacgcgcacgacattcgatccagatcacactcacgcttgacacgaaagacggtta

SEQ ID NO: 4051 - DNA, 1166 bp, unidentified
  source 1..1166: mol_type = unassigned DNA; note = element_616634a
  misc_feature 1..2: note = core
  misc_feature 3..206: note = LE
  misc_feature 207..1154: note = CDS
  misc_feature 1155..1166: note = RE
  misc_feature 12..212: note = bridgeRNA
cttgtctgatgatgtttctgtcctttccggcaaagatggggtgctgccgacgaggtgcgaactcgctggcagcgggaggggacgggtcgagtacatgctggccgtgatgggtcgagcttgagtgtgaccgccgctctcttttcctcgtggcctgaacggatacccgggcgtcgtggcccgtatgacaagcaaaggacctggaaaagatgaccgccaccatagcgcagactgtcggcgtcgacatctccaagctcaccctcgacgtctacctccacccccaggctacagcacggcaatttcctaacaccacggccggtatcacggccctgttggcttggctcggtcaaaccatcgtccatcgcatcatcttcgaacccaccggcgcctaccatcactgtctcgaacgtcagctcggcaacgcgggcgtgcccatggtcaaggtcaatccgctgcaggccagacgtttcgcagaagccatcgggcagcgtgctaaaaccgacgccgtcgatgctgccatgctcgcccgcttcggcgcgctggatgcgctgcaagacaggccgatggtgagccagacgctcagcgacatgaaggagctgctcgtcgctcggcgcggcctggtcaaggaccgtgttgccgcgtccaaccggaaccacgtccaccgtgcgtccttgctcaagcggctggccggtcagcggcttcgccaagtcgaacggcagattgccgccatcgatgccgccttgcggggcctttgcagatccgatgccgagctgaaagcccgcctcgacatcctcgtcagcattccggccattggcgaggccaccgcacttaccatgctgatcgagatgcccgagctcggcacgatcgacaacaaatgcgttgcaagcctcgctggcctagccccgatcgcccgcgactcaggacaatacagcggcaatcgctacatccgagccggccgcgctcatttccgccaagccctctacatgccagctctggttgcgatccgcttcaacccggacatgaagaccaagtatcaggccctcatcaccgccggcaagccgcccaaggtcgccattaccgccgtcatgcggaagctcgcaatcctcgccaacgcactgctccacggacagcgaaactggacgccaaagcccgcttgaccaacacggata

SEQ ID NO: 4052 - DNA, 1339 bp, unidentified
  source 1..1339: mol_type = unassigned DNA; note = element_6167794
  misc_feature 1: note = core
  misc_feature 2..66: note = LE
  misc_feature 67..1101: note = CDS
  misc_feature 1102..1339: note = RE
  misc_feature 1102..1327: note = bridgeRNA
tgatgctgtggacggctctcatccaaccagccagcctcctggaggttggtggacaggaggagagcaatggaagcagtggtcacgatcgggttggatctgggtaagtcggtctttcaagtccacggtgtcaaccgagaaggggtagttgtcgtgcagcggcggttaacccgggcccggttgctggcgttcttcgcgaagcagccgggatgcttggtcggcatggaggcttgcgcggccgcccaccactgggcccgggagctgcggaagcttgggcatcggccaaagctgatgcctccacggtacgtcaaaccctacgtgaagcggcagaagaacgatgccgctgatgccgaggcgatctgcgaggcggtgacccgacccaacatgcgcttcgtcgagatcaagagctgcgagcagcagggtgtgttggtccttcaccgcgtccggctgatgttgatgcgccagcggattgcgctctcgaacgcgatccgtggccacatggcggaatacggactggtggcctccgttggccgcaacgggctgcagcggctcatagagatcattgctgacgagagcgatgagcggctgccggcgatggcccgcagctccctggtcatcctggcgtcccagcttcagctggtgaacgagcaggtgctcgagaatgaccgccgggtgagagtgagcgcgcggtcgactgatgtcgggcggcggctgatggaagtgcccggcgtcggaccggtgcttgccagcgcgatcgtggcgtcggtccctgaccccgccgcattccgatcaggaagagatctcgcggcctggatcggcctggttccgaagcagaactccagcggcggcaaggagaagctgggtggcatcaccaagcagggcgatcggtatctgcgccaattgctggtcgtcggcgcactgtcagtcatccgctacgcccagcggcacgggacgcgccgtccttggctggtggcattgctttcacggcgatcatcaaagatcgcggccgtcgccttggccaacaagatggcgagagtgatctgggcgatgatgatgactggagaacgttacagagagccggttctcgtcggcagcgccggctgagagagtttgggaagggcaactgcgatgtaatgcatccaccggtcaataccgagagcgggaaaacccatttgcgccatagcgcttcgagcgcgtgcttttggtcgggacccggctccgcggaaggcattatggccagcggcctatgtgtgccgcatcaacaggccgcacacatggccgcaccgaccaggcggaagcacccatctaagaaaacccttgccaagggagagccgtccacaca

SEQ ID NO: 4053 - DNA, 1551 bp, unidentified
  source 1..1551: mol_type = unassigned DNA; note = element_616ecb2
  misc_feature 1..3: note = core
  misc_feature 4..245: note = LE
  misc_feature 246..1439: note = CDS
  misc_feature 1440..1551: note = RE
  misc_feature 7..265: note = bridgeRNA
attcgtaatatataagtgaaggttctcagtagccttcactcttttattttataatgaaggtgattggctgacggaatttgaaattgggacattacgcccgtagttaaatgtgtcagctagccttcattttcttgcattcgattcagcaagttgggacatacaaatgctcccgtttaaccaacgaatatgaatggaaactgaagagttggaaccaatcaaatattctactataaggaggtatccccatgattgctgttggaatagatgtttcaaaatccaaaagcactgttgctatcttaaattccaatggttctttacttgtcaagccatatacaatgacacatactcaatccgatatgtgtgccttggttgactatttatgtacctttgatgaacccattaccattctcatggagtatacaggtcactatcactatccagtacttaaaaagctacaacaggaaggattccctgtctgcattatcaatccatatcaaatgaaaaaatatgccgacgttgaaatccataaagcaaaaactgataaaaaagatgctatcagaattgctacatatgctctggaaaagtcttataaactcgtcccctataactcattggagcagaagtatgaagatctgaaatttttgtcaaggcaatataatcaacgaatttcctctgtgtcctatacaaaggttcagttgattaacctacttgaccagacaatgctgggaattactcgcttacttcctctaaagagcaagaatcctgaacaatgcgttttattactttttatcaaacgctttaaatcttttgatgaaatcaacaaaatcggcaaaacacgttttctttccagttatacaacacttgtgaagaaaacttgcgaccgccacgctccaagtaaaggattggcaatatatgagcttgccactaacagtattacaacccgcggtgaagacccatatattcagcttgctcaaagtcaatgcgtagaccttttagcaacttcacagaatgcagcagatgagattatcctgcaaatgcagaccatggctgaaaccatacctgaatataaaatcctcagggctatggctggcgtaggtgatagacttggtccaataatacttgctgagattggtgatattcgccgttttcatagtggtaaagctcttaattcctttgctggaaatgatgcgccaccttatcaatcctggcaattcgagagcagaaaccgccacatatcaaaacgtggtagtgccaccctcagaaaagcttgttttgaggttatgcaggctctcaaactgacaaaacctcaagatgatcccgtctacctttttatgttaaaaaaggagcaggaaggaaaaccctacaacgtagccaaaatggctggtgtaaataagtttctccgaatttactacgctcgtgcgatggagctttataagtaaatccgagtttattatcatatatttttgaaaaatctacaatacgtaggtttattaaggttaccctttttaaagatgaaatttcttaaaattcttcttgacaaacattagcaag

SEQ ID NO: 4054 - DNA, 1709 bp, unidentified
  source 1..1709: mol_type = unassigned DNA; note = element_617438b
  misc_feature 1..3: note = core
  misc_feature 4..247: note = LE
  misc_feature 248..1462: note = CDS
  misc_feature 1463..1709: note = RE
cttatacagtaaactaagaacaagccctctcgacacagggccggagcaagggtatacttgctcaatgaaactattgaactggccgaggaaagtctccctcctccacccggctcgaccgattgagaaagctcgcacttcctcggcctcgttcctgagtccgaccgatcatgagagagtcgcgcttcgagcgccacagtataagggcacgtgaactcaggaacaaggtatgtagagaggagaattttccatgtggtatgctggtgtggactgggccgatcaacatcatgatgccctggtcattaatgagcaagggcagcaggtcggatcgatccgtgtcgatcatagcctccaagggtttgccaagttgaccacctttttgcagcagatcatcggctctgagccgaaagagcagatggcctgcatcatcgagaccacccatggtctgctgattgctgccctgctggaggctggctggccagtgtatccggtcaatccgcgtaccgttgatcggcggcgatccgcctcgggggccaaaacggatacgattgatgcctatttgctggccaaaacaggacgagctgatttcgcggatttgcaccgcctcactcccgacagtgcacaggtggccgaactcaaaacgcttacccgtgatcaggatggcttgatccagatgcagactcggctggtcaatcaattgacggcttgcctcaaagcctactaccccgtggcgttggagctctttgccaaactgcagcagcacacgaccctggtctttctgcagacgtatccgactccacaagcggcttcggctgcttcccaagagcagatcgcctcggtcctcaagcaagctggtcatcccaatcccagcaaggcggctccggcgatcttcgccaccctgaaacttcctcatctgactgcagatgccgtcaccacccgcaccaagtcgcgcctgatgctggcactggtcagtcaactcatgccgcttctcgagcagattgcggcctacgataaggagatcaccaccctttttttgacccatcccgaccatgagatcttcagcagtcttccgcgagcgggaaagcgactggcgccacgattgctggcggaagtgggcgacgaccgcacccgctatgtcgatgcggccagtctgcaagccctggccgggacctcgcccgtgctgtttcaaagcgggatgtactccaaggcgcatcgacggctgggctgcatcaaaccgttgcgcaatgcgctgcaccaatttgcctggcagaccacgcaaagcgagccgtgggccatgcagtattaccaacgcaagcgcgctgaaggcaaaagtcatacggtagcgctccgagcgcttgccaatgtgtgggtcaggatcatctttgccatgtggctccatcaccgctgctatgaggcgatcacctttgagaccgcacagcagcggcatgcacgcagagcagcctagaaggtgctgatcaggcttcttcctttcaagacgagcaaaaaaccctgctgtttttttgctttcaactcggtatgtccctttcagaccacgcaagcgaacggctgtcaaggaaagcgaagcggcttgacagccgtaagcggcgtggtacactccttcataccgtgttgaaggcatcgctctttccctcactttcatcgggtttttctctcgttccaaattgctccaaaaaaagcttgacatagagagt

SEQ ID NO: 4055 - DNA, 1167 bp, unidentified
  source 1..1167: mol_type = unassigned DNA; note = element_6183dcb
  misc_feature 1..2: note = core
  misc_feature 3..177: note = LE
  misc_feature 178..1146: note = CDS
  misc_feature 1147..1167: note = RE
  misc_feature 34..198: note = bridgeRNA
cttgtatcttgacaattggttaaaataactgtgattagatttggcaaggtgtatgcagcccgatccctcaaggggttcatagcccgtagctcagcgaatggcgcatacactgagccactcatctgaaacccgaacagttgtcagtacgccataacgcatttgcaaggatgggtaatcatgagtcagccaggttcactttgtgtggatatcgatgtttcgaaagcgatactggatattgccgccagcagcgctattgaacaattttctgtcggcaatgacagtgatggctttgacgccatcattgctgagttgagaatgtacgccattgcgctggttttaatgaaagccactggaggacttgaaaccgccatagtctgtgcgcttcaggcagaaggttttgagcttgccgtggttaaccccagacaagctcgtgactttgcccgcgccatgggatacctcgcgaaaactgatagtattgatgccagagtgctttcccagatggctgaggttctcaaccggcatccggagcgggaacgctttatcagagcactgccggatactgaatgtcaggttctcactgcaatggtagttcgtaggcggcagttgattacgatgctggttgccgagagaaaccggttgcaccctgctcatccattgaacaggaaaagcattaatatcatcatcaaagcactggaagacgagcttgcgcgactagatgctgacatgaacagccatatccatagccacttcaaagagcttgctaagcgactgagcagtattaaaggtgttggcaccatgacggctgctgcgctgctggcggaagtacccgaacagggtaacctctccaggcgtgaaatcagtgcgcttgtcggtatggttccagtaaaccgggactcgggcacgatgagagggcgacgaaccatctttggcggcagggctggtgtgcgaacagccctgtacatggcagcgcttgtcgcaacccgctttaacccggtaataaaggtgttttacatgcgactgcttgccgcaggaaaacccaaaaaagtggcgctggttacctgtatacgcaagctgctgactatcctgaacgcaatgctcagaaagaacgaagaatggaatgaatcgtaccatcacgttgctccataatttttacgttcaagacagttg

SEQ ID NO: 4056 - DNA, 1359 bp, unidentified
  source 1..1359: mol_type = unassigned DNA; note = element_618be0b
  misc_feature 1..3: note = core
  misc_feature 4..87: note = LE
  misc_feature 88..1113: note = CDS
  misc_feature 1114..1359: note = RE
  misc_feature 1100..1346: note = bridgeRNA
atgatggggtggacggcccctgctcaccggcgtcgcaatgcgccaagatggtggttgtcgatacacaccattcgaagggggccgtccatgtccgagattatcacggttggtttggatctggcgaagcgggttttccaggttcacggggtggacagtgccggagccgtgacgctccggcgccagttgcgccgatcggaagtcgtcaagtttttcagcagtctttcccggtgtgttgtggggatggaggcgtgcgcgtcggctcactattgggggcggacgctggtcaagctgggccacgaggtgcggctgatcgccgcttcgcaggtcaagccctacgtcaagcgagggcggaagaatgatgccaccgatgcggcggcgatcgccgaggcggtgacgcgaccgcacatgcaattcgtcccgatcaaaaccgaagaggcgcaggcggcgctgatgctgcatcggacccggcgcctgctgatgacccaacgcaccatgctcgccaacgccttgcggtcgcactttgccgaatacggcatcgttgaaccggaaggccaggccggattggcgcggctggtggtcctcgccctggacgcccccgacgcggccttgcccgaggccgctcgcgaggcgctggcgatggtggcggcacactggcgcgacaccgacgccaagattgatgccctggaccacgaaatcctgaggtggcatcgcggcaacgccgacagccagcggatcgccaccatccccggcatcggcccgctgatcgccagcgctatcgtcgccaccatgggcgatcccggacggttcaagacgggccgcgatttcgcggcttggctgggattggtgccctcgcaaaattccaccggcggcaagaccgtgctgggaccgatcaccaaggccggtgatcgttacctgcgctccctgctggtggttggcgccaccagcgccttgtggcgtcgccgcaaagagaagggaacatggcttgccgccttgatggcgcgcaagacggtgcgtcaggtttccatcgcgttggccaacaagatggcccgcatggcctgggccatcctggccaagggcggcgtctacagggaaccgaccgcgttggcggcataggcacaggcacaagaaacaaccagttgcgagggcgatgaaagcgtgatggcgaccggtcaatccaaggaacggcaaaaccctgcaagggtcatggccgataaggtctctgaaatgattgggagccgttccgcggatcacatcatggccagcggtcagagtgccgcgcaaacaggccggacacatgactgcacccgaccggggcgtgatcgcgcagaaatctccttgcaacgcaggggccgtccacac

SEQ ID NO: 4057 - DNA, 1199 bp, unidentified
  source 1..1199: mol_type = unassigned DNA; note = element_619872a
  misc_feature 1..6: note = core
  misc_feature 7..185: note = LE
  misc_feature 186..1169: note = CDS
  misc_feature 1170..1199: note = RE
  misc_feature 9..194: note = bridgeRNA
gtatctctcgttgataaatgattagctattatttatcacatcgaagtcagtgagcttgcctttgcgcctagtatttaatactgctccgtagataaagccctgactttctattctcacaaactgaatggtatccaagcacacttttatttaagtagatgctgtatgtacaaggggagtaagtagagatgatgtttatcggcattgatattagtaaagagaaagttgatttatcgtggttgagagaccagcttacaaacaagattaaaacaaaagtctttaaaaacaagcatcaagactttgagaaaatagaaaagtggcttttaaatacaactaaaagcgttgctagtgagctcgttatcaccctcgaaccaacgggtgtttatcatgaagcactgatgtattttttacatgagcaaggctttaatattattttagcgaatacaggcaaagcgaaaaagtatgctgacgcgttaaacataattcataaaacagacaaatctgatgcaacgatgcttgcccactacggctgtgcaaagcacgcagtcgttgattattggcaacctgaagcgttagaagttagagagcttaaagcccttatccgtcgtttagatgcgcttgagagtaaccggcaacgagaagctaaccgattagaagcaagtgaattcagcaacgtttcagcacgtgttcgccaatcgataaaagtgactatcgcatttttagatgacgaaattaaacagcttaaatctgacattgatgatcacatagataatgagcctggtttaaaaagaaacaggaaactactagagtctatacctggcattgggcatgtattatcgagagagctgacatatttgtttgcggctaaaaagtttaataaagccaaagaagcagcagcttattgtggattaatcccacggcacaatgaatcgggtaaattaaaagggcgaacaacaatcagtaaacttgggccagccagaattcgctgtaaactctacatggcagccattgtcgctgggcaatggaataaaagaataaaacgacacaagttaacattaataaataacggtaaaacaccgatgcaagctgtatgtgcgaatatgagaaagctcattcatatatgttttggtgtaataaaaaaccaagaagcgtttaagctccaagaaagttaagtacgaccttgaagcttaaaatgagagatg

SEQ ID NO: 4058 - DNA, 1209 bp, unidentified
  source 1..1209: mol_type = unassigned DNA; note = element_61a06f0
  misc_feature 1..2: note = core
  misc_feature 3..204: note = LE
  misc_feature 205..1182: note = CDS
  misc_feature 1183..1209: note = RE
  misc_feature 31..228: note = bridgeRNA
cttgtatctttactaccttgatgttcaggatgcggttatgggaagttgtccacagcctgatcccccctttggaagcattgcattccgagagagagcaagtggcgtggacagcctaccgtttgcaagtagcccgaacagttgctggttggcaatgcaccgtcattgaccgtgtgtattgacctcgtatttttgcaaggaggggccatggcaaacgaatctcgtgaacccgtgtacgtgggcatcgacgtatccaaggacagcctggaagtggccttggctgacaaagtcgccagcgtgcgctttgaaaacgatgagcaaggcgtcaacgccttgctggaatacctgacaagccacaacgtggccgtggtgctgctggaagctacaggaggcctggaaaagcgctgtgcccatgcgatgtacctggcaggcatgaccgtggtggttgccaaccccaggcaagcgcatgaattcgccaagtcaatgggatacctggccaagaccgacggaattgatgcccgaatgctgtcgcactttgcgcgcactctgcacagcagtgagaggtttgacaaactgctgttcaagatggctacgccgcagcaggagcaactgcaagcgcttgtgacccggcgtgcgcaactggtgcacatgcgcgtggcagagacaaaccgattgaaccaggcccacgcgctgtcggccaagagcatccaggccgtcatcaagacactggacaagcagatcaagacgcttgatgaggacattggaaaccggctcaagcagcactttgcgcaaaaactcaagctgctcgaaggcttcaagggcattggagaaggcaccaaggctgtgctgatggccgcactgcccgagctgggccaactcaaccggcgcgagataggcaagctggtaggggtggcgcccttgaaccacgacagcggcaagatgcgcggcagacgctccgtgtggggaggcagggccgacgtgcgatctgctctgtacatggcagccctcagcgctgtgcgctttgatccaaccatcaaggcgttctatgagcggctgcgtgtagcgggcaagccagccaaggttgcgctggtggcttgcatgcgcaaaatgctctcgattctgaacgcggtgatcaaatcgaacacggcgtgggagcaacgttatccacaggcaagcgctgcatgacaaagcgcttgactttgaacacagttg

SEQ ID NO: 4059 - DNA, 1749 bp, unidentified
  source 1..1749: mol_type = unassigned DNA; note = element_61a0e33
  misc_feature 1..2: note = core
  misc_feature 3..360: note = LE
  misc_feature 361..1599: note = CDS
  misc_feature 1600..1749: note = RE
  misc_feature 58..328: note = bridgeRNA
ctcgtattatataagttgttccttcggtgtatttgtagctcattacttgtgttgctatttatttgttggacaccacgtgataatctctaattgtcattggctttggtcaactggtataggtttagacctccttgtagccgcgactactttattagactgccgcccagacaatcatctaaatcacgaaccacatgctgtttcgatgacgacgttcactagtctgagtaggactagccgcagcttgaacttagtcacccatgaattcttatctgcgaggatgtgtttagtgattgtaattaggggttatcacatggtgtccaacttaagaccagacaataattatgaaaggaggccatcccaatgaaattacttgtcggcattgatgttagttcgaaaacgcttgaagttgtgatgatgacttctgaagcgctaaaacctgtcttccaaggtgcctttgagaatgatctcaacggcgccacggaacttaagaccatcatcttggcattgaatgaacaacgtcattttgaacaaattacgattggtatggaatcgacttccatttatagtttccatccagcttatttctttatgaacgatgacgatctagctcagttcaataccgaagcggtcgttctcaatccccgtgatactaagcgttataaagacgtttttgaagacaataaaaacgaccacattgacgcactttatattgctgactacctacgtaatggtcgcttcaccaccagtctggttcgtgaggatgaatatattgcgcttcaacgccttacccgttctcgttttgaacttgtgacctcattagctcgttctaaacaacacttcttagagaacctttactataaagtcaataaactcgctgtaaactcctcaggagaaaaggtggcggtctttggtagctctatttttaacctactcactgatgaaatgaccaccgatgagctcatcaacgcctcgaccgaagacttaattgactatttaaacgccgctggtcatggccgctttgctgatgctgagaagaccgctaaagcgattcaaagggccgttcgtggctcgtatcgcttacctaaagtcatccaaaactctatcgatatcaatgtgtctatctatgccactgagattcgaacctaccaaaaactcatcaaagaacttgataaacaaatcgaagcggttgtcatggtattaccggaaactgaaattcttcaatcggttcctggtatcggctcagtttactcggctggtatcttagccgagattggccagattgaacgctttgataaagagactcagctggctcgctatgctggattagcctggaaacaaaaccagtctggcgactttaacggacagattacgcctcggacgcatactggaaacaagtatctacgctattacctaatcgaagctgccggttcggtaacccgctatgatccagtatttcgttcctattttgaaaaaaagatgtccgaagttacgaagactcctagaaagcgcggcctcgcattaaccgcaagaaagcttatcagggtgcttgacgtcctactccgtcgacaccaactctatcaaaaggaggaatcggtataggcatataaaaccagcttaaggtcaagccatcagctctgattttcaaaaatcgaaaatcagtgggcttatttaagtgcaccattttccaagtgttgagcagaaccaaatcccgtctgctttaatttattttattgacttatcaccacatgt

SEQ ID NO: 4060 - DNA, 1519 bp, unidentified
  source 1..1519: mol_type = unassigned DNA; note = element_61a240d
  misc_feature 1..2: note = core
  misc_feature 3..243: note = LE
  misc_feature 244..1410: note = CDS
  misc_feature 1411..1519: note = RE
  misc_feature 15..225: note = bridgeRNA
cttgtatactcaaaactgtaatagtagttagagtatagcttcctttctttctattgttataattaaatcaagcactgtggatttgtttcatgtctgtatagctttgactattaaaggagactcttaccacagttcttatttttaatgtcaatcagtaagttagcgctagacgcttcatcacaagactacataaataagaaatctgtgacttacccagtgctaaactattagggaggtgtatttatgtacttaattggaattgatatctctaagtacaaacacgactgtttcatagctactgaagcaggcgtacccatcaaagcattcagctttgagaacaatcgtttaggttttgatttatttctcaaggatttaagattcttagatcagtccaaagaaataagaataggtcttgagtcaacaggacactatggatcaaaccttaaacagtttattacgacatctggttatacttatctagaatttaacccttacttaacgcacatgttttccaaggcattatcgttacgtaagacaaagacagataaagttgacgccaaaactatttcaagtatgctaggttctgttgactacaagaccttacatactaaattttaccacatcaacgaattaaaacaacttgtgcggtatcgtcatgttcaaatgatgaacaggtctaaaacattgattgaactcacaaatatcctagaccgaacattcccagagtttaaaccgttttttaatgaaagactcgctggtagtgcacttttcattcttaagaagtttaaatctagaacacgaatttctaaattttctacaaaagattatgagtctattagaagttattctaaaggtaaattatcttatgttagagttcaaaaacttaaatcactcgctttatcttcagtaggttatgaaactcagtccgatcttttactgctcaaacatactattaaacattacgaggaactttctaacacgcttgatacaattgatgaagaaatcctttcaatcatgaaggatataccccagacacttacaactatacctggtgttagtgtcatctcagcagccattatcatcgctgaactaggtgattttaagaactttacaaatcctagtcaaatcgtttcgttctctggattggatacatccgttaaccaatcaggaacgatggaaacaagaggacatcttgttaagcgcggatccggattacttagaatgacgctttggcaaatcaccttttctagtttaaaattaaatccgaaactctatgattattaccttaagaagcgagctgaaggcaaacaccataaagtcgctttggttcactgtgctagaaaactaatacgcaccatttactatcttggcgtcaatcaagtaccttttgatcattcactatttaaataatcaaatgagggtgtagctaccttttttagattcatattttaaacttaggcttccatcggaggtcttttactatttaatattattaatcacttgacttattatagtaagt

SEQ ID NO: 4061 - DNA, 1186 bp, unidentified
  source 1..1186: mol_type = unassigned DNA; note = element_61a5cad
  misc_feature 1..2: note = core
  misc_feature 3..208: note = LE
  misc_feature 209..1171: note = CDS
  misc_feature 1172..1186: note = RE
  misc_feature 6..213: note = bridgeRNA
cttgtatgttcagaccagaccggaacggtagagtctgatcgtcgttgagacgaccagaccggcccgtgcagtttggtagccgcttgggtgttcgagcccgtgactgagtacagagcgcacggccgccgtgctggtcttcctgaagcccgaacggttacgcgcgccggcctggccgagcgcgcatgcacaagcaagggatccgaagaccatgtcttcttcctcagtggtggtgggcatcgacgtggccaaggcgcatgtcgatgtctcggtgctgggtgccaagctcgatgcccagcgattcgacaacctggccgaggctcactctgccctgccagcggcgctcaaaccgctggacgtagtgctggcggtgatggaggccaccggtggctacgagacagagctggcctgtgcgctgcagactgccggcctgccggtggcggtggtcaatccgcgccaggcgcgtgacttcgccaagtcgatgggccgtctggccaagatcgatgcggtggacgcgcgcatgctggcggagtgcgccgccgtgctgctgcggcgcgatgacctggcccgcttcctgcgcccactggtcgacgagcagcaacagtggctggccgcgctggtcacgcgccggcgtcagctgctgtccatgctgctcagcgagcgccagcggctgcagatcacgcccaagggcctgcatcccagcatcgaagcgatcatcgcggcgatcaaggcgcagctcgatgacatcgaggctcagatggtggctcacgtgggcaagcacttcgccgagctcgacgcgctgctgcaatcggccagcggcatcggaccggtggccagcgccacgctgatcgccgagttgcccgagctcggccggctgaaccgtcgccagatcgctgcgctggtaggcatcgcaccgatggccaacgactcgggctccagcaaaggccggcgacgtatccggggcggacgctttgacgtgcggcgcgtgctgtacatggccgcactgaccgccagccgccgaaacccggtcgtcaaggccttctacgagcgcctcatcgcagccgacaagctgcccaaggtcgcgttggtggcctgcatgcgcaagctgctgaccacgctcaacgccatggtccgaaccaacaaaccctgggacaactcgcttcacggcgcttgactcggaagacggtta

SEQ ID NO: 4062 - DNA, 1199 bp, unidentified
  source 1..1199: mol_type = unassigned DNA; note = element_61b1f75
  misc_feature 1..2: note = core
  misc_feature 3..302: note = LE
  misc_feature 303..1196: note = CDS
  misc_feature 1197..1199: note = RE
  misc_feature 36..199: note = bridgeRNA
tcctttagatttgcataattaaatttattggatatttaaattgagaagaagcagggtgaactatgactaggctccgagttaatacctcatatcctgatgaagcccctgcttcttttcttcaactttaaactcaaatagaaattcgggctagagacccattattaaggagttgagtagagttgaagttctcaattaataaactttcactacaaaactatgcaaaatcagacaattattggtattgatgttagcagtgctacattagatattcatgtaagtggtaagggggggggaaatctttcgtgatcaaaaatgaagaggcagcaatccgtaagttttttaatgtctataaactagaatgcctacttattgggatagaaaatacagggcgttataattgggctttatatgaagtattaaaaaatcttcatcaccaggtctatgtggtctcaccgctgcacttaaaaaagagcatggggttggtacgaggtaaaaccgataagattgatgcgataagaatagccgctttcatttcgaagaaccatgctgatttaccccgatggaaaccctcatcaccagcgattcaaaagctaaaaattctgcttaccgaacgtaatgcccgcattaaatctaaaagacagcttcttaaacaacaatacgattatgctaagatgaagcatgttggtttggacaaatctctgcaaagacttaatagagagcaattacacttgattgatcgccagattgttcagattgaaaaggaaatagaactgcttatcaaaacagatgaaaggatggatcagcaggcaaaacttatacgttccgttcctggagttggaaaggtgctatcctggatgatattggcaaaaactgaaaattttacaacgattaccgatccacgtaagatggcttgttacagcggtgttgtaccttttgcatatcaatcgggaacctccattagaggaaagaacaggatatcaagctatgcagataaggtaattaaatccattcttcacctggctgctatgagtgcaatccgcttaaaaaatgacctgagagaatattaccagagaaaagtagctgaggggaaaaataaaatgagtgctttgaacgctgtaagaaacaaaatcatccacagaatatttgcagtaataaaaaaccaaaccatctataaaaatgatttggttttatcatagaaa

SEQ ID NO: 4063 - DNA, 1499 bp, unidentified
  source 1..1499: mol_type = unassigned DNA; note = element_61c55af
  misc_feature 1..2: note = core
  misc_feature 3..243: note = LE
  misc_feature 244..1479: note = CDS
  misc_feature 1480..1499: note = RE
  misc_feature 7..230: note = bridgeRNA
ctaataggttcttgtcagcctgctggtccaggatggctccggtagcggctggcgggtcagcactccactcatttgaccttttgaggtcttgcggcagaccgtgcgcccgttggtcgtgaggagatgagacagccgatgggatgacgtgtcccgcccggcgggcggtgagcacttgactattagatcgctgacgtctcctccatgctgctgccaccggcaaaggtgtcgacattggaggcgaggatgatctgggtcggagacgactgggccgaagaccaccatgacgttgaactactcgacgacgacaggcgtcggctggcccgcgcacgactgtccgagggtctggagggaatcagccggttgcacgcgctgatcgcggagcacatgcccgcctcgtgggcggacctcgagcggcccgaagccgccgcacaggtgcaggtcgggatcgagaccgaccgcggaacttgggtgcaagcgctgctcactgccgggtatcaggtgttcgcgatcaacccgatgtcggtggcccgataccgggaacggcattccacctcgggcgcgaagtccgatgccggcgacgctcacgtcctggccgagatcgtgcgtctcgaccacgctcatcaccggcagatcgccggtgacagccccctcgcggaggccgtgaagctggtggctcgggcacatcagagcctgatctgggaccggacccggcaggtcctgcggctgcggtccacgttgcgcgagttcttccccgccgcgctgcaagccttcgatgacctgaccacgggcgaagctctcgagctgctggaccgggcacccgacccggaccgggctgcccgactgccccggctcaccgtcgtcgccgctctgcggcgggccggccgacgtgacctcgacgggagggccaccgcgatccagcagactctgaaagcggctcagttgcgtcagccgccgccggtgcagaatgcctacgcggcgatcgtgtccagcctggtgcagctcatcaacatcctgaacatcgagatcgccgaactcgggcagctggtggccgaccattttggccggcaccgggacgctgagcgctacctgagcctgcccggcctcgggaccgtgctcggcgcccggatcctcggcgaattcggcgacgacccgcaccgccacgccgacggcaaagcccgccgcaactacgccggcacttcaccgatcacccgggcctccggcaaccgccggatcgtgctggcccgctacgcccgcaatcggcggctcgctgacgcggtgcaccagtgggcgttctgcgccatgcgcggctcacccggcgcccgcgcctactaccaacagcttcgtgaacgcgggaccggccatcaggccgctctgcgccaactcggcaaccgcctcgtcggcatcctccacggctgcctcaaaaccgccagcgcctacgacgagaccaccgcctgggcccatcttcaaaccaacacttgactttcaaaaacgtgggatgt

SEQ ID NO: 4064 - DNA, 1380 bp, unidentified
  source 1..1380: mol_type = unassigned DNA; note = element_61cde0f
  misc_feature 1: note = core
  misc_feature 2..88: note = LE
  misc_feature 89..1114: note = CDS
  misc_feature 1115..1380: note = RE
  misc_feature 1144..1372: note = bridgeRNA
caatgggatggactcctcctccccctgagggcacgttagtgccaaactggagtttccacaaaaccggtttggaaagaaggagtccaccatgaagcttatccgcgttggagtcgatttggcaaagaatgtctttcaactgcacggcgtagaccgctcggaaaagacggtctggcggcgcaagctggtccgtggtgattggatcaaggaactgctcgaaaggattgagccgggttgcgagatcgggatggaagcatgtagcggcgcacatcattgggcgaggatgctgcaagcacagggacatacggtgaagttaatcgctccgcagttcgttaaaccctacgtcaagagcaacaagaacgacgcaaacgatgcagaagcgatctgtgaggcgatgagtcggccgagcatgcgtttggtggccatcaaaaccgtcgagcagcaagatatccaggccgtacaccgggtgcgctcaggcttgatggatcagcgcaaggccaaggcaaaccagctgcgcggcttagcgtctgaatatgggttggtggcgccgaaagaactgcttcacctgaggtcagcgatcccgcgctggcttgaggatcaggaaaatggtttgaccgagcattttcgccggcttttgcatggtctgtggcgagatctgaaggcactcgatgaacgagttgaagaactcgaccgggagattggacagattgctcggcaagacccggtcgctatacgcctgcagcaagtacgtggtatcgggccgctgaccgcaacggctctgctggctacagtaggtgacgccagccaatttgctagcgggcgcgagatggctgcttcgttcgggctcacgcccaaacaaaacagctcaggaggaaaacagcgattgctcggcattagcaagcgcggcgacgcttacctgcgcagtttactcgtgcatggagcccgagcggtcatacgaaccgcacaggcgaaaacggatcgattgagcacatgggtaatccgcattgccacgacacggcacccgaatatcgccgcagtggcgttagcgagtaagaccgcgcgcatcgcctgggcaatgctgaccaaagggaccgattaccgatctcaagccgcgtaagcatagctttagaactactgaagtagtatccgaaccacgattgcatgacaagccgcatgatggccaacaggtcgaaccggcgctgatgaaacccgataatgtctgaggccttcgagcccgtcaaagcgatagggagtcagcgcgcgaatagcccatcagggtccagcgcctgaagcaggtgcagcagtacgagaccggatatacgtgagcagtcgtacctcacggcctgaaaacggattgcttgcaaacgaggaggagtccatata

SEQ ID NO: 4065 - DNA, 1216 bp, unidentified
  source 1..1216: mol_type = unassigned DNA; note = element_61cf9a2
  misc_feature 1..2: note = core
  misc_feature 3..214: note = LE
  misc_feature 215..1201: note = CDS
  misc_feature 1202..1216: note = RE
  misc_feature 19..197: note = bridgeRNA
cttgtatcttgaaccatgtagtgggtggtggttagctaccatcacctgaaacagggtgaatctggtacttcctataaggtcagaccttgtcttacagctgagatcccctgtttcacctttcacgccagcatcaactttgaacggttgccaggagcatagactccgcatgaacaaggaaaatgggcgtgatggttatatgtgaaagggggctcgtatgattcagttaggaattgatgttggaaaaagcaaaatagacttatgcctcaggccggatggttcggaaggtcgccagaaaaccaaaacgctgactaacgggcctgatgtcgcaatcagcgttctggaatggttggcgaagcagaaagtcggtccctctgatgtgcaagtggtgatggagtcaacgggcacttaccacgaatatctggcttacggcctttatgagcgctctgtacgtgtcgtcattgccaatcctgcccgcatccgtgcctttgctcagggcatgggtattctcactaaaaatgacaccgtcgatgctgacgttctggcccggtatggtgccatgcgtcagccagatgtgtggcaacctccttctccagctatccgtgaattaaaagcactaattagcagacgtgatgcgctggtacacgatgtaggccgtgaacaaagccggcttgagaaactcctttcaacgcgatgttcactgctggttgaagcctctgtcagaaagatacttcaggtgctgaacaacgaactgcaggtggtacaagcgctgattgataaccatatcgataaacaccctgagctgaaacgggatatggaatatctgacgtcgataaaagggatagggtcagcagtcgggagtacaatgctggtagtcctgaggggaaatcacttcatcagtgcagaacaggcagcatcctgggtgggagttgtacctaaggaaaaacgctcaggaagctctgtccgcggcagaacaagactctcaaagaatggtcctccagaagtgagagccaaactctttatggctgcaatagttgccgtcaaacacaaccctctactcaaacagttttatgagcgccttctggcggcgggaaaagcgaagatgtcagcgctgggtggggtgatgagaaagctggtacacatctgctacggtgttgtgatgaaacagcaaaagtatgacgagaattacgctacagcagcttgacgctcaagacggtag

SEQ ID NO: 4066 - DNA, 1389 bp, unidentified
  source 1..1389: mol_type = unassigned DNA; note = element_61d8ff2
  misc_feature 1: note = core
  misc_feature 2..87: note = LE
  misc_feature 88..1119: note = CDS
  misc_feature 1120..1389: note = RE
  misc_feature 1156..1381: note = bridgeRNA
caatgggatggactcctcctcacctcggcatcttgagtgccagactgaaggtgcgaaccacagtcaaatgcgagaaggagtccacacatgaagcttatgcgcattggggtcgacctggccaagaacgtatttcagatccacggcgtggattgccatgaccagccaatctggcggcagcgtctgcctcgtgatcgctggcttcaaacggtgctggagaagatcgagcccggctgtgagattggcatggaaagttgcggcggtgcgcaccattgggcacgacagctccaggcatgcggatttcgcgtgaagctgatcgcgccgcagttcgtcaaaccgtacgtcaagagcaacaagaacgacgccaacgatgccgaggccatctgtgaagcgatgagccgccccagcatgcgcttcgtcgccatcaagaccgtcgagcaacaggatatccaggcgacgcatcgcatccgggccggcttaattgaacagcggacggccaaagccaatcagattcgtgggctggtcgccgagtacggcctcatcgccccgaaagaattactcatgctacgtcgtgcgataccgtgctggctggaagatccggataacggtttgacggtacgctttcgccgtttgctggatggcttgtggggcgatcttcgcgggctggatgagcgcgtgaacgaactcgacagcgagattactgccattgcgacaagcgaaccggccgccctccgtctacaacagctacgcggcgtcggcccgatgatcgccaccgcactcgtcgtcgccctcggtgatcctcgacagtttgccaacggccgacagttcgccgcctcactgggattgacgccgaggcaacacagctccggcggcaaggatcgactgcttggcatcagcaagcgcggcgatgcgtatctgcgaacactgatagtccatggtgcccgctcggcgttgcgtacggcgaaacccaaagacgaccgactcagccagtgggtcgtccgtttagccgagcgctcacatcccaatgtggccgctgtcgcgctggccaataaaacggcacgcatggcctgggcaatgctgcgtcatgattctgattaccaaccggatcgggcggcaacctgatctattcacccgaggtaccctacgagagaaccatcccttaaccacgattgcgacgcaacccgaacgatggcaaaccggtcgaaccggcgttggtaaaaccctcaagcatccaggtgcgaaaagcacggcggaacgattgggaaccaacgcgcgaatagcccatcatggcccagcatcgatctgatgccacagtcagaggccgaatatacgtgtgcagtcggcacgggcgccagagcgaaggggggcttgcaaagaggaggagtccatata

SEQ ID NO: 4067 - DNA, 1391 bp, unidentified
  source 1..1391: mol_type = unassigned DNA; note = element_61de506
  misc_feature 1..2: note = core
  misc_feature 3..86: note = LE
  misc_feature 87..1112: note = CDS
  misc_feature 1113..1391: note = RE
  misc_feature 1161..1389: note = bridgeRNA
cgatggaatggtctcctccccccaaacggcatcacaatgtgccatgattggagttgaagacaacaatcaaaagagtggaggagaccatgaacaacattagcgtattaggcttggatttggcaaaaaactcctttcaggcggctattttgaatgggcatggcaaacaggtgcgccagcgcacgctcagacgccagcaggtactcgagtacctgatgaatgccgacgttgatgtgattgctatggaagcttgttctggagcacaccatctagccagaacgctgcaagcagcggggcgaacagtccagttgttaccaagccaacatgtaaaaggctacctgcgtggtcagaagaacgaccgcaatgatgcgctggcgatcgccgaggcgtgtcagcatggccggatcaggccggtccaggtcaagacgcaggaccaccaggatgaccaggcatttcaccgaattcgcaatcggttgaagcaggatcaaaccagcctgatcaaccagatgcgaggactgctgtctgagtatggcctggtcattgcgcaaggggtcgcttcgttccgtaaggaaatcccctggatattggaaaacgcggagaatgggctaagcccccggttcagagaattgcttgatcggcgttatcaacatctactcgcgctgcaagaagagctggattggtttgatcagtgtttgaatgagcaagtcaaacaaaacccggtctgtcagaagttgatggcactgccaggggttggacctgtcgtcagcagtcagctggcgtgctggatgggcaatggacgccagttcacccgggggcgggatgcgtcagccgccttgggggtagtgccccgtcaatacagtacgggcgggagagagtccctgtatggcatcaccaagcgtggtgatccaaacctgagagcagccatggtacatgggtgtcgggctgtcgtggcggcggccgtcaaaaagggtaaggacgatcacctcagtcagtggatacagagcattgtggcgcgacgaggctttaacaaagcggtcgtggcgctggtcaacaagctggtacgggtagcctgggtgatcgtcgcccggggcgagtcctaccggcctgcgggttaacctgaatgcaaacaggctaaactacaaaccgagcacgtcgaaagaagaggagcatgtcccaggttgcgtaagtgacagacattgatgtgaaacaggtcagaccagcatattgaaaacctgatcagggcgatggctttagaggccgaccgttcgtagaggacaatatgcgcgcattatcatcaaggccagaggctggacctcgagaacaggccggatatacgacagcaaacctgataaaacatcaacgaagttgcttgcacaatgggaggagaccatata

SEQ ID NO: 4068 - DNA, 1430 bp, unidentified
  source 1..1430: mol_type = unassigned DNA; note = element_61eec1b
  misc_feature 1..2: note = core
  misc_feature 3..106: note = LE
  misc_feature 107..1123: note = CDS
  misc_feature 1124..1430: note = RE
  misc_feature 1190..1427: note = bridgeRNA
taatgaaatggacccatccttcttcccacacgcgtcaccggcgcggcaagatgggtagtggtaaccgccacacacactcatgatcaggaagaagggaggggctgttatgcatatcacgacattggggatcgatttggcgaagcaagtgtttcagttacacggcgtggatgaccgagggcacgcggtgctcagccggcgcgtgcgacggcagaagttgatggaggtcatcacgagtctgccgccctgtgtgatcgggatggaggcgtgtgcgagcgcccatcactggggccgagcctttgaacagtgcgggcacactgtcaagctgatgcaccccaagtacgtcaaaccttatgtcaagaccaacaagaatgattgtcgagatgccgaagcgatctgtgaagccgtgagtcgaccgaccatgcgctttgtggcgatcaagaccgtggaccaggcggacctgcaagccgtgcatcgctcccggtccctcttgatcaaaacccgaaccgccttaatcaatcagatccgcggactgctgggggaatatggcctggtcattgcgcgctctcccgagcacgtccgaccggcattggttgcactgttgaacgacgaacaggccgggttgactccctttgcccatgacaccttctccgagttatatgagcaactggtggagttagagcagcgcattgtgcgggtgaatcagcggctggatcgcatcttcaacgcgcatccggtgtgtcggaagctggctgcggtgccggggattggtccgctgacggcgacggcgctgctggctgcggtcaacagtgcacaggcgtttcagaacggtcggcacctcgccgcctggttgggccttgtgccccgacaattttcgagtggcggccactctcgcttggggaagctttcaaaacgagggaatcgctatgtgcgcacactcttgattcatggtgcacgtgcggtggtccagcgggctgcgcacaaaaccgatgcacggggacggtggatctgggacctcaaatgccgcaaagggaccaatgtcgccgcggtcgccgtggcgaataagaatgctcgggtcatctgggccttgttggcccatgatgatgtataccgacaacccgcgtaggacaggaacgcgcaactgggcgttgtgaggagaaccgaatcgcatcataacagacggagtcacaccaaggagcgcaacacggaccatctgtgatgacaccacagggacacccggcgcgttcagaccctggacaaattgtcggcccaaccaaggccgttgtgctaatgaggagaacgcgcgcagctttcatcaaggcccggacatcagctctggtgtccagagagaggccggatatatagacgcagccctgtttttactggtgtatcacgtgagacgctgctgttgccccgaaggctgggtccatata

SEQ ID NO: 4069 - DNA, 1325 bp, unidentified
  source 1..1325: mol_type = unassigned DNA; note = element_6203e03
  misc_feature 1..3: note = core
  misc_feature 4..70: note = LE
  misc_feature 71..1102: note = CDS
  misc_feature 1103..1325: note = RE
  misc_feature 1114..1313: note = bridgeRNA
cgatgtatggaatccactcatactctgccaaacttaagcatgggcaggaactgtaaaatgaggtgtcatcatgctaagaacgaacgtaatcggcatagatttagcgaaaaatgtatttcaggtttgtaatataagctgccagggagagttactcagcaacaaagctataagcaggcagaagcttaaggagctccttgctaaagccaaaccatcccttgttgctctagagggctgtgctacttgtcactactggggtagatacgctgagtccttcggccatgaggtgcgtataattaatccgaaaaaagtgaaggcgtatgttgagggtcataaaacggacgccaatgatgcgcttgctatcgccaatgcggcacttcaaatagggataaaatacagtaaacctaaatcgatggaacaacaaactttgatgtctcttgaagcaaatcgccagtttctttcgaaaactatcgtgtcattggggctgcacattcgaagcatcattaacgaatacggtatcgttagggctaaaggcactaaagggcttgctgcattagtgacttcagcgcttgatgaaagggatgttctacctgcaagtttaattgctactttatcaatgctctggcaacaataccttaacctgaaagaagagttaagccatcttcagaaatccatgaatgcgacaactcgccaaatagaaccctgtaaaaggctcatggctcttgaaggtgttggtgaggtaacagcatccatgctttatgctaatttgggtgacgggacacaatttactaacggtcgacaagcatcagcatttatcgggttaacaccgaagcaatacagttcaggtggtaaggtgacgatgatgggtattgataaatttggcggagttaaagatcttcgctcaatgctttaccttggtgctatggcatacatatatcgactgcctgactcacctacaaaccagaaacaggcgtggcttatcaagttagtcaatagagtcggtttcaaaagagcttgtatcgctttggcaaacaaaactgttagaacagcttgggcaatgcttcgctatgaaacaaaatatcagtcaaagacactatcctgctagcagtataaattaacagattacaaataatgatgttcaatggttagaccagcctactgagaccctgactacttcgcaatgctataaaaagcttttttcgcggcaatgacagtaggtgcgcatgcatcaaaggttagaaggtcgctccttcaatgagaaaccgaatatacgaccgcatcttatccattgcacattcttatcttgtaaaacccgtggattccatata

SEQ ID NO: 4070 - DNA, 1583 bp, unidentified
  source 1..1583: mol_type = unassigned DNA; note = element_621ab1c
  misc_feature 1: note = core
  misc_feature 2..78: note = LE
  misc_feature 79..1143: note = CDS
  misc_feature 1144..1583: note = RE
  misc_feature 1345..1574: note = bridgeRNA
taatggaatggtccggccgtgctccggccctgccagtacgagaagctggcaaggggcgcccaagacaaggagcacgccatgtctcagaaactcgacgcttcgcccgccgtcatcggcatcgatatcggcaagaactcgttccacatcattggccagaatcagcgcggcggcatcgtgctgcggcagaagtggtcgcgcggccaggtggaaacgcggctcgccaacctgccgccgtgcttgatcggcatggaggcctgcgtcggcgcgcatcacctcagtcgcaagctgcaaacgcttggccacgacgcccgcttgatgccggcgaaatacgtgcgcccctattcgaagggacagaagaatgacttccgagatgcggaagccatcgccgaggcggtccaacgcccgaccatgaagttcgtcgcaaccaagaccgccgaccagctcgacctgcaggcgctgcaccgcgtgcgcgagcgattagtcggtcagcgcaccggcgtcatcaatcatatccgtgcgttcctgctggagcggggcatcgccgtgcggcaaggcctgcgctccctgcggtccgagttgccgggtatcctcgcgacgcgcaccgatgtgctctcgcctcgcatgttgcgcatcatcgaggatctggcgggtgactggcgccggctggatgagcgtatcgaggacctctccagcgaaatcgaggcattggcccgtcaagacaaaggctgcgagcgactgatgacggtgcccggcattggcccgatcatctcgagcgcgatggtggctgcgatcggcactggagacgtgttctcgaaaggccgcgacttcggcgcctggcttggactggtgccgaagcagatatcgaccggcgaccgcacgatcctcggcaagatatcaaggcgcggcaatcgctacctgcgcgcgctgtttgtgcaggccgcgtgggttgtgctggtcaaggtcaagggttgggagcgctatggcctcaaatcttggatcgaagccgccaagaaacgattgcaccacaacgtgctggcgattgcgctcgccaacaagctcgcccggatcgcctgggcggttctcaacaagggacgcgccttcgagtgcgtcaacacggaggagacggcgtcccgagctgcctgatcctcgcaccgtgctcggggccgtcaaggcgcggcctgaccgcggtagagcaagacgtcaggacagcacgacggccggccttgacggcccttgcgcgcggcgcgtctgcgcgcgcaggccgggacaaaggaacgaccgccaggcacgaactaaggaacagcacgaggtgaggtgcgatcgatgacgtaaccaacatcccttacccgccgaggtctgcgagaggaatgagacaacgatggaggatcggtcttcccggcgcatgcgaacactggtgacccgaatggcccgttcgaggcctgtccgctaattagctcgaatgcgcgctgatatccatgatggcccggagcacaacacgctccaatcagaggccggatacattgatgcaagaccgcatctgccaggttgacgaaacctcttgcaacgcgcggccggaccataca

SEQ ID NO: 4071 - DNA, 1428 bp, unidentified
  source 1..1428: mol_type = unassigned DNA; note = element_621b708
  misc_feature 1..2: note = core
  misc_feature 3..121: note = LE
  misc_feature 122..1156: note = CDS
  misc_feature 1157..1428: note = RE
  misc_feature 1176..1378: note = bridgeRNA
agatggggtattcggcttgagtcccacttcgcggggttttggattgaggtgctgcgcttcgggctgatgataaacgtggtctgttcttcaatagccacacgcatcagaagggaagcgcagcatgaaatattatgcgggtttggatgtctcgctgaaagagacctctgtttgcattctggatgaaacgggcgcggttttccgggagctgaaggctccaagccatccggaggatctgatccgggtttttgaggcgctcgataagccgctcgctcgcatcgggctcgaggcgggacccctcttgcaatggctgttcagcgcgatggtcgaggctgggctgcccgccgtctgcatcgaaacgcgccacgccaaggctttcctccaggctcagatcaacaagaccgatcgtaatgatgcgcgcggcatcgcgcagatgatgcgagtcaacctgtttcgcccggttcacgtcaagacgctgaccagccagaggcgccgggcgttgttgacggcgcgcaagttggcgcaggaaaaggccatcgcgatcgagaacgacattcgtggaatattgcgaaattttgggctcaaggtcggcgttgtcggcaccgccggctttgaggcccgtatccgcgaactggtcgaaggcataccggacctggcctgtgtcatcatgccattgctggcggttcgccaaaagctgcgtgagaccttcacgatcctgcatcgtcaattgctggcgatcactcgagacgatgtcgcttgccggcgtctgatgaccattcccggtgttggtccagtggtcgcgctggccttcaccagcaccgtcgatgtcccggccaggttcaaaaactccaaagccgtcggtccggcactgggattgacgcctcgtcgcaatcaatcaggcgaaagcgatcgggtcgggcgtatctcccgctgcgttgacgcgatgatgagaacgctgctctatgaggccgctcattcgctgctcacgcgcgtgcagaaatggtcgtggctcaaagcctgggcgatgagtgtcgccaaacgccgcggcctgcagagggcggtcgttgccttggcgcgacgactggcggtgatcatgcatagaatgtggagcgatggttcgcagttccgctggacaagggagaccgcggccgtggcctgagcttctcaagcaaagagataccaagttccgcccgttggtggagagacgtccttcgcgggacgatggataaggcgagttcgcaatgtgtcccggaccgagccccatgaggattcaggccgtggttcagatagttccgcctcatccttccgatcccatcatcatgggagagccaccgtgctcatcccgcagagaagcgagacccgcggacgacagtcacatccgcaaacgccggaaagctcgaaagcgcttgacctcaacgcgccgaatagaga

SEQ ID NO: 4072 - DNA, 1379 bp, unidentified
  source 1..1379: mol_type = unassigned DNA; note = element_6225e25
  misc_feature 1..2: note = core
  misc_feature 3..309: note = LE
  misc_feature 310..1119: note = CDS
  misc_feature 1120..1379: note = RE
  misc_feature 1149..1367: note = bridgeRNA
tgatgctgtggacggctcctccacccggcacgtgggtgccatggatgtgggtgctggtaaggcccccacgattcggaggagccaaacatgcaagcagtcacgacaatcggtctcgatattgccaagtctgtttttcaaatccacggagttgacgcggcaggtaatgtaatcgtccgccgccagctcaagcgccgctacgttttgccattcttccagaaactaccgccgtgcctcgttggcatcgaagcatgtgcgtcgtcccatcattagtcgcgcgaattgcaggctcttggtcatacggtgcgcctgatgccgccggcctacgtgaagccctacgtcaagcgacacaagaacgatgccgccgacgctgaggccatctgcgaggcggtcaccagagcaaacatgcggttcgtggcgaccaagacacccgagcagcagagctgcctgatgcttcaccgtacgcgccatctgttcatccgccagcagaccgcagtgatcaatgcaatccgcgcgcatcttgccgagtttggcattgtcgcaccggtcggacgtaatggtgttgaacaactgctcgatgtggccgccgacgcaagcgacaaccggttgccggaggctgcacgcgcctgtctgctagctctcggcgcccaactgcgggcgctaaaggcacagattctgaacttcgatcgccagatcatggcctggcaccgatccaatgaggcgagcaagcggctcgatgagatcccgggcgttggtccggcgctcgccaccgctctggtcgccagcgtcgctgatccgaaggctttccgatccgggcggaatttctcggcctggatcgggcttgtcccaaagcaacactcgagcgggggcaaggacaagctcggcagtatcagcaaacagggagatcgctatctgcgcagcctattcacggcgggtgcgctggccgtcatccgctatgccaagatccatggcacgaaacatcggccctggctcacggcattgttggcgcgccggcccacgaaggttgtcgcgattgcgcttgccaacaagatggcgaggatggcgtgggccatgatggcgaaaggtgatcgctacaaagaacctattgcacttgcggcgtgaacgagatcgcgccgacttccggcgtgatgtgaaggttgggagggcgaacagcacgtaatgcagagccggtcgatccggcgatcaggacaacccacatgtgccagtgcattgtcgaatgcgggcttttgaccgggacctgatccgcggagggcattatggccagcggtcatgtgaaccgcacaaacaggccgaacacatggctgcaccgaccagcctgcaaatgtgaagaaaagccttgccaactcggagccgtccacaca

SEQ ID NO: 4073 - DNA, 1376 bp, unidentified
  source 1..1376: mol_type = unassigned DNA; note = element_6228bbd
  misc_feature 1: note = core
  misc_feature 2..86: note = LE
  misc_feature 87..1118: note = CDS
  misc_feature 1119..1376: note = RE
  misc_feature 1146..1371: note = bridgeRNA
caatgagatggactcctccccgtcttcggcatcgagtgccagactggaagcgatagaaccagtcgctggcgaagaggagtccacccatgaagcttacgcgcatcggagtagacgtggccaagcaggtcttccaggtccatggggttgatcgacacgagcaaccgatatggcgtcgccgcttgtcacgagatcgttggctgaaggccgtgcaagaggttgctgagccaggctgcgatatcggcatggaggcgtgtggtggcgcgcatcattgggcgcggcagctgcaagcgctgggttatcgcgtcaagctgattgcgccgcagttcgtgaagccgtacgtgaagagcaacaagaacgatgccaacgatgccgaggcgatctgtgaggcgatgagtcgtccgagcatgcgctttgtgagtgtaaagagcgtggcacagcaggatctacaggcgatgcaccgcgtgcgtgccagcctggtggagcaacgcactgccaaaggcaatcaaatacgaggtcttgtcgccgaatacggcttggtggcgccaagagagatggcttcactacgacaggccattcccggttggctggaagatgcggagaacggcctgagcgtgttgttccggcgcgtgctcgaagggctgtggcacgacctgcgaaatgtggaaggccgtgtcagtgaattggacgtccaaatcaacgaagctggcaaggccgatccagcggcacgccgactccagcagttgcgtggcgtaggtcccgtcgtcgccacagcgttgatcgcatgcgtgggtgatgccaagcagtttgccaatggtcggcagatggcggcatcgttaggtctgacgccacggcagcacagctcgggtggcaaggagcgcttgctcggcatcagcaagcgtggcgatgcctacgtgcgctcgctgttagtacatggcgcaagggcaatgttgcgaacggccccgcgacacgatgatccgctaagccgatgggtcacgcgcctgtcggcccgatcgcacccgaacgtggcctgtgtagcgatggccaacaagacggcgcgcatggcctgggccatgctgcgtcatgggtcgaactatcaacccgcgctcgcggcggcctgagaggtagtgtcccgatacaaaccacttcacgattgcgaagcaccccgcgtgatgacgaaccggtcgaaccggcgtcggcaaaaccctgaaatgtccgtgtgccacgagcacgccaaagcgattgggagccgacgcgcgactagctcatcatggcccggcaccgaaaatcggtgcagcggttagaggccggatatacgtgtgcagtcgacacgggcgccagagctaggggatgcttggcaaaggggaggagtccatata

SEQ ID NO: 4074 - DNA, 1566 bp, unidentified
  source 1..1566: mol_type = unassigned DNA; note = element_6228d12
  misc_feature 1..15: note = core
  misc_feature 16..245: note = LE
  misc_feature 246..1421: note = CDS
  misc_feature 1422..1566: note = RE
  misc_feature 3..224: note = bridgeRNA
cttgtattatatagtcatagcttttctttaccttttcttaggtatgagctatgctgttttagatactgtggattagttcatttctcctaccacttgatggtttagtaaaggctctaaccacagtctctttgttcacttgttaatcagttagataccgcatgacggtttatttagaacaaggttacaatcgcagagagccaccgtggtctaaaacagtatcaaattcatttaataggagtttcgctatgatatacgcagggattgatgtttccaaggataagcatgattgttttatcaccaactcagatgggaagattctctttaaatcctttaccattcccaacaaccgggaaggttttgaggtcctctatcagaagatcacttccactacagatgatttaaccaatgtaaaagtaggccttgaagccactggacactacagttataacatcttgggctttcttcttgataaaggtctgaccacctttgttatcaatccgttacataccagtcttttcagaaaaagtctaagccttagaaagacgaaaacggataaagttgattcccatacgattgctacaatgcttatgtctgatgtgaacttaaagtcctactcagacatatcttaccacaacgaggaattaaagtcactaacccgttaccgttttgataaagtcagggagcgcgccaagcttaaaacttctgtttcccgtctggttacgattctttttcctgaactggaaaagctggttcccactcttcatatgccttccatttccgctttactaagcgaattccccggtgcttttcagattgcttctgctcatcttaccagactgaccaatctgctttacgaaacctctaagggtcgttacggcagagacaacgccatcctgttcagggaaacagccagagcctctatcggttcgaatatgcctgtaaaatctctggaactgaaacacaccctaaagctgataggtgaattagatgccgaaattgatgaaatcgaacaggaaataaaacgtatcatggatgaactccattcccctattcttacgattcctggaatcagttaccggatgggcgccatgattctagctgaaatcggtgatttttcccgttttgactctcctgataagattcttgcctatgctggattatctccctctacctaccaatccggacagttggaatcttctcattcacatatggaaaagcgtggttccaggtatctgcgctacgcactttttaatgctgctaaatttgtctgtaagtgggatccggtatttgccgcctatcttgcaaaaaagagggcggagggtaagcattataacgttgctgtttctcatgctgcgaagaagctggtcagagtcatttatcggttagaaaaatcgggacaggcatacaacaaagtctcttaacttttctgtttaataattttctttttgagcacctgtaaagatgctctgtttgtcatgcggttttcaaggtactgatttacttgaaatgcatttctgcaattcattcataaactttcttttttagacttgacttttaatagttagt

SEQ ID NO: 4075 - DNA, 1384 bp, unidentified
  source 1..1384: mol_type = unassigned DNA; note = element_622e052
  misc_feature 1..2: note = core
  misc_feature 3..86: note = LE
  misc_feature 87..1118: note = CDS
  misc_feature 1119..1384: note = RE
  misc_feature 1122..1371: note = bridgeRNA
tgatggtgtggaacggccctccgaaacggcatcgatagtgcctattgtggtgacggcaatcgccacgaaagagaaggaaccgttccatggagaagattaccacaatcggcctcgacctggccaagtcgatctttcaagtgcatgccattgccgaggacggaagtcttgtaacgcgccgcgctttgcggcgatcgcaggtactggaattcttccggaagctggagccttgccttgtcggtctggaggcctgtgccagcgcgcactattgggcgaactcgatcatgcagtttggacataccgtgagaatgatgccggctgcctatgtcaaggcctacgtcaagcgtaacaagacagacgcggcggatgccgaagcaatctgtgaggcggtgacgcggccgacgatgcgctttgtcccgatcaagacgcgtgacgagcaggctgcctgcatcgttctgaagacgcgcgagctgttcgtacggcagcgcagccagacggcgaacgctctgcgtgcacacatggcagagatgggtatcatcgccgcaacagggatgaccagcatcgccaagctgatcctcgtccttcgcaacaacgaggatcagcggctcccaaacgcggctcgggcggcattacttgagatggctgatcagattgagatgttatcggcacgcattgagaaactcgatgcgacaatcggggcaacagtgaaagctgatgctgctgcccggaggttgaccagcattccgggggtcggccccctgattgctgcgaccgtcagggcctcggtgcaggatcccagcagtttcaaaacggggcgagacttttccgcctggatcggcataacgccgcgggcacattccagcggcggcaaggagcgccttggcaagatatcgaagcaaggcagcaagcagttgcgcaccttgctcatcgtcggcgcgacatcaatcctgaagctggcacgccgtggggcaaagctgccggcttgggtggtctccttgatggcacgaagaccgtacaaggtcgccgccgttgccttagcaaacaaaatcgcccgaacaatctgggcacttctcgtcaagggcggcatctatcagatgccggcgattatgatgaaagcatagaaacaggagtggttccggcgcttctgtcgccggatcaagcggcaaggtgccaacgtgtgatgaacccaatgggcgaaatctcgataccgatcagaccgtcttcctcaatgcgccatcgagcgcggcaaagtgattaaggcgatcggcatcgtggatctcatcgtggccagcggtcatagaccgcgtcagataggccggacatatgactgcaccgtccgacggggatttgcacaataaatgccttgctaaccgggccgttccacata

SEQ ID NO: 4076 - DNA, 1555 bp, unidentified
  source 1..1555: mol_type = unassigned DNA; note = element_6238fff
  misc_feature 1..2: note = core
  misc_feature 3..161: note = LE
  misc_feature 162..1424: note = CDS
  misc_feature 1425..1555: note = RE
ctcgtataataaagtagtagttattttagtccctctccaaggactttatgctatactgttaatagatactgtggattagtacattcctcctaccacaagatggtttttgaaaggctctaaccacagtctctttgcatagttgttaattagttagataccgcatgacggtttatttagaacgaggttacaatcacaaagagttcttgtggtctaaaaacagtatcattttttatgaaagaggtattcgtatgattttagttggaattgacgtagcgaaggacaagcatgattgctttattatgagtagtgagggtgaagtgttatacaaatcatttaccatcgccaacaacatggaagggtttaacgagctttatcagaagatttcatctactagtgatgatttaagcaaaataaaagtaggacttgaagccacaggacattattcctacaatattttggggtatctacttgataaaggtcttaccacctttgtcatcaatccgctgcataccagtctttacagaaaaagcctaagccttagaaagacaaaaacggataaagttgattcccataccattgcaagtatgttaatgtctgatgtgaacttaaagtcctactcagaaacattataccacaatgaagaattaaagtcactaactcgttatcgttttgataaagttaaggaacgagcaaagcttaaacaatccatctcaaggcttgttactatactttttcctgaactcgaaaagctcgtttctacgctgcatatggtgtcgatatatgctttgctttctgaatttccaagtgcaaaagctattgcaaatgcacatttaacgaagcttacaaatctactttatgaagtctcaaaaggtcgctatacaagagaaacagccattatgtttcgtgaatcagcaaggaactctattggttcgtatatgcctgcaaaatctttggagctgaaacataccattaaacttataggcgaacttgataatgagattgaagaaatagaggcagaaattaagcgtattatggatgaaattaattcacctatacgttcaattcctggcataggactcgctatgggcgctatgattgtagctgaaataggtgatttttctaactttgattcacccgataagatcctcgcctatgctggcttatctccatctacttatcagtctggacagctttattccacccatgcgaagatggaaaaaaggggctcaagatacctaagatatgcactttttaacgcaactaaatttgtttgcaattgggatccaacattttcagcatatcttgctaaaaaacgtgcagaaggtaaacattacaacgtcgctatttctcatgcagctaaaaaacttgttcgagtaatctaccagctacaaaaatcagggcaatcatatatcaaggctgcttagatttttctattttattactgtttttgagcattgattcaatgctcttcttgtcatgccgtttcttaggtttttatttctctaaaatatttttgtgttttttgtcttttgggggttgactttttatagttagt

SEQ ID NO: 4077 - DNA, 1392 bp, unidentified
  source 1..1392: mol_type = unassigned DNA; note = element_62391cf
  misc_feature 1..3: note = core
  misc_feature 4..258: note = LE
  misc_feature 259..1308: note = CDS
  misc_feature 1309..1392: note = RE
  misc_feature 64..239: note = bridgeRNA
tctcctatgtttgcgaagttatcgattttaatttttaaagtcaataaatttgaataatgaagtgaaaaagaatgagagaacatatgtccctaaatagttcaaagaaacatattgacacatagaaaaatcctcattcttttttatcttttagagtctgaacagaatgtaaggaattaagcgagttttaatatccagaatatccaattaggagaaaagacgaaggaagattcatcactttataaatttaaactttaaagtatgaaagaattaaaacaagtagttggcattgatgtagcccaaaaagagttagtagttaccttaggaagaatgtttgaagatttatcaactgaattgtacgcttacaaggtttttaaaaacacagaaaaagggtttgttggattgtcagactgggttaaaaaaataactaaaacagaggtgaaagttctttatgtaatggaagccacgggcgtttatcatcaaaagtttgcttattatttagataagaacggttatgaagtttgtatagtcttgccaaacaaaataagcaattacatccgaactttagacattaaaacgattacggataaaacatgttcacaagcaattgcccaatttggattagaacggaaattagatttatggaaacgtccaaaaagcgtttataaaagcttgcaacaactaactagagaacgtgatcaaattgtgaatgagagagttatagtgaaaaaccaattgcacgctgaggaatcagaagctgagccaaatgaaaagagtttaaaacgaataaatgcaagaatcagatttttaaacactcaagaaaaagagattaaaaatgatattaatgatattgtaaaaaacgatgaaaatttaaaaaaagaaatagacattatctgcacattacctggggttggagagttaactgcagtaatcgttttagcagagaccaatggttttgaactaataaaaaacaaaagacaattaactagttacgcaggcttagatgtaaaagaaaaacaatcgggtacatcaataaaaggaaaacctagaatatcaaaaaaagggaatagaagtctgagaaaagcaatgcactttccagcattggtagctgtaaagtgggatgataattttagagagctgtatgcaagattagtgtcaaaacaaggtgtgaaaatgaaagcattggtagctgtacaaagaaaattgctagaaatgatttacacattattcaaaaacaaaaccacttacgataaagaatatgaatacaaaaaacaaacacaaaaaaatagcgtgcaaacacaaatggcttaaacacgctatagagtctagttctatgactgacttagaaacaaaattataaaaaaaatatagatttatttggaaatcaacacagaa

SEQ ID NO: 4078 - DNA, 1280 bp, unidentified
  source 1..1280: mol_type = unassigned DNA; note = element_62403f0
  misc_feature 1: note = core
  misc_feature 2..189: note = LE
  misc_feature 190..1158: note = CDS
  misc_feature 1159..1280: note = RE
  misc_feature 30..199: note = bridgeRNA
ttgtatgacgggaaaagagcattgtgaggggcgacgggggttcggtcatgaccgtctccctgtcgcgaccggaagcccgcaggcgtttcggatagcaaaccgcgagtgagcttggagctccggtcgcatcttccatacccgaacagttgccggggcacgagcccgcatcagcaagaaagggatacgaagatggcaatgctttcttttggcggtatcgatgtgtcgaaggatcggctggacgtcatggtgttgcccgaggagcaatgctcttcggtgccgaacgacgccgccggctgggccaagctggtcgagcagctgcgcggcttctcgatctcggctatcggcatcgaggcgagcggtggctacgagcgtggtgccgtgcgggcgttgctcgcggctggcatgtccgtgcgccaggtcaatccgttcaagctgcggcagttcgccagggccagtggagttctggcgaagaacgatccgctcgatgctcgcatgatcgcgtcgttcgtcgccgtcatgccgacacgtccggcgcagcggcaaacgccggcagccgaacggctggccgagatgctcgccgtgcgccgccagctcagcgccgagaaagttgccgccgagaatgcctcgaggctgctggaagatgcgatgctgcagcgtctttctcgccgtcgcatcgctcggctcgccgccgatattgacatgcttgatgggcacctggtcgaggtcgtcggaaccgatgccccgctcgcgcatcgataccgactgctcacgtctatgaccggagtgggaacggtgctggcctgcacgttgattgcgcttttgcccgagctgggcggcatgacccgcaagcaagtcgctgcgttggtcggcgtggcgccctacgctttcgagagcggcacactcaagggaaggcggtgcatctggggcggtcgtgcgaacgtccgccaggtgctctacatggcggcgatgagcgccagtaattggactcctgggctcaaggcgttccatgaccgcctcaaggctgccggaaagaagccgaaggtcacgatcgtggcggtgatgcgtaagatgatcaccacgctcaacggaatgcttcgtgacgacgttgtgtgggccgatcgtcttcgcggtcggcacagcgtgccgaccgtacggtagcggctgcgctgatcgatttggccgagtcaaggccgtagccgcgcgcagcgcgggggcgcgaagcaccagccttgacgcggccgaagtgatcagcgatctccctgcgacaagatgacagttgc

SEQ ID NO: 4079 - DNA, 1582 bp, unidentified
  source 1..1582: mol_type = unassigned DNA; note = element_6248544
  misc_feature 1: note = core
  misc_feature 2..251: note = LE
  misc_feature 252..1451: note = CDS
  misc_feature 1452..1582: note = RE
  misc_feature 6..225: note = bridgeRNA
tcgtattatgtgaataagccagtcacttctggttgacctattttaaataggttttatgcttgaagtagccggggtagaacgtgcgcgcccgtgggacaatgatcccgtccgttatactgttcaccccctacttgtagaaacatgtttgaggctggttgggacttggatcccgcataacaagcgaagctatgacactacaaaattagttaggggcacaccggtgaatctaccaaaaggagttgtgattatatatggaccctgtcattggcctggatgttgcgaaaggtgaaagccaggtccaagcctttttacaaaggaaaaaaacgtataagaaaagctttaaattcgcacatgatttacaagggctaggtatgttttatgaatttttccgggaggtgaagcaagtttccggacaatctccagctgttatatttgaatcgactgggcactatcatgagcctgtgctgcaatatcttgaagagcatggaatcacctattatttaatcaacccaatggttgcacacaaggcaaaacagacaagcctgcgcaaagtgaagacagataaaatggatgctttccatctgggggagctttactacaaagaagatttggaagcgttccaaaagaaaacggtaaaaaccctgaatctgcgccaattaacaaggcaacatagtgctttaaccgaaagctatgtcggaatcaaacttcaatttcaaacaatcttggatcaggtattcccagaatatcatcatgttttcagtaatttatatggcaacatttcattgaaaacgttgctccaatattcaacatcttacgatgtcaaaaacacaacacaagagcaattagccactgatatgtaccagattggggcgaaacgttcttatgcatggtttttggataaagcacaacaattaaaagatgcagcagaacgcaatccatttcaagaacgtatctaccatggtcatcttattagcttgcgtatgtacattcagatgatttttcaataccaagagcatctatccaaaatgagagaagagatagatgccctggctgcaacctttgaggattataaactgattcagtcaattcccggggttggaggtaagattgccgccacaatcatctccgaaattggggaaatcgatcagtttcctcatccgaaaaaattggctgcctacgcaggcatagatccggaagtttttgaatcaggcaagtttaaagccaccatcaattgtatcacgaaaagaggctcgtcaagattacgtcaatctctctattcagcagtgcaatgcggaatagcgaaaaatcgtaacacaaagctacgagctttttatgatagaaaacgcgaagaaggtaaaccacataaagtaactgtcattgcctgtgccaataaactaattcattggatccatgccatgttaaaacgcaaagaagtctttgtagatcaataataacgatcaatattcacaatattctgatgccttatcgattttacggtaaggttattttgtatgcctaattttagtctaacatgttttttgaactttttttacctttaattattgacagctattagctggta

SEQ ID NO: 4080 - DNA, 1155 bp, unidentified
  source 1..1155: mol_type = unassigned DNA; note = element_6254309
  misc_feature 1..2: note = core
  misc_feature 3..207: note = LE
  misc_feature 208..1143: note = CDS
  misc_feature 1144..1155: note = RE
  misc_feature 12..213: note = bridgeRNA
cttgtcttatgactttgggagcttttgtgcgaaacaagagccacagaccagcatttaaaaatgctggtctgtggtggtggttggatcgtaacatgcttggtctttgaggaccgtttgagagtaagatcagccaccaccttcgccaaaggcctgaacggatacagagcggcacgaagccctctaggacaagcataggatatgacgaagatgacagatgataccattggtatagatatttccaaagccactttggacattcaccgactgagcgacgggaagatgatgtcgtttagcaattgccctgcgggatttaaggagttttcaaagttctgcgcacaaacatcagtgacacgcgttgtctatgaagcaaccggagcataccatagcggacttgagcgcgccttgggtgctcttttgcctttagtaaaagtgaaccctttgcaagcgcgccgatttgcgcaagcacaaggcgtgcgggcaaaaaccgatgctgttgacgcaaaaatgctagccgttatggggaatgcttttgtattagatccggataaaccggctacaaaattacagcatgatctgaaagagttacgcgcatttcgttcaggattgatcaaagaccgaacccgcatcatgagtcggcagaaaacacaaactctgtccatcatttgccgtcaaagcaaagcccgcttggctcaagttgataagcacatcgccgaaattgatgctgaggttaaacgtctgatacaatccagcgacacgatggcgcgttcaatgaagattctacgctcaattccaggcatcggcgcggtctgtgcgtccaccattttgatagagatgcctgaaatcgggagaatggacagaaaacaagtggccagtttgaccggagtagcaccaatgacacgtcaatctgggcaatggcgtggaaaatcgttcattcagggtggtcggaaagtggtgaggaacgccctctacatgccagccctggtggcgatgagattcaaccctgacctcaaggccaaatatcaagccatgatcaaagctggaaagccaccaaaggtcgctcttactgcgctcatgcgaaagctcatcgaacttgccaatgccctcatcaaagcagatcgaaattgggaggaaaaaagagcttgatcaagacggata

SEQ ID NO: 4081 - DNA, 1619 bp, unidentified
  source 1..1619: mol_type = unassigned DNA; note = element_625904b
  misc_feature 1..3: note = core
  misc_feature 4..252: note = LE
  misc_feature 253..1488: note = CDS
  misc_feature 1489..1619: note = RE
  misc_feature 8..225: note = bridgeRNA
gttcgtattataaggtcaccagatatttctggttgaccattttttatttggtcttattatatcagtagccagggtagaacgtaactgcccgtggggccatcgaccccgtcaactaaacggttcaccccctacttgtagaaacatgattgaggctggttgggacatagatctcgtataacaagcgaagctgtgacactgcatggaggaattaggggtactggcaaattactagtttaggaggaggatttttaaatgaatccagtcattggtctggatgtttcaaaaggggaaagtcaggttcaggcatttttggataaaggcaaaccatatcgtaagagctttaaagtttctcatactattgaaggtcttgatttacttgtagagtttctggaggtcgtaaagagagaaacaggtaagaaaccacctatcgtcctagaagcaacaggacattatcattcctctgttgttcaatacttggaggaccgtggatatttattgatcatcattaatccactgatttcttataaggcgaaaagttcaagtcttcggaaagtaaagacagatgcgctcgatgcttaccatctctgcgagctgttttataaagagcatcttgagccatataaaaagcgtggagttcaacttttaaaccttcgaaatcttaccagacagcacgagaatataacgggggtattaatccaaacaaagctacaatttcaagccattctggaccaggtctttcctgaatatagaggggtttttggtgacttatattcggtagtatcactgttaactctttcagagtttccctcatctgaagatatattagaggcaagcgttgaaaccatagctgacaaaatcgctcaattatgtaaaagccgttcatacagatgggctaatgaaaaagctattcaactcaaagctgccgcagacagaaatccgtttgaaaagactttgtatcagagtcatattttgagtcttggtatgtatataaagattattcttcaatacaaagagcacctatccaagttagagtcagagatagatgccctcgctaaagaagttgaagaatataatattatcaaatctatccctggtatcggtgaaaagatcgctgcaacgatcatttcagaaattggggagatagatcgatttaatgatcctaaaaagctcgtagctttcgctggagttgatcctagtgtattcgaatctggtaagtttacagccaccagaaaccgaatcacgaaaagaggatccagtaggcttcgtcacgccttatatatggctgttcgttgtgcgattcgtgactgtcgcaagagtaaaacaagcgatgaaattattcctcgaaataagaaattacgagagttctatgataaaaaacgtgaagaaggaaaaccttttaaggtagctgtaattgcttgtgtaaataagctcttacactggatatttgcccttttaaaaagcaaaacaactttccaagatatagcttaaaaccaaattaaactaaatatcacaaaaccttccaacaacagaataatggaaggttatttggcatgctcatttttagtatagcatgagatattttaagtttttattgaaaaatattgacaaactattagctg

SEQ ID NO: 4082 - DNA, 1740 bp, unidentified
  source 1..1740: mol_type = unassigned DNA; note = element_6263687
  misc_feature 1..2: note = core
  misc_feature 3..272: note = LE
  misc_feature 273..1517: note = CDS
  misc_feature 1518..1740: note = RE
  misc_feature 12..292: note = bridgeRNA
ctgttactatatgaatgccccgtgttcgtggcagccagtcacaggcgagggacatctcattgcccaagttgtataatgggaaggcaatggcctggcgggtaaccgcaagagcatcgcgctcgctattgagtcagccagccagcctccccattgtgcaacgttcgatttgtgcaggttgagaacccatagaggtcactggagtaagcgaacagttagaatcggcgatgggaaaagctgaaagccattgaagcaacacatcgggaggattccacatgttcgcagtaggggtcgatgtttccaacggcagaagtatggtcgctgtgctcggtgccaggaggtcagtggttgtgcaaccgcacgaggttccgcataccgcggatggctttgccgagctggcggcaaggctgcatgcactggatggtgaggttaggatcgtcatggagcataccggacgatactacgaatcatttgccatgagtatgtaccgggcaggctttttcgtctccgcggtaaatcccctggccatcaagggttatcaagagggaatcagcgtccggaaggtgaagactgacaaagcggatgccctgaagatcgctcagtttgccattgacaaatgggagatcctgccgcactatactcccatggatacgattcgttacgacctcaagacccttcaccggcagttccaactgtcctccaaaaccaagaccgcgctgaacaacaatctgatcgctctgctggagcagagctaccccggcgcgaacaggtactttgacagtccggttcggccggacggcagccagaaatgggtggacttcgtagacaccttctggcatgtggactgtgtggccagagtcagccggaaggcttttgtggagcggtatcagaaatggtgcaagcgccccggctacaatttctctgaagccaaggctgttgaaatccacgaggatgcccggcaaagatttccgctggtgcccaagtccgatacctgcaagctcatggtcagggaagcggttgcccagctcaacgctgtttcccgcacagtggaaacataccgtgccgagatggatcgcctggcttcccagcttccggaatacgaaaccgtcatggccatgaccggcgtgggaaaatccatgggaccgcagctgatagctgagatcggcgaccttcggcgttttgcgcatcagaagtcgttggtaggcttcgccggtaccgatccgatcaaggatgactcaggcgacaaagtctccgatagcaagcccagcagcaagcgcggctccccctaccttcgcaggacgctattcgtcattatgacgatcctgctgcagctccagcctccagatgatccggtctaccaatttctggacaagaagcgctccgagggcaagccgtactatgtgtacatgaccgctggtatgaccaaattccttcgcatctactacggcaaagtccgcgactgtctcaaagagaaaggcctctgggaacagcccaatgtcgacgaggtcaatcctgtttgacacgggttgccttgcaaccccttggccgccgggcagcacagacagcatgatgggtcaaggatgccgaaggcacggcacagccgcttgtccttgacgcagcgtgatggctgtgctactccctacagtcgaccacctcccgagtggtctgtttgtcattatcatattgaggtttccttagtctgcaaatttccagccttgagggggttgactatttatttgcagg

SEQ ID NO: 4083 - DNA, 1398 bp, unidentified
  source 1..1398: mol_type = unassigned DNA; note = element_6263abf
  misc_feature 1..2: note = core
  misc_feature 3..78: note = LE
  misc_feature 79..1116: note = CDS
  misc_feature 1117..1398: note = RE
  misc_feature 1129..1385: note = bridgeRNA
tgttggagtggacggcccctgaacggcatcgaaatgtgccagaatgagctgttaagatctcaatcgaaggggccgcccatggacaagattattcgtattggcatggatacgtcaaagcatgtctttcagttgcatggcgtgaatgccgaagagaaaccggtcttgcgtaagaaaatgcgacgtaaggagatgatcgacttcttcacgacctgcccgccaactttggtcgcgatcgaggcctgtggtggttcgcatcattgggcgcgcttactcacctcatttggacatgaggtaaaaatgatcgcgccacaactcgccaagccctacgtgaagcggaacaagaatgacgctgccgatgccgaagggctctgcgaggcgatgagccgcccaacgatgcggttcgttccggttaagacagttgaggaacaagcggcactcatgctgatcagcgtccgtacccgcctgatagccaaccgcacccaactcgccaacgctatacggggttacgccaatgagtttggtgtctccgcagccaaggggctggcacatattcctatgctgctcgaaagggtgcaagctgagaaaactgtgccagagctcgcgcaggaattgttcatgagccaggccgaggaatacgctcaacttgaaaagaacattgctgacgtggaggcgaagttaaaggcatggcagcgtaacgacgaacgcagcatacgtctcaacaccattcccggtattggcccgatcagttcggctcttttgataatgaagacacctgctccagagctcttcaaatctggccgccagttcgcagcttggatagggttaacgccaaaggatcactcgaccggcggcaagctgcgtcttggttgcatcacgcgggccggcgatgaagcgctgcgggcagccttggtggttggagcaaccgctgtcattcagcatgcacgacgatctggtaatgcctctcggtggcttacggcattgcttaagcgcaagccacctaaagtggcagcagtagcactcgccaacaagatggcgcgtatggcctggaagctgatggtctccggcgagacatacagcgcaagaccggcgtcagttccacagggctgcgcggcatgatgatcggcgagcaagaaccgaagaggccgtgatccttactcctttgtcgaggtcaacacttgcaggataaggagcagatggtgtgatcgatcgatccggaacacaggataccccggtgatcccattggcagctagaggccgtcttgatgcttgggacctgtgttgcggaaaccatcttggccagcgttcatgtgcgaacgcaacaacaggccggacatatggacgcaagcgatacgatcagattatctcaaaatatcttgcgagtcgggggccgtccacata

SEQ ID NO: 4084 - DNA, 1451 bp, unidentified
  source 1..1451: mol_type = unassigned DNA; note = element_6264d09
  misc_feature 1..2: note = core
  misc_feature 3..125: note = LE
  misc_feature 126..1163: note = CDS
  misc_feature 1164..1451: note = RE
  misc_feature 1207..1400: note = bridgeRNA
agatggggtaatcggcttcgtgccccatcttcgctgatcggaaaggaaggtgctgcgctccgagctgatggtaaaacgtggtctgttcgtatcagccacaagcatcagaaaaaggaagcgcagccatgcaatattacgccggcctcgacgtctctgtcaaagaaacgagcgtctgtattgtcaacgcaagcggagggacctgccgagagagaaaggtgatgtctcacccggacgatttgattgatgccttgaatgatcccgcactccccttagaacgggtgggcctggaggcagggccaatgtctcaatggcttttcgatggattagcgaaggccggcctcccggtattttgtatcgagacacgtcatacgaagggtttcttgaaagcttcgcagacaaacaaaagtgaccgcaacgacgctcgtggaatagcgcagatgatgcgggtcggccttttcaagaccgtgcatgtaaagacgcttacgagccagaagcgccgcgctttgctgacggctcgcgcgctgttgctggaaaaggcggtggctctcgaaaacgacatgcgtgggcttctgcgcaatttcggactgaaggtcggcgcggcctctggaggaatgttcgagaacaggatacgcgaactcgtagaaacggatcctgatctggcgttgatcatcgaacctctgcttgctggaaggcgaacgctacgcgaagagttcgccaaattggacaagcaggttgttcgcgaggcgaagcgtgatcaagtttgcaagcgcctgatgacagtgccgggggttggacccgtcgtctcgctcgcctacatctcgacgatcgacgttcctagccggttccgcaattcgcgggcagtaggagccgtgttggggctaacgccggtgctcaaccagtccggcgaaagcaaccggatcggccacatttctcggtgcggtgatgccatgatgcgatcgcttctatatgaggcggcgcaaaccatgctgactcgcttggtgaagtggtattggctcaaggcgtgggcaatgaacattgcaaaacggcatggcagaaagaaagccaccgttgcattggcacgaaggcttgcggtggtgatgcataggatgtgggtagacggctcagaattccgctggacgcgggagcaggcgcctggcgcctgactgtagaaggcacaatttcaaggcgaaccaggaaagcaatttcaaagttccgctcagcggcggaagacgtccctcgcggacgatggtgatgtgagttcgtgcggccgctattccgatgacaatacgatcatcaggttgcagcatagattgggccacgtcatcttctgaaccccatggtgggagggctgtttgccgatcccggagagaagcacgggccgcgagaaacgcacaatgccgcatcgagcaggaagttacgaaagaacttgaccttaacacgccgattagaga

SEQ ID NO: 4085 - DNA, 1604 bp, unidentified
  source 1..1604: mol_type = unassigned DNA; note = element_626551a
  misc_feature 1..2: note = core
  misc_feature 3..551: note = LE
  misc_feature 552..1469: note = CDS
  misc_feature 1470..1604: note = RE
ctagtaccatataagtgtagtcaaataggtcgctcctatctactgcacttattttttcgtatgataagggaagcagttggtctgtcgaaagcccaccttggtgcagatgctttttactgccaccgcagagaagtgcgacagccaaccccttgttgtatgcgcccgagtaagcaggttgtccctttcatagagaggcatacgtgtaacaaactaggttgggataggtaataagtgtggctggctacaaagattcaactgactgctaaatattttttaaaggaggttgaattagtatgacttgtatcagtgccggtgttgatgtgtcaaagaacaggagtaccgtatgtattatggaccaggacgggaaagtcattatgcggccgtttcttgtctggcattcgactgaggagctcgattttcttgcagatacgctcaagaggcttaatggagaggttagagtcattatggaatcgaccagtatttagcaatatccgattgctcttcaccttaaagaaaaaggaatttttatctctatcgtcaatgcatatgagatgaagcagttcgctaatatagattttagaggcggcaaaacggataagaaggactcccgcaccattgccagttacggaattagttattgggataagctggtggaatggcagattcccaaagacacctattttaacctggatctgctaaacagaacctatatgaacgcgaaaaagcatcgtcagataatccttcaggaactgcagcattatattgactgtgccatgccgggaatggataaagagcttcattctctcaatctaaacaccaagaaggactttatgctggattttgtggagaaattttggcatcgtgatgagatcgtaaataagacagaaactgaatttaccgaagttttcactgcttgggcaaagaaaaagggataccgcccagtcgaaggtaaagccgctaagatttacgcgatcgccaaaagctgtatcccttattacccagcaaatccaacggttaaaaccattctccaatgtatcgtcgacaagctgagcggagtcaacaggactcttgtcaccatagtaacacaaatgattgaagaggccaagaaacttcctgaataccagattgttagagaaatgcctggcgttggagatccattagcagcaagattcttcggctacgcaggagatatccggcgattcaaaaactcaaaggcactggtcgcatatgccgggatagattcacctcccgatgaatccggagatttcagtagtacgcataggcatataacaaagaaaggctcgaaagtatttcgtgacactggttacgaaataatgatggctttaagagctcagaagagaacatgggaaaaggtcagaaaaaatcctgaagtttatgattatatgctcaagaaagaagcagagggaaagccaccgcctaagctcaatgaactagcaagatttaactaaagaaaagcgcgaaaaaaccgagggaaagatcggtctttttgtgctgcccaaaattaagtggacaaagagaaaacgccggatttagaaaaaagttgcaaaaaaaatgaaattggcacttgctttttggtagcagga

SEQ ID NO: 4086 - DNA, 1172 bp, unidentified
  source 1..1172: mol_type = unassigned DNA; note = element_6268ece
  misc_feature 1..2: note = core
  misc_feature 3..209: note = LE
  misc_feature 210..1157: note = CDS
  misc_feature 1158..1172: note = RE
  misc_feature 26..192: note = bridgeRNA
cttgtatcttgaatctgagtcgctagtatgcgttggttatctaaatcaggacgtgacagaccgacctttccgtggtcctctgagaccgaggtttagcctggctcgtcacgtcctccctcccgagagctcggacggttgcctgggccggtggagcccgcatcgtgtgcaaggtcgagccaccatgggaggctttctcatacggaggatgcatggaggctgcccctgtgtttattgggattgatgtatcgaaagcccagttggatatggcggaacgtccatcgggtgagcgagccgtacttccccccaccgaggaaagcattaccacactcgtcgagcgactgcgacagcgccagcccacgtgtctcgtcttggaggccacgggtggtctggaagtgccgatggccagtgcgttggccgtcgcagggattcccgtcgccgtggtcaacccccggcaggtacgcgattttgccagagccaccggccagctcgctaagacggatgcgatcgatgcgcagatcttggcccgctttgccgaggcggtgcggccagccgcacgccccttgcccgatgaggccatgcaggcattcagtgcgctgctcacacgacggcgtcaactgattgagatgctcgtggcggaacagaaccggatgcagcgagcaccgcacccgatccagcagcagattcaggctcacttgacgtggttgaagcagcagttggcagccctggacgaagacttgacccatcggatccagtccacgccgatctggcgcgcgcaggaagatctgctgcgcagcgtgccaggcatcggtcctgtcgtgagtcggaccctgctcgcggagttgccggagttgggcacgttgacgcacaagcagatcgcggctttggttggggtggcgccgttgaaccgtgacagcgggaccttgcggggtcgacgcacgacctggggcggccgtgcggtggtccgcgccgcactctatatgagcaccttggtcgccaccaaacacaacccggtcatcaaagccttctatcaacgtctacgtgcggccggcaaggcacccaaagtggcgctcgtggcttgcatgcgcaagctgattacgattctgaatgccatggtcaaacatcgaaccccgtggcgtcagtcagcgcagggcacttgacaatcaagacggttg

SEQ ID NO: 4087 - DNA, 1383 bp, unidentified
  source 1..1383: mol_type = unassigned DNA; note = element_6271c19
  misc_feature 1..2: note = core
  misc_feature 3..121: note = LE
  misc_feature 122..1033: note = CDS
  misc_feature 1034..1383: note = RE
  misc_feature 1162..1378: note = bridgeRNA
agatacggtaatgggccgcgcctccggatgactggaggagtggctgtcccccgatcatgatggagtgacggggattcaggtgtggtgcctcggagccccgctagcctgatggaggacagccgtggagcattatgccggattggacgtgtcgctggaactgaccagtgtgtgcattgtcgatgcgcggggtgggatcatctgtgaagtgaaggtggcgagcgagccggaagccctgatccgtttcctctcggaccagggtctggagcttgcgcgggtcgggctggaagcaggtccgctgtcgcagtggctccatgcggcgctgatggatgctggctttgagacggtgctgctcgagacgaggcatgtgaaggccgcattgtcggcgatgaccgtgaagaccgaccggcgcgatgcacgcggcattgcccagctgctgcggcttggctggtaccggcgggtgcacgccaagtctgccagtgctcaggaagtgcgttcgctgctcactgcccgcaagctgatccaggccaagctgctcgacctcgagagcggcatccgcggggtgctgcgcggcttcggcctgaaggttggtccgatcagccgcggccgcttcgaggcgcgcatccgcgagctggttgatggccataccatgctcgagacggtgatcggctcgatgctgagcgcgcgcaccgccttgcaacaggagttcgcgagtcttcatcgcacgatgctgacgctggtccgcgcggatcccgtctgccgtcagctgatgaccgtgcctggcgttggcgcgatcgtcgcgatcaccttcaagagcggcgtcgacgatccgacccgcttccggcgctcgcgcgatgtcggcccgcacttcggcctcactcctcgcaagtaccagtccggcgaactcgacgtcaccggatccatcagcaaggtcggcgaccggatggtgcggaccgcgctctacgaggcggcgagcgtgatgctcacgcgcacagtgcgcatcaccactgaagagctgggcgatgggcgtggctaagcggcgcggcacgaagaaggcgcgcgtggcgctggccagaaaactcggcgtcatcctccaccggatgtgggtcgatggcaccaccttccgctggagcaatgacgctgccgtggtggcgtaaggagggaagttcaggagatcgggtcagctaaccaggcccgtagtcccgacgctgggacggtgaagttggcgaagccgcaatgtccgcagcagctgcagactgcgctggaaagatgggctcaccgcttcctctgaccgtatgatgtggcagcgcctagctgaccacggacagaagcaagtaaccagcggaaggacaaaccgggacagcttgacacacggcccattacaga

SEQ ID NO: 4088 - DNA, 1467 bp, unidentified
  source 1..1467: mol_type = unassigned DNA; note = element_627e625
  misc_feature 1: note = core
  misc_feature 2..240: note = LE
  misc_feature 241..1452: note = CDS
  misc_feature 1453..1467: note = RE
  misc_feature 26..244: note = bridgeRNA
cccctcgttactttcttcgtagccgttcaggagtcattcttggagggtgttggcctgccgggcccggcatgattgttgcccccagtcgttgatgatccggggggtgttgtcaccgggtccggttcggcagtgagtgatcgctgataggggctggacccagcggatgctgaggccgttcgtaacgtggatgccgagactcaccgccctggttcaggccacgtctcacggacggagaagcaggtgacaatcgaacgatacgaacaagtcgatgtcttcatcggtgtcgacgtcggcaagggcgaacaccacgccgttgccctggaccggagcggagcggtgctctatgacaaggcactcccgaatgacgaggcgcgactacgcacggtcattggcagcctgaaacgacatggcctggtgctcttcgtcgtggatcagcccgcgacgataggcgcccttccgattgcggtcgctcaggcggaggccgtgttagtggggtatctccccggcctcgcgatgcgccgcatcgcagacctgcacgcgggcgaagcgaagaccgacgctcgggacgcggcgatcatcgcgcaagccgcccgcacactccctcacgcactgcggtcaatacaactcgccgacgaacaggtcgctgagctctccatgctctgcggtttcgatgacgaccttgtcgggcaggccaccgcgacgagcaaccggatccgcgggcttctcacgcagatccaccctgccctggagcgggtcctcggcccgcatctggatcatccggccgtgctggacttgttgcagcgttatccgtctccggccacgatgaaggccgcgggagcgacccggctcggcaaccggctggtcaagctcgcaccccgcatgggacgccacctcgcggagcagatcatcgcggctttgagcgagcagacggtcgtcgtggtcggcaccaacgccgccgcgctcgttctgccgcgcctcgcggaacagctcgcaggtctgcgccggcaacgggccgagatcgccgttgaggtcgaacgtctcgtggaggcgcaccctcttcagcccgtcctgacgagcatgcccggagtcggcgtcaggaccgcagccaggctcctcaccgagatctccggcaaagacttcgccaccgccggccacctcgccgcctacgccgggctcgcaccggtcacgcgaagatctggttcatcgatccgcggcgagcacccctccaggcgcgggaacaagatcctcaaacgaacactgtttctctccgccttcgcagcgctccgcgacccgatctcgcgcgcctactacgaccgcaagatcgcccaaggcaaacgccacaaccaagccctcatcgccctcgcacggcgccgatgcgacgtcctctacgccatgctccgcgacggcaccctctacgaatcacgagccacgacgcccgccttcgcggcttgacaaacgacatagggg

SEQ ID NO: 4089 - DNA, 1694 bp, unidentified
  source 1..1694: mol_type = unassigned DNA; note = element_628678a
  misc_feature 1..2: note = core
  misc_feature 3..117: note = LE
  misc_feature 118..1149: note = CDS
  misc_feature 1150..1694: note = RE
  misc_feature 1162..1397: note = bridgeRNA
agatgccgtaatgggccggcgctcctctcatagccaggaaggcggctgtccctcagagtgatgatgttgaacgggggtccgattgtgtcggccccaagcatcaagcgagggacaaccatggactattatgcaggaattgatgtgtcgctggaactgagcagcgtttgcgtgatggattcgtcgggcaagatagtgcgagagacgaaggtggcgagcgagccagaggcactgttgcagcatttcgccgatctgggattgccggtcatccgcgtcggccttgaggcgggcccactgtcgcagtggttgcgcgagggtctggtcgacgccggctttgaggtggtgttgctggagacacggcatgtgaaggcggcactgtcggcgatgccggtgaagacggatcgcaaggatgcccgcgggatcgcgcagctgctgcgcatgggctggtaccgtcctgtacacgccaagtctgcagatgcccaggaggtgcgggcactgctggttggccgcaagctgttgcaggccaagctgctcgacgtcgagcttagcatccgcggaatcctacgcggttacgggctcaaggttggcgaggtgagccgggggcgtttcgaggcgcgcattcgcgaactcatcgaaggccatgacatgcttgcgacggtgatcggcgcgatgctgcaggcccgggccgtattgtggaacgagtttacccggctgcaccgcgcgatgctgaagatcgcccgtgtcgatcctgtctgccagcggctgatgagcgcgcccggtgtcggggctctggtggcgctcacctatcgttcggcggtcgacaatccggggcggtttgcaaaatcccgaaccgtcggtgcgtacttcggactgacgcccaagaaatatcaatccggcgagaccgacatcgacggcggcatcagcaaggtcggcgatggaatggtgcgaaccgcactctatgaagcggcgcacatcatgctgacgcgcgccacgcggttctccgccctgaagcgctgggcgatggacgtggcgaagcggcgcggcatgaaacgggcaaaggtggcgctggcccgcaagctcgccaccgtcctccatcgcatgtgggctgatgtcagccagttccgttggggcaaggacaccgtaaccgcgtaaaggaggaacaaggcagcgaggcaggccgccataggcgctgcttcttcgaggtcccgtcgctgggacgagggcttggcaaggtcgggagtagtgctgtgaaagcttcggcaaatcacgcgtcctagattgacctgccggctcaaggatctgatggcatgatgtggcagtcttcgtgctgaccacggacagaagcatgatcccagcggcgtgatgatcactcgaagggacttgacgagtaagggcccattacagaagccagttccgttggggcaaggacaccgtaaccgcgtaaaggaggaacaaggcagcgaggcaggccgccataggcgctgcttcttcgaggtcccgtcgctgggacgagggcttggcaaggtcgggagtagtgctgtgaaagcttcggcaaatcacgcgtcctagattgacctgccggctcaaggatctgatggcatgatgtggcagtcttcgtgctgaccacggacagaagcatgatcccagcggcgtgatgatcactcgaagggacttgacgagtaagggcccattacaga

SEQ ID NO: 4090 - DNA, 1413 bp, unidentified
  source 1..1413: mol_type = unassigned DNA; note = element_62893fd
  misc_feature 1: note = core
  misc_feature 2..224: note = LE
  misc_feature 225..1400: note = CDS
  misc_feature 1401..1413: note = RE
  misc_feature 14..239: note = bridgeRNA
ctacttgtttcattgacggcatggccgggatctgacgaggctcggtctaggcgttcggggttgtcgctctcatttcggctgctcacctcggtgtggctctcatttggcctgcgcatccccggacgtcgccagagcgggagaggctcaagaggggtttgccctagctcgaagtagcgttgccctcccagctcgaccacccatcaggttcgagttcggaggacaccatggacacggcatcgcgagtcgtcatcgggatggacccacacaaacgctcagtcacgatcgaagtcatgaccaaggacgaaaccatcgtcgggacagggcgcttcgccaccgaccgtgacggccatgccgcgatgcgccgctacgtccaggcgtggcctgaccgcgtctgggcgatcgagggatgccagggcatcggtcggcacgtggccaaccggctcctggccgaaggcgagcaggtcgttgacgttccaccgaagctgtccgctcgggcgcgggtgttcgctaccgggcagggccgcaagactgacgccaccgacgcgcactcggtcgcgttggtcggcacgcggatgagcggcttgcgacctgtcgtcgacaacgaggacctggcggtgctgcggatcttggtcgaccggcgcaggtcgttgggcgaggagcacacccgcaagatgtcgcaggtccaccacctgctgctcgagttgatccccggcggcgcgaagaaggacctgtccgccgcccaggccaagaagctgctcgcgaccgtccgcccgcgcgatgccgccggcaaaacgcggcgtcgggtcgcggctgagctgatcgccgacctcgagcggatctatcagcgcaagaaggccgcgaacaaagagctgacagccttggtcgctgcgaccagcaccacgctcatggccctgaacgggatcggcccttccggagccgcacggctgctcgtcgaggtcggtgacatcacccggttcccggacaagaaccacttcggctcatggaccggcaccgcacccatcgacgcatcctcgggcgacaacgtccgtcaccggctgtcccgcgggggcaaccgtcagatcaaccgggtgctgcacatcatggccaccgtccagctgcgcaaccccaccgagggccgcgactacttcgaccgcagcaaagcccgcggcaagacctcgaacgagtccatgcggctgctcaaacggcgcctgtccgacatcgtgtaccggaccatggtcaacgacgccgcccgacacattgggacgggcccgggagggcaacggggcgacgactctgactccagcgcggccggctcacagccccacaccaactcttcggacaagccacttcccggacccgccaccaccgatcctagaaccccgttcccggccgcctcttgacacagaggggagc

SEQ ID NO: 4091 - DNA, 1535 bp, unidentified
  source 1..1535: mol_type = unassigned DNA; note = element_6298827
  misc_feature 1..3: note = core
  misc_feature 4..243: note = LE
  misc_feature 244..1422: note = CDS
  misc_feature 1423..1535: note = RE
  misc_feature 8..214: note = bridgeRNA
tttcgtattatcaggttagccagtaattactggttggcctatttttttggctgttttacgatggggggagccgggagaacgagagctttttaggggcagtggaccccgtaacacaaactgttcttccacgacctccaatgaccatgtttgggctggtaggggcagtggaccccgtataacaagcgaagctatgggtttggaaccatcgtggaaaggccggtgagatcaaggaggagtgagtacatggagcctgtcattggaattgacgtagctaaaggttcaagtgtagtacaagcatttgtcaaacggaacgagccgtacggggcagcgattcatgtcttgcacgaagcatgcgggttcgagcaactgggtgagcttttaagtgaactggaagcccgcacagagatgtcgcccattgtcattctggaagcgaccgggcattaccaccgcgctttggtttcatacctggatcggagtggctacatctattacatggtgaatccgttgcaatccaaacgtgcaaaggggacgcagttacgcaaagtgaaaacggatgctctggacgcctggcatctggcggaaatgtactaccgtggcgacgtgaaaccgcaccgaatctgggaggatacgtatacagaactgcagcatttgacccggcagcatgaattcgtcacgggaatgtttgtacaggcaaagctgaatagcagagcgttactggagcaagtgtttccggcgtatgagcaggtattctccgacgtattctcggcaacgtcactgacggtactggcccgttgtttggagggagatacagaagattggagcgaagtcatacaggggagcacaaggagagctcgctctcaacgttgggtccatgagaaagccatgaagctggaggaagtgctggttcactggagagagactcgtcgtagtctgtctcaaagccaggcgctgctgggcatggtgtctctgttgctgaagatgaatgagcaactggcagaattagaagagcacatggaagagatggcaagccatctgcccgaggtaggtctcgtgagaagcattccgggaatcggaacgaaactggccgcagcgattgtagctgagatgggtgatgtgaggcagtttagcgatgccaagcaactcgtggcgtttgcaggtctggaccccggcatcttcagttcagggaagtttacagcgacgagtacacgaatcacgaaacggggctccaaaaggctcaggcgttcgctctatttggcggtgcaatgtggaatgcggaaaaatgcgaatgcaagaatccgttcgtattacgagaaaaaaagaaaagagggcaagccctacaaggtggttgtgattgcctgcgcgaacaagctgttgcaccacatttttgccatcttgcagaaggggcagccctaccaagtttaaaccatatttaaccaaaacctccatagcagtggaggttatttggcttggtcggaaaaagtatatcacgaaaaaggaaacttaccaacctggaatgcttgacaagtattagctgg

SEQ ID NO: 4092 - DNA, 1374 bp, unidentified
  source 1..1374: mol_type = unassigned DNA; note = element_62a167f
  misc_feature 1..2: note = core
  misc_feature 3..247: note = LE
  misc_feature 248..1354: note = CDS
  misc_feature 1355..1374: note = RE
  misc_feature 6..243: note = bridgeRNA
ctaatgggagctaccgggtcgctgatcgggcagactcggtgcctggtagccgctggcgagtgagcactttcgtccgctgggccgatgttcgagtcctggggtcagaccgtgccctcgccggtggtcaggggcttgatcgctgatgggatgtcgtgcccgtccttcggggcgtgagtactggtccattagcacgccgaccggctcctgcgggctgcttgatcgtgtagtcgaggggttggaggatcgggtgctgttcgtcggtgatgactgggccgaggaccatcacgacgtggaggtgcaggacgagcagggccgggcggtcaagcgggcccggctgcccgagggcgcagccggggtggcccgctttcacgagctggtcgcctcgttcctgcccgaggacgccgagccggccgaggtgctggtgtgcatcgagaccgaccgggggccgtgggtgcgggcgctggccgcggccggctaccgggtgttcggggtcaaccccaagcaggccgcccggcaccgggaagtgatgggcaactccggggccaagagcgacaaggccgacgcgcacgcactggccgacatggtccgcacccgccgccaccagctgcgagagatcgccgcggactccgatgaggccgaggcggtcaaggtcgtcgcccgcgcgcatcagacgatgatctgggaacggacccggcacatgctgcggctgcggcggctgagcgccggccagatcaccgcggcgctcaagggccaccgcgacaagcccggcaaggccgccgccatccaggccgaactgcgcgccgagcatctggggcaaagcgatctggtggcttcggcctatgcggccaccgtgtcggcgacggtcgcggtcctgcggactctgaacagcgagatcaaaactctggaagggcaggttgaggccaattttggccggcacccggacgctgagatcctgctcagccagcccggcatcggcgtcatcctcggcgcccgggtgctcgcggagttcggcgacgcgcgcggccgctacgccagcgccaaggcccgcaagaactacgccggaacctcacccatcacccggcaatcgggcaagtccaaaaccgtgcacgcccggttcatccacaacgaccggctcatcgacgccctgcacatgcaggccggcgccgccatcttgcacgacccggccgtccgcgcctactacgaccagctcaaagcccgagacctcagccacaacgccgccctgcgccaagtcggcaaccgcctcgtcggcatcctgcacggctgcctcaaaacccacaccccctacgacccggcaaccgcatggtcacaccggcaagacgatctcgccgcttgacaatccacgtccagggatgt

SEQ ID NO: 4093 - DNA, 1353 bp, unidentified
  source 1..1353: mol_type = unassigned DNA; note = element_62a19e3
  misc_feature 1..2: note = core
  misc_feature 3..79: note = LE
  misc_feature 80..1114: note = CDS
  misc_feature 1115..1353: note = RE
  misc_feature 1145..1348: note = bridgeRNA
tgatgtgatggacgcacctaccttctagcgtcgttgtaccaaactcatggtgcaaccagtaagaacaggagcaacgaacatgtctattaaagttgtcggcatcgatatagccaaaaacctcttccaagtatgtgtgttgagtactgacggccagattttgtctaaccgcaaagttaagcgagataaaatcctcgatactattcgtcaactaccagatagaacagcactagctatggaatcatgcgccacttcccatcattggggtagagtatttcaggagctaggctttacagtagcactgatacctgcacagcacgtaaaaccatttgttggacggcaaaaaaatgatgccaacgatgcgagagctatttgcgaagccttttctagacccgacattcacttcgttcccgttaaatctgttgagcagcaagatcccaaagcgatacgtagcgttcgtaaacgtttagtggaacacagaacagcgcttgctaatcagatcaggggactcgccgctgaatacggagtggttttccctttgtctattaaagcactgcggagtcatttgccgttagcgattgaagatgctgagaatgagttgtctcatgcaatgagaagtttactgcaaacactgtactgtgattttatcaatctcagcgacgaaattgatgaagttactcggagtataaccatactgagccaacagcacccacgatatgaggcgattaagaatatcccgggttttggtccgattttgactgctgcaattattagcgaagtaggttctggcaaacagtttcaaaatggtcggcaattctcagcttggtgtggattggttcctaaacaaaatagcacgggcgggaaaagtagcctcggggcgttgtcaaagaatggcaaccgtgacttgataaccttgcctattcacggcgcacgcgcagttgtacgatgtagaacaagcagcatggaccctatgggtgcttggatcagaagcctggttgcacgtcgtgggaaagcgaaagctatagtggcgttggcaaacaagctcggtcgtgtggtctggcgagttttatcaacagactgtgaatacgatatcaatcgtgcttttaaacctctgtaattaaagaaatagagtattttgaatagcaaatgagtttgcaatagctgatgaagaaacggtgaaccatccttgctacactctgattaggcaacaggtttattgaaaccgaggctttgaatagacagtgaggagcggattacatcatggcgtaggtctattatcgacctagaaagacgtctgatatatgttagcgacagtaccattcgattagccattgcatcctgaggtgcgtccatata

SEQ ID NO: 4094 - DNA, 1366 bp, unidentified
  source 1..1366: mol_type = unassigned DNA; note = element_62b1ef8
  misc_feature 1..3: note = core
  misc_feature 4..83: note = LE
  misc_feature 84..1115: note = CDS
  misc_feature 1116..1366: note = RE
  misc_feature 1111..1353: note = bridgeRNA
tgatggggtggacggcccccgctcacggcatcgatgtgccaaaacgtggtcgttggtgaacgccacaaggagaggagccgtccatgggtgaagttagcacgatcgggttggatctagcgaagcatgtgttccaggtgcacggagttgatgaggaaggtaatgtcatcgtgcgcaagcaagtgcgcaggagtgcagtggcgaagttctttgccgagctggcgccctgcactgtcgggatcgaagcctgctcgagcgcccattactgggcgcgggaactcagtgcgctcgggcacaccgtgaggctgatgccccccgcttacgtgaagccttatgtaaagcgcggcaagaacgatgcagccgatgcggaggcgatctgcgaagcggtgatgcgaccgaccatgcgctttgtcccggtgaagtccgccgagcagcaggccaatgcgatggtctacaaggttcgggagttgctggttcggcagcgcacgcaactgatcaatgcgcttcgcagccaccttgcggagatgggggtcgtggccgcaaagggcgtcagccatctcgacgacctgatcgcgatcctacgcgatccagatgatagccgccttccgcctccggcgcgcccggctctggaagaactggcgcagcaaatcgcggcactggaagcgcggattgatccgctggaacaggagatagcctcacaggtgcgcgggagcgaagccggccggcgactggcgaccgttccgggcattggaccgatcatcgcaggggctctgctggccatagtgcccgatccggccggcttccgctcggctcggcacttcgcaagctggctcggctttgcaccacgacagaactccagcggaggcaaacaacgacttggatcgatcagcaagcagggtaaccgctatctgcgcagcctgctcatcctgggtgcggcgaacgtcctgcgccgccgtaagaaagcgtctcagtcagcctggcttgtggccttgcgcggacgccggcccttcagggtcgtcgcagtcgcgctcgcacacaaaatggcccgtatcgtctgggcgctgatgattaaaggtgaaagctatcgcgcggccgatccggccgcagctcagggctgatcggcgggccgccgccgacagggacaaggtgcacaagacgcgatgagacagagggtcgaagaccggatgcgagacagccaggcaattttcgagcgcgtcaaagcacgcctgtttgatcaggcactcgcatcgcggactccatcgaggccagcggccaatccggccgcagtaaaggccggacacatgaccgctaccgttccctcactctcaaaacgtcaaaaacaccttgatccgcgggggtcgtccacaca

SEQ ID NO: 4095 - DNA, 1577 bp, unidentified
  source 1..1577: mol_type = unassigned DNA; note = element_62b6480
  misc_feature 1..2: note = core
  misc_feature 3..336: note = LE
  misc_feature 337..1467: note = CDS
  misc_feature 1468..1577: note = RE
  misc_feature 10..268: note = bridgeRNA
gtataatgtatttaggttgttcaagggatacctataaaccctcagacctgattctttacatctcctgtctgataggagataatcgttttattagattgagaggatgatcgtcacctccttgagcgcctctgctcgtacttgaaagactgatccctctcgctaataagctttccgcgtatgagttggatgttggttgccttatggcctctcttcgtatttagcacaaggtagtggcgcttattagctgagtggtctcccaatctaaaatttttctcctgaggtggctttatgttttttgttggcattgatatcggtaaaaataaccatgtcgcttccatgatggatgaatctggcaaggtggtatttaaggctttttcctttcctaatacctcggacggcggacatgccctcttttccaaactcgcttcttattcttccagtcctgatgactttgaaatcggcatggaggctaccgggcactactggctctctatctactcatttctttttgaaaagaaattccttctccatgtcatcaatcccattcagaccgacggctggcgcaggggcactgaaattcgcaaacggaaaaatgacatcattgattctgtcctgattgccgacttaatccgttatgggcagtttgtcgaaaccaggctcgcagatgaggatttattctccctgcgttcacttacgcgttttcgtacctatctggtggaatccatcagtgacctgaagcgtaaggtggtctgtgtactggatcaggttttccctgaataccagtccattttttccgacatctttggcaagacctcaaaagagatccttctccagttttcttcgcccattgattttgagtcggtttcatcgcagacccttgcagaactgctggcaaaactcagccgtaagcagatcggccctgcaaaagctgcgcagttaaaggctgccgcatcctgttcctttggcgttactttcgctaaaagcagctttacctttcagctcaaagcgctgattgaacagatagcctttattgaaaaacaggtaaaagaaacggaaaccgaaatcgctggcatcatggaaaaactggaatcccccattacgaccattaccgggattggtaatatcacgggcgctgccatcatcagtgaaataggtgacatttctaaatttgacagtcccagaaaactggtggcctttgccgggcttgatgccacggttacgcagtcgggcgaatttgaagcagcccacaatgtaatgagcaagcgcggatcaccatacctgcggaaagccatttttcaagccgccctggtcgccgcctttaaagaccctgtattaagtgcctattaccagaaaaagagggcggaaggtaaacatcatttaacctgcatcggcgctgtggcaagaaaaatgtgcaacattatttatgctgtggtgaaaaataatcagccttatgttccaaaggcttaaatccttttccctttccagcctgcctgacagcaggtcttgttgttgtgctcttttttcctatgataatttcttttgattttttcaattatctacttgacttttaatagttg

SEQ ID NO: 4096 - DNA, 1334 bp, unidentified
  source 1..1334: mol_type = unassigned DNA; note = element_62b7c8a
  misc_feature 1: note = core
  misc_feature 2..221: note = LE
  misc_feature 222..1193: note = CDS
  misc_feature 1194..1334: note = RE
  misc_feature 43..211: note = bridgeRNA
tcttaagtttgatttttaataaatcagttaactttaagtattaatcagaaagaacaaaagagcggagtaaggttactttatacagtgaagctttaaacttcgacaacattgataatccccgctcttttactacttaaatcacgttcagttctgtgaggcctagacctcgttttcaagttgttgtgacccaagtagctggttctttcataaactatttttctatgaataaatataaggaaacttttggagttgacatcagcaaggatgtttttgacgtgcacggcagtgataatggccacgatcagtttaagaataatgaaaaaggatttgctgcttttttaaagattcttcccgaagattcgattgtggttatggaggcgacgggctactatcattacagactcgcacagtttctttacaaaaacaacgtagtagtatcggttgtaaatcctttgtcagtaaaacgtttcatacaaatgaagctagccaaagtaaagacggacaagagcgacgcaaaggcaatctgcgagtatgccctggccaacgaagttccgctctacaatgccttaaccgaggttcaggcagagtgtctgcaactcttccgattaatggatagttaccttaaaaaacgcacggcaaccaaaaacaaattgcacggcgaagaaaccctgggcattccctccaagtttgtgtaccgttccctaaaactggacagaaaacacttggacaaagagattgccggtatcgaggaacgtctgctctcactggtcaagatggagcaacaacaacagctcacacttttgaccaccgttccaggaataggcacaaagacagtattgtttttaattgtaataaccgatggtttttccaagtttgagactgctgcgcagctttgtagctatgttggcattacacctacaattcgagagtcaggaagcagtgtacgtggtcgaagcaggatcagtaaggtcggcaacaagaaactccgcaacttgctttttctttgcgccttcaacgcctgtaagcacaacaaggcgtgccgcgaggtatatgaacggattgtaaataagggaaagagtaaaaaattggcacttattgcagttgcaaacaagttattgaaacagtgtttcgccatagcaaattcgggtttgccgtatgatgatgcgcacgtttcagtgctaaaaattaaataaccaatattaaaatgttggtgttgtttatagcttgttgaactggaaacaaatcgacgaaggaagatttgttccatttcaacaatgccaggaaagttttgtcaaaatttaatggagaaaatgtttggtttttacctcagttct

SEQ ID NO: 4097 - DNA, 1306 bp, unidentified
  source 1..1306: mol_type = unassigned DNA; note = element_62b7ffa
  misc_feature 1: note = core
  misc_feature 2..338: note = LE
  misc_feature 339..1169: note = CDS
  misc_feature 1170..1306: note = RE
  misc_feature 48..302: note = bridgeRNA
cattacgttgttagcagttccgcttaagggagcccagaattcgtgactctgcccctgtgcaggggcaggtcatgtttctctgcgttcctttttgcttttctttttcaggagcagtggaactagtcgctggcttcggtatggcttattttcgtccctgcctgacaatgatccgggggtgatgccgccgaaggcagtgacatactccaaactgctaaaaggaacctgacccacatcaacggtgtgaggtctcaaagtaatgtggagaccaacgtgaagtatgtccgaccaccagcgatgaaagaagtctcatactcattcaactcgctaggaggcctggcatgccctacttctatgtcatcggaatggacgtaggcaaatactttcaccacgcttgcgtcttagacatcgacggcacccaggtgctatcaaaacgcatcaaccaaaacgaacaatccctacgcacactcttttcaacgtacagcgcaaacgaccacaaggtccttgtcgtcgtagaccagccaaataacaacggacgactaactgtcgcggttgccccagatatcggaatcgacgtgcgctaccttccgggtttggctatgcgtcaactctcacgcatccaagctggcaatgccaaaactgatatccgggatgcctatatcattgcccatgctggaaagaacctgccagagtcccttcgcagtgtcgaccgcgttgaaaaggctttctgtcagcttaaagtcctcaacggcgtcgacgacattccacacacacaaatcctgttatccatgccaggaatcggcccgaaagcagcagcacaaatcctcatgaccgtcgggaatttgtctgcctttccaacacctggacacttggcctcatatgctgggctatcgcctcggacacgccagtcaggcacttcaataatgtcgaactcgctgaatagaaccggcaacaaaaaattaaagaacgccccatgtcaatcatcttttgcatccataagattccacgagcgttcacggcaattcttcgaacgaaagcgcaaggaaggcaagcgacacaacgcagcagtcgtagcacttgcccgcagacgaatcaacgtcctctacgccatgatgcgcaaccacgagtattaccgcgaccccgccccagcaaaggaagccgcagcagcctaacccctcacagcgaaaaaagccggctggaaaaatcccagtcggctaccagtcgcgcaaaaacaacacacctaaaaatcccgagttagggatccgccccgtccacccctcccgcgagattgacaaactacataggaaca

SEQ ID NO: 4098 - DNA, 1664 bp, unidentified
  source 1..1664: mol_type = unassigned DNA; note = element_62b80c5
  misc_feature 1..4: note = core
  misc_feature 5..256: note = LE
  misc_feature 257..1465: note = CDS
  misc_feature 1466..1664: note = RE
ctcattggtgcaccttagagtcggagcggttcagagcgtatgctttgaagcactcgactgccggtaccttccatgacagccacggccgctcgccactcgatggccctcgtgagacccgctgcctggaaggtgctggaaggtcgcgacgggcgacagggtgaagcgccaagctgagcaggccggagcgccggtcaatgagcatcccggaggaccttccagcgacgggcagtctaaacccgaacgaaggaggtcgcacatggctgtttgcggaggcctcgattggggccaagccggacatagcgtctgcgtgatcgaccgcgccaccggccagatcgtcgtgcagttcgtcatcccccacacggcagatggattggccgatctgatcaggcgcctggcccggcggggcgcgccggccgacctgccgatcgcgatcgagcgcccatccggcctgatcgtcgacaccttgatggcggccggccatccggtcatcccgatccatcccaacgtcgtcaaggccagccggccccgctatcgcgctgccggtggcaagagcgaccagggcgatgcctatctgctcgccgacctgctgcgcaccgacggccaccgcttccggccgctcgtgccatgctccgatgccatcaaggccttgcgcgccctggtccgcggccgcgacgacctggtagcccagcgcctcgccctggccaaccagcttcgggccctgctcgacagtttctggcccggcgccgccgccatcttcgccgatatcgacagcccgatcgccctcgccttcgtgcagcgctacccaactcccgacagtgcggcccggctcggcgagaagcgactcaccaccttcatggcacagcaccgctactgcgggcggcgcagcgctgccgaactcctcaaccgcctgcgcgctgcacccaccggtctcgccggcgagaccgaggccgacgccaagggcgaactcgtcagatccctcgccgccgtcctctccaccatcgtcgcccacatcgccgaactctccgcacgcatcggccacgacctcgctgaactgcccgaaggacgcgtcatcatgtccttcccccgcgccggacgtatctgcgccgcacaaattctcgccgagatcggcgacgaccccgagcgcttccaaacgcaagatcagttggccgccgaggccggcgtctgccccgtaacccacgcttccggcaaaagccgtggcgtcgtcttccgatgggcctgcaaccatcggctgagacaggccgtgacctgcttcgccgacaattccaggcatgcttcccactgggccgccgatatctatcgacgcgccatcgcccggggatgcaaacacccacacgccgtccgcatcctcgcaagggcatggatacgcatcatctggcgcgcctggagcgacaacgtcatctacgacccaaaccggcatcaggccgcccgagccttcgctgcatgaacccgcgaaactgacacccgtttcctggttcgaaccaatagaccgtttcctcgtcccgacctgccttccaagcggccggcaaggcgtcgcgatgtcaaggaccgccgaaggcggccggctatgccggcgcgcagcgtccttcgacatcgacacgccggacggccaaaattctaccgggagggacgttgacacagggtgt

SEQ ID NO: 4099 - DNA, 1389 bp, unidentified
  source 1..1389: mol_type = unassigned DNA; note = element_62bf87e
  misc_feature 1..2: note = core
  misc_feature 3..89: note = LE
  misc_feature 90..1118: note = CDS
  misc_feature 1119..1389: note = RE
  misc_feature 1089..1376: note = bridgeRNA
agatggggtggttgccgcctccccaaaccgcatcgccatgtgtcaggatgtggtgttgagcccaacgagcgaaaaggacggcaaccgttatgaacgatttgatgattggcgtggatttggcaaagaatgtctttcaactgcacggcgcgtcgatgaccgggcaggtccggtttcgaaagaagctatcgcggcagaacctttccgttttcatggcggaacacccaccggcgttggtggtgatggaagcctgcggcagcgcgcattactgggcacgcgaactggtcaagtttggccacgaggtgcggctgattgcgccgcagtatgtgaagccgttcgtaaaacgtcagaagaatgatgcagcggatgcagaagcgatagtgattgcggcccagcgacccgagatgcgctttgtggagccgaaatccgaagagcagcaggcacgtgcagtgctgttccgcaatagggaacgccttgtccaccagcgaacagagttggtgaatgcgctacgctcatgtctttatgaatacggccacaccgtcccgcaaggcatagctcaggtcaagcgcatcgaggagatcatcgatgcgcccaacagtgacctgcccgagctggttagagaagaatgccgggacctactcaaacagatcgtagagaagacagttcgaattgaagccaggacgaagaaagtcatagccctagcggctgaggccgacacggctcaacggctgcagacgatgccaggagttggcccgctaaccgcactggcagtcgaggctttcgcgccggatatggccagctttaagcgcggccgggactttgcggcttggcttgggttggtcccgcgccagcactcatctggaggaaaggaacggcttggacggatatcaaaggcggggcagacagacattcgccggctgctaatcatcggggccatgtcgagactgaattggctggggcgcagatcaatccctgatgggtcgtggttggggcggatgctggcgaccaaaccgagaatgctcgtggcgattgctttggcaaacaagatggcgcgcgcgatctgggccatgctgacgaagaaggaagattatagagatccggcgcaggctgtagctgcatgatccagatgcggaatacagcctgacgcaggtgaaggggagcaagaagtcgacggcctgaatgggcaaaacgatcgaatagatctggattggggaaaccagccccgccgcgagtgcatcaaagctcgtacggtagatttggacccagtccgcagatcaccataccggccagcggcaggtgaaaggccgtagacgaaggcctgacacaagaccgcactcgatcgcccgtccaaaaagcacaaagatctcttgcattccaggcggcaaccacaca

SEQ ID NO: 4100 - DNA, 1144 bp, unidentified
  source 1..1144: mol_type = unassigned DNA; note = element_62c0cb1
  misc_feature 1..2: note = core
  misc_feature 3..172: note = LE
  misc_feature 173..1129: note = CDS
  misc_feature 1130..1144: note = RE
  misc_feature 15..187: note = bridgeRNA
cttgtatcttgagtcagagggttcggaccggctcacgtagcccgacgcgcctctggggtgaaggtaaccccgtctctgagcactggggcacgtgagccggaccgtcctctcttgcagcccgaacggttgtgggaacaagagttcgcatagacaaggatgggagcgagaggacatgtccgatccgattttcgtcggtatcgacgtctcgagtcaggtcttggaggtcgccagtaccgtcgagtcgaagacggctcaggtgaccaacgacagcgctggcatcgagcagctcgtcgagcagctggtggggctgaagccggccttggtcgtgctcgaggcgaccggcggctacgagttcgaagcagcctgtgccttgcaggccgcaggtctctccgttgccgtggtcaaccctcgggcggcccgtgacttcgctcgtgcaatgggggctttggccaagaccgacgcactggacgcgcgcatgctggcggcgtttgcgcgcgttctcgatcagcatcccgaccgccagcggttcatcaagccgctggctgacgacgagctccagcgactgcaagccctggtcctgcgccgccgccagctcgttcagatgctcacctccgagcggcagcggctccgcatatcgcaccccgctgccaaacccagcgtggaacgcgtcatcgacgtcctccgacgagagctggatgatagcgacacgcaagtcgcagctcacgtccggcggcaccatgcggccttggctgaggctttggccagcgtccctggtatcggtgccgttaccgtggcggtcttgttggctgagctgccggagctcggctcgctcgaccgccgacgcatcgccgctctcgtcggggtcgcgccgatgaaccgcgactcgggccagatgcgggggcaacgcacgatctggggcgggcgagctgacgtgcgtcgcaccctgtacatggccaccctcactgccgttcgccacaatccgatcctcaatgccttctaccaacgcctgctcgccgctgggaaacgtaagaaggtcgccctcgtcgctgcgatgcgtaagctgctgaccatcctcaacgccatcgccaagcatcgctctacctggattccgtcccttccgcttccttgacagtcaagacggttg

SEQ ID NO: 4101 - DNA, 1672 bp, unidentified
  source 1..1672: mol_type = unassigned DNA; note = element_62c633d
  misc_feature 1..3: note = core
  misc_feature 4..312: note = LE
  misc_feature 313..1572: note = CDS
  misc_feature 1573..1672: note = RE
tataaaccacctttctgcgaaaggcaccaatgcatcatgaaactagtgcattgacctttcgctatctaatctgttttccttctgatattatctttttataagactgacacactacagaacacgtggaggtgagtggcggggctgtatagcggcgacctcgcatttgtatatgttgtcggtcatccgttaaggcatcaatgattggcgcataacgtagcccgtaaacttatctcttccaaagtcgactcgattttgccggatgaccagtcactgtcagttttaaacttataaaattatcaggaggttattttattgtcgtttaaaattctcaaaaataactgttgtggacttgatgtccacaaaacctggatctatgcctgtattggtattaccgattccaacggacgtacagaatataagcaagctcgcttttcttcctttacgaaaggattgcaagagttgtgtgactggcttgttaaatataactgtaacgatgtgtgcatggaatctaccggaaagtattggattccagtttttaatatcttagagaagaataacttatgggttactctgtctcatcccaaatataccaaaccacaaaaaggaaataagactgaccgcaaagacgcaaaatggatctgcgatctatatatgtgtggtatggtcaagccttcctttataccaccagctgatattcgtcaattaagagatcttgtaagatatcgtttcaaacttacctgtatgattaccggtgaaaaaaaccgtgctcagaattgtcttactgtatccaactttaaacttgacgatgtcttttccgatgtatttgggaaatcttcacgttccatcacggaacagattttacaacaccctggggaaacttttgatgtggcaccttttgttgacggcaggtgtaaaactcctattgaagaaatacaggctgctgttgatggtgctatttctacggaacaggctgtaaaacttagacaatgtctgaatcacatcgatgaattagaaaagcatcaagcggaaatcgaacgggaaatctttcgtctcagcgataagtatgaaagcattctcaatcttatacgaaccgtaccaggattcgataagaacccattgactgctattcaggtgctctctgaaatcggaggtgatatgtctgtcttccccacagctaaaaacctcgtatcatgggctggatgttgtcctcgtaatgatcaaagcaatcataaaatcaaatccactaggatttcccgtgctggttcctattttaaaccagttttggtgcaagttgcaaatgctttaattaaatccaagaaacatcctgaatttactacccgttatcgacgtataaaagcacgccgtggacacaagaaagctatcattgccatctctcgtatgatcctgaccgctatctggcacatactcacagatttaaagccatatacaccggaaggctttcttgagtcacgtcctgtgaacgactcaaaagtattgaccacttcacaggcgcttaatctgctgaaacaacgaggatatatcatcaaagataataccattcctgttacctgattaggtgttgtgtctatagttgattttcaaaccaccgaaagatggtttatttgctataccctttatttcttagttgtcttctacttatttgtttcaaact

SEQ ID NO: 4102 - DNA, 1368 bp, unidentified
  source 1..1368: mol_type = unassigned DNA; note = element_62d1c1e
  misc_feature 1..2: note = core
  misc_feature 3..82: note = LE
  misc_feature 83..1111: note = CDS
  misc_feature 1112..1368: note = RE
  misc_feature 1085..1355: note = bridgeRNA
tgatgggttggacacccccgcccgacggcatcgcaatgtgccatggtggtgatgtcgaaatcgccacagaggagaggtgtccatggaagcaattaccatagtcggggtcgatctggccaagagcgttttccaggttcacaccgcaaattcagacgggcgagccgtcatcagaaagcggctgccgcgcacccgtttcctgtccttcatgtcacagatcaagccctgcgtggtcgcgatggaagcttgcgcaacctcgcaccactgggcgcgtgaactgacgtccctcggacacaacgttcgtttgataccaccgatctacgtgaaaccttttgtgaagcgccagaaaaacgatgccaacgacgctgaggctattgtcgaagcggcgctgaggccagcgatgcgcacggtgccagtcaaatctccggagcagcaggcccttgccatgctattccggacacgcgaactgctgctgacgcagaagacccaactggtaaacgcgcttcgggcccatctggcagagcatggggtcatcgtggcgggaggtcgtcgatcgattgatccgttcatccgcattctcgatgatgtgacaaacacgctttctcatgtggtgcgcaaggtcggcgccatttatctggaccggattgcccggacagctggcgaaatcgaagatctggagcggcagatcgacgagcatgccaaggagcaagagatggcgcagcgcctccgcaccattccgggggtcgggccagtcacggccatggccattgaggctttcgctccggccatggagagttttgcgcgcggcagggatttctcggcctggctcgggcttgttccccggcaacattccagtggaggcaagcagcgcttgggacgaacgtcgaaaatggggcagcgcgatatccgcaggttgttgatcagcggcgcgatgtcgatcatccactggagggggcggaacggtggaaagcccggatcatggctggcgcgaatgcttgcatgcaaatcgcggatgctgaccgccatcgccctggccaacaaactcgccagggtcatctgggccattatgacacggaaagacgtttacagagatcctgcgggtgcgatctgctgaccgcgccctgtcaggagcgtcggtgacgcaagtagagcactgatctcgtatgggcaaaagatcgaccgatcggggtggggcagccagcgaaaggcaaagagcttcgagctcgcagttctgatatggcctccatccgcgcatcaccatcccggccagcggcatgaacggccgcgcacgaaggccttacacatgttagcagccggtcacttgctcgcgaagatcacaaaaatacttgcgcaagcgggggtatccacaca

SEQ ID NO: 4103 - DNA, 1459 bp, unidentified
  source 1..1459: mol_type = unassigned DNA; note = element_62d4ab0
  misc_feature 1..2: note = core
  misc_feature 3..168: note = LE
  misc_feature 169..1212: note = CDS
  misc_feature 1213..1459: note = RE
  misc_feature 1230..1454: note = bridgeRNA
agatgggataacgggccggcccggtacgatcaagccgctcgctcgctacggcgctatatgatggcgcgctcgctcgcggcttgattggcaagggaagcggtcgtccctcagattgatggtgtcaacggagtcgggcaagcccgctccaagcatcagcgagggacgaccatgaaccattatgcaggaatcgacgtatcattggaattctcaagcgtgtgcgtggtggatgggagcggcaagatcgtacgggagggcaaggtggcgagcgaaccggaggcgctgatcgcctggttcggttcgcttgggctctccctggatcggattggactggaggctgggccactgtcgcagtggctttatgcaaaactgaagcaagctgggtttgccgttgagctgttggagacccgtcacgtgcgcgatgccttcaaggcgatgccggtcaagagtgatcgcaacgatgcccgcggcatcgcccagttgttacggctcggctggttccggccggtccactgcaagtcgatggaggcccaggaggtccgcgccgtgctgacggcgcgcaagttggtgcagcgcaagcttcgcgacgttgagaacaacctgcgcgggatcttgcgcgggttcgggctcaaggtcggcaagacgacggccatcacctttgcccagcggatcaaggagctggtggttgggcagacgagcctggaacgcattacggacgcgctgctcgcggtgcgtgccgttctgaggcgtgagctgagcgcgtttgataggcaggttcgctcgatggctcgtgcggataccaaagcacggctgttgatgtcgacgccggcggtagggccgatcgtagcgttgacctacggctcggcgatcgacgatccggcgcgattcacatcgtcgaagcaggcggggccgcattttgggctcaccccgaaaaagtatcagtccggagaaaccgactggtccggccggatcagcaagatcggcgatgccacggtacgcgaagcgctctacgaatccgcgcatctgatcttgacgaggccgatcaagggttgcccggagctcaagagctgggcgatgcggatcgccaagcgcgccggcatggccaaggcgaaggttgcactggcgcgcaagctcgctgtcatcctgcatcgcatgcttgccgacaacatgcccttcaatccgaatgcaaaggccgccaagttggcgacgatctgacacggagaaactcacaggtttcggggcggcacgacaccagccttcccgaagcgaggtcccttcgccgggacgatggaccaggtcaggccgcaatgcgggatgtggcatcagaccacgcttccctagattggccgacctgtcctcacgatccccatcaggtgacggccttgcgccgatcccgaacagaagcacgtccccggcgatggaccccgcaaaaagggattgactgatcgaggcccgttacaga

SEQ ID NO: 4104 - DNA, 1579 bp, unidentified
  source 1..1579: mol_type = unassigned DNA; note = element_62d7a56
  misc_feature 1..4: note = core
  misc_feature 5..283: note = LE
  misc_feature 284..1468: note = CDS
  misc_feature 1469..1579: note = RE
  misc_feature 45..260: note = bridgeRNA
ctgctatataataactccatatcataaatgcatattttgtgataatagtctctggtatgaacatcatgaaacactatgatgatataatgattcatacagacagaggttctctttttaaccttgcggttctatccgccggacgcagtctgagacctctttcttacagtaattcatttatgagcaggatgcaggatttttcatatttctctgctgatctcgaagccggctatgaactgtaagtttttgagggactgtctgactaattcagaaagtaggtgtagctatgttttttgttggtattgatgtcgcaaagcgtaaacacgaagctgttgtcattgatgacaaaggacgtattgttcaaaaatctttttcttttcccaattctctaagtggttataacagcctaattagttgcgtaaaaaggattacttcaactcgtaaagatattgtttttggcatggaatccacaagtcactactggcttgcgttatattcccatttgataaaagatggatacaccgcacatgttattaacccaatccagtctgatgccttccgaggactttttatcagacagacaaaaacagatcctattgatgcagttatcattgcagaagtgatccgatttgggaagtattcctcaacacattttccgcagcataagatactagctttaagagaaatgtgcagaaaccgcttatacatggttgatgccatatctgacctaaaaagaaaaacaattgctctgattgaccaggttttccccgaatatgatcaattgttttccgatacctttcttgtatcctctattgaagtcttatacagatatccaactcctaaaaagctgctgcatattcgtagaaacacattaacaaatcttttaatcaaaaccagcggagggcattttggttccgcaaaagcagatgaaatcattcatgctgctaaaaacacatttggaattgatgatccttatgatgtctatgcagatttgatccagaccttcattaagcagataaagtttattcaaaaaaatgtctccgaaattgatcaaaagattaccgcaatcatggatgagattgcctctccaatcacttctattcctggtataggtgtaaccttaggagccgtcattttatccgaaatcggtgatatttcaagattcaaatccgccgacaaacttgccgcatttgccggcatagatccatccttaaaacaatctggtaactactcaagtatcagaaatcatatgtccaaacgaggaagtccatatctaagaagagccctttggatggcttgtattccagcaactcaggttgatccaatgttccatgcatactatctcaaaaaacgttctgagggaaaaagtcatatgaagacaatggggcatgttgccaaaaaaatgatctgcgtcatatatgctgttcttcgtgataataaagagtatcagcctgtccttacggcagcataaaaccatttcattagatatcgaatcaaaagagagcctatgtggcttttcttttgatgttcatttttcatgaatttattttttatgagtagaatattgacaaatatagcagga

SEQ ID NO: 4105 - DNA, 1227 bp, unidentified
  source 1..1227: mol_type = unassigned DNA; note = element_62d9ca4
  misc_feature 1: note = core
  misc_feature 2..224: note = LE
  misc_feature 225..1196: note = CDS
  misc_feature 1197..1227: note = RE
  misc_feature 45..215: note = bridgeRNA
tcttaagttagcattctattaaaaacactaaattaagacctataaataagaaagcacaaaagagaggaataaggttattatatacgcagaagcttaagacttcgtcaacaatgaaaatcacctctctttttctacacagatttcgtacagttctatgaggcttttagacctcgattttaagtcgttgaaactcgcgtagttcgtcctttcaaaaacattttattatgaataaagatattaaattttatggaattgacatcagtcatttggtatttgatgttaccagccatacaggagaacattaccagttcaaaaacagtactattggttttaaaaaatttgtgaaactactggatgaaaatagtcattgtgtaatggaagcgactggatattatcattatcaattagcttattatctacttgagaatggtattaaagtatctgtagaaaatccgttatcagtaaaacgatttatacagatgcgtttgtcaaaaataaagacggataagagtgattcaaagctgatttgtgaatatgcaaaacaggtggagttaaagctctggagaggtaattctaaacatcaaatagaatgtcttcaaatgactagattgcttactatatatacaaagcaaagcacaatgcttaaaaataagattcatggagaatcagttttaggtaatccaagtaaagtggttgtaagatccttaacgcgtagtttgaaacaagttcgaaaagagatggatctgttagaagagaaactattgattctagtaaaacaagttcacaaagacgttctgagccggctaaaaaccatcccaggaataggaaagaaaacatcattaatgttagtagttctcactgatggatttgagcgttttaccagtgcagcagaactgtgtagttatgctgggctaacacctgtaataagaaagagtggaactagtataaacggacgtgcgagaatcagtaaaataggaaatcagaaattaagaaacctactatttatgtgcagttttaatgcctgtaaatacaacaaggcctgtagagatatatatgaacaaattgtagccaaaggaaaaagtaaaaaactagccctaattgcagtctgtaataagctcctaaaacaagcttttgctatcgcaaaatcagggctgatttatgatgattcttatagaagtactttaccggtaaattaatgagactttacttgttttttaccacagtact

SEQ ID NO: 4106 - DNA, 1324 bp, unidentified
  source 1..1324: mol_type = unassigned DNA; note = element_62d9f8e
  misc_feature 1..2: note = core
  misc_feature 3..254: note = LE
  misc_feature 255..1274: note = CDS
  misc_feature 1275..1324: note = RE
  misc_feature 30..198: note = bridgeRNA
cttgtatgatcgaatctaatgaaatgctgtataggaggttaagtaaagttttacgtttcaccgggaaggccgttccgacctgaggactggtttttaaccagagcctgattgtagattggcctcccgccctattcgtccataccgtggagtatccgaggccaagagcctgcatacacaaggaaggtagacgcctattcagggtcgggaaaccagtggggagtttactttcttttttaaccttacggataaacatcatgaccattcaatctgaaaaaattgttcaaggaaccaaatcgctgttcgccggaattgatgtcggcgcggaagagttgattctcgtcgtccgcaagaacggcacagcgcatcatccgcagaagtttgccaacacccccgccgaccgcgctcggctggtgaagaagctggtcaagctgaccggcatcgtcgtctgcctggaagcgaccggggtctatcacttcgacctttccgtcgcactgcacgatgcgggcgtagcgctgatggtggttaacccgaagtcgtcccacaacttcgccaaagtgttgatgaaaaacagtaaaacggatgccgttgacgctgaaacactggctcaatacgccgagcgcatggacttcattgcctggacgcgcccgtccgacgagaagattgccctgcgcagtttcgcgcgccgcatcgacgcgctgacccgtcaaaaagccgccgccaaaaacaattgccacgctttgagcgtctctcaggaaacgcctaaagccgtgctgcgcgatgtcaaattggcgatttcccaattggaaaaacgcatcgcgaatctgggcaaagaggcgctgctcctgatcgaaaaacacgccgatctcgaacgcgtgttccagttgctcacgggcatcaagggcattgctcaagccagcgccatcgcgctgatgggcgagctgttgctgttgccgcaagcgctttcccaccgcgaatgggtgaagttcgcgggcctcgatccgcgcgccttcgattccggcaaaagcgtccataaaaaaacgcgtatatccaaggccggcaaccgccatattcgttcggcgctttacatgcctgccatgagcgccaagcagcatgatcctcacgtcaaggcctactttcagcatctgatggataatggcaagaagccattgcaggcgctttgcgccgtgatgcgcaagttgctgcacgccatacacggtatgttgaagaacaacatgccatttgataacacccgtttttacgccattccggcatgaggtttggaatgctaaaaactcagaaaaacgcttgcttccgaacagagtat

SEQ ID NO: 4107 - DNA, 1210 bp, unidentified
  source 1..1210: mol_type = unassigned DNA; note = element_62e13b9
  misc_feature 1..2: note = core
  misc_feature 3..225: note = LE
  misc_feature 226..1194: note = CDS
  misc_feature 1195..1210: note = RE
  misc_feature 6..201: note = bridgeRNA
cttgtatctcgacgacagcctccttaggggggcatagtccccgactgatcatcggggaggatggcaggccgtgtccacccttaagcctttgagcttgcaacgtagataggctgcctcctccacacccatccccgagtccgaacggtatctagagcctccagagctcgtattgcacaaggttggacgggatgacgtgatcgtgtcgcatctgaaggaggagacatcatggccgtaatcggtgttgatatcgccaagcgcagcttcgatctggcggtcctgcaatccaatggcaagcaccggaccaagggcaggctgagcaacgatccgtcaggcttcgcggtctttgccgactggctgcagcagcatgccgagccaggcgcttggatcgtgatggaggccacgggcacctatcacgaagcgctcgccgagcatttccatgcgctgggctaccgaatcgccgtgctcaatccggcacagatcgctcgctatgcgcaaagccagttgcagcgcagcaagacggacaaactcgacgccaagctgatcgccacctatggccagcggcatgaagacagcctgcgggcctggcaccccgagcctgtgtccatccgcacgcttcgcgcgctgacccggcgcctggaggatctccaatcgctacggcagatggagctcaatcggctcgaggtcagcccggaaaaagtccaaaactcgatccaggcggtcgtgcagcggctcgatgagcagatcgcctggacgctcgaacagatcaaacggcatatcgacgatgacccggacctgagcggcaaacgtgatctgctggtgagcatagacggcatcgccgacaagaccgccgccctgatcctggcggagctcggtgatatcggtcgcttcgccgatgcccgcgccgtgaccgcctttgccggtttgaacccacgcctacaggaatcaggtctttaccgcggccataccggcatctcgcgcatgggatcggtccgcttacgaagtgcgctatacctacccgccgtcgtggcgctgacctacaacccggctatcaaggcgcaagccgagcgtctgaaaaccagggggaagaaaggtaaacaaaccgtctgcgccgccatgcgcaagctgctgaccatcgcctatggcgtgctcaaatcaggcaagcctttcgaccctgctttagcgattgcacactgaggggcgaagacggtat

SEQ ID NO: 4108 - DNA, 1234 bp, unidentified
  source 1..1234: mol_type = unassigned DNA; note = element_62f9b5c
  misc_feature 1..3: note = core
  misc_feature 4..234: note = LE
  misc_feature 235..1212: note = CDS
  misc_feature 1213..1234: note = RE
  misc_feature 20..209: note = bridgeRNA
gctattagtttagctttctatatttacaagaagtttaatcatattaaatttctgaataaccagaaggaaaaggtgaactatttcgactcttagacattatggtctatgctgagcatcagtcctttcccttcttaggttttggtaccatttagaatgttaagcttgtaggcttattaatagcgttagtacacagacctattggttattcaggtttttaatagctaatccaaagttatgaaaaatttagttttaggtattgacatttcaaaagacacactagattattgtattttgaatagtcaaagtattcaggtagaatcaagagggatcattgataataccaagaaaagcattgatcaatggcttaagaaatttgatgaacatgccatatttgccttagaacacacagggcattatggtgcaattttgatagattgtctaagtagaaataattttcagttctatgttattaatcctttagaactcaaaaaatctcttggaattcaacgtggcaaaactgacactaaggatgcttaccgcattgcagagtatagcattactaacaagcataagctggctccttaccagttgccatcaaaaaaattgagtacgcttaaagcgctcgttacagctagagaacgttatgtgaaaatatctgttcaaattcaaaacagtttgaaagctaatgaaatacttaacaagtcggttgatgtaaaaatgctgatcagggaagaaagcaaacaatataaatccattgagaaaagtatcaaaaacattgaagcccagatgcaggaattgatcaatcaagacgagaacctaaaggacagctacaagaagatcacaaaggtaattggtgtgggcccagtaattgctataaaatgcatcgttgagacagagaacttcattaagtttagcaacgctagaaaattcagctgtcactgcggccttgctccttttccttaccaatcgggaagtagtgtaaagggaagaaccaaaactcattatttaagggataaatcattgaaggcaatgctgacaaaaggagctatcagtgccatacaacacgacccccagatcaaggcctattacaaaagaaaaattgaagagggaaaacatcacatgaatgtaaagaatgctgttgccaacaaaattgtgctaaggatttttgccgttgcaaaaagagaagaaccttttgtgaaattagctgcttaaaaatttgtttttatcttagaat

SEQ ID NO: 4109 - DNA, 1494 bp, unidentified
  source 1..1494: mol_type = unassigned DNA; note = element_62fb830
  misc_feature 1..2: note = core
  misc_feature 3..244: note = LE
  misc_feature 245..1474: note = CDS
  misc_feature 1475..1494: note = RE
ctaatgggagctgtcgggtgagccgttggcagactcgacatccggtagccgcgggcgggtgagcactcccgccgcctggacatgttcagtcctgaggtcagaacgtgcccccgctcgtggtcggaagaggaacggctgatggggtgtcgtgcccgccgatgcgcgtgagcactggtccattaggccgccgggctcttccgcaggctgccgacagtggggccccttgggtggagcggaggcaagtgtgctgtttgtcggcgatgactgggcggaagatcatcacgatgtggaggtacaggacgagcacggccgggcattgcgtaccgcccggctgccggagggcgtggagggtatggcccgcttccatgaactggtcgccgggttcctgcccgacgacgccacgccgtcgcaggtgctggtgtgtatcgagaccgaccgcgggccgtgggtacgggcgttgatcgcggccggctaccaggtttacggggtcaacccgaagcaagccgcccggcatcgggagctgatgtcggtctcgggtgccaagagcgacaaggccgacgcgcacgccctggccgacatggtccgcacccgccgccaccagttgcggcaggtcgctgcggactccgacatcgctgaggcggtcaaggtcgtcgccagggcgcaccagacgctgatctgggaacgcactcggcacaccctgcggctacgggccgcgctacgcgagtacttccccgccgcgctgcacgcctaccagccgctgacgctcaccggcgcagacaccctggagctgctggccaaggccccgacaccggcggctgccgcgaagctgagcgtggcgcagatcagcgccgcgctcaagcgagcccgccggcgtgacatcgcggccaaagcgaccgcgatccagcaggccctgcgcaccgcgcacctgggccagcccgagatcgtcaccggcgcgtacgcggcgaccgtgcgcgccacggtggcggtcctgaccaccctcaacgccgagatccgcaccatggaaggccaggtcgaggcgcattttggccagcacccggacgctgaggtgtacctcagccagcccggcatcggcacagtcctcggcgcccgggtgctcgcagaattcggtgacgctgctggccgctacaccgacgccaaatcgcgcaagaactacgccggcaccgcccccatcacccgccaatccggcaagaccaaaaccgtgcacgcccgattcgtccacaacgaccggctcgtcgacgccctgcacgtccaagccggcgccgcgatcctgcacgacaccgccgtgcgcgcctactacgacgaactccgcgcccgcgacgtcagccacaacgccgccctacgccagatcggcaaccgcctcgtcggcatcctgcacggctgcctcaaaaccaaaacccgctacaaccaggccaccgcgtggtcacaccgagccaccacacccatcgccgcttgacatctcagctcctggggtgt

SEQ ID NO: 4110 - DNA, 1204 bp, unidentified
  source 1..1204: mol_type = unassigned DNA; note = element_6301214
  misc_feature 1..2: note = core
  misc_feature 3..392: note = LE
  misc_feature 393..1196: note = CDS
  misc_feature 1197..1204: note = RE
  misc_feature 6..198: note = bridgeRNA
cttatatcttgatcatctaccagcaatggaacatgatccccgattgatcatcgggtggctacggatgagatagtaacagccctgaggctttcaagcctgtccgatagatttatcctccgtagccttcattcgctttacaaaccgtacggtatcttgtgcctgtgagcacgtattgataaggatggttacagcgattatttacctgtcactgcccgttgtgaggtccagattatgacgactttcgttggtgttgatattgccagtcaaaaatttagtatgtcgctgttttatatgaaaaagtaaatataagcacaaaacaattccctgactctacacagggattttgtgagtttgtagactggttgcaaccttacaataatgtgcatgtatgtatggaggctactggtgcgtacagcacacctttagcaacccatcttcatgaatctgatatcactgtcagcgtagaaaatcctgccagaatacatgcgtttgcacaaagtgaactgacccgtaataaaaccgacaggaacgatgcgaaaatgattgcccgttattgttgtctttatcagccaccattatggaaacctgcaccacctgatattcgtcaactcctggcacttatgacaaggcttgatgcactaaaagaaatgcgcaggatggaattaaaccgaatactggttgcagatcccattatcacaaattcattacagaaaaatatagattcattatcagtacaaatagaagaaattcagcaaactgttaaagagcatgtcaataataacaaagcccttaagagaaacaaagagttacttaaatccataccgggtgttggtgatattcttagttatacttttcttgcttatactggtgatgtttccagatttagcaacaacaagaagttagtcgcatgggtcggactgaaccctatgctacaggagtccggcctctggaaaggccgcagtaagatatctaaaaaaggcaatattgagttaagaaaagcgttatatatgccagctgttgcggcgctgacacacaattctgtcttcattgcttttaaaaaaagactccaacaaaatggaaaatcagggaaaagcattgtttgtgccggcatgaaaaaattgctgcaaatcatgtatggggtcctgaaatcaggagtaccttttgacgaaaaatacagtttgccaaataagttttaacacggtat

SEQ ID NO: 4111 - DNA, 1382 bp, unidentified
  source 1..1382: mol_type = unassigned DNA; note = element_630b70c
  misc_feature 1..2: note = core
  misc_feature 3..92: note = LE
  misc_feature 93..1115: note = CDS
  misc_feature 1116..1382: note = RE
  misc_feature 1095..1372: note = bridgeRNA
tgatggtgtggatgccgccacctgaaggcatcacaatgtgccaagtgtcgtcatgatgacggcacagaagcatagaacatggaggcatccacatgactcacgctaccatcatcggccttgatcttgcaaaaaacgttttccatgcgcacggcgcgatccatgacggaacaccgatttttcgcaagaagctctcccgcggccaggttttggccttcctgtcagaacagccacactgcatcgtggccatggaggcgtgtgcgaccgcgcacgattgggcgcgcgagatcggcaagatcgggcataccacgaagcttatcccgccccagtatgtgaagccgtatgtcaagcgtcagaaaaacgattcagccgacgcggaagccatcacggaagctgtttcgcggaggaacatgcgatttgtggaggtcaagaccgaggaccagcaggtcagtgccatggcctatcgcacccgacagatgttcatcggtcagcgcacccagacgatcaacgcattacgatcgcacctctccgaacacggggtgatcgcgccgaaaagcaaagccggcgtcagaaagctggtgtcgatgatcgaagatgacacggtcatcatttccgagaagatcagagagattgctcgcgtctatgtcgatcatatcgaaaagctgacagagcagatctctgatgcaaccgaagcgatgaaggcggcggcgaagacgtctcaagtcgcaaaacggttgcagaccgtgccgggcgtcgggatacagacagcaatggccatcgaggctttcgcgcctgacatgacatgcttcaatcggggtcgggatttttcggcctggttgggtctggtgcccagacaacattcgaccggcggcaagagccggcttggcaagatctcgaaaatgggccaggcggatatccggagccagctcatccgaggggccatgtcggtgattaccgctgcaacacgctttgggattgaaaagggatcatggcttgggcgtcttcttgctcgcaaaccgaaactggtggccgcagtcacgctggccaacaggatggcacgggcaatctgggcgatgctgacgcacaatgagaactatcggaaccccgaggcggcgtgacagcgatacacacacagctgccgcctcggtgagagacgtgtgaggaggtcaacgagccatgggagattgatcggacagatccgaaccgggaaaaccattcgtcaccaacaagcgctatagctttgaaagttgatttggacctggttcgcgcatcaccataccggcccgcggccatgaacagcgccgcaaagagaggcctgatacatgaccgcatccgatcacacgctcataagttcaaaaaccacttgcacaggcggcatccataca

SEQ ID NO: 4112 - DNA, 1464 bp, unidentified
  source 1..1464: mol_type = unassigned DNA; note = element_631183c
  misc_feature 1..3: note = core
  misc_feature 4..240: note = LE
  misc_feature 241..1449: note = CDS
  misc_feature 1450..1464: note = RE
  misc_feature 21..229: note = bridgeRNA
tccttaagttcgtagttgcagttacttcgtgttattacgttgtgctgtaacccgggtgggtcgggtgaggctgcatcgtctttgccggcctgtgggtgcggcttgaaaggactggccgcccgatctgcctggacttctctggccgctgattgagatctgcgatctgatcgcttgtttaaggaaacgctggcggggatgtccgtggggaacatggtgggtaacaacagaacaggaggttcgatgggtacgggccagttgtgggtcggtgtggatgtcggcaaggaacaccactgggactgtgtggtcaacagtgacggtgtggcggtgttgtcgcgcaagctcgccaacgatgagcagacgatccgcgaactgatcggcgaggtcgatgcgctgagccacgacgtgtcctggacggtggacttgaccacggtgtacgccagcctgctgttgacggtgctggccgattccggaaagtcggtccgttacctggccggccgtgcggtctggcaagctgcgagcgtctaccgcggcggggaggccaagaccgatgccaaagacgcacgtgtgatcgccgaccaatcccggatgcgtggcgccgatttgccggtgctgcatcccgacgacgacgtgatcaccgaactgcggatgcacaccgcccatcgcgctgatctggtcgctgatcgcacccgcacgatcaaccggctccgtcaacaactcatcgcggtctgcccagcgttggagcgggccgcgcagctgacccaggaccgcggctgggtggtcttgttggcgcggtatcagcgcccgaaagccattcgccgcaccggtgtttcgcgactgacgaagatgctcagcgatgccggggtgcgcaacgcggccaccatcgccgccgcagcagtgaccgccgccaaatcgcagaccgtgcgcctgcccggcgaagacgtcgccgccgggctcgtcgccgacctggccggggaggtgattgccctcgatgaccgcatcaaaaccaccgacgccgacatcgaggaccgatttcgccgccatcccgcggccgaagtgatcaccagcctgcccggcatgggtttccgcctcggcgcggagttcctggccgccgtcggcgatcccgccctgatcggatcggccgaccaactcgccgcctgggccggactggccccggtgccacgagactccggaaaacgcacaggacgcctgcacgcacccaagcgctacagccgacgactgcgccgggtgatgtacatgtccgcgctgaccgccatccgctgcgatcccgcctccaaggcctactaccagcgcaaacgagacgaaggaaaacgaccaatccccgccaccatctgcctggcacgccgacgcaccaacgtcctctacgccctcatccgcgacaaccgcacctggcaacccgattcacccccgatcaccaaatcggcggcttgacatcttcattgagag

SEQ ID NO: 4113 - DNA, 1704 bp, unidentified
  source 1..1704: mol_type = unassigned DNA; note = element_63145dc
  misc_feature 1..3: note = core
  misc_feature 4..219: note = LE
  misc_feature 220..1677: note = CDS
  misc_feature 1678..1704: note = RE
  misc_feature 34..182: note = bridgeRNA
tctggtatgttgaaagtgtcgaatcgagtatacactgatcgcgccgcggaagagaacggtgtgtgccatgaggcgtgacctctacacaaagattgttcctcccggcgggatcggtcaatccggggaagtatccggcgctgcgagcgcggatcaaccaggctggatgccgatctcgacggccgggagaacccgcggtgaatccatccaggagacggagcgatgacgacggtgtacctcggccttgatgtgagcaaagggtatgcggacttcgtcgcgatgaacgaagcggggagtgagctgggcggctggggccggtttgacgacacccgggccggccacgaccaggtgcagggacgcgtggccgcggtgttggcccgggcgccggagacgcaggtggtggtgggcgtggaatcgaccggcgggtatgagcggaactggctggggctatgtcaccgcttgcgccgcgcagggtgggcgctgacggcataccggctcaatccgctggtggtcaagcgctaccatgaacgccaactccaccggacggtgacggatcgggtcagcgcggcggggattgccgcgtatctgcgggcggggcggcgccggcaggatcagctgtgggtggccggcgagttggagggcgccctgacgctgtaccgaaccgtccgccgactggttcggctgcaggccgacctgcagaatcagctccaggccctgctgtcgcgctgtcatccggagttggtggcgtgtctgcggggcggtctgcggcaatgggtgctggcgctgctgcgacagtatccgacggcggcggccctggcccaggccgacccggcggtggtggcgcgcattccgtacgtcacgccggcggcggcggcgcggctggtggcggccgccgccgccagcgtggcggaccaaaccgatccggccaccggtcgggcggtcatggtcctggtggacgagatcgcccatctgcggctgcaggtccggcggctgcagaccgagttggccgagcaactgcgggccgatcccggcgtccagatcatcgacagcatccccggcttcggcatctggagcgccatctgcctgcggctggagctgggggatatccaccgctttccccgcccggcggagttggtggcgtttgccggactggacccccagcaccaccagagcggggatacgacgatcaaccgggggatcagtcaccgcggtcaggcgggcgtccgcgccatcctctacccggtggtgcgggccgccatccggtgcaatcccgccgtcggcgccctgtacacccgcctgcgcgcccgcggcaagaccgatgcgcaagcggtcgtggccggcatgcgcaagctgctgcacctggtctttgcctgctgggtgcaaggcgtcgcctttgacccgtcgcggtgggagcaggtcgccggcaaagcgcaggagatggcccagcgtgccgggatggccctgacgcccgcggtggcggttcccctggccacgtccctggccgcgcccgtttccaagcgcgaggccaaacgacggaaggcggcacactcgcctcagggtccgtgcggggtcgtgccccaaaagagaccggagttcgagcggccgccttccgcgccgatcataccaatccgaacgccctcgtgccaaggagatcatgcgcccgatttttcatcatgctgaaaaatctttttgacttctaacggagta

SEQ ID NO: 4114 - DNA, 1543 bp, unidentified
  source 1..1543: mol_type = unassigned DNA; note = element_63161ae
  misc_feature 1: note = core
  misc_feature 2..80: note = LE
  misc_feature 81..1139: note = CDS
  misc_feature 1140..1543: note = RE
  misc_feature 1307..1534: note = bridgeRNA
taatgggatggcccggccgtgctcctgccccgcaagacataaaatcttgcggggattgagaggcacaaggagcacgtcccatgtcacacaaatccgcaccatacgccgccgtgagcacgatcggcatcgatcttggtaagaacagcttccatcttatcggtctcgatcagcgcggggcgatcgttttgcaactgaagtgctcgcgcgctcaacttgagcgccggctcgccaatattccgtgctgcttgatcggcatggaagcgtgttctggagcgcattacatcgcccgtcagctctcagcgcttggacacgatgttcgtttgatccctgcgcaatacgtgaagccattcctcaaagggcacaagaacgactaccgcgatgccgaggcgatcgcggaagccgtgcagcggccaaccatgcacttcgtggcgatcaagacgccggagcagatggacctgctggctctgcatcgcgtgcgctcgcgcctcgtcagtcagcggacgggggtgaccaatcaaatccgtggcttcctgatcgagcgcggcatcatcgtgcggcaaggtgtggtgccgttgcgcaaggcgatggccgatatcctgagctcaaatacacacgcgctctcgccaagaatagtcaatctcatcgctgacctggtccaggactggcgtcgattggacgagcgcattgcagcggtgtcggctgagatcgaatcgctcgcggaacaggatgaggcttgccaacgggtgatgacggtgccggggatcggcccgatcatctcgagcgccgtggtggcggcgatcggcaatggcgccggcttcacgcagggacgcgacttcggcgcctggctggggctcgtaccgaggcaagagtcgaccggagatcgcacgatcctgggcaagatctccaagcgcggcaacaagtatctgcggacactgttcgtgcaggccgcacacgtcgtgctggcacggcggccgaaggcagcgatgcggagtctgtggccttggatcgagcaggcagcgaggcggctccaccgcaacatgctggcgatcgcgctcgccaacaagctcgcccgcatcgtttgggcggttctcgcgcgcggtcgctcctatcagccgaggatcgtcgccgatgtcgcgtgatataggctcgctcaggttcaccaaggggatgcccgccgtccctctccgccaccctcgctcaccacccagggcgaacgagcgacggtggctccgaggggatggcttcacgtgaccgctctgacgcaaacatcagaacggagactgagtagcttgagtatcgacagcttacccgccgaggtctgcgagatggaatgaagagatggacgaacggtctgcccggcgcaaccaagagactgggtgccataatggccttcgaggtcttgccgctagtaagtctcggatgcgcgcggatacccatgatggcccggagcaaattgctccacttcagaggtctgatacattaatgcagctctcacgttcgtcgatcttgaaagtccatcttgtacgcacggccgggccataca

SEQ ID NO: 4115 - DNA, 1381 bp, unidentified
  source 1..1381: mol_type = unassigned DNA; note = element_6318faa
  misc_feature 1..2: note = core
  misc_feature 3..86: note = LE
  misc_feature 87..1118: note = CDS
  misc_feature 1119..1381: note = RE
  misc_feature 1149..1369: note = bridgeRNA
tgatgctgtggacggctcctccaccggcacatcggtaccatggaagtgggtgctgttaaggctcccacgattcggaggagagagccatgcagacgattacgacaatcggtttagacatcgccaagtcggttttccaagttcatggggttgatgccggcggccaagtggtcattcgccatcggttgaagcgccgctacgtccaagcgttcttccagaaggtgccaccatgcctcgtcggcatcgaggcttgcgcctcgtcgcaccactggtcgcgcgagctccgggcactgggtcacaccgtgcggttaatcccgccggcctatgtgaagccctacgtcaagcggcagaagaacgatgcggctgacgcagaggccatttgcgaagcagtcaccagagccaacatgcggttcgtgccaaccaagactcccgagcagcagagcggcatggtacttcatcgaacgcgtcatctgtgcatgcgccagcaaatctcggtgatcaatgcgatacgcgcgcattttgccgaattcggaattgtcgccgcagtcggccgcaagggtgttgaggaactgctcgatatcgtcgcggatccagatgacaagcgattgccggaaatagcccgcgcttgtctcgcaattctcgggacacaattgcgcaggctcaaggagcagattctggagttcgaccggatgatcagggcctggcatcgttccactgagatgagcatgaggctcgatgaagctcccggcgtcggtccggtgctggccaccgctctggtcgctaccgttgcagacccaaacgcctttcgatcaggccgtaacttctcggcctggatagggctggttcctaaacagcactcaagtgggggcaagaacaggctcggcagtatcagcaaacaaggtgaccgctatctacgcggcctgttcgtgatcggcgcgctcgctgtgatccgttatgccaagatccatggcaccaagcataggccttggctcacggcattgttggcgcggaagccggccaaggtggcagccatcgcgcttgcaaacaaaatagcgcggatggtctgggccatgatggctagaggcgagcgctacaaagagcctgtcgcacttgcggcgtgaaagagattgcgccgggtaaccggcgtgatgtgacggttgggagggccaacagcacgtaatgcagagccggtcgatccggcgatcaggacaacccactcgtgccatcgcattgtcgaatgcggcttgttgaccgggacctgatccgcggagggcattatggccagcggtcatgtgaaccgcatcaaaaggccgaacacatggctgcaccgaccaatgctgcacaacgtgaagaaagctcttgccaacccggagccgtccacaca

SEQ ID NO: 4116 - DNA, 1437 bp, unidentified
  source 1..1437: mol_type = unassigned DNA; note = element_63195ee
  misc_feature 1: note = core
  misc_feature 2..224: note = LE
  misc_feature 225..1253: note = CDS
  misc_feature 1254..1437: note = RE
  misc_feature 15..233: note = bridgeRNA
ctgcttgagacttcaggtggacgcagcgatcggtttcgtagcgtctcggggtctctgacgggatggctcacgaagtgcctgccgctggcccatgccggttggctgtcgaacgatgagctccccgtcggggtcttcgccgcgggtggcccgaaagaggaacgtgcaccaacgatctgaagcaggagtgccctcgcggacccatccacgagtccggggaggaactcatgtcagtgatcatcggcgtcgacccacacaaggcgacgcacaccgcggtagcgatcgacagcagcgaagctgagctcgcacgggccagggtccgggcgacccgcaagcaggcgcagcagctgctgcgctgggccgagccattggggaagcgaacgtgggcggtcgagtccgcaggcgggcttggctacctgctctcccaacagctggtggctgcgggcgagacggtcttggacgtgccttcgacgctcgcggcgcggatccgtgtgctcggctctgggcggtcggacaagaacgatcccaacgacgcgctctctgtggcggtcgcagcgctgcggacgccggcgttgcgggaggtcgtcgccgccgatcacgcccaggtgctgcggctgctggcgaagcgcaacatcgacgttggcagccaccgcacacgcgtcgtctgccggctccacaacgtgttgatggaactcgtcccgggcgggatcgccaaggaactcaacgcttctgacgccgttgcggtcctcgagcgcatcgagccaaccacgcccatcgagctggccaaacgagacatggcgcttgagatcctcgccgacgtgcagcgtctcgacgcgcagctcaagcagtcgcatcgccgcatccgcaccgcagtggcagcgtctcagacgacggtgaccgagctgttcggagtcgggccggtcctcgcctgctacctggtcggcttcaccggcgacatcacgaggttcgccacgcgcgacgcctacgccggctacaacggcaccgcaccggtcgaacgatcctccggaggacgggtcgtgcaccgggtctcccagcgcggcaaccggcgcctcaaccacgccctgcacctcgcagcgatctgccagattcgccagcctcattccgacgggcgcacgtacttcgagcgcaagctcgccgaaggcaggaccaagaaggacgccatccgctcactgaagcgccacatcagcaacgccgtctaccgcaagctcgtcgaggaccagcaccgaggggggtaggcgggcccgggagggcactccaggaacgtctctgtcgtccagcgtggccggcttccatcctgcacaccggctcttcggaccaagccacttcccggacccaccagcaaccgtacgcccgccgatcgcgggccgctcccacgcgccccacgacaccgccaaatcccaacttgactcaaagaggatt

SEQ ID NO: 4117 - DNA, 1462 bp, unidentified
  source 1..1462: mol_type = unassigned DNA; note = element_631a6bb
  misc_feature 1..4: note = core
  misc_feature 5..244: note = LE
  misc_feature 245..1441: note = CDS
  misc_feature 1442..1462: note = RE
  misc_feature 3..245: note = bridgeRNA
cccccccccgttaccttgttcgtgggccttgacgcaaggctcctggtcgccaggctcggcatgacttattccccctgtcgtacgcatgatccggggggtgttgtcaccgggactggtggcgtgggtgatcgctaatagggaccggaccacctggcttgtcgaggtaggtctgatcgtaacgtgggtgccgacatccttcgcctgatctggtgaccagctcatcaagtgggaggaagaggagttcatgactcgtccggagtacgcggtgttcctgggcctggatgtcggcaaggaagagcaccacgcctgcgggctggaccccgacggggaacgcgtgcatgacaagccgctgccgcaggacgaggccaagctgcgggcactgttcgacaagctcgccaaccgcggccgggtgctggtcgtggtcgaccagcccgcgaccatcggcgcactaccggtcaccgtggctcgcgacgccggcgtggacgtggcctacctgcccggactggcgatgcgccggatcgccgacctacacccgggcaacgccaaaacagacgcccgagacgcgtacatcatcgccgaagccgcacggtcgatgccgcacgcgctgcggcgtgtggacgtcggtgacgaggccttggcagacctggaagtcaccgtcggctatgacgacgacctggcagccgaggtcacccgggtcaccaaccgaatccgcggactgctcacccagattcaccccgccctggagcgggcgatcggtggctggctgcaccacaaggccgtcctggagctgctgacccggttcggtgggccgaccgggctgcgcgccgcgggacgtcgccggctgacggccgtggccaaaccccgcgcgccacgcatccataccaagatcgtcgacgccgtcctggccgccctggacgagcagaccgtcgtggtgcccggcacgacggcggccgagcgcgtgctgcccaagctcgcgacccagctggcgggactgctggccgagcgtgccgacgcggcacgccaggtcgaggagatgctcgatgcgcaccctctttccacggtcctgacctcgatgcccggcatcggggtcaggaccggcgcccgcatcctgctcgaggtcggcgacggctccgcattcccgactccaggacacctggccgcctacgccggcctgaccccggtcacccgccggtcggggtcctcgatccgtggcgaacaccccaaccgaggcgggaacaagaaactcaagaacgccatgttccaagccgcgttcgccgccctgcacgaccccgcctcccggacctactacgaccgcaaacgggcccagaacaagaagcacaacgccgcgatcatctgtctcgccagacgccgctgcgacgtcctctacgcgatgctccgcgatggcaccccctacacgacaaaagccccgtcagcggcttgacaagaaccatagggacacccc

SEQ ID NO: 4118 - DNA, 1346 bp, unidentified
  source 1..1346: mol_type = unassigned DNA; note = element_631d60a
  misc_feature 1: note = core
  misc_feature 2..70: note = LE
  misc_feature 71..1099: note = CDS
  misc_feature 1100..1346: note = RE
  misc_feature 1121..1340: note = bridgeRNA
taatgagatggtccgccgctggtcatgcgaagtggcatgatgcggtaactcagacacggaggatcatcgcatgcagattacttccatcggcattgacctgggcaagaccactttccacctgattgcactcgaccaacgcggcaaggtcgtcagcaagcagaagttctcgcgcaaacagctgctcgcctacagtgcgaacctgccaaactcgctcatcggcatggaagcctgtgccggcgcgcacttcctcggcgctgcactgcgcgatcagggccacgacgtgcggctgatcccggcgcagtttgtaaaaccctttctgaagtccaataagaacgacttcctcgacgccgaggcgatcgccgaagcggtggcacgccagaacatgcgcttcgtgcccattaagaccgacgatcaactcgatttgcaagctctgcaccgggtgcgggatcggctcgtgcaccgtcgcaccgcggtcatcaaccagatccgtggcttcctgctggagcgcggcatcaccttcgccaaagggccggcgaagttgcgccagcagatgcccgcgatcctggaaaatgccgatgagaacctcacgccgcgcctgcgcagcctgctcgatcatctctggcaggagtggaagggtttgaactccgatatcgaacgcgtcagcgacgagatcgacgcgatcgccgaccaagatgcagcttgccggcggttgcgccagataccgggagtgggaccgctggtggcgaccgcgaccgtcgcggccatcggcaatggcgcggcgtttcgcaagggacgcgagttcgccgcctggctcggcctgatcccacgacaacactcgaccggcggcaaggccaagctgctcggcatcagcaaacgcggcaacgtttatctgcgccggctgttcatccatggcgcccgcgccatgctgctgcgtgtgaagtacgacaccggccgcttgggacagtgggcgcatcagctcgagttgcgggcaccgcgcaacaaggtgatcgtcgccgtggcgaacaagctggcgcgtatcgcctgggcagtgctatcgacgggcaacgagtaccggaacacggcagttacagccgcctgaggacagggtgaaatcgtttctcgaagtctgctgaggagaggacaggacgaaagaacagtcaaacggcgtgccggagaaccttgctacgctaagggttgcaacagaccgttccacttatcaggaccggcacgcgcggatcatcattatggcccggagaaaaacctccaactaagaggccggatacatttgcgcagactgcttcttcgtccccactaactcctcttgcagtcacgcggcggaccataca

SEQ ID NO: 4119 - DNA, 1402 bp, unidentified
  source 1..1402: mol_type = unassigned DNA; note = element_6328fdc
  misc_feature 1..2: note = core
  misc_feature 3..118: note = LE
  misc_feature 119..1150: note = CDS
  misc_feature 1151..1402: note = RE
  misc_feature 1163..1397: note = bridgeRNA
agatgccgtaatgggccggcgtttcaagagtagccaagttgggtggctgtccctcagaatgatggtgttggaaacggggtccgagtgatcggccccaagcatcatgagaggaacagccatggagtattatgccggaatcgatgtctctctgaaagagagcggtgtgtgcatcgtggacgcaaagggtaagatcgtccgcgaggttaaggtcgccagcgagcccgaggcgctggtgcggtatttcaacgatctggaattgccggtgtgtcggatcgggctggaggcggggccgctatcgcattggttgcatgctgggcttgttgccgctggtcgggacgttgttttgctggagacgcgacacgtgaaggcggccctttccgcgatgaccgtgaagaccgaccgaaaagatgcccgcgggattgcccaattgctgcggatgggctggtatcggccggttcatgcaaaatcggtggcatcgcaggatacccgcgccgtactcgtcggtcgcaagcttctgcagagcaagctgctcgacgtcgaactcagcatccgggggatcctacgcggatatggactgaaggtcggcgaggtcagccgcggtcggttcgaagcgcgtatcgaggaactgatcgtcgggcacgccactctgaagacggtgatcggcgcgatgctggcggcacggggaacgttgtggggggagttcaccaggctccaccgggagatgctgaagatcgcgcgtgctgacaagatttgtcaccggttgatgagcactcccggggtcggtgcgttggtcgccctgacatatcggtcggcgatcgacgatccgacacgcttcggaaaatcgagtacggtcggcgcctactttgggctgacccccaagaaatatcagtccggcgagaccgaccgggatggaggtgtcagcaaggtcggcgacgcgatggtccgaaccgcgctcttcgaggcggcgcatatcatgctgacgcgagcgacgcggttttccagcctgaagcgctgggcgctcgaagtggcgaaacgtcgcggcatgaagcgcgccaaggttgccctggcgcgcaaactcggcgtcgtgctccatcgcatgtggatggacgccaccgactttcgctggggggcaaccgcaatggccgcttgaagggaaaaatgctgatcgaggcgcgtcgggaacgacacgcttctaatgaggtcccgtcgctgggacgagggcttggcaagatcgtgtgtagtgctgtgaatgcttcggcaaaccacgcttcctagattgatctgccggttctggatctgatggcatggtgtggcggtcttcgtgctgaccacggacagaagcatgatcctggcgacgagataatcattcagagggacttgacgaacaaaggcccattacaga

SEQ ID NO: 4120 - DNA, 1429 bp, unidentified
  source 1..1429: mol_type = unassigned DNA; note = element_632e1bf
  misc_feature 1: note = core
  misc_feature 2..128: note = LE
  misc_feature 129..1148: note = CDS
  misc_feature 1149..1429: note = RE
  misc_feature 1188..1428: note = bridgeRNA
atgatatgaacgcctcccacccgtgagcggtggaagctgtaaggaaggcggagcctcacgggccaacggcatcagagtgcccagatggaagaccataggggttttcctggcaaaccggaggctccgacatgaagcatatgaccgtaggcgtggacattgcgaagaacgtgatgcaactccattacatcgatgcagcgacgggcgagattgtgaacaaaccggtgaagcgaggcgcgtttctggaacacttcgtgaatctggctccgtgcctgatcggcatggaagcctgcggcggttcacagcactgggctcgcaagctggtggcgatgggccatcaagtgaggctgatgccggggaaattcgtcaaggcgtttgtgatgggtaacaagagcgacatgactgacgcgaaagcaatttggctaactgtgcagcatgcggacagatcggtcgcggtgaagactgaaacgcagcaggcggtgctgggactgcaccggatgcgcgagcaactggtgaaatttcgcaccatgcaaatcaacaatctgcgcggcttgctgaccgaatacggcgaagtgatgggcagggggcggaccgcgctggataaagcgatgccgggcgttctggagcgactggttgatcgtttgccgacgatcctgattgatacgctgcgtgagcaatggagcggacttactaatcttgacaagcagattgccagcatcgaacggcggctgcagacatggatgaaggaagataagggctgcaaggcaattgctgcgattccgggcgttggtctgctgacggcaacggcagtagtcgcaacgatgggggacgccaagacgttccagtctggacgcgagttcgcagcatggattgggttggtgccaaggcaagttggcactggcggcaaggtgcagttgctggggataagcaagcgaggcgatgtgtatctgcgcaagctgttgatccacggcgcccggagcgtgctgtgtctcgcgaaagagccggggccctgggttgaagagatcaagaagcggcgcccgatgaatgtggcggctgtggcacaagcgaaccggatggcccgcacgatctgggcgatccttgcgcatgacaggcagtacgaaaagggctacgtgagcgtgaagcctgtttgatcggcaagccttgtgtagaagaaaggtaatttttgcaggatgatacgtcgaaaggttgcgctggcaatcgtatgcaatgacaagacaggtcggaccgggactcgctaaacctgaattcgctttcgagcttcgagctcgccggagaaatgaggtgtgggtcagcggatttcatagtgggccgcggcgtatcaggctgcaacaagcccggatataaagctgcaacccatcctgtcgtcgtcagagtaaacgaaaaaccttcgcaaacgggaggcgttcatata

SEQ ID NO: 4121 - DNA, 1520 bp, unidentified
  source 1..1520: mol_type = unassigned DNA; note = element_63357dc
  misc_feature 1..4: note = core
  misc_feature 5..250: note = LE
  misc_feature 251..1492: note = CDS
  misc_feature 1493..1520: note = RE
  misc_feature 42..212: note = bridgeRNA
gtcactagtgcaccctcttccgtgcaggtcccccgatggggcttgtggtaggaactaggcggaagccggggtgacggcctcgtgtggttgcccttcgagggcctcgatgacactgccgcccccggcttccccggaaccgcgaagcgatgacaaagggacgcgccgtagagcgccggttagtgaccactctgctgtcggttccctcgcccccgcctggctcctgccctgaagcacgagcaggaaggcgaatttgttgtcgcagcaggacgggcagttgttcttcgtcgggatcgactgggcctcggccgagcactccgtgtgcgtgctgggccgggacggccgcaaggtcgccgcgttcacgatcgcccacaccgcggccgggttcgcccggctggccgcccggctgggcaagcacgcccgaccgcaggacatgccggtggcgatcgaacgcccggacggacgcctggtcgacgcgctgctggaagccgggcacccggtcatgccggtcaaaccgaacgcgatcaagacctggcgcgagtccgaagtcctctccggcgcgaagtccgaccccggagacgcgcacgtgatcgccgactacctgcgcgtccgcttccgccgcctgcgcccggcggcgccgctgtccggccgcaccaaggcattgcgcgcggtcgtacgcacccgcggcgacctcgtcgccgcccgcgtggccgcggtcaaccagctcgccgctgtgctggacgcgcattggcccggagccaaggcgatcttcgccaaactggaatcgttgatcgcgctcgcgttcctgacccgctgcccgaccgccgcatccgcggcgaggctgaccgaaaaacaactggccgcgttctgcgccaaccacggctattccggcaagaaacccgccgcggtgctgctggcccggctgcgttcggcacccgccggaacgctcgatcctgtcgtgtccgaaggaatccgggacgcggtgctggctcaagtcggcgtgatcaccgcgctcaacaccgcgatcaagaacctggaccgctccatcgccgagaagaccggcgcccaccccgacggcgagatcttccggtccttcccccgcgcgggcaccgtcaacgccgcccagatcctcgccgaatggggcgacgcccgcgaggtcttcgaccaccccgacgccatcgccgcactggccgggatcactcccgtcaccaaagcatccggcaaacaacgcggcgtctcgttccgctgggcctgcaacaaacgcctccgcgtcgccatcaccaccttcgccgacaacagccgccacggcagcccctgggcagccggcatctacaaccgcgcccgagcctccggcaaagaccacccccacgccatccgcgtcctcgcccgcgcctgggttcgggtcatctggcgctgctggcagaacggcacaccctacgacccagccctgcacggcagcgcccgccaaagcacggaacaacaggccgcagcctgattctgatcttggggttgacacaaagggt

SEQ ID NO: 4122 - DNA, 1664 bp, unidentified
  source 1..1664: mol_type = unassigned DNA; note = element_6342641
  misc_feature 1..2: note = core
  misc_feature 3..290: note = LE
  misc_feature 291..1586: note = CDS
  misc_feature 1587..1664: note = RE
atctccattccgccgcctttggctggcggcacaaatagtaatgaaagtgttccaactctctccactgtgctgtaaaatagtttgcaagaagctacactacaaagcacgggaggatgagttgtaataactttcttcgttttagacagcatactaatcagtgtaagttctgccttttcaagcacaaataagtggcatcatgaatccgtacactaagaattgtttaagcctttcgtttaattgtgtggcagttcagtcaatggcttcttatcattcacgaaaggagtctgactatgaaagttacttatcaaacctgttgtggtgtcgatgttcacaaatcttttctcgttgccacaattgtaaaaaccactggtggcattgagccttcttaccaaaagaagcgcttttccacctttaataattcaattcttgaattcaagcaatggcttctcgacaatgattgccatgatgtctgcatggaatccacaggtaaatactgggttcctgtctttaatcttctggaagatgatatcaatgttgtcattgccaatcctaaatgggtaaaggcggtgaaaggcaacaaagatgatacaaaagattctaaatggattggagatttgttccgtcttggacttgtcaaaggcagttatattccttgcaagaaagtccgtattcttagggaatacactcgctatcgttacaagcttgtttcctgccgttcaagtgaaaagaatagatatcagaatgctcttaccgtttgtaatgttgcattagattctgttgtttccgatatctttgggaagtcatccacatccattatcgactatctgcttgaacaatcgggtacatccattaaccacgaagaaatcgcatctaagcttcttaggaggctcaaatccaaagaagatgctgttatagaatccatcgaaggatatcagatgactgatacccaaaaatatcgtatgcgcctcgtccgcgcacatatggattatatcacagctgaaatcagcgatgttgataaaatgatagaaaatatgatttcttctaatcctgattttgaaaatgctgtccagtttctctgtaccattccgggtgtcaaacgtgatagtgcaatcactatcatctccgaaatcggtactgacatgtctcagttctcaagttctaaacgtttgtgttgctgggctggtttaacgccaggcagcaatgagtctgctggtaagaagaagtctgttcggattacacgtgccggtatctacctcaaacctgcattagtacagtgtgctcatgcagccgtaaaatctgacaaatctccttactacaaaaagaaatatgattctcttgtcaaacgccgtggcaagaaaagagccattatcgctattgcccgtatgattcttactgctatctatcagatgctgtctactggtgagcagtggaatccgagcgatctttacaaaatcgatatgcctgtagctcttgttgaaaaacaaaaagcaaaagctatcaagcaagccaagaaactattgcaacgagagggattatttcctcctgatgaaccattagcttctttatttaattttctaactctataacactttaaaaagttgcctgtcttagacagcttattcaagtgcgtcaatttatggtcttcctctactttctttcacact

SEQ ID NO: 4123 - DNA, 1653 bp, unidentified
  source 1..1653: mol_type = unassigned DNA; note = element_6344556
  misc_feature 1: note = core
  misc_feature 2..308: note = LE
  misc_feature 309..1565: note = CDS
  misc_feature 1566..1653: note = RE
aactctcattcctttcgcttcgcttaggcacaaaacagttatgaaatagcaagtttgtgcttccactattttatttttgatgttaaactctcctcagacagatacactacagagcacggaggaggaagtagaatcggttcctccatttgggatcaagtccgcataaaaacatgtgtcggctgtcttctcaagcacaaaccagtgacgccttgagctcgtaacctaatcattgtcaaagcaattccttaggtctttctttgctggacagccagtcaatgtctgtctattttacttaggagggctgttttatgttatctatcaaacactttgtctgctgtggcatggacgttcacaagaaatttgttgtcgctaccattgctctgacagactacaggggcgttacttcttatgttaaaaagcggttcgccaccttcaattccgatcttaattctttgaaaaaatggcttctttctttcaattgcactgagatctgcctcgaatccactggtaaatactggattccaatttttaatatcctggaggattcctgtcacgttgtcgttgctaaccccaagtatgtcagggctatcaaaggacagaaaaccgatgacaaagactccgcctggattgcggatctgtttaaatttgatattgttccttccagttatatcccctgtaaggaaattcgcatgcttcgggaattgttccgataccggcagaaactgattggccaccgcagcagtgagaaaaaccggttacagaatgctcttacggtttccaacattgcccttgcatccgtcctctcagatacctttggaaaatcagcgaccgccatcgttgactatatcctgacctgtgaggtatttgaccccgaatactgtaaatccctgcttcttaaaaaagcaaaggacaaggcagatgatgttgtaacctccataatcggttatgaactgcgccgtgaccaatccgttaagattaaggtctgcagaaagcatttcgatgaaatcaatgagtgcgtctccactctcgaagaaacgatttccgacctggctaaaccttaccataaatttatcgaattggctactacaattcctggaattacagagcagtctgccacctttatcattgctgaaatcggggtggatatggcggtattcaaatcctcaaaacgtttgtgctcctgggctgggctggctcctgaaaataacgaaagtgccggtaaaaagaagagcgtccatgtttcaagagccggggtgtacttaaagcctctgctggttcagtgtgcaaatgctgccatcaagagtaaaaacccttacttcagatacaaatatgaccgtataaaaaaacgtcgtggtcataaacgggcaatcattgccattgcacgcatggtgttgacttgcatttaccacatgttccaaaagcaggaggtatttaatcctgccgatacggattattccgctattcctgaagaaatgtaccggaaatttcaggaacagtatgacagaaatgccatcaaacgtttagagaaacgaggctatatgattactcctcctgctatggcctgataccctttattccataggatcctttggggcggcagtttactggtgctcttgttaagttacgattttttttgattttttctttcaacct

SEQ ID NO: 4124 - DNA, 1577 bp, unidentified
  source 1..1577: mol_type = unassigned DNA; note = element_636a922
  misc_feature 1: note = core
  misc_feature 2..248: note = LE
  misc_feature 249..1448: note = CDS
  misc_feature 1449..1577: note = RE
  misc_feature 6..224: note = bridgeRNA
tcgtattatatggtcagctagtcattgtactggctgacctattttaataggttttatccttgaggtagtcggggtaggacgctggcgcccgtgggacttggatcccgtccgcaatacagtccaccccctccttgtagaagcatgtttgaggctggttgggacgcgatcccgcataacaagcgaagctatgaaactacaagggatgtcaggggcgtaccggcgaatttattaaaggagttttgattactatgaatcctgtcattggcctggatgtcgcaaaagaagaaagccaggtccaagcctttttacaaaggaaaaaaccttataagaaaagttttaaatttgaacaccatctacaaggacttcacgctttttatcagttttataaggaagtggaacaggtttcaggacaacctccggctgtcatctttgaatccacggggcactatcatgagcctgtgcttcaatttctggaggatcaggctataacgtattatttgatcaatccagtggtttcttatgaggccaggaaaacgagtctgcgtaaggtgaaaacggataaaatcgatgccttccatctgggggagttgtattacaaagaagatctggaagtatttcagaggaaaaccgagcaatacctgaatctgcggcaattaaccaggcaacacagcgctttaacagatagctatgttgaaataaaactgcagtttcaggctgctgtggaccatattttcctagaatatcataaggttttcagtaatctttgtggcaagttgtcgttaaacaccttactgcactatccgactgctacggatgttcaaaaagtctcccagcagacattggccgatgagatgcgtcaattcgggacaaggcgttcccatgcatggtttttggataaagcagctcaattaaaggctgcagcgaatcgtaatccctttcaacaccctgtttgttatggtcacgttgtgagcctgcagatgtatattcaaatgctatttcaataccaggaacacctatccaaattacaaaaagaaatagatgccctggctaagacctttgaagactatgacgtggtccaatcggttcctggtatcggagaaaagattggggcaacaatcatctccgaaatcgggggaatcgatcagttcgaacacccaaagcaactggctgcctgtgcgggactagatccgagtgtttttgagtcaggcaaatataaagcatccatcaaccgcatcacgaaaagaggatcatcaagattgcgtcaggccctttatacggctgtacaatgcggtcttgccaaaaaccgaaacaagaaacttatagccttttacaatcgcaaaagaaacgagggcaaaccacacaaggttgctgtgattgcctgtgccaataaactcgttcactggatccatgccatgttagaacgtcaggaagtctttgtagatccttaagttactaaaattatgaacattccgaaaccttatcggttgaacggtaagggtatttggtatgctcaatttttagtgtaacatgtttttttaacttttttagccttgaatgttgacaactattggctggta

SEQ ID NO: 4125 - DNA, 1448 bp, unidentified
  source 1..1448: mol_type = unassigned DNA; note = element_636f38a
  misc_feature 1..3: note = core
  misc_feature 4..237: note = LE
  misc_feature 238..1431: note = CDS
  misc_feature 1432..1448: note = RE
  misc_feature 1..237: note = bridgeRNA
cccgttaccttattcacggtccttcacagaagggctacggtcgccagacccggtatgactccttgcccctgtctctcgcacgatccggggggtggtgtcgccgggtgtggtggcgtcgacggaccgctgatagggacacggccaaccgaaattgtgtaggtctctttgtaacgtgggtgccgggcgtcgatgccggatcggcgaccggccgaccgagacacaagggacgacccctgaatggactcgaactatgcggtgtactgcggcatcgacgtcggcaaaggtgagcaccacgccgtcggactgaccgccgccggaaagaagatctacgacaaggcgttgccgaacgacgaagcgaagctgcgggcggtcttcgaccgcctggccagccacggatcggtgctggtggtcgtcgaccaacccaatacgatcggcgccctgccggtcaccgtggcccgcgtaggcggccacgaggtcggctacctgcccggactggcgatgcgccgcatcgccgacctgtaccccggacaggcgaaaaccgacgcccgagacgcgttcatcatcgccgataccgcccgcaccatgccgcacaccctgcgccgggtcgataccggcgacgaggcgctcgccgagctcgaggtcctcgtcggattcgacgacgaccttgccggtgaggccacccgggtcagcaaccgcatccgaggcctgctcacctccatccacccggccctcgagcgggtcctcggcccccgcataacccatccggcggtcctcgaggtcctctcccgctgcggcgggccggccggaatccggcaggccggcaagcgcaagctcaccgcgatcgcggtcaagcacgcaccccgaatgggcgccaggttggccaccgacatccttgccgccctcgacgagcaggccgtggtggtgcccggcaccacggccgccgaaaccgttctacccaaactggcggattcactgaaagagaccctgttacaacgcaaagcggtcgccgtggacgtggagagggccctcgatgaccaccctctttccccagtcctgacctcgatgcctggcatcggcgtcaggacagcagctcggatcctgatcgaggtcggcgacggctccgccttcccgtccgccggacacctcgccgcgtacgccggtatcgccccggtcactcaccgatcgggctcctcgattcgcggtgaacacccggcgcggtcaggcaaccgcaagctcaaacgtgccctgttcctgtccgcgttcgcggccctgggcgacccgaccagccgcggctactacgaccgcaaacgcgccgagggaaagaaacacaacgcggccctgatctgcctcgcccgacgccgctgcgacgtcctctacgccatgctcaagaacaagaccctctaccaacccccagcaaccgcagccgcttgacgaaaaccatagggaca

SEQ ID NO: 4126 - DNA, 1580 bp, unidentified
  source 1..1580: mol_type = unassigned DNA; note = element_636fb89
  misc_feature 1: note = core
  misc_feature 2..79: note = LE
  misc_feature 80..1144: note = CDS
  misc_feature 1145..1580: note = RE
  misc_feature 1346..1571: note = bridgeRNA
taatggaatggtccggccgtgctcctgccccaccggcgagtgatgctgggatggggcgagtgtcaaacggagcaccgctatgtccaacaaatcaatcgcgaccattgccacgatgggcatcgatatcggtaagaattcgttccacgttatcggcctcgatcggcgcggcgccatcgtgctgcgacagaagtggtcacgcggccaggtggacgcgcggctcgcgaacatgtcgccgtgcctgatcggcatggaggcctgtgttggtgcgcatcacttgagccgcaagctgcaagcgcacggtcacgacgcccggttgatgccggccaaatatgtgaggccgtattcaaaaggacaaaagaacgattatcgcgacgcggaagcaattgccgaggcggtgcagcggccgacaatgaaattcgttgccaccaagacggccgaccagctcgatttgcaggcattgcatcgggtgcgtgaacggttggtcggtcaacgcaccggcatcatcaatcaaattcgcgcctttctgttggagcgcggggttgcggtgcgcaaagggctgggcttcttgcgcaaggaattgcccgccatcctcgccacccgcgttgacgtcctgtcgccgcgcatgatgcgcatcatcgaggacctggcgggagactggcatcggctggacgagcgcatcgaaggcttatccaccgagatcgaaaccttggcccatcaagacccggcctgcgagcggcttatgacggtgcccggcattggaccgatcatctcaagcgcgatggtggcggcgatcggcaatggtgcggtgttcgcgaaggggcgcgacttcggcgcctggcttggactggtgcccaagcaaatctcgaccggagaccgcacgatcctcggcgcgatatcgcggcgcggcaatcgctatctgcgcgtcctgttcgtacaggcggcttgggtcgtgttggtcaggatcaaggactgggaccgctacgggctcaaagcctggatcgatggcgccaagaagagattgcaccacaatgtgctggcgatcgcgctcgccaacaagctcgcacgcatcgcctgggcggttctcaacaaggagcgcaaattcgaggtcacgaggacaactgcgccttcgtcccaacctgcgtaagcgtggcaaccgtgctcggggccatcaaggcgtggcctggagataccgacgctgtggagaggcaagcgcgacggccagccttgacggcccctgcgcgcgatgccccgcacaacgtgcaggccgggacgaaggaacggcctcacggcacgaactaaggaactgacattgatcagagagagagcgatgacatagtccacgttttcttgccgaggtctgcgagaggatgaaacgaaatggaggaccggtcttcccggcgcctgcgaaccctggtgacccaaatggcccattcgagtcggctaatgagaacgcaggcgcgctgatatccatgatggcccggagcacaacacgctccaattagaggccggatacattgatgcaagaccgcaaagccgacagatcgatgaaaacctcttgcgacgcacggccggaccataca

SEQ ID NO: 4127 - DNA, 1407 bp, unidentified
  source 1..1407: mol_type = unassigned DNA; note = element_6382079
  misc_feature 1..2: note = core
  misc_feature 3..79: note = LE
  misc_feature 80..1123: note = CDS
  misc_feature 1124..1407: note = RE
  misc_feature 1123..1394: note = bridgeRNA
tgttggagtggacggcccctgaacggcatcgaaacgtgccaaagtgagtcgttgaggaactcaaacgaaggggtcgtccgtggatcagattatccgtattggcatggatacttcaaagcacgtctttcagctgcatggcgtgaatgccgccgaacaaccggttcttcgcaagaagatgcgccgcaaggagatggtggatttctttgcaaaatgcccgccaaccgtcgttgcgattgaggcctgtggtgcttcgcatcactgggcgcggttgctgagggaactcggtcatgaggtcaagctaatcgcgccgcagctcgtaaagccctacgtcaagcgtggcaagaatgatgcggccgatgctgaagcgctgtgcgaagcgatgagccgtccgacgatgcggttcgttgcggtgaagagcgccgagcaacaagcggcactaatgctggtgggcatgcgcgagcgtgctgtcgccgccaggacgcagcttgccaatacgatccgtggctatgcggccgagttcggactaaccgcggccaaaggtgtgtctcatatcccgctccttttggaacgcatcatggttgatgaaagcgttcctgccttggcgcgcgatctgtttgtgtcattggcggatgaatttgcgcagctgaaggaacgcttgaaagagatagaggcgaatctgttggcttggtatcgcagcaacgaatgttgtcgccgcctcgcaacgatccccggtgtcgggccaatcggtgcgatcttgctggtgatgaaagcgccggcaccggagcagtttgtatcgggaaggcagtttgccgcttggatgggcctgacgcccagagatcactcgacagccggcaaggtcaggcacggtgtcattacgcgagccggcgacgagaccttgcgcaagacattggtcgtgggcgcgacttcgctgcttcgacaggtgagagcaggcaaaggcaggaatgcctcgccctggctcatcgagctgctcaagcgcaaaccgccgaagctcgtggccgtggcgctggccaacaagatcgccaggatcgcctggaaaatgatgatggcaggcgggacgtataaaaacaatgctgcgccaccggctatggcctgcgcggcataacgagattggccagtcacggtgagcaggaaaaaggcgctaccgtgctgagctgatgcgtgaacttgcaagaaatctgaagatggtgtgatcgatcgatccaagacgtaggacactccgtatgtgccaatggcccgatgtggccgtcaccgtgtttggaaccaacgtcgcggaatccatcttggccagcgttcatgtgcgagcgcaccaacaggccggacatatgaacgcaagcgatccgatcaaaatcatcaaggagttcttgtagggagggggccctccacata

SEQ ID NO: 4128 - DNA, 1358 bp, unidentified
  source 1..1358: mol_type = unassigned DNA; note = element_638354a
  misc_feature 1: note = core
  misc_feature 2..294: note = LE
  misc_feature 295..1116: note = CDS
  misc_feature 1117..1358: note = RE
  misc_feature 1126..1352: note = bridgeRNA
taatgggatggtccgcctcgtcctcccgtagcatcatgaggcagtcaaaccaaaggaggttgcaatgcacgacgcaatgtgccgcgcccagcggctgtctagggaattgatattggcaagaacatatttcatgtcgtcggcctcggaaacgatggcgcgccagtccagaaagttcgctttccacgcgacacgctgctgcagttcttcgagcgcgcagcgccgacgattgtggggatggaatcgtgtgcaggatctcagtggatcgctaggaagatacaagcattcggacataaggtgcgcttgatcccggcacaatttgtgaagccctatgtcaaatcgaacaagagcgatatcatcgacgcggaggcgatcgctgaagcagccacgcgaccgacaatgcgatttgctgcaatcaagagcgaggaacaagccgatcttcaggcgttgcaccgagtgcgggaccagatgatcggcacaagaacgcgcctgatcaaccagatgcgagccttctgtctcgaatacggaatcgccctacgccagggcgctggtctgttcaagctcgacctgccactggtcctcgaggaccagtcaaatggcctttcctcggcaatgcgtaagctactcgcagagctgttcaccgatctgcgtctattggagaagcgcattggtgacgtcacacgtgagattgaggcgatcgccagtcgggaggatgcggctcgacggctcatgacgatccccggggtcggagccttgggtgcgactgcgctcctcgccgctattggtaacggtcggcagttccaaaaagcgcgcgatctcgcggcatggctgggctttgtgccgcgcgaatattcgaccggcggcaagcaaaagctactcggcatcagcaagcgaggaaaccggtacgtgcgcaaactcctcgtacatggcgcaaggtcatgctttcggcatctcgaccgaacacgagaccgattggggaactggctggacggccgtcaggctcggatgcacccgaacaaagccgtcgtcgcactcgcagctaagatggcccgaattgtttgggtcgttctgacaaagcctggagcgctctacgaacgcagagaccctgccttcacctgacgatccaagcttgattgcaaggctcgggaatagtgatgacgaaacagtggatcaacatgccgtgagccctgcgcaaaaaagcgggcttcgtgcccgaaccatttattgggaacggcgtgtgcggatctcatcatggcctggctgcaaccgcagcccactcgcgagaggccggatacatttatgcaactgaaatcgtcatttacgatgtcgcgtacccttgcacggacgagacggaccataca

SEQ ID NO: 4129 - DNA, 1556 bp, unidentified
  source 1..1556: mol_type = unassigned DNA; note = element_638586d
  misc_feature 1: note = core
  misc_feature 2..518: note = LE
  misc_feature 519..1442: note = CDS
  misc_feature 1443..1556: note = RE
  misc_feature 1..247: note = bridgeRNA
tgtatgataaatacataaagtacttatctacaaacctccttttacagtttattttatttattattttttgtataatttacttatactgtggactttttatttttacttaaagagcttttgctacttttttaaggagactactgccacactcttttaactcatatacttatagttggataagtttttaaactttcatatatcgcaagaatgtattgttttctaagatgtggattccacagttattaattttttaaggatgtgatcttacgtttttacttggtattgatattgctaaacttaatcatgttgcttcttgtattgattcttccactaatgaagttgttttttctaattttaaattcaaaaatgattttaaaggttttagcgctcttttaaataaaattaaaagtttcgatgctaaaaatcttattattggcttagaatcaacttctcattatggtgaaaatcttattaattttttattcatacatgattttaaagttgcacttattaatcctttgcaaacttcacatctgagaaaagctaatattagagatgctaaaaatgataatctagactctcttaatattgctaaatctttaattgttactaaacttaacttcgtttctaagaagaacattgagtgtttttctctaaaaaaacttactagatttagaagtaatctgattaagcaaagaagtaaagccaaaattcaattaacatctttacttgatttactttttccagaactacaatatctttttaaaagtaaaattcatagcaaagcaatctactctcttcttaaaaaatatccttcagcagaggagatagcagccctaaaagatgatgaaatctctaatcttttatatgcttcttcaaaaggacatttcaaaaaagaaaagtccattgagcttaagagtcttgctaaaaccactgttggtatcaaggatacttcaatctcattacatttaattcagttaatagaattaattgaattatataccaaacaaattaaagatattgaaattaaaataactgatatagttaataatttagacacaacacttctatcagttcctggaataagtgttattgcttgtgccattatattaggtgaaacaaataattttgaaaatttttctagctctaaaaaattacttgcatttgctggtcttgatccaaagataagacaatcaggtaattttaatgcttcatcttgtagaatgtccaaaaaaggttctccatatttaaggtatgctttaatctttactgcttggaatattgttaggcattcagaaaaatttaataaatattattctttaaagcgctcacaaggtaaatcacattacaacgctcttggtcatgttgcgcataaactagtaagaattttatttacattgataaagaaaaacatttcttatcaagaagaaaaattagaatagtatatattagattttaactatatgaaaaatcaagagtttcataactctaattttgttatgccaaaaattcttatttaaaatttttttaaaaagttcttgacttttcatagttgg

SEQ ID NO: 4130 - DNA, 1386 bp, unidentified
  source 1..1386: mol_type = unassigned DNA; note = element_6386c98
  misc_feature 1..2: note = core
  misc_feature 3..87: note = LE
  misc_feature 88..1122: note = CDS
  misc_feature 1123..1386: note = RE
  misc_feature 1155..1372: note = bridgeRNA
gatggagtggatggctcccgctcccggcatctaggtgccaaaattgtggttgctatcaggaaccacgagctaaaggagccatccgccatgacagttaccacggtcggtattgacctcgccaagaacatctttcaagtccacggcatcgatgcgacgggagaggtcgtgcagcgcagatcgttgcgccggcgccaggtcatatccttctttgccaagctggcgccctgcctggtcggcatcgaagcctgcggcaccagccattattgggcgcgtgaattgtctgagctcggtcatgacgtcaagctgatgccgccggcttacgtgaaaccctacgtcaagcggggcaagaccgatgccggcgatgccgaggcgatctgcgaggcggtgacgcggtcgacgatgcggttcgttgccatcaagtcgcccgagcagcaatcgatattggcgctgcaccggacacgggatctgctgatccggcagcgcacccagctggtgaacatgatccgcgcccaactggccgagttcggcattgtcctggccaaaggcatccagcatgcgctccggctcgcaggacagcttgtcgagggcgcggtgccggacattcctccgctagcggtcgaggtgatcgtcaccctggccgagcagttgcgcgatctgcaggtgcggatcggggggctcgataagggtcttaagacgtggtcgcgcgacaacgaggtcgtgaaacgcctgcagaccattccggggatcgggattgttacggcgtcggcgctggcggcctcggttaccgacccgcaccagtttacctccggtcggcagtttgcggcctggctcggtctgacccccagagccaattccagtggcggtagggagcgtatggggcgcatctccaagatgggtgaccggtatctccggcgtctgctcgtgagcgggatgacatcgcagagtcaatcgattcggcgtaacccggacgctcatccctgggtcaccagcctgttgcgaagaaagccggccaagctggtcgctgtcgccatggccaacaaggccgcacggatcgcctgggttgtcatgacccgtgatgagatttaccgcgcgcccaaacctgcaacagagcgggccgcatgacgaattgatcgctcaaaagaagctgagacgatctccaattgcgaggacgatgagacgtgatggcgaaccggacagaccggggatggggacaacccgactaatgtccagggcaagagagcccgcaaagcagaatgggacccgatccgcggataccatcaaggccagcggtcaaagcaccgcgtcaacaggccggacacaagacagtacctgaaccagtcgctatgccgtcaaaaaatccttgcaacgcgggagccatccacacag

SEQ ID NO: 4131 - DNA, 1622 bp, unidentified
  source 1..1622: mol_type = unassigned DNA; note = element_6389e25
  misc_feature 1..3: note = core
  misc_feature 4..251: note = LE
  misc_feature 252..1490: note = CDS
  misc_feature 1491..1622: note = RE
  misc_feature 8..222: note = bridgeRNA
gttcgtaatataaggtagccagatttttctggttgacctttttgtttatggtcttaatattacggtagtcggggtagaacgtcgcacccgtgggactcaatcccgtaagctaaactgttcaccccctacttgtataaacatgtttcaggctggttgggaccatgatcccgtttaacaagcgaacctatgacattacaaggagcattaggggttaccgactaatttgtatttctaggaggaggaaaaatttaatgaatccagtgattggtctggatgtatcaaaaggagaaagtcaggttcaagcgtttttagataaaggtaaaccatatcgtaagagttttagtattactcacgatcttaaaggattaggatgtttattagagttccttcaagatgttgaaaaggctgctggtggtcatcaaccttcggttgttttagaatcaactggtcattatcatattcccgttattcagtttctagaggaacaaaattatgtttatattatcgtcaatcctcttatctctcatagagccaagagctccagccttcgaaaggtaaaaactgatgcaattgatgcttatcacctttgtgaactgttttataaagaggaactagagccttacaagaagcgtggtgttcaactattaaaccttcgtaatctgacaagacaacaagagagtattgcggaaatatcagctaaaacaaagatacagcttcattctttaattgatcaggtttttcctgagtatcgaggtgtatttggaagcctatattcgaaagtatcactccttactttactggagttccctacttctaaggctgtattaagtgtgagtgaaaaagagttaacggataaaatagcttcattatgtatgagtcgttcggagtcatgggcaaaggaaaaggcacagaagttaagagaagcagcccttcgtgatccttttcaaaacaatctctacgatagtcatatttttaaccttgaaatcttggttaagattgttcttcaataccaagagcatctatccaatattgcggatgaaatagatgccctcgctagcgaaatagaagaatatgaaatccttcaatctatccctggagtcggtgaaaaaatcgctgcaacgattatttctgaaatcggagagatagatcggtttaatggtgccaagaagttagttgcattcgctggaatagatcctagtgtctactcttctggaaaatttactgcatcaataaaccgaattaccaaacgtggctcatgtagacttcgccatgccctgtatatggctgttcaaagtggaattcgggatgcccgtaaaaagaaaacgactgatgaaattattccacgcaatagaagactacgagagttttatgacaagaaacgtgaagaaggaaaaccctttagagtagctatcattgcctgtgtaaataagctcttacattggatttacgccttattaaaaaccaaatctactttccaagatatagcttaaaaacaatatctaactaaatacaacaaaaccttccaaaaagagcataacggaaggttatttggcatgaacatttttagtatatcatgagtttattaaactttttattgaaaaatgttgacaaactattagctg

SEQ ID NO: 4132 - DNA, 1359 bp, unidentified
  source 1..1359: mol_type = unassigned DNA; note = element_638a180
  misc_feature 1..2: note = core
  misc_feature 3..76: note = LE
  misc_feature 77..1102: note = CDS
  misc_feature 1103..1359: note = RE
  misc_feature 1078..1346: note = bridgeRNA
tgatggggtggacgcccctcgacggcaccgacgtgccagattggcggtgttgagagccacgagtgggagggtgcctatgacgcaggttgtcaccatcggcctggatctggccaagaacatctttcaggcccatggcgcggatgccgccggtgctgtcgtgttccgaaggaagctgcggcgcgatcaggtcctcaccttctttgccgcgcaggccccgtgtctcgtggcaatggaggcctgcccgggcgcccatcactggggtcgagagatcggcaagctggggcacacggtcaggctgatcgcaccagcctacgtgaagcccttcgtcaagcgacaaaggaacgacgcggcagacgctgaggccatctgcgaggcggcccagcgtccgacgatgcgcttcgtggccgtgaaaagcgaggccaagcaggcctcggcggccatcttccggagcagggacgtgctggtcgcgcaacgcactcaactcatcaacgcgatccgggggcacctgtccgagtacggcctgatcgcgccgcaagggccatcccacgtcgagcgcctcatcgccgagatcgaagatccggcctcgtccgttccgcaggctacccgcacttgtctggtaatgctggtcagcaccctgcgtcacctgcagcatcagatcgcggccttggatgccgagatatccgcccgcgccaaggccgatgacacggcccgacggctgatgagtgtgccaggcatcggtccgctgatcgcgaccgccgtcgaggcgttggcgccgccggcggagacgttcagctcgggccgggacttcgctgcttggatcggcctgacgccggtacagcgctcgacgggtggcaaagagcgtctcggacgcacgtccaggatgggggagcggaccctacgccgcttgctcatcatcggagcgagcggtgtcgtgcgctgggccaagcgcaaggacattgcggccgatacgtggctcggccggatgttggcccgcaagccgaccatgctggtcattgtggcgctggccaacaagattgcacgtgttgcatgggcactgctgacgaagggcggaatctaccgagctccggtcgtctccgcataggcggagcggacgcgaggccgtcggaggtgtgatgggtcaaaggacaggtatggcgcaacgtcggtaaggcggggtcgggagaaccaggcccacggggagcgcttcgagcgcgttccagtgatgtggacccgaccctcgcactcccatacgggcccgcggcatgtgatggccgcatcagaggccggacacatggcagcacccgatcatgcgcagcgccgatccaacagatcccttgcacccgcgggggcgtccacaca

SEQ ID NO: 4133 - DNA, 1391 bp, unidentified
  source 1..1391: mol_type = unassigned DNA; note = element_638ba0b
  misc_feature 1..2: note = core
  misc_feature 3..83: note = LE
  misc_feature 84..1121: note = CDS
  misc_feature 1122..1391: note = RE
  misc_feature 1121..1379: note = bridgeRNA
tgatgtggtggaacggcccgctccgacagcatcaaagtgctaacgtggtcgttgttgcaaacgccacaaggagggaccgttccgtgaaagaagttaccactattgggctggacttggccaaacaggtttttcaggttcatggcgtcgatgctgatggcgcaccactgttcaaccgaaagctgcgacgcgcagaagttttgcgcttctttgaaagactgccgccgtgcctagtcgggattgaggcatgcgcgagcgcgcactactgggcgcgggagatctcagttttccgccatgacgttaaactgctaccgcctcaatatgtgaagccgttcgtcaagcgcggcaagaccgatgccgccgatgcggaggccatcagcgaggcggtgacgcggaagaccatgcgcttcgtgccggtcaagacggctgagcagcaagctgcggtgatggttctgaaaacgcgcgccctgcacgtgcgccagagaacccaggcaatcaatgccctgcgtgcccatatgggcgaactgggcatcatcgctccaaccggcatcgccaacgtcaaggccctggcagccatcattcgggatgaggatgatgcgcgactacctcccgccgcgcgcttcgccctcaccgaaatcgtcgatcaaatcgaaatgcttgccgcgcggattgacaagctcgaacgtgaaattgtcgtgcaagctcgtcgagacgacgatatgcggcgccttacgacaatccccggcgtcggagccatcatcgcaaccgccgtcaaggcgttcgttcccgatcccgctggcttcaaatcagcgcgccactttgctgcatggataggattgaccccgaaagcccattcgagcggaggtaaagaacggcttggtcaaatatcgaaaatgggcaatcgggacttgcgatcattgctaacgaccggagcagcatctgtgcttcgccatgttcgatatcatgacagagtatggccctggttgaagggcatgctgggccgacggccatttaaggtggtggcagtcgctctcgccaacaagatcgcccggatgatctgggcgttgctgaacaaaggtggagtatatcgcaatcctattacggcggattcagctcctgcataggtcgcagccgccgacacgagctgcccggcaactgccggcatgagcgaggtgcacaacagacgatgaaccacgggacgaaatcccgaaacaggccaggccgaaacccgtgacgcgcacaaagcgcgcccccttgatccagccacctgcttcgcggacttcatcgaggccagcggtcaaccaccgcgcaagtaggccggacatatgaccgcaccgtcctcatgtggtgaaatcgactgaaatgtatccttgcaccgcgggccgttccacata

SEQ ID NO: 4134 - DNA, 1481 bp, unidentified
  source 1..1481: mol_type = unassigned DNA; note = element_638dcdf
  misc_feature 1..2: note = core
  misc_feature 3..237: note = LE
  misc_feature 238..1461: note = CDS
  misc_feature 1462..1481: note = RE
  misc_feature 14..234: note = bridgeRNA
ctaatcagttctgggagtgagccgtcgggcacactcctggttggtagccgaccggtaggtgagcactcgtaggtcctggacgtgtgagtcctgctgaaagaccgtgcccctgccggtgggtcgggagagttgatcgctgctgggatgtcgtgcccacccgtggtgtgagcactgcttgattaggtcgctgatggttctcccgccggctgcgcatggtgatcgagagcgggaggatcgttgcgactgttcgtaggggatgactgggctgaggagcatcacgacgtcgagctgatggacaacgccggtcgccggttggccaaggcccgcctgcccgagggtgtggcgggcatggcccgtttgcacacgatgatcggtgctcaattcggtgaggacgctgaggatgcggaggtgctggtcgggatcgagactgaccgggggccgtgggtggcggcgctggtcgccgccgggtacacggtgatggcggtcaacccgttgcaggccgcgaggttccgtgaccggctgggggtgtcgggcgcgaaaagcgacgccggcgacgcccacgtgctcgcggacatggttcgcacgcatgcccacgagctgcggccggtcgccggtgactccgaccaggccgaggcggtcaaggtagtggcccgcacccacaaaacgctgatctgggaacggacccgccacactcagcggctgcggcacgcgctgcgtgactacttccccgccgcgctggaagcgttcgacgacctggacgccgccgacaccctggaactgctggccaaagcccccaccccggaacaagccgcccggctgacggtcgcccagatcaacggcgcgctgaaacgagcgcgccgccgcaatatcgcggagaaagcggcggcgatccaggccacgttgcgctccgaccagctcggtcagcccgaggtcgtcgccgccgcctacgcctcctccatccaggcgctgatcgcggtcctgaccgtgttgaacactcaggtcaagaccctgcaagggcaggtcgaggcccattttgggcagcacccggccgctgagatcatcgcctcccagcccggtctgggaccggtgctcggcgcccgggtgctcgcagagttcggcgacgaccccgaccgctacgccaccgccaaagcccgcaaaaattacgcgggcacctccccgatcacccgcgcctccggcagaaagaaggtcgccctggcccggttcgtgcacaacgaccggctcatcgacgccctgatggctcaggcgcaaagcgcgttgctgcactcgccaggcgcccgcgcctactacgaccggcagaaagcccgcggcaccggtcacaacgccgccctgcgccaactcgccaaccgactcgtcggcatcctccacggctgcctcaaaaccagcaccccctacgacgagacgaccgcctggtcgcaccacgccgagaacatcgcagcttgacatgtcagctcctgggatgt

SEQ ID NO: 4135 - DNA, 1311 bp, unidentified
  source 1..1311: mol_type = unassigned DNA; note = element_6393d25
  misc_feature 1: note = core
  misc_feature 2..240: note = LE
  misc_feature 241..1296: note = CDS
  misc_feature 1297..1311: note = RE
  misc_feature 4..227: note = bridgeRNA
cagtgaggatggtggggtgggtcgccgggctggtctgactcaccggcagaccgacgattgctgtcctcatcccgattcgtcggccagcccggtggccccagcagctgcatgtcaccggtcaggcgccgtgacctgataggagcctgtgcgagaggcgcccaccactgtgttgtccgatcgtctgaccagtgacgtgtccacagattctcgacgcagacgagaaaggcggacctcaccagcatggcagccagaaagcgatcagttatcggtggtgtcgacacccaccgcgacacgcaccacgccgccgtcatcgacagcaccggcgggctcctggccgacgccgagttccccgcgaccaccgccggctacacggatctgctggcctggatgcgctcgttcgggcgggtcacggccgtgggcgtggagggcaccggcagctatggcgctggcctggcccgctatctgaccagcaagaagatcactgtcagggaagtggaccggcccgatcgccgcgcccgccgcgcccagggcaagtccgacccgatcgacgccatcgccgccgcccgggccaccctcgccggcaccgccatgggcaccccgaaaacccgcaccggaccggttgaggccatccgcgccctgcgggtcgcccgccgaggagcggtcaaggctcggaccgccgccctgaatcagatgcgcggcctggtcgccgccgcccccgaacccctgcgagcgcagctgaccaagctcagcgctgccgtgctggtcagccggtgcgctgcgctgacctacaacccggccaaacttcacgagccggaacacgccaccgccgccgcgctggccggactcgcccgccgggtcaccgccctcaccgacgagatcaccaccctcgaccggcaggtggcacccatcgtccagaaagcggcaccccgcaccacggccttgttcggcgtcggccccgaggtcgccgcccagctgctcaccaccgccggcgacaaccccgaccggctgcactccgaagccgccctcgcccacctctgcggcgcagcacccatccccgccagttcaggacgggtgcgccgccaccgcctccaccggggaggtgaccgcggcgccaaccacgccctgcacaccatcgcgctgtgccgcatgcgctacgaccagcgaacacaggcttacgtccaccgccgcatcaccgaaggcctcagcaagcaggagatcctccgctgcctcaagcgctacatcgtccgcgacgtctacaccgccctgctcgccgacttcatcgccctgaccacttgacctccataggagcat

SEQ ID NO: 4136 - DNA, 1415 bp, unidentified
  source 1..1415: mol_type = unassigned DNA; note = element_6393fc0
  misc_feature 1: note = core
  misc_feature 2..63: note = LE
  misc_feature 64..1098: note = CDS
  misc_feature 1099..1415: note = RE
  misc_feature 1182..1406: note = bridgeRNA
taatgagatggtccgccgccgagtaggatttggctcggcagtttacatcaggaggatcatcccatgaacatcgcatccatcggcatcgatctcggcaagaccacctttcacctggttgcattgggagagcgcaacaagattctgctgcgcaggaaattctcacgctcgcaattgctggcctacaccgccaatctgcccgcatcgttaatcggtctagaggcatgcgcgggatcgcacttcatcggtactgtgttgcgcgagcaaggacatcaggtacgactcatcccggcgcagtttgtgaagccgtaccgcaagtcgaacaagaacgacttcatcgatgcggaagcgatcgccgaagccgtgaccaagcagaacatgcgttttgtgcaaatcaaaacgcaggagcaactcgattggcaggccatgcaccgcgtgcgcgaccgactgatgcagcgtcgcacggcgctgatcaacgagatccgcggattcctgctggaacgcggcctcaccttcgcggcacggcccatctacctgcgcaagaacctaccaaccgtgattgaagatgccgagcagaacctgaccccgcgcctgcgctggctgctggatcggctgtggcaggagtggaaacagaccgagatcgacatcaagaccgtcacggacgaactggagcgcattagtaaggaggatgcgcgttgccagcgtctcctgcagatccccggctttggcccgctggtctccaccgcaaccgtggccgccatcggcaacggagccgcttttcgccggggacgtgacttcgcggcctgggtgggcgtggtgccacggcagtactccaccgggggcaagcagaagctgttcggcatcagcaagcgcggcaacatctatctacgtcgcatgctgatccacggtgcccgcgcggtactgctgcgcgttaagtacgacaccggaggattcgggcagtgggtgcatcggctggctcagcgtgctccgcgcaacaaagtcgtggtcgcgatcgccaacaagctggctcgcatggcctgggctgtgttgtccagcggccaacagtatcgacatcagccgctgcaactggcagccgcttgatggccgtggaaaagacgctacgcttggaaagcaaagaacgctttccactttcccaccgccacgacgacggatgttagaccgagttctaccaaggtctgctgaggagagaaggagacgaaagaacagtccaacggcgtgccggaaaacctggacactcaaacgcgtccctggtgaccgagggatttaaaaggaccggcacgtgcggatcatcatcaagtgcccggagagcgattctccactaagaggccggatacatttacgcagactgtcccttcgcccaacttcaaacctcttgcagtccggcggcggaccataca

SEQ ID NO: 4137 - DNA, 1100 bp, unidentified
  source 1..1100: mol_type = unassigned DNA; note = element_639892f
  misc_feature 1..2: note = core
  misc_feature 3..161: note = LE
  misc_feature 162..1085: note = CDS
  misc_feature 1086..1100: note = RE
  misc_feature 1..156: note = bridgeRNA
cctgtctgttgaaaatgtgtcattgtgtctgtgcggaggagagcccgtcccccccgtgggcccaatcccgaacgagagcaggggcctcctccgcttggtcatcaacctgaacagttgcttgggccgcttgagcccgcatgacatggacaggagcttataccatgccacagatcatcgttggctgcgacctctctcgcgccttcctcgacatttgtattgatgccggaaaaacaacatcgaggatcgaaaataccacagccggcatagccaaatgggcagatacactcgcgacgggcgcgcttgtcgtcttcgaagcgacaagcggttgcgatggcatcctgatggacgtcctggcggagcggcatatcccttattcgcgcgtcaatccaagacaggcgcgagaattcgcacgtgcgcttggcgtccttgcaaagacagaccgcgtcgatgccagagttcttgcccagatgggacaacgcctgccactgcctgttactcagccgcaggagcccatgagaaagagattggctgatttcctgcgccgtcgcaaacagttagtcgaagcgcgcaaggccgaaaaactgcgtcgtcatagtgcaggccagcctgaactactgcgcgatatcgacacaatgatcgtcatccttaaccggcgcattgacaagctcgacggacagataaaggcgatcatcaaacaaagccgggaactcacagagcaagccaacttgcttacagctgtgcctggtatcggtcctaccgttctcgctaccttgcttggtgaactgcccgaacttggcacacttgaccgacgacaaatcgcgtcactggcaggtcttgcgccgcatgcacgcgaaagcgggacgtggaaaggcgcacggcggatatggggcgggcggcgtaaggttcgtgaagtcctttatattgctgcgctcaccgcaacacggcgcgtgcccgctcttgtcaaaatgcgacagcgattgatcgcggctggcaaagcaccaaaaaccgctctcatcgctgtcgcaagacaactgcttgtgattatcaacgccatgatccgagacaaacaacctattaggctatgatggagaacacagttg

SEQ ID NO: 4138 - DNA, 1389 bp, unidentified
  source 1..1389: mol_type = unassigned DNA; note = element_639b6b7
  misc_feature 1..2: note = core
  misc_feature 3..7: note = LE
  misc_feature 8..1120: note = CDS
  misc_feature 1121..1389: note = RE
  misc_feature 1088..1375: note = bridgeRNA
agatggggtggttgccgccctccccaagcggcatcgcgatgtgccaaaagacgtggtgtatcagccacaaaacggagaggacggcaaagtgaaagatacgatgatcggggtggatctggcgaagaatgtatttcagctccacggcgcatcgatgacggggcatttgaagtttcgaaagaagctctctcggcctcagtttcgtaagtttatggctgcgcagccgtcggcagtggtcgtcatggaagcctgcggcagcgctcatcattgggcacgggagatgagaaagctcggccacgaagtgaaactgatcgccccgcaatatgtgaagcctttcgtgaagcgccagaagaatgatgcggccgacgccgaggcgattgttatcgcggcacagcggcccgaaatgcgcttcgtcgagccgaaatcggagaaacagcaggcgcgggcggtgttgtttcgggctcgacagcgcctggttaatcagcgcaccgagcttgtgaacgcactgcgcgccgttctgtacgaatatggccgcatcgttccgcaagggatacgccagctcaatggcatcaggaggctcctcgatgagccgaatagcgatttgcccgggctcgtccgccaggaatgtcacgacttgatcaatcagattgctcagaagaccgcgcggattgaggccaagacagatcaactcaaaaagctcgcggcggaaagcggaacggcacgacggctgcaaaccatgcctggggttggctcattaactgcgctggcgattgaggcattcgcacccgacatgtccagctttaaacgtggtcgcgacttcgcggcttggctcggtctcgtcccacgacagcactcctctgccggtaaggagcgcctcgggcgcgtttcgaagacgggacagtccgacattcgccgattgctgatcatcggagcaatgtcacgattgaattggctcggccgcaaatcgatcatcaaaggatcttggctggcgcagatgctggccagaaagccgcgaatgctcgtagcaatcgctctcgcaaacaaaatggcgcgagcgctttgggcgatgctcaccaagaatgagaattatcggaatccgacgttggccgccgtggctgcatgattaagctgcagcaggcagtctgacgtcggagcggtgtgagaagacgacgaaccgaatgggcgtaacgatcgaagagatctggatcaggacaaccagctagagccaacgagccgacgcgctcggagatgagatttggacctggtccgcggatcaccataccggccagcggcttctgaaatcgccgcaagaaaaggcctgacagaagaccgcactcgatcacacgtcaaaaagggtcagaaacttcttgcataacgggcggcaaccacaga

SEQ ID NO: 4139 - DNA, 1274 bp, unidentified
  source 1..1274: mol_type = unassigned DNA; note = element_639ed83
  misc_feature 1: note = core
  misc_feature 2..189: note = LE
  misc_feature 190..1152: note = CDS
  misc_feature 1153..1274: note = RE
  misc_feature 30..196: note = bridgeRNA
ttgtatgtcgggaaagcagcattctgaggggcgacgggggttcggtcatgaccgtctccccgtcgcgaccggaagcccgcaggcgcttcggatcttaaaccgcgaatgagcttggcgctccagtcgcttcttccatacccgaacagttgcgagggcgcgagcccgcatcagcaaggaagggatacgaagatgctctcgttttgcggaatcgacgtgtcgaaggatcgtctggacgtgatggtgttgcccgacgagtactcctcttcggtgccgaacgacccagccggctgggcgatattggtcgagcagctgcgcggcttctcgatcacagcgatcggcatcgaggctagcggcggctacgagcgtggggccgtgcgctcgttgcaagcagccggcatgcccgtgcgccaagtcaatcctttcaagctgcggcagttcgccaaggcgagcggggtcctggccaagaacgatccgctcgacgcccgaatgatcgcctcgttcgtcggcatcatgccgacgcgtccagcgcagcggacgacgccggtagcggagcagcttgtcgagatgctggttgttcgccgccagctcagcgctgagaaaatcgccgctgagaatgcctccagactgctggaagacccgatgttgcagcgtctttctcggcgccgtatcgggaggctcgccggcgacattgagctgctcgacaagcgtttggtcgagatcgtggcaaccgatgccacgctcgcgcatcgataccgactgctcacgtcgatgcccggagtgggaccggtcctggcctgcacgttgattgcgctcttgcccgagctcggcggcatgagccgcaaacaggtcgctgctctggtcggtgttgcgccttacgccttcgagagcggcacgctcaagggcagacgctgtatctggggcggtcgtgcaaacgtccgccaggtgctctacatggccgcgatgagcgccagcaattggaatcctgcgctcaaactctttcacgatcgtctgaaaggcgccggcaaattgccgaaggtcgtgatcgtggcggtgatgcgcaagatgatcacgacacttaatgcgatggttcgcgacgacatcgcttgggccgaccgtcttagtggtcggcacagcgtgacgaccgcccggtagccgttgcgctgatcgattgggccgagtcaaggccgtagccgcgcgcagcgcgggggtgcgaagcgccagccttgacgcggtcaaatcgatcagcgatctccctgcgacaaggtgacagttgc

SEQ ID NO: 4140 - DNA, 1504 bp, unidentified
  source 1..1504: mol_type = unassigned DNA; note = element_63a54bb
  misc_feature 1: note = core
  misc_feature 2..121: note = LE
  misc_feature 122..1138: note = CDS
  misc_feature 1139..1504: note = RE
  misc_feature 1168..1471: note = bridgeRNA
gaatgaaagggacttccccgtcccaagcaagccgcgcccggtgagggttgcggttgacggcaacaaagtgccacgatggagaggcgaatcgtttcatcaacttgctctgagaggggaaatcatgactatcgtaaccgtaggaatcgatctggcgaagaacgtctttgctgtgcatggtgtggacgagacaggcaagcctgcactggtgcgccccgaagtcgcgcgtgccaaactgctcgaattcatcgccaacttgccgcgctgcctgatcggcatggaggcgtgctccggcgcccaccactgggcgcgcgagtttgccaagttcggccacactgtgcgcctcatggcgccgaagttcgtcacgccctatcgcatgagcggcaaacgcggcaagaacgacgccgccgacgccgcagcgatctgcgaggctgtcacccggcccaacatgcgcttcgttccggtcaaggacatcgagcagcagtcacgcctgttcgtgcaccgcgcccgccagggctacgtggagcagcgcaccgcgctcatcaaccgcattcgtggcctgctctcggagctgggtatcgtgctgccgctcaaagcggccaccgtgcgccgcgaagcccacaaacacctggaagacctgccgggctggtgcaacaccgttgtgggtgatgccttgagcgagctcacccacatggacgaacgcatcaaccagtacgacaagtacatcgcccaggccgccaatgagaacgagcaatccagacagcttatgcgcctgtgcggtattggtcccacgacagccagtgccattgtggccacggtgggcaagggtcacgactttgcctgtggtcgccaattctgtgcctggctgggtttggtgccaggacagtacagctcgggtggcaagcagcgcctgggacgcatcaccaaggcgggagacccgtacctgcgcaccttgctgatcatgggcgccaaggcggttttgaacgcggccaagaacaagaccgacccggtgagtcgctgggcgatccagatccagcagcgccggggctactggaaggcggtggtagcggtcgcggccaagaacgccaggatgtgctgggccatgctgcagctcggggatgcattcaagctgccggcatgaagttgaaatcggaaacgcaagaatttgtagacgtcaccgtgtgatgggaagtcgttgatgggtaaaaggttgggacctgcgctggggaatgctcgtttagctcaaggaggtcaacaggacagcaatgccctgagcctcgactaacgaatggagcccccggcgcgcgtctttcatcagggtccgcaagaattgaacttgcaacaatgaccgtttgtagtttcgccgtccacatgcctttgaccgaacaggcaacgaccgatagcagcactgtgatgagatgaaagagaagacagattccgtggtcaatcgctggtgcgattcaaccacggtgggattcggtttgacaaaggtggggaagcccttgta

SEQ ID NO: 4141 - DNA, 1395 bp, unidentified
  source 1..1395: mol_type = unassigned DNA; note = element_63a7a2f
  misc_feature 1..3: note = core
  misc_feature 4..86: note = LE
  misc_feature 87..1121: note = CDS
  misc_feature 1122..1395: note = RE
  misc_feature 1127..1375: note = bridgeRNA
tgatggggtggacggcccctgctcagcggcatcggagtgccatagcgtggtcgttggttagaacgccacatagagaggagccgtccatggataagattagcacgatcgggttggacctcgcgaagcatgtgttccaggcgcacggggtcgatgagtgcggcgtcgtcgcggtgcgcaaacggttgcgccgtggcgaagtgatggaatttttcggtgggctcgcgccctgcgtggtcgggatcgaggcgtgcgggagcgcccattattgggcgcgcgagattgcggcattggggcatcgggtcaagctgatgccgccagcctacgtgaagccgtacgtgaagcgcggcaagaacgacgcggccgacgcggaagccatctgcgaggcggtgatgcggccgacgatgcgcttcgtgccggtcaagagcgcacaacagcaggcgagtggcatggtctacaaagtgcgtgaactgctggttcggcagcgcacacagacggtcaacgccctgcgcagccatctggcggagatggggatcgttgcggcgcaaggaggcggcaagctcgtcgggttgattgccgtggtgcgcgaggccggcgatgcccgtctgcccgaggcggcgcgtctggcgcttgaggatttggccggacagatcgaagcgctggacgcgcgcttggcgcgcctcgacgacgagattgtcgcccaggtgcgggcgagcgaagccgggcgccggctcaccggcattcccggcgtcggaccaattacagcgggtgcattgcttgcgatggtgcccgacccggccgggttccgctcggcgcggcactttgcaacctggctgggcttggcgccgcgacagaactccagcggaggcaagcagcggttgggtagaatcagcaaacagggcaatcgctatctgcgcacactgctgatcctgggcgcggcgaacgtgctacggttcatgcgcaagaacatggccatttcggcgtggctcgcagccttgcgggagcgtcggccgttcaaggtcgcggcggtagcgctcgcccacaagatggcgcgcatcgtctgggccttgatggtcaagggcggagtttatcgtgcgaccgttccggccgcagccacgagctgatcgaagagctgatcggcggggcttaagccgcgccgccgaccggggcaaggtgctgcaaacgacgcgatgagaacagggtcgaagatccgatgcgagaaagcctgaaattttcaacgcgcttcgagcgcgcctgtttgatccggctcccgcaccgcgaacttcatcgaggccagcggcccatgccggctgcaatgaaggccggacacatgaacgctaccgaaccctcgacaaaaaacgtccaacagcaccttgatccgcaggggccgtccacaca

SEQ ID NO: 4142 - DNA, 1462 bp, unidentified
  source 1..1462: mol_type = unassigned DNA; note = element_63a9469
  misc_feature 1..4: note = core
  misc_feature 5..160: note = LE
  misc_feature 161..1207: note = CDS
  misc_feature 1208..1462: note = RE
  misc_feature 1232..1461: note = bridgeRNA
agaatgaaatggacgcctcccaccagtaccagaagaaagatggatagcagagagtgtgtaaaggcaagtgcggagggtggaccctcgcgggccaacggcgtcagaagcgcctaaagtgaaagtctgaagagctttcaaggctaaccggagggtccacatcatgaatgctactcgcaaaacggtggtcggtgtcgataccgccaaaaacgtgtttcaggtgtacaccgtggaacgggagactggcgaggtgatcaacaagcagctcaagcgcgcgcaattcctgcagtggtttgccaaccgtgccccgtgtctgattgggatggaagcgtgcggcggctcccagcactgggcgcgcaagctccaggagctggggcacgaagtcaagctgatgagcggaaagatggtcaaggctttcgtctgtggaaacaagaacgatgcggccgatgcgcgtgggatctacatggcggcgcagcagccggaagtgaaagccgttgcggtcaaaagcgagggccagcaggcggtgctggcgatgcaccggatccgccagcagctggtgaagatgcgtacggcacagaggaacgagttgcgcggtctgttgggagaatacggcgaagtcttcggtacgggcagaaaggctttcgaagtcggcctgaaagcggcactcgaacgattggcagagcgattgccgacgccactgatcgacacgttgcgcgaccagtggaacgaactggcgcggttggatgagcgcatcgctcgcatcgagaaatcgttgctggcatggctgcgccaggaccgtgccgccaaggccatcgccgcgattcccggtgtcggcttgctgaccgctacggcggcggtggccaccatgggagatgcgaaggccttccggtctggccgtgagtttgcggcatttgtcggacttatcccaagccagaccgggagtggaggcaaggtccggttactgggcatcagcaagcgcggcgacacttacctgcgcaccctgctgatacatggtgcacgggcggtgcttcaacacgctaagacacccggtccgtggctcaagcagattagcgcgcgccggccacccaacgtggtgatcgtggcgctggccaataagatcgcgcgtacgatttgggcggtattggctcacgagcgtgcgtatgacagggaccacgtcagcttgcagccgcttgcggcggcagccacgtgaaagacaactcaacttacgaaaggatggcacgtcaccagttgcgttaggtattgacagtgatgacagacaggtcagacctggatccaccaaacctgaatcatttctagggctgaaagcccgttaggagaatgaggcgtggatcagcggatttcatcggggccagcggcgttgccgtgcacaaggtcggatatagaactgcgactttcctcgtctgcacagagctgaaaataccttgcaaaagggaggcgtccatat

SEQ ID NO: 4143 - DNA, 1351 bp, unidentified
  source 1..1351: mol_type = unassigned DNA; note = element_63aa017
  misc_feature 1: note = core
  misc_feature 2..61: note = LE
  misc_feature 62..1114: note = CDS
  misc_feature 1115..1351: note = RE
  misc_feature 1124..1345: note = bridgeRNA
taatgggatgacccgccctgccgctcgacccaggatagggcggatcaacgaggaggacgcaatgagcatacgcaacaaacccagacctgcgatggtcttcgggatcgatatcggcaagaacctgttccacaccgtcgggctggatgcggccggcaatctcgtccagaaggtggcgttccgcagagagacactgcttcagttcttcgagcgagcgaagcccaccttggttgggatggaagcctgtccagggtcgcaatggctggcgcggaagctcagcgccatggggcatacagtcaggataatgcccgcccagtttgtgaagccctatgtcaaatcgaacaagagcgacatcatcgatgcggcagccatcgccgaagccgttaccaggccgaccatgcgcttcgtcgagatgagatcgaccgatcaagtcgacctccaggctcttcaccgcgttcgggacaggcttgtcgctcatcgcacccggctgatcagccagatgcgagccttttgtctggaatacggcattgccatccaccagggcgccggcaagttcaaagccgatcttcccagagttttgagcgatgaggggaacgaccttacgccggcgatgcggcggattctggtgacagtgttcgatgagctgcgggagctcgagcttcgtctctccgccctcaatcgggagatcgatgccattgcagcgagaagcgatacagcccggcgtctcatgacaatcccgggcatcggaccccttgccgccaccgcgctgttggcggccgcaggttcaggccgccagttcggcaaagcccgcgatatggcggcatggctcggcctcgtgccacgagagcactcaaccggcggcaagacaaccttgctggccatcagcaggcgcggaaacaaatatctgcgtcgaatgctgtgccacggagcgcgatcctgtgtcgtacatctcgatcgttctcgcgatcggatcggggcctggctggataggctgggagcccggatgcacaccaacaaggttacggtggccatggccgcgaagatggctcgcattgcctgggtcgttctcacacaccctggtgccatgtacgagcggcgggatccggctcttagctgacctgccgcactagactgcgaggttcgaaagagtgatgacgaagcagttgaacggcgtgtcgtaagccctggcaaaaaagcgggctcttgagcccgtagcatttaattgggaacgatacgcgcggatctcatcatggcctggccgcaacagcggcccacttgcgagaggccggatacatttgtgcagactgtgccgtcaccacgagaagaaccttgcacaggcagggcgggtcataca

SEQ ID NO: 4144 - DNA, 1496 bp, unidentified
  source 1..1496: mol_type = unassigned DNA; note = element_63aac9c
  misc_feature 1..2: note = core
  misc_feature 3..239: note = LE
  misc_feature 240..1475: note = CDS
  misc_feature 1476..1496: note = RE
  misc_feature 7..227: note = bridgeRNA
ctaatgggagccggccgggtcctgtaggacttggttctgagccgccggccggtgagcactttcgtcgacagggaccgttggatctctgggctcagaacgtgctccggctggttggtgagggctgctcggagcaccagtgggatgtcgtgccacagagcactgatccattagtccgcgcggagcgctcttcggctcgagtccatgatccccgagaccagaacggtgaggtgcaacttgacgtgatcttcgtcggagacgactgggctgaggcccatcacgatgtgtacgtgtgcgatgaggccggcgggaagatccttgcccgccggctgcccgagggcatcgagggggtgacggcgctgcaccaactgcttgccgagcaggtcgacgatcctgccgaagtggtcgtcgggatcgagaccgaccggggcttgtgggtgcagtcgctcgtggaggccggctaccaggtgtacgcgatcaacccgcgggcggcatcgcgctaccgggaccggcacacggtgtcgggcgcgaagtccgaccctggtgacgccaagctgctcgccgagctggtccgcaccgatcggcacaaccaccgccaagtcgctggcgacagtgacctcgctgagggtgtcaaggtgctggcccgggcgcatcagaacttgatctgggaccggacccgcgccacgaaccggctccgttgctcgctgcgcgagtactttcccgccgcgctcgccaccttcaacgagctggccgatcgcgacacgcttgccgtgctcgccaaggcgccgacgcccgccgaggccaaggccctgccgttgggaaaggtccgctcggcgctcaaggccggtggccgtcagcgcaacatcgatacccgggcccgccagatcgtcgatggcttgcgcgtcgatgagctcgcagcacaaccagcggtcacctcggccttcgccgctaccacccgaaccgccatcgcgatcatcaccgagctcaacacgcagatcgctgcgctcgagaccgagctggccgaccattttgaacagcacccggacgccgacatctacctctcccagccaggaatcggtgtcatcctcggcgcccgggcgctcggcgagttcggggacgacccgaaccgctatgccgacgccaagtctcgcaagaactacgccggcacgtcacccatcacccgcgcatccggcaaccgccacgttgccctggcccgattcatccgcaaccgacgcctcgccgacgccatcgaccagtgggcgttctgctcgctgagcacgagtcccggcgcccgcgcctactacgaccaccaacgcgacaagggcctctcccaccacaaggcactccgcgcgctcgcaaaccgcctcgtcggcatcctccacggctgcctccaccacggcaccagctacgacgaacacaccgcctgggcccaccgccccgagaacaccctcaccaagaagatccccaatgccgcttgacagctaccacccctgggatgt

SEQ ID NO: 4145 - DNA, 1367 bp, unidentified
  source 1..1367: mol_type = unassigned DNA; note = element_63b3ce4
  misc_feature 1..2: note = core
  misc_feature 3..78: note = LE
  misc_feature 79..1104: note = CDS
  misc_feature 1105..1367: note = RE
  misc_feature 1135..1364: note = bridgeRNA
ttaatgggatggtcagcctgaccgaaacagcccgatcagcttacgctgatcgggctgtttcctttttgggagatcgtcatggacactgtgtcattgatcggaatcgatcttggcaagcattgcttccatctgcacgcgcaggatgcgtcgggccgattggtgttccgcaagaagctcacgcgcggccagatgctgacgttgctgggtaacagcccccgctgcacggtcgtgatggaggcgtgcgccggagcacactgggttgcacgacggattcagtctttcgggcatgaagccaagctgatttctccccagttcgtcaaacccttcctgaccggcaacaagaacgacttcgccgatgcccaggcgatctgcgaggcggcatcgcgtccgagcatgcgtttcgtcagtgcgcacaacgagacacagcagaccctctcggcgctgcaccgcgtgcgcgaggggttggtgcgcgaccgcaccggcacggtcaaccagatccatgcgtttctgctggagttcggcgtgagccttcccaaaggggctgccgtcatccgccggctgccggcggtgctcgccaaacacgagttgccgccacggctggtcgcgctgctcgagcggctgcatgcccacttcaagtacctggatgaacagattgatcagctggaacgcgagttgcagctgcaactccgggaggacgagcgcagccagcgactgctggagattccgggcatcggcccaatcacggccagcgtactcacaactgaattgggcgatacccggcagttcgcgtcagcgcgccagtttgcggcgtcgatcgggttggttccacgccaatacagtaccggcggcaagccaacgttactgggaatcagcaagcggggagacaagaatctgagacgtttgctggtgcagtgcgcgcgtaccatcatgcaacacgtcgagcggcgcagcgaccggttgggggtgtgggtccgcagcctgttgagccggcggcatggcaacgtcgtggcctgcgcactggccaataaattggcgaggatcgcctgggccatcctcgccagagggacgcgctaccaaggcgaacaggctgttgccgcagcctgacgctctgcgccgcctagttccggttttacccagtcacctcctggttttgcgacgcgagatacgtgaagacataaacgactcaacggccgggcaaacatcctgagacgtaaaagagcgttagacgctgaggtttttttgagggttgcccggcgcggctctcatcatggggcgggaatctgttccgacaacgaccccggatagatttgcgcacgtccaatttatgcccacaccaccttgcttgcaaaaatcaggctgaccataga

SEQ ID NO: 4146 - DNA, 1419 bp, unidentified
  source 1..1419: mol_type = unassigned DNA; note = element_63b4776
  misc_feature 1: note = core
  misc_feature 2..236: note = LE
  misc_feature 237..1406: note = CDS
  misc_feature 1407..1419: note = RE
  misc_feature 14..239: note = bridgeRNA
ctacttgtttcattgacctgcgaccgtggcccggccaggcttcggtcgaggcgcccgggctgtcgctctcatttcggctgcccacgctggtcgtgtggctctcttttggcctgcgcagtcccgggcgccgccagggcggggagaggctcaagaggggtttgctcggctcgaagtagcgttgccctcccggctcgacaacccaggtggatcgagcatcggaggacgcgttgagtgtcatgtcggaccgtgtggtcatcgggatggacccgtacaagcgctctgccacgatcgaggtcatggccggcgatgagaccgtcgtcggcggcggccggttcgacaccgaccgcgacggctacacggcgatgaggaagtacgccagtcagtggccgcaccgggtctgggcgatcgagggctgccagggcatcggccggcacatcgccaaccggttgctgaccgatggtgagcaggtcgtcgacgtgccaccgaagctgtccgccagggcgcgggtgttcgccaccgggcagggccgcaagaccgacgccaccgacgcccactccatcgcgctggtcggcacccgcatggccgggctgcgcccggtcgtcaacgacgagcagctcgccctgttgcggatcctggtcgaccggcgccgctctcttggcgaggaccacacccggatggtctcccagctgcaccagctgctgctggacctgattcccggcggggcgaagaagagcctgtccgcggcccaggccaaagcactgctggccacggtcaggcccctggacgtggtcggcaaggcccgccggcgagtcgccgcggagctgatcagcgacctcgaacgggtctaccaacgctccaaggacgccgacaaggaactgaaggaactggtcgcctccaccggcaccacgctgatggacctgcatggcatcggaccctccggcgccgcccggctgctggtcgaggtcggcgacatcactcggttcccgaaccgggcccacttcgcctcctggaacggcaccgcccccatcgacgcgtcctccggcgaccaggtacggcaccggctttcccgtgccggcaaccggcagatcaaccgggtgctgcacatcatggccaccgtccagctacgcaaccccaccgaaggacgcgcctacttcgaccggaagaaagacaccggcaaaacgtcgatggaagccatgcgcgcgctgaaacgacgcctgtccgacatcgtctaccggcacatgatcaacgatgccgccgctgccgcggcggcgggcccgggaggacaacggggaacgactactgactccagcgtgaccagctcgcatccccaagccggctcttcggagaagtcacttcccggacccgccgagacccagcttagaaccccactgccgatgatgtcttgacacagaggggagc

SEQ ID NO: 4147 - DNA, 1307 bp, unidentified
  source 1..1307: mol_type = unassigned DNA; note = element_63b4cae
  misc_feature 1..2: note = core
  misc_feature 3..233: note = LE
  misc_feature 234..1235: note = CDS
  misc_feature 1236..1307: note = RE
  misc_feature 7..219: note = bridgeRNA
tcctttagatttgcactgtgaaaaataaaggttgaaatattacctttgtggttaaaacaagttaaccaaggaaagtaggtgacccattgtgtcctctaggcagaagccctatccacggaattagtccttctttccttatcagttgaacagatccaattagaattttaggtcgttggcctattaaaggatatagtttgttcaacctatggttaaccctttaatagtgcaaaaatatggaaaagaaatggtttattggcattgacatctcaaaaaaaactttggatgttgttatttacgttcctacaaagaaacatgcggacgaaacaaattatgaacgcttcttaaacaaagaagagggctacaagtctcttctttgttggttgaaaaagaaaaacatggcaaagaaaaggctggtcattagtatggaaaatacgggtatttacagttttgacttatgcctttttctagaagcagcatccatcgattactgttctttcaatcctcttcatttaaaacgttccttaggcttggtacgtgggaaaaatgaccgtgtagatgccgaaagaatagcctattttgcttatcttcatcgggatgaactatcttactctaagctgtcagggagttcaattatccgtttgcgtgactttgctgcagagagaaaacgttttgtaaagcagcaagctgaatacaaaggttttctcactgatagaaaagattgtgaaatgacttctaccattgagcgcgctgcccatatggtaaagatactggatgaagaaattgcaagtgttgaagaagaaatgctgcaaattatcaattcagacccatctattctccgaaattatgagctcttaaacagtattaaagacattgggacgatcaatgcgatgaatacaatcatacatactaataattttcaggcatttgaaacggcacgtcaatatgcatgttatttaggtattgctccttttgagcattcttcgggaacaagtattaaaggtaaaacaagggtttatcccacgggagcaaaactattgaaagcggatctttcacaagctgctaattcagcgattgtatgggataaggaaatgaaagagtattatgaaaggaaaaggaaggaagggaaagcttatggagtagtgctaaatgcagtcaagtttaaactagtaggaagaatgtttgctgtggtcaaaaggggaacaccctttgtggagttaatgacttacaaaaagtaaacggactgaaatagcccgtttaacttctttaactgttttttataggcctattatttgcataggtcttagaat

SEQ ID NO: 4148 - DNA, 1346 bp, unidentified
  source 1..1346: mol_type = unassigned DNA; note = element_63b9824
  misc_feature 1: note = core
  misc_feature 2..70: note = LE
  misc_feature 71..1105: note = CDS
  misc_feature 1106..1346: note = RE
  misc_feature 1107..1336: note = bridgeRNA
tatgggatggcccgcccttccgaggacatcgagtatgatgtccttctcttgaatggaagggagccgtgtcatgcagatttccatactgggtatcgacatcgggaagaacagttgcagcgttgttggggtagataagcgcgccgctgtggttgtccgtcgaacgatgcggcgagagacattgatcgaattcgtcgagaagctgccaacctgtgttatcgcgatggaggcctgttgtggtgctcaccatcttagtcggctctttaccgcgagaggtcatgagatccggctgatgtcgccggaatatgtccgcccatatgtaaaggcgcagaagaatgatgacagagatgccgaaggcattgccgaggcggcatctcgcccgacgatgcggtttgttgaactgaagagccaggagcagctagatatccagacattgcacagggttcgatcccgcctcgttgcggaaagaacgacactgatcaatcagatgcgcgcgatcctgctggaacgcggcctggtcttcgccgctggccgctgcaaatttgagcgtgctgtcgacacgctgctggaagagcgggccagtggcttatcggagcgcgttcaccggctggttgccgagcttcgagacgaatggaaggtactcgacaccaagattgcagctctcaatgccgagttcttgtcgctggcccgagataatctcgcagtgcgcaggctgacaactattccaggcattggggtgctgagtgctacagcgctgatcgccgctattggaaatgccagcggctttgatcgtgccagagatctcggcgcttggttggggctcgtaccacgacagtttacgaccggaggcaagccacggctgctgggcatcacaaagcgtggtaacgtctacctccgaactctgcttgtgcacggcgcgcgagcggccatgccgacgctcagtcggagtgatacccctctcgggcaatggctccgaggtctgctttcccggggtatgcaccgcaatgtcgtgatcgtggcgctggcaaacaagctcgcccgcattgcctgggcggtactacgaaaggactgcccattcgagcgagcgtacggcgccaccgcggcgtaacaagattggctgcgtccagctgcagcccatgatgtttgcgagaaggaccgtagatggcctgacagttgaccggcgagcggaaagcccagcagtggcaatggctcattgaagccgtgttgattattgaggctccggacgtgcggatatccatcttggccacggcgtgaccgtgagaccgaatacgttgaagcagactgtacagggatctaaaattctacttgcgaacagggcgggccatacg

SEQ ID NO: 4149 - DNA, 1508 bp, unidentified
  source 1..1508: mol_type = unassigned DNA; note = element_63c2b16
  misc_feature 1..3: note = core
  misc_feature 4..558: note = LE
  misc_feature 559..1482: note = CDS
  misc_feature 1483..1508: note = RE
  misc_feature 68..224: note = bridgeRNA
aaacccacatgagcacattgctcatgcaagaaggatgaaaaactgatataatcgctaagctatttaattgcttgatatgggcggtgaaggcagtccgccgtttaggggcgtagacctcgttagtgaaactagccaaatcctgcggatgcaagaatgcgtctgttgaacgcgaatgcgaatgagcaccctttgaggattaagttatccgcccatatcaggacgggaataatcatggaaccggagaggaataaagtttgtggcattgacgtgcacaaacggtttctgatagcatcaatcctttcccgagacgggaagaaggacactcagcgcttcagcgttaccctggaagatctcttaaaatttagagattgggtcatcgaaaatggatgtgaacagatagccatagaatcaactggaatctattggcatcctgtgcactctgttctagagggaaagatggacctgatcgtggcgaattcgtacaaaattaagcacacgccaggaagaaagactgatgtcagcgactcggaatggattgcttaactttgtctcaatggcatgattgagccttccaggatcttccctaaagatgatcgagagctgagaaggctaaccagagcgagagaaggctatgttaagcagatgactcaggaaaagaacaagatccaccaatctctcgattctgcttgcatcaagttggcatccgttatctctgatatatttggcaagtcagggatgtatctcttgaattgcgttctagaaggaagagatattgatgagataattgaaggcattccgtctggacgacttaagaaaaaagcggatcaaattaaggagtctatcaaaagtcgtctagagatctctcaggtcatattaattcgaggatctctaagcttgatgagatccatccaggagaggatagatgagctggatggagagattagcgccagaattcattatcgtaagaacgatttagccattgctatgtccattcctgggacaggttttgtctctgccactgccattctagcggaaattggcaactacatcgatttcaaaaagcctgagcagcttgccgcatggtgtggccttgttccttctttatatcagtcagcagaaaagactatcctcggagggattaccaaacaaggctccaagcatattcaaagaatgttgattcaagtcgcctatgccatatcgcgaaccaaggattccaagctgaaaaaattcttcttgagaattcaggccaagaagggatctaaagtagcagcagttgctctggcaagaaaggttctatgcattcttcaccatcttctcatgaatcaagaaatgtatcttgaagacagagataagaagaatatgcgtcagaagcccttaacaccccattctcacattgagatgtcgatccaagagatgattgactgcatcgtccgggcaggttatgttgttacgaagagcgatagcataggagggttcggctaatcgtttttttcggtttttttcatgcg

SEQ ID NO: 4150 - DNA, 1409 bp, unidentified
  source 1..1409: mol_type = unassigned DNA; note = element_63d04bd
  misc_feature 1: note = core
  misc_feature 2..306: note = LE
  misc_feature 307..1383: note = CDS
  misc_feature 1384..1409: note = RE
  misc_feature 70..274: note = bridgeRNA
ctttaactttgcagtctgtaataagagtcctcaataactcttaaattatttaacgttcaatatatgatgaaaattgaagaattataccagttaatccttacctttgttgtagaaaggaaggattgactgccggaggtcaacctaactggtcttgaaagccacgagcttatggcctgttataggccctccggatttccagctgcaaatgccaaataggaaggtaggctcggagcctaattaaagtaatagtcacagacagctttccttcagtcaatcgcttcctataattaaaaactgtacaaaggtatgaaaaaaatcgttatcggcatcgacatttccaaagaaaagattgatgcaagcgcaattgacgtgagaaacacccggcaaggagtcctgaaacttggctaccagacgtttgagaaccgtccgatgggtttccgacgcatgctggtctgggcacgtcatctgatcaagggcacacccctgggggaagtcctgttctgctgcgagaccacgggtggctacgatcgctccttgtgcgactacatctacgccaaggatttggacatctggcgcgagagcgcacttcagatcaagcgcagcatgggcgtgcgcaagggcaaggatgacaaggccgactcgctgatgattgccgaatatgccatgcggcacatggacaaggccgtcatctacgagacgcccagcagcaccgtccgcgagttgaaggcgctgctgcagtatcgccataaactggtgcaggagaagacggagaagaaggtccgcatgtcgcatctgtcagacacggcggcaaaaagcaagtccatgagcttcatcctgcgcgatgcccgcaagagcatcaaggcgctcgaaaagagcgtcaagcagtgtgagcggcaaatcctcgagctgatcaagggggacgaggaactggccagaagctacggacacatcgtatctgtcagcggaataggaatcgtcaacgccactgccctcatcgtttacagcaacaacttcaggggaattaccaccgccaacaggatggcctcctactacggcatcgcatccttcagggacacttccggcaccagtgtggacaagaaggcgtacgtcaaatgctattccaactccttgctcaaggcatatctcacacagtcggcggaatggacaatcagggaaaacggaatataccacgactattacctgagattgaaggagaaggggaagccatacggcatcatcattaacaatgccagaaacaaactaatacacctcgtcttctcgcttgtcaaaaatgacacggattatgagcggaactatgagtacatcagaaagctgagaagggaaaaagtagattttgcaacagaattagagaatattaactaaatatgcttggataaaatcataggaag

SEQ ID NO: 4151 - DNA, 1402 bp, unidentified
  source 1..1402: mol_type = unassigned DNA; note = element_63d91da
  misc_feature 1: note = core
  misc_feature 2..87: note = LE
  misc_feature 88..1122: note = CDS
  misc_feature 1123..1402: note = RE
  misc_feature 1170..1400: note = bridgeRNA
taatggtatggaccctctcctcccataaaggcttcaaatgagccaagatagggttgttcaaatcactatcaagaaggagaaggtcacatgagtaaggtaacaataggtctctatatcgccaagtctgtttttcatttagtttttatgaatcagtcaggcagagtgctcagaaagaagaaattaaggcgtcaccagatgttgtcctattttagtcaactggagccatgcattgtagtgatggaagcctgtggaagttgccattactggtgtagggaattgacgaaagccgggcatgaagtcaaagcaatagcaccgcaatacgttgtagcataccgaaaaggcaataaacacgattacaatgatgcagaggcgatagccgaggcatcacaacgcgaagggatgcgatttgtgccgtttaagtctcaggaccaacaagacatccagcttatgcatcggattagagagcgtatgatagcgcagcaaacggcgttgagtaatcagataagaggcttgttgagcgaatacggtattgtgtatgcacggggtgtagcgactttggtgaaagagctgcctttaaccctggaagaagctgacaatggattgagtatgttagctcgccgacagtttcaaggcttactcaatgatttgcgggaactgcgagagcacataaaagaaatggataaggagttgaaagcgttctcacaaagccagcctgtatgcgagcgtttaatgagcatgacaggaattgggcctttgattgctaccgccttatatgcaggcattggacaaggtcaggcttttaatagcggccgacatttagccgcttggttaggtgtagtgcccaaacaacatacaacgggagataacccgagattgttgggtattagcaagcgagggaacacgtatttacggacccagataattaacggcgccagggccgccttgcgccatattggtgataaaaccgataaggtgagcgagtggtgtcgggcttgtttagcacgcatgagctttaacaaagcgtgcgtcgcactggctaataaaatggtaagaatggcctgggctatgctgcactatcaacaggactaccagccaggactgataaataaagcagcggcttagccgatgaaacccaaaccaaagataagtaaataaactaaaacagaaagcctatcaacatattgcaaaaagacaacgtactgatgattaacggttcataaccatcttgttcaaatcagtttataccaagggccttcgaggccgccggattgatgagacaacaagatgcgaacaaccatcaaggctagaagtcaattgacttcacgaaaaagccgaatatatggcagcaatgaatcacgttattaaatcaacacggtgtcttgcaatcggagagggtcatata

SEQ ID NO: 4152 - DNA, 1355 bp, unidentified
  source 1..1355: mol_type = unassigned DNA; note = element_63dc172
  misc_feature 1..2: note = core
  misc_feature 3..82: note = LE
  misc_feature 83..1108: note = CDS
  misc_feature 1109..1355: note = RE
  misc_feature 1125..1342: note = bridgeRNA
tgatgtggtggacggcctccgctcccggcatcgcaatgtgccaaagtgtggctgtcgaaagtcacatgagggagagccgtccatggagaagattaccacaattggggtggataacgccaagcacctgttccaggtccacgggatcaatgctgctggcgcaaccgtgacccgccgtaagctgcgccgcgacgatgtcgttggattcttcgaggctttgccgccgtgcctgatcggtatcgaggcttgtgcgacaggacacccctgggctcgggttctaattgcactgggccacgaggttcggctgatgccggcgtcttacgtcaagccatatgtgaagcggcagaagaatgacgccactgatgcagaggcgatttgcgaggcggtgacgcggccgacgatgcgcttcgttccggtgaagagcgaggagcaacagagtgtgctgatgctacatggggtccgcgagcttttgatccggcagcggacgatgctggtgaacgccttgcgcggccacttggccgggttcggcatcgtaacgcgacaggggattgccggggtcggtatgctgatcgcgttgatcgaagacggtgatcccgatcccgtcccgccgcttgcgcggtccgcacttcttccgctgatccagcagttgcgggaggtgcacgagaaggtccgtgagatggaccgccagattcatgcgtggcatcgctcgaatgagttgagccgacgccttgagacgatccccggaataggcccgatcactgccagcgcactcaccgcgacagtgacagacgcatcgctcttcaaatccggccgacaactggcggcgtggataggcctggtgccgcggcagaactcatcgggtggcaaggaccgcctcggaaggatcagcaaacaaggcgatccctatctccgccggcttctcgttgtcggagcacacgcagtgcttcgtttcagccgcaaggccgaagttgcacctacgcgatgggccgccgagcttctggtgaagaagccgtacaacgtcgtcgctgttcgcttggcgaacaagatggcacggatcgtctgggcgctaatgacgacgggcaggcgctttgagtctaccgtcgccctttgaaagatcgcgaggatgcagaaattggtgaggtgctgatggtgtgatggcgaacggtcgagccgggatcggacaaacccgatcagtgggtgccgcttgaaagcgcgttgacctgtctgggatccgatccgcggactacatcagggccagcggcataaacgcgccgcaatcaaaggccgtatacatgcctgcacccgaccaatcgtcagaaacgccgaaaagcacttgccacgcgggggccgtccataca

SEQ ID NO: 4153 - DNA, 1362 bp, unidentified
  source 1..1362: mol_type = unassigned DNA; note = element_63de5c3
  misc_feature 1..2: note = core
  misc_feature 3..76: note = LE
  misc_feature 77..1102: note = CDS
  misc_feature 1103..1362: note = RE
  misc_feature 1078..1349: note = bridgeRNA
tgatggggtggacgccccctcacggcatcgctgtgccaaagtggtgtcgttgatcatcacttgaacggaggcgtccatgttggaagttaacacaatcggattggatctggcgaagaacgtgttccaggcgcacggttcggatgcgtcgggagctgtgctattcaggaagaagcttcgccgcgatcacgtacttcggtttctcgccgctcagccagcctgcagggttgccatggaagcgtgcgccggcggccattactgggggcgggagattgcgaggctggggcacaatgtccggctgatcactccgggatacgtgaagcctttcgtgaagcggcagaagaacgatgccgctgacgccgaagcgatctgcgaagctgcgcaacggccgaccatgcggttcgtggcggtaaagagcgaagagcagcaggctgcggctatggtgtttcgtgcccgcgatcttgtggttcggcagcggacccagaccatcaatgcgatacggggtcatcttgccgagttcgggctggtggctgcgcagggcgttttccacgtagccaagcttgtcgcggcgattgaggacaaggattccaccatccccgaagccgcccgcccgatcctgtctctgctcgtggagcagctccgttcgctggatgagagggtggctgttcttgaccgcgaggtcgctcggcgcgccagggaggatgcagaagcccggcggttgatgaccatccccggcataggaccgatcaccgcgacggctgttaccgcgttggctccttcggcctcaaccttcaagagaggccgcgacttcgccgcatggctcggcctgacgccgctgcaaaggtcctcaggtggaaagcaaaagctcggcgagacgtcccgcatgggggagcgaaccttgcgccggctgttaatcatcggggcgagcgctacggtgcgctgggccatgcgcaagggtgcgtcgatggatccttggctctcgcggatgcttgaacgcaagccgcccatgctggtgatcgtcgccttggccaacaagacggcgcgcatcgtctgggcattaatggccaggggcgggacatatcgggcaccagctttggcaagatagtccgctccccgagcgggctgccaaagtgtgagaaggtcaaacggagagtatggcgctacggtcaatgagacgggatcgggaaaaccagatcatggatacgcgcctcgagcgcgccagattgaattggacccgctccgcgaactcccatacgggcccgcggcatgtggaccgccgcatcagaggccggacacatgtcagcacccgaccacgctccgaactcttcaaaagattcttcttgcgccaacgggggcgtccacaca

SEQ ID NO: 4154 - DNA, 1331 bp, unidentified
  source 1..1331: mol_type = unassigned DNA; note = element_63e2515
  misc_feature 1..2: note = core
  misc_feature 3..73: note = LE
  misc_feature 74..1090: note = CDS
  misc_feature 1091..1331: note = RE
  misc_feature 1069..1320: note = bridgeRNA
tgttggggtggacggcccaacggcatcttgtgccacagttgagttgttcaaatccaacgagagggccgcccgaatggaatttaagcgcattgcgattgatacgtccaagcatgttttcacgatccacggtgtggatgagcaggagcggccggtgctgcggcgggagctcaagcgtggccaggttgaggcctttttcagcaagctggcgggaacggaagtggttttggaggcttgcggtggatcgcaccactggggtcggatgtttcagaagatgggccacgatgtccggctgatcccgccgcaatacgtcaagccctttgtcaaacggagcaagaacgaccgcaacgatgctgaggcgatcagcgaagcggcagcccggcctgccatgagatcggtggcggtcaagagcctcgatcagcaggcaaacggtatcatcgtgaagcatcgcgagatgctggttggccagcgcagccaggcgatcaacgcgctgcgcggccatgccacggagtttggcgtagtggcagccaagggtgccgccaaggtcgaatcactgctggcagtgctggcgggggatatcaacatcccggccgctgctagggcgatgttcgagcacatgggcgggcatattgcggcactggagaaccgcatcgctgttttggatgccgagttggtggcattgcacaaggcgcatccggtcagccggctgctggtcgagatacccggcgttggtccgatgatcgccgccaccatggcattgaccgtcgatccggcgaactttgcctcggggcgccatttttcagcgtggctcggcctgacgccgcgcgagcattcctccggcggcaagcagcgcctgggcaggatcagcaaggccggcaatgaaaggttacgaacattgctggtggtgggcgccatgtccgtcatccgtttcgccaagcctggcagcaaatctgcctcgacatggcttttacaattgctggagcgccggccgcgtaagctcgcggcggtggctctggccaacaagatggcccggatcatctgggccatgatggcgcgcggggaagcttatcggcgtcagccgatcgtcgcctgaaccgcacgtcggtgccgagggtttaaggagcaagcagaagatggttatcggtcgaaccgacgagcaacaaaatccgtttgaatcagcggcaattatatgccgcaattctgtttggatgttgctcgcggaacccatctgggccagcggtcatgtcgccgcgtcaaaggccggacacatgaccgcattcgaaccaataccacattctgctttaactacttgaacccaacgggccgtccacaca

SEQ ID NO: 4155 - DNA, 1360 bp, unidentified
  source 1..1360: mol_type = unassigned DNA; note = element_63e3694
  misc_feature 1..2: note = core
  misc_feature 3..72: note = LE
  misc_feature 73..828: note = CDS
  misc_feature 829..1360: note = RE
  misc_feature 1128..1356: note = bridgeRNA
ttaatgagatggtcacccccaccctacacgcgggttgcgctgtagggtgttttcttttctggagaggccatcatgcaagacgtgacgctggttgggatcgatctgggcaagcattcgtttcatcttcacggccaggaccggcacggcaaggcgctgtttcgcaagaaggtgacccgcaagcaactgattgaattcttcgccacgcttcacgcctgcaccgtcgtgatggaagcctgcgccggcgcccatcacatggcgcgcaagttggcgggcttcgggcatcaggccaagctgatctcgccgcaattcgtgcgccccttcgtgaagggcagcaagaacgacttcgtggatgccgaggcgatctgcgaggcggcgtcgcgcccgtcgatgcggtttgtgacgccgaagaccgaagcccaacaaacactctcggcgctacaccgcgtgcgcgagtcgctcgtgcgggatcgcacgaagaccgtcaaccagatgcacggcttgccgttggagttcggcgtcagcctgccgatcggcaaggcggtcatcacgcgcttgcctgccgtgctcgccgagcagccgctgcccccacggctaatcgccatcctcgagcggctgcatgcccacttcaagtacctgagcgaacagctcggcgagctcgacaaggagatggctcggcaactggccgacgacgacctcggccagcgcctgcttacgattccctgcgtggggctgatcaccgcgagcgtgctagccaccgagatgggcgatgggaagcagtacggctgcagccgcgactttgccgcgtcgataggattggtgcagcgctaatacagcaccggcggccgcgccaacctgttgggagtcgtatcaacgcggtgacaagaacctccggcgcctgctggtgcagtgcgtccgcgcctacatgcagcggctcgagcgccagaccggccggcttgcgcactgggtgcgcgccatgctgacccgacggcactccaacgtggtcgcctgcgccctggcgaacaagctcgcgcgtatcgcctgggcgctggcgacccaccacaccacgttcgatacgggatcggttgccatgccgacttgaccggccgattccggtcactgctttaccgaagtccacccgcctggttttgcgaccgctgaaacttgatgacgtgaacggcccaccggcctgacggctaacctgacgaaaaaccggctctcgaagccgtccggtttttaaggaccgacaggcgcgactctcatgtggcgcgggagcgatccccacaacgacgccggatagatttaggcaagccaacccacaacatcgaagatcagtgttgcaaaaacgggggtgaccatagat

SEQ ID NO: 4156 - DNA, 1312 bp, unidentified
  source 1..1312: mol_type = unassigned DNA; note = element_63e478f
  misc_feature 1: note = core
  misc_feature 2..225: note = LE
  misc_feature 226..1284: note = CDS
  misc_feature 1285..1312: note = RE
  misc_feature 1..224: note = bridgeRNA
cagagatgatgtttgtgagcacctcccgccgaggtttgacccaccctctgactgacttcgggtccttaacgggatttgtcggcctcgatcgggaggtgctcgtgcactcatcaggcgtggcgttgtgacttcataggagcctggccagaggccccatctctgtcttgtccgcgttgcccggctggtgcgtgccgccctgccccagtcacgaacgacaggacgacgatgccctccattacacctgatgaagccgcgatcgacgtcttcggtggggtcgacacccaccaggacacccacaccgccgccgtgatcgaccagatcggccgggtcctcggcacgcagcagtttcctgcagacgcggccggctacaccgccctgctggcctggatgcgcgagcacggccgactcaaccgggtcgggatcgaaggcaccggcgcctacggcgcgggactggcccgtctgctgcgcgccgagcaggtggccatgatcgaggtcgaccgcccggaccgcaagacccgccggttccagggcaagtccgacccgatcgactcgatccaagccgcccgggccgccctggccggagaacgcaccggcacccccaaacagcgcgacggccgcgtcgaagcgctgcgtaacctgcgcgtagtccggcgcagcgcggtcgaccagcgcgccgacacccaacgccaaatcaaggccctgatcgtcaccgccaccgacgagctacgcgcccggctacgcggtctgaccatcacgaaactgatcgccacctgcggaaacctgcaacccgacccagccaactcggccgccccgtccaccgccaccgagcttgcattgcgcagtctggcccgccgccaccagcagctgtcggtcgagatcaccgacctcgacgagctgctcgaacctctcgtcgcggcgatcaaccccggcctgctggccgcccacggcgtcggcgccgaggtcgccgggcaactgctggtcagtgccggccagaatcacgaccggctcgcctccgaagcggcgttcgccatgctctgcggcgtcgccccgatccccgccagctccggcaagaccacccggcaccgactcaaccgcggcggcgaccggcaagccaacgcagccctctaccgcgtcgtcctcgtccgcctgcgatgggacccccgcacccgcgactacatgcaacgacgcactaaagaaggcatgtccaaaaaaagaaatcatccgatgcctgaagcggtacgtcgcccgcgagctctaccagctcatcaccaaaaacgatcttgaacttgccgcttgacatctataggagcat

SEQ ID NO: 4157 - DNA, 1423 bp, unidentified
  source 1..1423: mol_type = unassigned DNA; note = element_63e5bf3
  misc_feature 1..2: note = core
  misc_feature 3..78: note = LE
  misc_feature 79..1170: note = CDS
  misc_feature 1171..1423: note = RE
  misc_feature 1157..1410: note = bridgeRNA
tgttggggtggacggcccccgacggcatcagttgtgccagaatgaggtcgttggagatctcaaacgagggagccgtccgtggacaagtttatccgcattggtgtcgacacgtccaagagtgttttcgtgctgcacggggtaaacgcagctgagcagccggtgctgcgcaagaagctgcggcggcggcaagtgcttgagttctttgccaagttggagccgaccaagatcgggctggaagcctgcggtgcggcgcattattgggctcgcgaactcgcagctttgggtcacgaggcggttctcctgccgccgcaatacgtgaagccgtacgtcaagcggaacaagaacgacgcagccgatgccgaagcgatttgcgaagccatgagccggccgacgatgcggttcgtgccggtgaagacacccgagcagcaagccgcgctgatgttggcgggcacgcgtgacgcgctgatccgccgccgcacgcaactgaccaatgcgatccgcggctatgcagccgaattcgggctgaccgcggccaaggggctcgacaagatcgagccgctgctggtgcgcatcgcggcgaccacggcactgcccaggctcgccaaggagttgtttgccgcatacggcaaggaatatgcccaactcaaggtgcaaattcagaagatcgaagccaagctgatggcctggcacaaggacaatgaactgagccggcggcttgtcgaggtgcccagcatcggcccgatcggcgcctcgctcatggcgatgaaggtgaccgatccccacgccttccgctgcggccgcaacttctcggcctggatcgggctcaccccgaaggatcactccaccgccggcaagacccggctcggcgtgatcacgcgcgccggcgatgagagcttgcgcagcgttctggtcgtcggcgccacatcggtgatccaacaggtgcggcgaggaaaaggccatccctcgccctggctggtcgagctggtcaggcgcaagccgcccaagctcgcggcggtggcgctggccaacaaaactgcgcgcatcgtctggaagctgatggtcagcggggaacgctacaatccagcgcgcgccgcggcggtgatcgctcgcatcagccaccaaatctcgggcgacgaccgcgatgaccaacgcataacgagttcggcgtgagagcggccgtcgcctcgcgctgaggccggagcttgctcgagacggagcagatggtgtgatcgatcgatcccagacgcgagacactccgcgggacccagcggcattcgacaccgctgtactgtttggaactcacgtcgcggaacccatcttggcaggcggtcatgtgcaccgccatcaacagaccggacatatgatcgcaagcgatccgatccgctgctgcaccacctcttgcaagccgggggccgtccacata

SEQ ID NO: 4158 - DNA, 1269 bp, unidentified
  source 1..1269: mol_type = unassigned DNA; note = element_63ee810
  misc_feature 1..2: note = core
  misc_feature 3..79: note = LE
  misc_feature 80..883: note = CDS
  misc_feature 884..1269: note = RE
  misc_feature 984..1257: note = bridgeRNA
cgatggggtggacgccccctgacggcatcgaaagtgccaaggtggaggtgttgagcacaccactgcaaaggaggcgtccgtgggtgaagttagcataatcgggctcgatctggccaagacggtcttccaggcgcatggcgccgatgcttcgggcgaagtcattttccgaaagaagctgcgacgagatcaggtgctggcgttcttggccagccagccccgatgcgtcgtcgcaatggaggcctgcgccagcgcccattactgggctcgagagatcgcgactttgggacacgagacccggcttattccgccggcctatgtcaagccgttcgtgaagcggcagaagaacgacatggccgatgcggaggcgatctgcgaggcggcgcagcggccgacaatgcggttcgtcgcgcccaagagcgccgaggcgcaaggcgcggccgtggtcttccgcacgcgcgatctactggtccgtcaacggacccagctgatcaacgccctgcgcggtcacctcgctgaatttggcttcatcgtgaggcaagggcccgggcacgtcggcaagctggtcgacctggtcttcgacccctcgtccgagttgccggctgaggcccgtccggtgctagcggttctggctgaaagcctgcaggcgatccaggccaggatcgcggtccttgatcgcgacatcgccgccagagccaagaccgatccggtcgtcaaacgcctgatgaccatccctggaatcgggccgatcatcgccaccgctctggtgaccttggcgcctgcgccctcgaccttccgaagagggcgtgacttcgccgcgtggctcggcctcacgcccaagcagcattccagcggcggtaaggatcgcgggcaagcccgtggctagtcggcatgctggccaggaagccgcgcatgctggtgacggtggcgctggctaacaagatggcgaggatcgtctgggcgctgatggcgcacggtggatcttacaaggctccggccgcggcggcgtaacccgttacggtctgaggtcgtcgggaagcaggaaggtcagacgagaggtatggcgcaacggtcagaagacgggatcgggcaaaccagtgaaggtccaggcgcctcgagcgcgcgaaagcgtagtggacccgatccgcgatctccatacaggccagcggtcacgtgaacggccgcatcaatcaggccggacacacggaagcacctgaacctgcgcaccaaacctctcaaaaaacttcttgcatccgaaggggcgtccacaca

SEQ ID NO: 4159 - DNA, 1332 bp, unidentified
  source 1..1332: mol_type = unassigned DNA; note = element_63f459f
  misc_feature 1: note = core
  misc_feature 2..77: note = LE
  misc_feature 78..1106: note = CDS
  misc_feature 1107..1332: note = RE
  misc_feature 1105..1326: note = bridgeRNA
gaatgatatggactccctctacctgacacttcacgtgccatagttactcatgacacgttgataatacggaggtgactatgtccaccattcaaactattggcattgacctcgccaagaatgtcttcagtattcacggcgttgatgcatatggcaagtgtgtactacgcaaaacagttaaaagaaacagactgttagaggtattcgccaacctaccgccctgcttagtcggtatggaagcttgctctggcgctcatcattgggcgagagaactgagtaaacttggacatacacctcgcattatggcttcgaagtttgttatcccttatcggcaaaatgaaaagaacgatgccaatgatgctgaagctatatgtgaagccgtcagccgtcccaagacgcggtttgtcgctattaaaagtacagagcaacaagctgtgcttaccctgcatcgcattcgacatggtctgattaaaaaccgcaccgccaccattaatcagttacgtggattactttctgaattcggtattattattcctcaaggtcgatacccactccaaaataccatttccagcattcttgaagatgctgaaaatgggctacctatgctggctcgcgaactactctatgacttagtcaatcgtatccacgatatcaacattgaagtactgcgatacgaccgcaaaatttatgcgctcgtcagtcagatgaaagaggctaaaaagctcatgactattcctggcgtgggagaacatagtgcaacagccattgttgctacggtttctgatggaaaacaatttcgttccagccgtcaatttgctgcatgggttggattagtgccgagacaatataccactggcggtcacgtccaacttgggcgcataagcaaacgaggcgacaaacacatccgtacgttacttattcatggagcacgtgctgttatagcaagatgcaaagacaaaacggatagaaacagtctctggttacaacaattagttgaacgtcgcggttataagcgagcaaccgtcgctttagccgctaaaaacgcccgaattatctgggcgttactgacttcgggaaatgagtataaagttaactatatcaatggttaaccccaccgagtcaacacaattgcaattgatggcaatacggtcagaccgaggtatcaaagcctgtttaattgggaagtagaaaatactgtctaacgaatgaggctggtaccaagcgaatatcatcaaggtaatggcaataaagcctgtcaaataccgaatgtagagctgctgtccgatccactgttgtcaaagagagctattgttgacaaaagagggagtccatgta

SEQ ID NO: 4160 - DNA, 1573 bp, unidentified
  source 1..1573: mol_type = unassigned DNA; note = element_63f78de
  misc_feature 1..2: note = core
  misc_feature 3..283: note = LE
  misc_feature 284..1504: note = CDS
  misc_feature 1505..1573: note = RE
ctggtattatcctcacctgatacacctgtgagggaatttctgttaaaattaacttatatatttctgtagggagacatctttcagctccttatggcggcgcaagccgaccattcaaaaaagactgttgcttcctgcgttctgactgggaatgtttattaaggatgctatggggactgattgacatcggtctaccattcatatcccaggatacatttagtcagatgctgcaggaacaccatccctactgaaaaagaacaaccaccacacttacaaaaggacgcccatgaactatcttggtatcgacgtctccaaagctaacgcccgttatgtccttatagacaacgacggggaacaggcaacaaaaggcttcacacttaccaacgatcaaaagtctttcacccaaatcatcgaacgcttcaaagaactcaaactcaccaccgacacgcttctcatcggcatcgaggccaccggcatctggtgggaaaatctctactgcttcctcacggaacaaaaatttaaggtcatcgtccttaatccacaccagaccaacaaattccgcgaggctctgcgttacaaggccaagaccgacgacatcgacgcttgcgtcattgccgggttattacgctcaggcaaatatgccgcaagctatatccccgaagaaaccatccaggttctacgcgaaatcgtcaagctcaggcatcaacttgtaactaatcgccagaactttgaacgacaagctcagtcgttattaggcttgttattccccgaataccagaaaacggccatcaaaaacccgtttaccgttgcatcgctggctattctcaaagcctacccaaccgcaaaacacctggctgaagccaaaccaaagaacattgaaaagattgtccgatctatcgtcggcaacaacttcaacatcgctgaaatcaaaacccttatcgaaaccgctcaaaactcaatttactctggccgtgccaaagacgctcgtggcttgaatctcaacatcttgctcactcacgttgaaacccttcaacattcaatcgctcaacttgataaaagaatggacgatattttatctccgcaggatcctgacgatgctctgagcttcccaggagccaacctgctctccatccccggcataggccctaaaactttggccgcattcctctcaatcgctggctccgatggtagtgcttaccccgacggaaaaagcattttcggatatatcgggttcttccctaaaatctatgaatctggagaaacacgacacgataacatcatctccagtcgcggaccaaattatgcccgcagagctttttacattgcctctgtcgcttgcttaaaacacaacgatgaattcaaggctctttacgaccgtaaaatctctcaaggtaaatccgccaaacaagcattgatttgtgtcgccaagaaattaatccatctttgcttgagcatgcttaaatccggcgaatcttacaatccgtcgcgtgtctttatgccagtttaagaaagatcattactgctctttgacaacctgttttacttcattcttaatacttgactctttataggatgt

SEQ ID NO: 4161 - DNA, 1420 bp, unidentified
  source 1..1420: mol_type = unassigned DNA; note = element_6409a54
  misc_feature 1: note = core
  misc_feature 2..87: note = LE
  misc_feature 88..1140: note = CDS
  misc_feature 1141..1420: note = RE
  misc_feature 1181..1420: note = bridgeRNA
taatgatatgaacgcgtcccaccctgaatgtagcgcaaaggaaggtggatcccgcgggccaacggcatcgatgtgcccaggtggaaaatgcacgcatttcccggcaaccggaggatccgaaatgaatgctacgcctgttggaatcgacattgcaaaagtgtctttcaagtgcactacgtcgccccggaaaccggcgaaatcgtgaacaagcagatcaagcgctcgcagtttctcgaatatttcgcaaatcgtgcgccgtgcatgatcgggatggaagcgtgcggtagcgcctatcactgggcaagacagctgatgcagatgggacatcaggttaagttgatgccagcgaagtttgtgaaggcattcaacgttggcaacaaaaacgatgcgatggacgcgcaagcgatctggctggcagtccagcagccacggaaggcggtggcggtaaaaagcgaaatgcagcaggcggtgctgatgatgcatcgtcagcgggaacaactggtgaagttccgtacgatgcagatcaacggcttgcgcgggatgttggccgagttcggcgaggtgatgggtaaaggccgcaccgcgatgatcaaagcagtccaggacgccctcgcgcgtgccgaagcgcggctgccgaaactgctgatcgatacactgcgcgagcagtgggcgcgggtcaataagctggatgaggaaatcgcgacgatcgagcggcggttgcgcgaatggaagaaggacgacaaggcggtacaggcggttatcgagattccgggcgttggcctgctgacggcgacggcagcagtcgcgatgatgggtgatccgaaagcattcaagtctgggcgcgagttcgcggcatgggccggattagtgccgaagcagactggcaccggcggcaaggtgagcctccacgggatcagcaagcgcggcgacacctacctgcgcactttgctgatccacggcgctcgatctgtactgacgaatgcgaaggagcctggtccgtgggttgagggcatgaagaagcggcgaccatcgaacgtggtagtggttgcgttggcaaacaagatggcgcggacgatctggacggtgctcgcccatgacaggccgtacaggaaagatcacgtgagcgtgaagtcggcataaccgtggtcgcacggcttgtaagattaacgtttaacacagggtgaacgtcgaaaggttgcgttggcaatcgtgtgagatgacaagacaggtcggaccgggactcgcaaaacctggtaagaggcatgagcttcgagctcgttgaactaatgaggtgcgagtcagcggatttcatagggcccgcagcggaacgtcggctgcaacaaggccgaatacatagctgcaacccattctgtcgaagtcggaacacctgaaaacttgcgcaaagggacgcgttcataca

SEQ ID NO: 4162 - DNA, 1519 bp, unidentified
  source 1..1519: mol_type = unassigned DNA; note = element_640a766
  misc_feature 1..2: note = core
  misc_feature 3..246: note = LE
  misc_feature 247..1413: note = CDS
  misc_feature 1414..1519: note = RE
  misc_feature 3..227: note = bridgeRNA
cttgtatactcataactgtaataatagttagagtatatcttcctttctttctattgttataattgaatcaggcactgtggatttgtttcatgcaagtgtagcttgactactacaggaggctcctaccacagttcctatttttttaaccatcaataagttagttagcgcaagacgcttcatcacaaggttatggtaaataggatctcgtgtcaaacgacagtgccaacatcaatggaggtgatttgaatgtacttagtcggaatcgatatatctaagtacaagcacaactgcttcatagctaccgaatcaggtgtgccactcaaagaattcgtctttgagaacaattttgagggttttaaactgtttcatcaggtgttatctgaattagatcaagaccaagaaataagaataggtcttgagtcaacagggcactatggaacaaatttaaaacagtttatcatggcatctgggtatacctatctcgaattcaatccctacttaacgcatcagttttcgaaggctatgtcgttacgtaagacgaagacggataaagttgacgccaaaactatctcgaatatgttaggttctgttgactacaagaccttacatactcaattttaccacatcaatgaattaaaacaactcgttagagatcgtgacgatatactcacgaatcgttcgaaaacattggtaaagctcacaaatttattggatatcatctttccggagtataaacccttctttaacaacagattgggtgccacagcgctatctctgctcaagaagtatgggtcgccacaaagaatttcgaaacttacgatgaaggattttgatgatttaagatctaagtcaaagggtagactcacttatcctaaatttagtcaccttaagctgttggctaaagagaccgttggcattcaatctgaagtctatcaaaagcgcatgttaaccctcatcgatgactatacttattttgatcagtcactggatgagattgagcgagatatcatcaatctgtttaaagaagcagagtctaagttgactacgattcccggactcagcatcatccaagcagcaacgatttacgctgaaatcggtgatatccatctcttttctaatcctcaaaagctcatcgcttatgtcggtttcgacatttcaattagtcaatctggaatcagtgaacaccatggacatattgtcaaacgcggttctcctttacttcgaaaagcgatatggatctatgctttaccctctttaagatttattccaaccttaaatgattactatcataaaaagagagctgaaggtaaacatcataaggtcgctttaacgcacgtctgtcgtaaactcattcgcgtgatctatcacatcgaatacaatcacatcgattttgacgataaagaagtcaaataattagatcaagctgtagctacttgaagactaattcatccacttcagacttccaatggaggtcttttcgtgcgaaatgtattaaagtgcttgacttctaatagttagt

SEQ ID NO: 4163 - DNA, 1382 bp, unidentified
  source 1..1382: mol_type = unassigned DNA; note = element_640b3b8
  misc_feature 1..2: note = core
  misc_feature 3..82: note = LE
  misc_feature 83..1105: note = CDS
  misc_feature 1106..1382: note = RE
  misc_feature 1143..1377: note = bridgeRNA
cgatgtgatggacacctcccccttacggcatcaaagtgccagactgaggtgtacctacagttaactggaggaggtgtccatcatgaatattaaacgtattggtctcgacctggcaaaaaatgtcttccagatacatgccgtggatcaccgtgagcatgttgtccttcgtaaaaccctgcgccgtgaccgcatggcggcctttttcacccaactctcaccgtgccttatcggtattgaagcctgtggctctgcccactactgggcccgggagctgacccgtatggggcataccgtacgcattatcccgccccggctggttaagccttatcttaaaggccagaagaatgatgccaacgatgccgaagctatctgcgaggctgtcagccgccccgggatgcgcttcgtggcgatcagaacggaaaggcagcagatgctgcaggcggagcaccgcgtccgggccagactcatccgtgcccggacagccctgagcaatgagatacggggtctgctgggggagttcggtgtggtgttgccagcgggaatagcgcaactgcgtaaggcgctaccggagatagtgtcgcagcaggtgcagtgggatgagtgttttattcgtctgctgtgcgaactgtcagaagagctgcagggactggatgagcgtgtcgcccgccacgacaggcggcttcagcagtcagcacgggatgatatccggataaaaagactgctggcgatagaggggatgggtccggtggtggccagtgccctggtggctgcagtgggtgatggcagacagttcaggagcggccgggaaatggcggcttatctggggctggttccgcggcagcactcaagcggaggaaaggcgcgactgggccatatcagcaagcggggggaccgctacgtgcggacgctgataatccatggagcgcgggcagtgctgaatgcgtgtcagaataaaactgacaggcgcagccagtggttgcagggggtgtcggagagacgaaaccggaacatcgcgacggtggcgctggcgaacaagaatgcccgtatagcatgggcgctgctgagtcgtgaagaggattaccatgggatacaggtcaccggttaaccggcggccagtatcccatgcgttaaaagagcaatcacctgccgtaaggttgcagccagagaagcgagatgagtaacaggtaagaccagcatcagtcactccggcctggccgaaggctccctgataagcaaagccgctagcccgaatggaaacagatgcgcagataacatcatggcccggatacgacggtatcgtaagagaggccggatatacgaacgcaacttaccccgttacacaaaatgcagagatggcttgcataacgggaggtgtccatata

SEQ ID NO: 4164 - DNA, 1438 bp, unidentified
  source 1..1438: mol_type = unassigned DNA; note = element_6412b76
  misc_feature 1..2: note = core
  misc_feature 3..82: note = LE
  misc_feature 83..1159: note = CDS
  misc_feature 1160..1438: note = RE
  misc_feature 1255..1377: note = bridgeRNA
taattagatggactcgcccacgccgaggcgtcaatgcgccgcggtggcagtctaagaagccaacgacagcgagggcgagtccatgaaaaagaatacgacgcttaaacagtccctgtcttcaaccgatctgtcgacctgtacgacagtggcagtcgatctagccaagcaggtatttcaggtcgtaggcgaagatgctcttggccaggtgctttatgaagaacgcatcaagtcgcgtgagtccttccacgcattcttgcgcaagctaccggcaaacatcgttgtactgatggaaactggccccggcgctcaagcatgggcacgacagctgcaggcgcagggtaatctggcgcgagttcttcccgcgcagctggtggccgaccaccgcagcggcgcaaaaaatgatcgtaacgatgcgctggccattttacgggcgggacgggacaccaaaatcacagcggtgcccatcaaaagtgctgcagcactggccatgcaggcattgcaccgtgcccggcagggttatgtgcgtcggcgtacagctacgagtaaccagatgcgcggtctattgatggaacacggtgttgccttggcacaaggcgatgttgctatcagtcaaaccctacctcgcatactggaggatgccacccaaccactgccagacatattgcgcgaactcatcgacgagttgctgggcgaatggcgccagttaggcgagcggatcaacgtattgaccggtcgcctggagatcgctgcgaaccaggatcaaaccgccagacggttaatgacggtacgcggtgtcggtccgatcatcgccacagcgatgctagccaagcagaccgaacccgaacgtttcgccgatgcacgccagttcgccgcctactttggcatggtgcccgatcagaacagcagtgggcagaaggttcgcctgggcaagatgagcaaacgaggcgatggttacatacgcagcctgatggttcagggtgctcacgccgtattgaggcacctacgtcctgattctgagcagcccgacgatcgtcgcttgcaacgttggctgagtcggctaggacgtaaggaagcggcggtacgactggcgaatcgcaacctacgaatcatctgggtgctgctacagaatgaccagacttatcacagccaaccagcctaaggccggccggctgcgacaagttacagatcaccagagttctgccaccggggcgtaaagcgctccagcccctgctagaaaacattgaccccaggtcagaccgtcgcggatcgatgcctgcgcccttaccggccttcgaggcctgaacgtaatcggcataccgcgagctcaaccaatgttggccagaagccaaagatgggcttcctcgaataggccttatacatagatgcaaccgggtagcagtgttgaaaagcgggtagacagtggaggcgagtccataca

SEQ ID NO: 4165 - DNA, 1618 bp, unidentified
  source 1..1618: mol_type = unassigned DNA; note = element_6414c48
  misc_feature 1..3: note = core
  misc_feature 4..251: note = LE
  misc_feature 252..1487: note = CDS
  misc_feature 1488..1618: note = RE
  misc_feature 8..226: note = bridgeRNA
gttcgtattataaggtcagccagaaaatatttctggttgaccattttttatatcgatatatgataactgtagccggggtagaacgtaagcacccgtgggacttgatcccgtcagctaaacagttcgccccctacttgtagaaacatgattgaggctggttgggacacggatctcgcataacaagcgaagctatgaaactacatggaggataggggttaccggttaattgtatttcaaggaggagatagacgatgaatccagtcattggtctggatgtggcaaaaggtgaaagtcaggttcaagcattcttggataaaaagcagccgtacaaaaagagttttaaagtaacacatacacttgaagggttggcaaatcttctagactttattagagaagtagaggatgtatcaggggagcgccctcccattgtattggaatccactggacattatcatacaccagttgtccagtatttcgcggacagaggttacttattgattatcgtgaatccactcatttcgtatcgaactaagagttctagtttacgtaaggtaaagacagatattattgacgctcatcacctttgcgagctgtattataaagaggacttagagccttataaacaaagaggtattcagcttttaaacctacgtaatcttacaagacaacatgaaaatattacaggcatgtttgtacaaactaaactgcaatttcaggcagttctggatcaagtatttcctgaatactgtggggtttttggggccttatattcggatgtttctttactgactttacaagcatttcctacttcagaagatatcttgaacgttggcgaagaaacaatcgctaacaaaataaaagagttgtgtaaaagtcgttcacaaaaatgggcaaacaatcaggcaaaaaaactgatagctaccgcaagtcaaaacccttttcaggaaaccttatatcaaagccttattctgagcctaaatatgtatattaaaatgcttcttgaatataaaaaacatctatctaaacttgaagatgagatagatgctttagcaaaaggtattgaagaatataggattattcaatccatcccaggtatcggtgaaaaaattgcggcaacgattatttctgagattggggaaattgatcggtttaatcaccctaagaaactagttgcatttgccggaatcgatccaagcgtcttcgaatctggtacattcaaaggtactctaaatcgaattaccaaaagaggctctagtagactacgacacgccttgtatatggcagttagatgtgccattcgtgattgtcgcaagaaaaaaacgacagatgaactcattcctcgtaacaagcgattacgagagttttatgataagaaacgtgaagaaggaaaaccctttaaagtagctgtgatagcatgtgccaataaacttttacactggatttatgcacttttaaaaagcaaatcagagttccaagatctatcctagtttaaaaaactaactaaacagtccataactttccaaactaaataccttggaaggttatttggtatgtccaatttagtatagcataaattattttaagtatttattgaaaaatgttgacaaactattagctg

SEQ ID NO: 4166 - DNA, 1326 bp, unidentified
  source 1..1326: mol_type = unassigned DNA; note = element_64292a8
  misc_feature 1..2: note = core
  misc_feature 3..253: note = LE
  misc_feature 254..1291: note = CDS
  misc_feature 1292..1326: note = RE
  misc_feature 31..203: note = bridgeRNA
cttgtatgatgaattttaacaaccgatagcgcagaaaaaccgattaagctgtcatcgttcattgggaggccgtcccaccctgaggactggtagtttaccagagcctgtccgtgtagattggcccccgccctattcacccataccgtggagtatccgaggctaagagcctgcatacacaaggaaggtaggtgcatgtgcagggtcgggaaccgatgaatagtgtacttccctttaactgtattcaaaaacgattatgacgaaccgcccgctcaacactaccgctgaatctgtccatcgcctgtttgccggcgtggatgtgggagccgatgaattggtgttggtgatccgcaagaacggcaagccgttcgatccgcaaaaatatgccaatacccgtagcgaccgtacccggttggtcaataagctgatcaaattacccggcatcaaggtgtgcctggaagccaccggcatttaccatttcgatctggcgattgcgctgcatgacaccggtattcctgtgatggtggtcaatcccaaggcctcgcataacttcgccaaggtattgatgaaaaacagtaaaaccgatgctgtcgatgccaataccctggctgaatatgtcgagcgcatgaatttcgtcgcctggactcgtccgtcaaatcaaagcctagccttgcgctattatgctcgtcgcatcgatgcgttgaccggtcaaaaggccgccgcgaaaaatcatctgcatgcgctgagtgcgacagaggaaactccgaaggccttgctgcgcgatgccaagctggcgattagtcaactggaaaagcgcatcaataccctggctagcgaggcgctagcgttgatcgacaagcatccggaacttcagcgcatattcgaactgttgaccggcatcaaaggcattgcccaaaccagcgccattgccttgatgggcgaactgctgttattgccgcccaatctgtcgcaccgtgaatggggcaagtttgccggactcgatcccaaggcctttgaatccggcaaaagcatacacaagaaaatgcggctgtccaaagccggtaaccggcatattcgctccgcgttgtatatgccggccttgagtgctaaacagcatgatccacatgtgcgagcttatttccagcatctgatcgacaacggcaagaaaccgttacaagctgtctgcgctgtcatgcgtaaattgttgcatgcgatccatggcatgttgaagcacgaccagccgttcgataacacacggttttatgccatccctgaatcgatcatcgctgagtaaaagatgatgaaatttgttgcttttgaacagagtat

SEQ ID NO: 4167 - DNA, 1380 bp, unidentified
  source 1..1380: mol_type = unassigned DNA; note = element_642d9b2
  misc_feature 1: note = core
  misc_feature 2..88: note = LE
  misc_feature 89..1120: note = CDS
  misc_feature 1121..1380: note = RE
  misc_feature 1142..1372: note = bridgeRNA
caatggtatggactcctcctcccctaatcggcatctaagtgccaaactggtaagtgataccaccagcaaacggaaaggaggagtcgccatgaagcttagtagagttggcgtcgatttggcaaagaacgtttaccagttacacggtgttgatcggtccggcaagacgctctggaagcggcgcctgaagcgtcatcagtggttcaaagtgttgctggataatatagaacccggttgcgtgattggcatggaagcgtgtgccagtgcgcatcattggggtcggcagttgcagtcacgcggttacagcgtcaaattgattccgccacaatttgtgaagccgtacgtgaagagcaacaagaacgatgccagggatgccgaggcgatctgcgaagcgatgagccgaccgaacatgcgttttgtaacagtgaagacggtggcgcaacaggatatccaggcgacccaccgcatccgggcggagctgatgacccaacggacggccaaggccaaccagatccgtggcttagtggccgagtacggtctggtggcgccgaagcatctgagctcacttcgtggagcgatcccgtgctggttggaagatgcggaaaatggtttaagcggtgacttccgcactttgctgcagggcgtgtggacagatcttctgttgctggatgaacgcgttggcgagatggatcaggtcatcaagcgtctggccgagaacaacgaagactgtgttcgcttgcaacaactgcggggcgtgggcccgatgatctctacggcgatggtggccacggtgggagatgccaggcaatatcacaagagccggcagatggctgcagcgattggtatcacacccaggcaacacagttccggggacagagaccgcttgctcggtattagtaagcgcggtgatgtgtatcttcgtaccttgatgatccacggtgccagagcggtggtcgcccgagcaaaacacaaagacgaccggctcagtcgctgggtaacgggaatcgccacgaaacgacatccgaacgtggcagcagtggcattagccaacaagaccgcacgcatggcctgggctatgctgcgccatgaaacagattacgaccctgacttcgcgttacgctgaggcagggaacacaaggagatcctctacaacgattgcttaagcaaactgaatgatggcaaacaggtgagaccggcgtcagctaaacccggcaatgtccacgtacgtaaagtacgacaaagcgattgggcgctgatgcgcgaataaaccattatggcccggcatcaacgtatgcatgccaacttatgaggccgaatatacgtatgcagtcgtgccatgtctgccagatacagattgcttgcaactgagggggagtccatata

SEQ ID NO: 4168 - DNA, 1420 bp, unidentified
  source 1..1420: mol_type = unassigned DNA; note = element_64366da
  misc_feature 1..4: note = core
  misc_feature 5..203: note = LE
  misc_feature 204..1406: note = CDS
  misc_feature 1407..1420: note = RE
  misc_feature 1..188: note = bridgeRNA
ttccgtaagactggagcggcccgggggaactggtcgtggctgaggtcgccttgcgttgtgtcgcttactgggaatgtccacccagctccctggggtgcccctggctgctgaattgagatgtgcgcttggtcgctggttacggacgtgtcagcggggtgctccgcgggtgatcagacaacccatcggtgcaggaggcgtacgtgatggcaggacgagacagggcatggatcggtgtcgacatcggcaagacccatcactgggtctgtgcggtcgacgcgaacgggcagagatggctgtcgctgaaagtactcaacgatgaggctcagatcctcgaggtgatcactgcggtcggcgaggcaactgctgatcgggtgtgggcgatcgacatcctcggaactccctcagcgcttctggtcgcgctactcgcccgggcgggcgagcaggtgcgctacgcctccgggcgaatcgtggcggcgatgggcaccgcctacaccggcgaaggcaaaaccgatgccaaggacgcctacgtcatcgctgagaccgcccgcatccggaccgatctcgccgacgtcgacaccgacaccgacctggtgcggaccctaggggtgttgaccggccaccgctcggacctggtggccgaccgggtccgaatgatcaaccggttgcgggacctgctaaccagcgttttccccgcgctggaacgcgagttcgacttcgcgtcctgcaaaggagcactggtgctgctgaccggctacgccacccctgcggcgatccgccggatgggcgaagcgaggctgtcgcgatggctacgtcagcgccgggtccgcggctacgccgatgtcgcggcccgagcagtcgccgccgctcacagccagcacacggtgctcgccgggcaagacgtgacagccagcatcgtcgccgagctcgccggcagcatcctgtcccagcacgagcgcctcaagctcctggaccagcagatccaggacgccttcgcccagcatccgcaagcgaaagcgatcgagtcgatgcccgggttcggacccgtcctcggcgcttcgctgctggtcgcggccggcgatctggcggcgttcccgaccgccgggcatctggcggcggccgcggggctggtcccggttccgaacgactccggacgccgcgcggggaacctccacaagccgcggcgctacagccgaccgctacgacatgccctctacctatccgcccagacctcgatgatgcgcgccggcccgaaccgcgactactacctcaagaagcgcgaccaagggcgtacccacagccaggccgtcatcgccctggcccgccgccgcatcgacgtcctctgggccctgctacgcgacaaccgcacctggaccgccaccccaccaacgaaggctcaggccgcttgacaacaacattgaga

SEQ ID NO: 4169 - DNA, 1522 bp, unidentified
  source 1..1522: mol_type = unassigned DNA; note = element_644942d
  misc_feature 1..2: note = core
  misc_feature 3..126: note = LE
  misc_feature 127..1419: note = CDS
  misc_feature 1420..1522: note = RE
cttgtatgatatacacatggcaaaagccagtgaaatcatacttctcctttcctggtttttgttatgattgggatagacactgtggactgttcataagacctatagcttgactattatttggagtatatggccgcagtttctatcccaattgttgattggttggataagccgcagagctttcatttcgtgcaaggctacgaggatagattcttgtggaacacagttgtcgcaaatgatacaaggagtgatgcgtacatgatctacctcggcattgatgtcgccaaaaactcgcacgtggctgccgccatgtcgtcagagggagaagtactcctcatgccatttccctttgcaaacagcgccgatggttttaccctgctgcgagaaaagctgaacagcctcccaaagctgcctttgctggttggcttggaatccactgcccactatggggaaaacctgatttattttctctgtgggaacggataccatgtagccatgatcaatcctcttcaaacagctgccattcgaaaatccgctatccgtaagaccaagacagacaaagtagatgcttttgtgattgccaaggctctgatgatggaaggctatacagaattgcagcaagcagatattcagattcttaagttgaagggactgtgcaaaacaaggcaaaatctgattctcatgcgaactcgctgtaaaattcagcttggcagctttgtggatcaactcttcccggagttgaatcagtttttccggtctggcctccacatcaatgtctcttatacgctcctgaaagcgcatcccaggccggcagaggtgggggcccttcacctgacttacctctcaaatcttttgcgcaaagcatccagaggcaagtataagaaagaagatgccatccgcttgcgtgaacttgcccggaattccattggtacagacagtccggcgttagccttgcagatccggcaggctgtttctcaaattgaactcttttctgcgcagcttaagcaggtggagagcgaaatttccaccataatggattcccttggttctccgatcatgacggttccaggaatcggatatctgaacggagcaatgattctttcctgcattggaaacatacagcgtttttcatcaccagcgaagcttcttgcttatgccgggcttgatcctgctgttgttcaatccgggaattttagtgcgaaaagcaccagaatgtccaaacgtggaaattccatgctccgctatgcattgataaatgcttcccacaacgttgtccgcaacaatgagacatttgcgcaatactacaattcgaagattgcacagggtaagtctcattactgtgctttaggacataccgctcataaactgatccgcgtcatctttacgctgctcacgaacaatattgcgttcgacttagcttgattcattcttgttccaggtgggctgcgaaagcagctctgctttgctatgcctatttttcgccctgcactttttcaaatttctctattgactttccatagttggt

SEQ ID NO: 4170 - DNA, 1388 bp, unidentified
  source 1..1388: mol_type = unassigned DNA; note = element_644ddfd
  misc_feature 1..2: note = core
  misc_feature 3..78: note = LE
  misc_feature 79..1122: note = CDS
  misc_feature 1123..1388: note = RE
  misc_feature 1122..1375: note = bridgeRNA
tgttggtgtggacggccccctacggcatcgattgtgccagaatgaggttgttgcaaatctcaaacaagggagccgtccgtgagacagattactcgcattggaatggatacgtcgaagcatttttttcagttgcacggggtagatgcggccgagcagccgatcttacgcaagcggcttcggcgtaaggaggtgctggcgttttttgccaaacttccgccgaccgtggtcggaatggaggcttgcggtgcctcgcactactgggcgcgggaacttatgcagctcggccatgcggtgaagctgatcgcgccgcagcacgtgaagccctacatcaagcgcaacaagaacgacgggcgcgatgccgagggactatgcgaggcgatgagccggccgacgatgcagtttgtgcctgtgaagacggaagaacagcaagcggccctgatgctggctggcatccgcgaacggctgatcgcaaggcgcactcagctcggcaatgcgatccgtggctatgcggcggagttcggcgtaacggcggccaagggtctcaacaagatcgagccgctattggctgacatcgcgcaagatgaatgcgtaccggcgctggcgcgcgagctatttgccatgcaggggcgcgagtacgcgcggttgcaggtcgaattgaaagcgatcgaggctaagctgatggcctggcaccgcgccaacgccgacagccagcgcctggcgcagattccaggcattggtccgatcggcgctacggcgctggtgatgaagacccccaacccgcgtgcgttctcctccggccggcactttgcggcctggctcgggctgaccccgaaagatcattccaccgccggtaagacccggatcggcaagatcacccgtgccggagacgagatgttgcgcagcgtgctggtggcgggggcgactgccgtagtccagcaggccaagcgaggccgcggccgggcgtcgccctggctgctcgcgctgctggcgcgcaagtcctcgccaaagctcgtcgcgatagcgctcgccaacaagattgcccgcatcgcctggaagctgatgacgacgggtgagagttacgacagcgcgcggatgcctggcacattggcaatcgccgcttaacagatcagccggtcggcaacttcgcctatcggctgagccggagctgcaagaggagagagatggtaggatcgatcgatccgaggtgcgagacaatccgtgggacccactggccgaagacaggccgtcggtgtgtttggagctcgcgtcgcggaaaccatcttggccagcggtcggaagcgaccgcatcaacaggccggacatatggatgcaagcgatccgatcagaccatcaaaaaaaactcttgtggcacgggggccgtccacata

SEQ ID NO: 4171 - DNA, 1442 bp, unidentified
  source 1..1442: mol_type = unassigned DNA; note = element_6459037
  misc_feature 1..2: note = core
  misc_feature 3..83: note = LE
  misc_feature 84..1181: note = CDS
  misc_feature 1182..1442: note = RE
  misc_feature 1259..1380: note = bridgeRNA
taatcggatggactcgccctcgccgaggcgtctaggcgccacggtggcattctaaacatgtcaacgacagcgagggcgagcccatgaaacagcgtacaacgaagcattcagtccagccactgtccgaggtgcctgggtgtaagaccgtggcggtggatctggccaagcgagtgttccaggtggctggcgaggatgccctgggccaagtggtgtacgaacagcggatcaagtcgcgcgacaccttccaggcgtttctacagcagttgcccgaaggcgtgacggtgctggtggaaaccggtccgggcgcccaggcctgggcgcgccaggtgcaacagcggggtaacgcggtgcgtatcctgccggcccagcatgtgggcaaacaccgtagcgggccgaagaacgatcgtaacgatgcgctggcgatcttgcgggccgggcatgaccgccgtattgcgtcggtgccggtcaagaacgtggcggcgctggcgatgcaggcgctgcatcgggcccggcaaggctacatccggcggcgcacggcgctgagcaaccagatgcgcggactgcttctggagcaaggtatcgcgctggcgaagggcgatgtggccatcaaccggaggatccccgagatactggaagacgccagccagccgatcccggatccgttgcgtgagctgatcgacgagttgctggccgagtggcgccagttgggcgagcgcatctcggtcctgagcggacgcctggaagcgcaggcgcgcgctgaccagacggcgcagcggctgatgagcgtgcgcggggtcggcccgatcatcgcgacggcgctcctggccaagcaaacccagccggaacgcttcgccaacgcgcgccagttcgccgcctacttcggtctggtgcccgagcagcacagcagcggcgaaaaggtccggctgggcaagatgggcaagcgcggggatggctacatccgcagcctggcgatccagggggcgcaggcggtcttgcagcagctcaggcccgactccgagcaaccggacgaccggcggctgttgcgctggcagcagcgactggggcgcaaaggcgctgcggtgcggctggcgaaccgccaaccctgcgcatcctctgggtgttgctgcagaacgagcaaacctatcaccgtcagcccacccgccgtcaggaggcgaccatgaacaactgattcaccgagtactgccaccggggcgctgaagcgctccaacccgtgctgagtaacatggactccaggtcagaccgtcgcggatcgatgcctaagctcctaccggctcttgaagcctctctgtaatcggcataccgcgagcttatccgatgttggccagaagcccaccgaggcttcctcgaacaggcctgatacatagatgccaccgggtagccatgttcaaggcagggttgacagcaacgggcgagtccataca

SEQ ID NO: 4172 - DNA, 1362 bp, unidentified
  source 1..1362: mol_type = unassigned DNA; note = element_645d7a8
  misc_feature 1..2: note = core
  misc_feature 3..71: note = LE
  misc_feature 72..1115: note = CDS
  misc_feature 1116..1362: note = RE
  misc_feature 1097..1341: note = bridgeRNA
tgttggtgtggacggccccacggcatcgagtgccagatgttgggtcgtaaacgccaacataggagccgcccgtgacggagcttaagctgattgccatggatacgtccaagcatgttttctcactgcatggagtgaacgagcgtggcgaggttgtgctgcgccgtgagctgcgacgccagcagctcacagcattcttccagaaactgccgccaacggagattgtgctggaggcatgcggcagttcgcatcactggggccgtacgctggcggcgctggggcaccgggtgcggctgatcgcgccgcagtatgtgaagccgttcgtcaaacgcggcaagaacgaccgcatcgacgccgaggcgatcagcgaggcagccttgcgtcccaacatgcgcttcgtgccggtgaagtcggccgaggcacaggccgatgcgatgatcctgtcggtgcgcgagctgctggtgaagcagcacacgcaactggtgaatgcgctgcgcgggcatgcttcggagttcggcgtgatcgccgccaagggcacgggacatgtcgagggtctgctcgagcgcattgccgccgaccccgcggtgccggcgcccgcgcaggcgatgttcgtcgaactgggcgagcggatcgccgagctgcggacgcgtcgggcggagctcgaccgcaagctggccgcgttgcacaaggccaatccgctcagccagcaactggccgcggtgcctgggatcgggccgatcggcgcgctgacgctggccctgacggtcgatgcatcgcagttccactccgggcggcacttcgccgcctggctcggattgaccccgaggcagaactcgaccgggggcaaaccgcggctgggcgggatctcgcgccagggcaatgaacggttgcgccaactgctggtgctcggcgcgacctcggtggtcaggctgaccaagccggactatcggcatgccaacgcatggctgctggcgctgctgcagcgccgcccgcgcaagctggcggctgtggcccccgccttcgctggggcaggctgcttggccaacaagatggcccgtgtcgtgtgggccatgatgacgagcggagaggcataccggccacagccggcggctggctgacccgttcgtcgtcctgggtgaaagggcgatagcagaagatggcgattggtcgaaccgacgagcgagataccccgtggcatccaacggcgcattgcgacgccgtagacgtgttgagggctcgctcgcggaacccatctgggccgcggtcatcgataccgcaccgcaaggccggacacatgatcgcattcgtacccgccgccagtttttctgcacaactcgcccttgaacccagcgggccgtccacaca

SEQ ID NO: 4173 - DNA, 1406 bp, unidentified
  source 1..1406: mol_type = unassigned DNA; note = element_646fcbf
  misc_feature 1: note = core
  misc_feature 2..302: note = LE
  misc_feature 303..1364: note = CDS
  misc_feature 1365..1406: note = RE
  misc_feature 115..273: note = bridgeRNA
ctttaagtttgcagaggaaatgcgtaagcatcccaatccatataatttctatgaagaatatgcataaatatatgctcaaatataacagtttttcccacctttgttgtaggaaggaaggattaactgccggaggccaacctattgggctttttaggctacgagcctatgggctgttgcaggccctccggatttaagctgcaaattccaaataggaaggtaggcttcgaagcctaattaaagtatcagattacacagcttaccagttaatcgcttccaaatgtttaactctaaaatacaaaattatgaaaaagattgttgttggcatcgacatttccaaagaaaagatagatgcaggtgctatttgtgtcgggaacttgcaggaaagtcccgtcaggctggaccaccaagtgttcgtgaaccgtcccgcaggcttccgccgcatgttggcctgggcaaggcatctgatgcccgatatcactcttaatgacgttctcttctgttgtgagacaactggaggatacgaccggatactgtgtgactacatctatgctaagggtctgcagatatggcgtgagggcgccctgcaaattaagcgcagcatgggagtacgcaagggcaaggacgacagggcagactcgttcatgattgccgagtataccatgcgtaacatggacaaggccgttgtatatgtgtcgcctgacagcacgatacgagagctgaaggccctcttcctctaccggcacaggctggtacaggagaaagcagagaagcgggtgcgtgcaacacatctggcagagactgcgcccagaagcaagtccatgagttttatcttgcgcgatgcccaaaagggcataagggcattggagaaaagcatcaaggagtgcgaggagaggataattgagcttaccaagagtgacggggagttaatgcgcaactataaacatatcgtttctatcaagggcgtcagcatagtcaatacaaccgccctgatagcctacagcaacaatttccaaagcattactactgccaacaagatggcttcatactatggcatagccccgttcagagaacgttccggcacaagtgtcgacaggaaagcatgtgtcaggtattattcctgttctttgctgagagcaaccatcacacaggctgccgaatgtacggtaaaggagggagggatattccgtaagtattacatgaggctcaaggctacaggaaaaccatatggtgtcatactgaacaacatcaagaacaaactgctccaccttgtcttctcactcgtacgcaatgacgcggattttgacatgaattatgaaacaagaagaaacgaaatacacagtaccatgcaaaaagtggaaacataactacattttcttatgattatgtttggttttttccataggaag

SEQ ID NO: 4174 - DNA, 1539 bp, unidentified
  source 1..1539: mol_type = unassigned DNA; note = element_647184f
  misc_feature 1..3: note = core
  misc_feature 4..190: note = LE
  misc_feature 191..1426: note = CDS
  misc_feature 1427..1539: note = RE
  misc_feature 8..224: note = bridgeRNA
tttcgtattatcaggttagccagtaattactggttggcctttttttgtagtcgttttacgatggggggagccgggagaacgtggtgcttttaggggctatgactccgtacaaaaaactgttctcccacgacctccaaaagaccatgtttgagctggtaggggcgatagacctcgtataacaagcgaagctatgggtttggaaccatcgtggaaaggccggcgaaattcaaaacagggagtgagaaaattgcaacccgttgttggtgtggatgtggcgaaaggttcgagtgtggtgcaggcgtttaggacacgaaatgagccgtttggaaaagctgtagacatcgtgcatgaaaagagcggattcgaacaattctcgcgtatattagatgggcttcaggccgaaaccgggcttgctccagtcatcgttctggaagcgacaggacactaccatcgcgccttggtttcgtacctggaacgaagcggttacacctattacattgtcaatccgctgcaatccaaacgtgccaaaggcacgcaattacgcaaggtgaaaacggacgcggtggatgcctggcatctggctgaaatgtactatcgaggtgatgtaaagccgcaccgaacatgggaagagacgtttacagaactacagcatttgacccggcaacatgaattcgttacaggaatttttgtacaagcgaaactgaatagtagagcgctcctcgagcaagtgtttccagcgtatgaaggactattttcgaacgtattttcagcaacatcgctgatggtgcttgcccgatgtttagagggaagtacggcggattggattgaagtgattcaaggaaacacagggagatcccgttcgagaatgtgggccagtgaaaaaaacgacaaactgaaagagatgctgggtgactggaaagaagctcgacatagccagtctcagagccaagcattgctaggaatggtcaagctattgctgacaatgatcgagcaactggacgagcttgaacagcaaatggaggaggtggcagcaggtttgccagaggtggagcttgtaaaaagcattccgggtattggaacgaaactggcggcagcgattgtggctgaaatgggcgatatccgtcagtttagtgatgcgaagcaactggtggcatttgcaggtcttgaccccggaatctttagttcagggaagtttacggcgacaaacacacgaataaccaaacgtggctctaaaagactcagacgctctctgtacctagctgtacaatgtgggataaggaaaaatgcgaatgcaagaattgggtcgtactacgagaaaaaaagaaaagagggcaagccctacaaggtggtcgtgatcgcctgcgcaaacaagctattgcatcacatattcgccatcttgcagaagggtctgccctaccaagtttaatccatatttaaccaaaacctccatagccgtggaggttattcgtattggtcgaaaaaagtataccacgaaaagagaactcatccaacctgaaatgcttgacaaacattagctgg

SEQ ID NO: 4175 - DNA, 1247 bp, unidentified
  source 1..1247: mol_type = unassigned DNA; note = element_6476821
  misc_feature 1..3: note = core
  misc_feature 4..213: note = LE
  misc_feature 214..1146: note = CDS
  misc_feature 1147..1247: note = RE
  misc_feature 15..196: note = bridgeRNA
gcttgtgtcttgagccaggtttaaactgaggttgagagcggtgagtggcaagctgaatgcccggggtgcttaaagcacgtgtgggagcccatgctgccactcacctctccactctggtcattgagcccgaacagttgaacgagcccacctcgaacagttacaagcgtgggccaagccagagcgctctcacttttagtgtaagaggatttggctatgttttcctatccagcaggtattgatgtctccagcggtagccttcaggtccaggtaaatcaactggatgctgcgatgagtttccccaactcagaaagtgactttcccagcttaatcagatggttaaccctgcatcatgtcggtcgtgtattgcttgaggccactggtggttacgagcgcaaagttatgaaagcgcttcagacagcaggcttcgaggtggtacggatcaatccttgtcgagccaagagttttgccagggctatggggcagcacgctaaaactgatccgatagatgcaagcctgcttgcacaatttgcagcagtcatcaaatcgcccgatagccggattacaagcgctgagcaggatgatttacgcgccctggtccagcagcgggagaactttgttcaacaaagagatgacgacaaacggagacttaaaacggccgcctctgaggtgatcaagcctgcgttgcagagccatatcgactatttgcaaagtgcggtgaaggcgctggaaattctgatccgtcaaagtgccgagcgtttggacagcaaaaaagcagcccttctgtgctcggtaaaaggcatcggactcgttacagcagccagtttgatgtcctaccttccggagctaggagaagtgagtaggcaccagattgcggcattaagcggcactgcgccctacaacgacgatagtggcaagcacaaaggcaagcgccatatcagcggaggtaggtttgccgcgagacgttcattgtatatggcctgttggtcagtgatcagatttcagcctgagttcgccaagcggtatcaagagctgcgcgcgaaaggcaaatgcgccaaggtggcgctcatcgcctgtatgcgcatcttgctggtacgtctaaacgcgatgatccgtgactgttctgaatggaaagaaaacgccgcctagagctagcagcggctgttttctaaggcacttacacggtgtactgctgtgggggcactgtcatctctggaacagcagcttggaaaaaagccatcaagacagtt

SEQ ID NO: 4176 - DNA, 1356 bp, unidentified
  source 1..1356: mol_type = unassigned DNA; note = element_647b027
  misc_feature 1..3: note = core
  misc_feature 4..194: note = LE
  misc_feature 195..1106: note = CDS
  misc_feature 1107..1356: note = RE
  misc_feature 1124..1343: note = bridgeRNA
ggatggggtggacggctcctgcttcaaccggcgtcgccattcgccatagtgcagttgtctttaaccgcttatgagaggagccacccaatgcaagttagcacaatcggcctagacttggccaagaacgtctttcaggttcacgggattaccgaagacggaacattgcctttaaccgttcgttacgacgagcacagatgatttcctttttcgaaaagctagagccttgcttggtcggtatggaggcgtgtgggtccagtcattattgggcgcgtgagttgagcaaactgggccatgcagtgaaactgatcgcaccaatttatgtgaagccttatgttaagcgtggcaagtccgatgcggcagatgcagaagcgatctgcgaagccgtcacccgtccgaccatgcggttcgtggaaatgaagtcaccagaacaacaagcaatcttgtcgcgacaccgcgcacgggatctgattgttaggcaaagaacccaaaccattaatatgatgcgcgggttgttggcagagtttgggattatctttgctcaaggtgtcgggcatgccatcaggtttgcgaaaggtatgatcgaggggcattcacctgcgcttccgcaggccgcctgcgatgttgtcacagatctcagcgagcaacttttagcgctgcacgcgcgggtgaattggtacggtcgccgaatgaccacagtggcgaagttggaaccgcgcattgccttgctgcaaacgatccccggcatcggtccaatcacagcctctgctatcgtcgccaccgttggaagtggcgaacagttccaaagcggtagagatttgtcggcttggctgggcctgacgccaatcaacaaatcaacaggcggcaaagagcgcttgggacgcatatcaaagatgggagaccgttacattcgacgacttatggtcgtttgtatgacatcccgcatcaaacaaatcaaaagcgcaccggagcgatttgatccttggttcgccgacatcttgcagcgaaagccagccaaactggcggcaattgccatggcaaacaaaaccgcgaggatcatctgggccgtgctatcgcgcaatgagccctatcaaccgcgaacaacctgaaacgaaaggaaagaacaacgagatagcaagaccaatgaagtgatggcggacaagtcagccgcaacatcaagacaccccgggctttgtccaggacaatctctgtccgtctgcgagaatggggacttgatcagcggaaaccatcaaggccagcggccctaaaaaccgcgcgaacaggctgaacacaagaccgtatctgacaaattgccaattgcttcgaaaaaagtcttgctttgcaggtgccatccacaca

SEQ ID NO: 4177 - DNA, 1701 bp, unidentified
  source 1..1701: mol_type = unassigned DNA; note = element_648209d
  misc_feature 1..2: note = core
  misc_feature 3..340: note = LE
  misc_feature 341..1462: note = CDS
  misc_feature 1463..1701: note = RE
  misc_feature 44..316: note = bridgeRNA
ctcgtataatatttttatcaagaaaaaattatcattagtctggctgtgtcaatcggtttggcgctgtccgtgatataattgacatagtcaatcaggcaaacagttctgtttctccttgttgaaccacacggttgcttcattgtttagtctgttcccctgatgcggaagttagcttcaaacctactggctgtttgtcggagtcgcggtttgcctttcagcagtgaggctcacattaaaccgtctccgactggattctgatatgcgagggtgttgatgctccgcaatcacgggcattgccaagccgattgacttcaaacccattacgaaagaaggtgattctatgaacccgctttacgttggcattgatgtcagcagcaaaactaatgttgtttatttaatgaagcctgacggctctaaaatcagcaacttttccgttgccaattctcttgacggctcaaaaaaactcgtcaaaattatcttatcagcattagaaaaacattctcttgacaatgtcattataggtcttgaggctacctccatttacggagataatcttgtatattttcttcgtgaggattgttctctttcaaaacacctcacaaaaatacacattttaaaccctaaacaggtcaaaaaattcaaagatgcctacaatgacctgtcaaaaaatgactttgttgactcatttgtcatagctgattgtctgcgtttcggaagaatcaacaaagaggtatatctcagtgattaccgttatgcggctctgaaaacattaacaagagccagattttacgctgttcaaaaccttgttaaggaaaaacaacgcttaatcaatattattttcaagaagtattcttctttaacgcagaacaaggtattttccgatagattcggcacaactgctcttgctgtttacaccgagtttgattcggttgatacacttgtcaatatgggcttacatgagcttactgagtttattcaaaagaaaggtaaaaatcgtttctctgaccctgactcagttgctaaagccattcagaaagccgcccgaagctcttatcgcttaccgaaaacggttaacgattctgtaaatcaggtgctttctatatctattaactccatcaaatcaatcgaggctcaaattaaagacttggaaaaagccattgctgaacagatggatttaattcctaatactttgacctctattaacggtatcggtccggtttattcggcaggaattattgctgaaatcggagatattaaccgttttgacaatcaagctgccttagcgaaatatgccggtcttgtttggaaacaacaccaatcaggtgattttgagtctgaaaacacccaccttattcattccggcaatcgcattttgaagtattacttgtgtgaagctacattttctcttgtgagatgtgaccagagtacaatcgcttctatcacctcaaattcaatgaggtgaacaagtttcaacacaaacgcgccctcgctttaactgcccgtaaatttgtgcggttagtctttcgactgctgaaagacaatcgtctgtatattccaaagtcataatgactttgctctgacgtacgccctgctgaaaaaatttttttcaatcggggcttaggtgagactcctgttttttgccccaaatacgtttttgtccctatttttttgatttctctatcttgacatttcaccgctgga

SEQ ID NO: 4178 - DNA, 1382 bp, unidentified
  source 1..1382: mol_type = unassigned DNA; note = element_6483cb0
  misc_feature 1..2: note = core
  misc_feature 3..218: note = LE
  misc_feature 219..1214: note = CDS
  misc_feature 1215..1382: note = RE
  misc_feature 6..206: note = bridgeRNA
catttacttttgcagtattaaaacataagttaataatatatctttgaaaaaagagttgcggtgaactaattttcggactagtctttaatgactataggctggatcagactgcaactctatatttcaggagaacctagccagttagaattttaggcgtcagggcctgttaaatgtatcagctgcttctccttcatgtttaatactgtaaatacaaaagtatgaattattcttattttgtcggtcttgatgtgggcaaaaaatcttttgacgcttctttaatgtcttccgatgaggaggaattatgtcaccgtcgctttgctaatagtgaatctggtattcattctttacttgattgggttagttctcgtgtaacgactcttgatagagccttgttctgtgcagaaaatatgggtagttatgtaaccagtttatgtttgtgtagccagcaactaggtttttcattagccctcgaatgccccctggccattaagaaatcaatcggtttacagcgtggaaagaatgaccgggttgatgcttttagaatcgcttcatatgcagtgtcgcgtcaccggaaactgaagttatataaattacctgataaaaatctggtccagttaagagcctggatgtgtatcagagataatctggtgaagcagaaagtatctgccattaaactgttggagattaccacggagacctcggtgctgacaaatctctctgcatgcagaacatttttagaggaacaactctccatgataaaagagaaaatctcttacgtggaacaggaaatggagaaaattataaactccagtgtcttactcgcggaaaactatgaattactcaccagtatcaaaggtattggtatgatcaatgctattgtactgttgtgtgtaacagataatttccgacgatttagcgatccgagaaagtttgcctgttattgtggggtagctccttttgaacatacttccggaacatctatccggggtaaaacaaggacttcacaactggcaaacagagaggttaaggtgtatctcacacgggctgctattacagctatggtctgggatccgcagctaaaagcatattataaaaagaaaacaggggaaggaaaacataaagcatccgtcattaatgccattcgtgccaaaattattgcaaggtgttttgctgttatcaaaagaagaacgccatttgtgacactccgcgcataaacaaacacgggggcggaaggatggattattttcttttcgaaagtctctcacaaataccgagatttttgaaaagaaaaaaagacgtgcgttgggaaaaaagaaaaccgcaataaaaaagacagtttatcacgattttcttttagaaatatttgcaagagacttagaatt

SEQ ID NO: 4179 - DNA, 1451 bp, unidentified
  source 1..1451: mol_type = unassigned DNA; note = element_648aac8
  misc_feature 1..4: note = core
  misc_feature 5..229: note = LE
  misc_feature 230..1339: note = CDS
  misc_feature 1340..1451: note = RE
  misc_feature 12..233: note = bridgeRNA
ccccgttactttattcgtaccccttataatggggtgttagccagccagacccggcatgattactgcccccagtcgttcatgatccggggggatgtcaccgggtctggtggggcgctggtaaccgctgataggggccaggtcagacatcatgtcgggaccgtctgtaacgtggatgccggtacctgctccccaaggttatctggttaacccctataaacagggagacacaatgaccgaatccagcgattacgaatcaatccaggtctttattggcgttgatgtaggtaaagacacccatcacgccgttgccgttaatcgttcaggtaaacgtttgttcgacagagcattacccaatgacgaaaacaaactcagagcgctgatatctgacctgaaacagcatggacagatactgctggtcgttgaccagcctgctaccatcggagcgttacccgtcgccattgcccgctctgaaggcgtccttgtcggataccttcccggactggcagtgcgacgcatcgccgacttgcacgccggtgaagctaaaaacgatgcccgcgatgcggctgccatcgccgaagcggcccgaactctagctcatgcattacgcacgctgaaggtggctgacgagcaaatcgcagaactctccatgctctgtggcttcgatgatgatcttgccgcacagacaatgcaggccagcaatcgtatccgcggtttgttgaaccagatacatccggctctggagcgcgttctcggcccgtgtctggatcatccggcagtacttgaacttctccagagatatccctcaccagaaaaactggcttcgctgagtgagaagaagctggcagcccaactcagtaaactcgcgccccgtctgggaaagagtctcgctgctgacataacccgagccctgactgagcaatccgtcgtcgtttccggcacaaatgctgctatcgtcgttctcccgcgtctggcactccagctcatcacactgcgtaagcaaagagacgaggtggctcttgaggtagaacagagggtgcttgttcaccctctttacccggtcctgaccagcatgcccggagtcggtgtcaggaccgcagccaggctcctcacagaggttgcctgtcgggccttcgcctctgcagcacatcttgctgcttatgctggccttgcaccgataacccggcgttccggctcgtcaattcgtggcgaacacctgtcaagacggggcaataaaaccctcaagggggcgttgttcctgttagccttcgctgcgctcagggatccgatctctaaagcttactacacacgcaaaataaaccaagggaaacgacacaactagactcttatcgctctcgcaagacggcgctgtgacgttttgttcgccatgatgcgtgacgggactttttataccccgtaggcatcataaacatgcttgacaatttaataggggc

SEQ ID NO: 4180 - DNA, 1557 bp, unidentified
  source 1..1557: mol_type = unassigned DNA; note = element_64adfa1
  misc_feature 1..2: note = core
  misc_feature 3..264: note = LE
  misc_feature 265..1428: note = CDS
  misc_feature 1429..1557: note = RE
  misc_feature 3..243: note = bridgeRNA
cttgtatgatgatttcagaagctaaatcatcagtttcctttctttttcgatactgtggttcaatacattcagatactgtgggacttttgattttgccctgtagcttgactactcaataggagtgtattgccgctgcctttatctgaattgtttatcagctggatgtgccggagctcagctcctgagtacttatttcaatcaagtctacgatgataatcgttggtggatgccacagtgtcgggaaaccgaaaggagggtttcattatgtactatgtaggcatcgacattgccaaactcaatcattttgcctccgtcatttcttccgaaggtgaagtactcgtcaagccgttcaagttcacgaacgacaatgatggcttcttcaggctgctctccgctctcgaatctttcgatcgcagcagtctcatcattggtcttgaatcaacggcacactacggtgataacctggttgaattcctcgtttccagacgctaccaggtctgcgtcatcaatccgatccagacgtctacgatgcgtaagaacaacatccgtaagaccaagaccgataagtttgatacgtacgttattgccaaaactcttatgacccaacctcacaggttcatgactcaggaagacatcgatatgatgcacctgaagaaccttggtcgtttccggatgaagcttgtcaaagagcggaccagaaccaagatccagctcactgcgtatgtcgaccgggtattccccgagctgcagtacttcttcaaatccggacttcatcagaaggctgtttatgcccttctgaaagaggcaccttcgcctgaacagatagcttccatgcacctgactcatctcacacacctgcttgaggtttcctcccacggtcacttcaataaagagcaggctaaagaattaagagttctggcacagaagtctgtcggttccagcgacagagccctatctttgcaggtaacccagtctgttgatcagatcgagttgctcgataggcagatccatgaagttgaatccgaaatggaaaacatcatgctcggactcgactccgttatcatgaccatccctggcatcggatatatcaatggcgggatgatccttggcgaaatcggcgatatacaccgctttgccaagccaaatcagctgcttgcatttgccggtttagacccttcgatctatcagtccggtaatttcaatgccagccataccagaatgtccaagcgcggctcccgcgctcttcggtacgcgctgatcaatgcagctcataacgttgttaagaataatgctaccttcaagaattactacgacaagaaggtggcagaaggccggccccactacaatgcccttggacactgtgccggcaagctcgtcaggatcatccataagatgctgacggacgatgtggcatttaatctcgagtaagttctgactggagatcatagtagattttaaaaagcgccattgcgggagccttattaaggttacccttttgcagccacagaacaaaaagataatttcctgctaattcatgcttgacttttcatagctggt

SEQ ID NO: 4181 - DNA, 1447 bp, unidentified
  source 1..1447: mol_type = unassigned DNA; note = element_64aede2
  misc_feature 1: note = core
  misc_feature 2..86: note = LE
  misc_feature 87..1127: note = CDS
  misc_feature 1128..1447: note = RE
  misc_feature 1207..1439: note = bridgeRNA
taatgaaatggacgccccctacctgcaacggcatcgaagtgccaaagtggaagtgtcatcaaccaccaaaagtaggaggaggcgtcatgaaagagattaaggtaattggactggatttggcaaagaatgtatttcaggtgcatggcatggatgcgacaggtggcaaaatcgtcagcaagaagctcaagcgcggcgaagtgctcaattggtttgcgcagcagccacccgtcttggtcggcatggaagcctgcggcggtgcgcactactgggcacacgagatttcccgttttgggcacacggtcaagatgatggcacctcagcatgtcaaaccgtatgtgcaaggcaacaagaccgatgcccgcgatgcggcggcgatcgccgaagccgcgcagcgcgaatcggtaccaacagtggccgtgcgcgaccttgccggacagcaaatgcaagcactccaccgggtgcgggatctgtggatgaaacaacgcgtggcattgtctaaccagacacgcggcctgctggctgagtttggccaagtcatgccgctcgggcttgctcggttgaagaccgaagtggccttatggcaggcgcgggacgagccggcaatggtcgtcctcaaggagctgatcacacagctaatgacggcaatcggcgaactcgacaccaagatcagccagatcgaagtccagatcacccaactgcaccggagcaatgcggccagccggctaatcgaaaccatcccaggcgtcggcttactgaccgccacagcggtggtggcaagctttggggaatgcgcccagttccctcgtgcgcgccagtttgccagctgcttaggcattaccccacgcgaacacagtagtggcggcaagcagacgctattgggcatcagcaaacgtggcaatccgtatatccgcaggctcttagtgcatggtgcccgatcggttctcaccgcgcgcatgaacaaacctgcttatgccgatgattgggcggtgaagctcgccatacgccgtgggcacaacattgcggcggtcgccttggcagcgaagaacgcgaggcggatatgggcgatgctgcatacaggggaagtattccgtgctgatcatgcacaagccaaacccgcttgtgcatgatcagcacggttagaggagaaccggggaagcggcccgaatcaccagaaatacgaacgataacgaacacggaggaagcgcaatcgattgcctgagcaatctctaatgatggcaaacacaggtcagaccgggatcgtcctagcgcgcgggatccaaagtgcttagagcacgcaaaattgtttgcgcgacgatcagcgaatttcatcatgtgtcagcagccagatagacggctgcaacaaagaccgaatgtatggctgcaatcgactccgtgtgtcgtcatcatcatgaaaagattgctcttgcaaaccgggggcgtccatgta

SEQ ID NO: 4182 - DNA, 1390 bp, unidentified
  source 1..1390: mol_type = unassigned DNA; note = element_64c4222
  misc_feature 1..2: note = core
  misc_feature 3..89: note = LE
  misc_feature 90..1115: note = CDS
  misc_feature 1116..1390: note = RE
  misc_feature 1089..1377: note = bridgeRNA
agatgggatggttgccgccctctcctgacggcatcgcaatgtgccaaggtcgtggtgttcaacgccacgcaagcggagaggacggcgagatgaaggatacgatgatcggggtggatctggcaaagcgtgttttccagctccacggggcgacgatgacgggggaggtgaagttccgcaagaagctgtcgcgcgaacagttctgcgcgttcatggcgaaacagcccgctgctttggtggtgttcgaggcctgtgggagcgcaagctactgggcccgggagatggcggccctcgggcatgaggtgcggctgatcgcgccgcagtatgtgcggcccttcgtgaagcgccagaaaaacgatgcagccgacgccgaggcgatcgtgatcgctgcgcggcaggccgagatgcgcttcgtggtgccgaagacggcagatcagcaggccagggcggtgctgttccgcagccgtgagcggctcgttcaccaacgcacggaactcgtgaacgcgcttcgcgcggtgctctatgaatacggccacgtcttcccgatcggcctctgccacgtgaagcgcatcgcggcggtggtcgaggatcctggctgcgacctgcccgcccttgtcattgcggagtgccaggacctgctggcgcagattgcggagaagagcgagaggatcgagacgaagaccaaggccctgaaggcgctcgcagcggagaccgataccgcgcggcgcctgcagacgacgcccggcgtcggccccctgacggcgctggcggtcgaggcctttgcccctgacatggcgcagttcaagtccggccgggatttcgtggcctggctggggctggtgccacgccagcactcgagcggtgggaaggcacggctggggcggatctccaaggccggccagagcgatatccgacggcttttgatcatcggagcgatgagccgcatcacgggccgcgcacgccacaaggtgccagccgagagctggctcggccgcaagcttgcgacgaagccgaaaatgctgattgggatcgcgctggccaataagatggcccggcagttctgggcgatgctgacgaagaacgaggactaccgggatccggcgctggcgagggcatgaccaccctgtcgtgacctgccagttccggtgccaagggggagtgtgagaagccaatgacctgaatgggcgcaacgatcgaacagatccggatcggggaagccagggcaatcccatgagcatcagagctcacgtcgtagatttggacccgacccgctgatcaccataccggcccgcggcttctggaagcgccgcacatcgaggcctgaaagaagaccgcactcgatcacacgccgacagggtcagaagcctcttgcatcacgggcggcaaccaaaga

SEQ ID NO: 4183 - DNA, 1182 bp, unidentified
  source 1..1182: mol_type = unassigned DNA; note = element_64cca89
  misc_feature 1..2: note = core
  misc_feature 3..204: note = LE
  misc_feature 205..1167: note = CDS
  misc_feature 1168..1182: note = RE
  misc_feature 6..209: note = bridgeRNA
cttgtatgttcaatcctggccggcgcggggtagagtttgggggccgagaaggccctcggacaggatcgtgcagcctgggattcgctggggcctaacgagcccgtgcctgagtttattgcgcacgatccccgcgctggtcttcgcgaagcccgaacggttaatcgcgccttgagcgcgcagtgacaagcatgggaggcgaagaccatgtccgagcaaccagtggtggtcgggatcgatgtggcgaagctgcacgtggacgtggccgtgttgggtgcgccggcgtcagcggcgcgcttcagtaacgacgagccagggcaccagtccctgatcgaagcgttggcgcccgtggcaccggccttggtggtgatggaggccacgggcggctacgaagcgccgctcgcctgtgcgttgcaggcggcggggctcgccgtggcagtggtgaacccgcgtcaggcgcgcgactttgcccgctcgttcgggcaactcgccaagaccgatcgcatcgacgcccacgggctggctgagttcgccctggcgctgctgggccgtgctgacctcgagcgctacctcaagcccctgacgacggctgcacagcaggatctcgtggcgctagtgaatcgtcgtcgacagctgttgacgatgctcggcatggaggagcagcgcctcgccgccgctcgcccggccgtgaggcgcagcatccaggcgttgatccgggcgatccgcaaacaactcgacgacgtcgacgggaccatggccgagcacgtgacccggcactttgccgagctcgccgggttgctgcgctcgaccagcggcatcggcccggtcgccagcgcgacgctgatcgccgatctgcccgagctgggtcatctcacgcgtcggcaagtcagcgccttggtcggtgtggcgccgttcgcctgcgactcaggctcgatgcgtgggcgtcgtcgcatccgcggcggacgcttcgaactgcgccgaacgctctacatggcaacgttggctgcgatcacccacaacccggtaatccgtgcgcactaccgtcggttggtggatggcggcaagctgaaaaaagtcgcgctggtcgcctgcatgcgcaagctcttgaccatcctcaacgcgatagtacgaacacagacgcctttccaggaaaactacaggaacgcttgacggcgaagacggtta

SEQ ID NO: 4184 - DNA, 1502 bp, unidentified
  source 1..1502: mol_type = unassigned DNA; note = element_64d1e32
  misc_feature 1: note = core
  misc_feature 2..112: note = LE
  misc_feature 113..1129: note = CDS
  misc_feature 1130..1502: note = RE
  misc_feature 1187..1417: note = bridgeRNA
gaatgaaagggacttccccgtcccgaggtgcccgctgagtagcggagtgcggcaatgaagtgccacgatgggaggtgttcatttccatcaaccacctgcgagaggggaagtcatgaccattgtgtacattggtatcgatcttgccaagaacgtgtttgcagttcatggtgttgatcaggcgggcaagcccgcgctggtgcggccgtcggtgccgcgtgggcggctgcacgagttgattgcgtcgttgcctgcatgcacggtggcgatggaagcgtgcagcggcgcgcaccattgggcgcggctgtttgcgcaacacggccacacggtgcggctgatcgcgccgaagttcgtggcgccgtatcggatgagcggcgtacggggcaagaacgacgcggccgatgcggcggccatctgcgaggctgtacagcggcccaccatgcggtttgtgccgcccaagagcttggagcagcaaagccagctgatggtgcaccgcgcgcggcaaggctatgtagagaaccgcaccgcctgcatcaaccgcatccgtgggctgctcagcgagttcggccacgtattggagacgaaggccgacacggtgcgccgccaggcctgcgcgctgcttgaagagctgccgggctgggccaacaccgtgatcggcgacctgctcagcgagttgcaccacctggacgaacgcatcgccggctacgaccggcacatccaggccatcgtcaaagaggacgcaagagcgcagcagttgatgcaactgcgcggcgtcggcccgaccaccgccaccacgatcgtggcgatgatcggcagcgggcacgagttccgttgcgggcgccagttcgcggcctgggtagggttgacgccggggcagtacagctcgggcggcaagacgcgcctggggcgcatcaccaaggcgggcgacgcgtacttgcgaaccctgctgattttgggagcgcgcgaggtgctggctgcggccaagaacaaagacgactcgatcagccgctgggcgatggcgctggaggccaggtgcgggtactggaaggcggtcgttgcgattgcggcgaagaatgcgcgcatggcctgggcagtgcttgcgcgaggcgagagtttcaagatgccggcatagggctaagaacagccaacactaaaaccgctgaacagaaagaagacaccgagagtcgagaacttccaccgcgtgatgcaggaagcgttgatgagtcaaggttggacctgcgtggggtgtgcctgaatagctcaaggcggcggcagatgccgaccgcggctaacgaatgaggcccccacgcgcgtctttcatcagggtccgcagccatgacggctgcacgaatgaccgcttgtagtttgtccagtccgcacttggctcgattgattgacgcagatcgcatcgctgcagtgatgcagaagaagagatgaagatcagaaacgagccgctatgcggctcgacggcattcatttgcttgacaaagggggaagcccttgta

SEQ ID NO: 4185 - DNA, 1386 bp, unidentified
  source 1..1386: mol_type = unassigned DNA; note = element_64dcbef
  misc_feature 1..2: note = core
  misc_feature 3..86: note = LE
  misc_feature 87..1115: note = CDS
  misc_feature 1116..1386: note = RE
  misc_feature 1089..1373: note = bridgeRNA
tgatggagtggatgcccctcccgcccgtgccgaggcgtggcacagtggcagcagcaggatgagctgcggtgaagaggaggaaggacatgaacaacgtcaccatcatcggcatcgatctggcggagcgcgtcttccacgcgcacggagcacacatcgatggcagcgtcgcgttcagaaagcgattgacccgcgcacaaatgcttccgttcctgtccgcgcagccgcgttgcgtggtcgctatggaggcctgcgccagcgctcatgaatggggccgcgcgatccagcaactcggccacgacgtgcgtctcatcccgcccagctacgtcaagccatatgtgaagaggcagaagaacgatacggcggacgcggaggccattgccgaagcggggtctcggccgacaatgcgcttcgtcgcggtgaaaaccgaagagcagcaggcgcgctccatggtcttccggacgcgtgatctgctcgtgcgccaaaggacgcaactgatcaatgccctgcgcggccacctcgcagaacacggtcttgttgttccgcaaggtccggctcacctgaagactctggccaaagcactggacgcgaccgatgtcgcaatgccgcagctggttcgcgatatcgggcggatctatctcgagcagatcgaacagttgaacgccaaggtcgccgacctcgagaaaacgcttcgtcgcgaagcccaattcggcgaagaaacacgccgcttgcagacgatgccgggcattggcccgatcacagccatggcggtggagacattcgcaccgcctctgcagaccttcaagcgcggtcgcgactttgccgcatggcttggactcgtgccggttcagcactcaaccggaggcaagcagcggctcgggcgcacctcgaagatgggtcaacgcgatatccgtaggctcctcagaattggagccatggcggttattcgatgggcgtccggccgcggcgcacggcctggctcgtggctcagccgcatgatggaccgcaagccgctgatgttggtcgccgtggccttggcaaacaagatggcgcgcgcgatctgggccatgcagactaagaaagaagactatcgggatcccggcctcgcagccgcttgagcaaacgctcggtcgccgcgggatcaggagaggtgggcatgtgaggaggtcgtgaacgtcaagggcaaatgatcggactgatcgggaccaggaaaagcaccgaggctccaagagcgaaaagctcgtcgagttgatttgcgcctgttccgcgtatctccatgacggccggcggcaactacatcgccgcatcgacatgcctgacacatgaccgcacccgatcacatgctcggcggcacgaatttatccttgcatgaaccggggcatccacaca

SEQ ID NO: 4186 - DNA, 1619 bp, unidentified
  source 1..1619: mol_type = unassigned DNA; note = element_64eae20
  misc_feature 1..2: note = core
  misc_feature 3..290: note = LE
  misc_feature 291..1319: note = CDS
  misc_feature 1320..1619: note = RE
  misc_feature 59..268: note = bridgeRNA
ctggtataatgtaattgactcatctaacagtcgttacattatgcctttctcctttctatcaaccttttaatccgtggttgattacggtttggtttgttggtattatataagtaatgtggatttgcattttctacctgtagctttgactacttatgagaggttctcaccacaccttgtttctcagtaatgattagttagatgagtctttgaattcgtatctcgtaccaggttttacgaagcaagtgctgtggataacacattacaactttttacgaaaggaatgtattactttgattttagtcggtatcgacatcggtaaaaacaaacacactttttccataattgacaaaggggcctgtgaaatactcttaaatccatctgtttttgataacaatcagacaggatttctgtatctcatcaaaaaactaagcagctacaccaagtctgagcttcttatcggaatggaagataccgggcattaccatttagcactgctcaaacatcttcttgataaccgatatacggttgcactcatcaaccccacgacaactgaccttacaagaaaaattcaaggcggtatcaccaaaaatgatactcttgactccattaccatttgcgatgtgattttttccaatcatcgcaagaaaccatatcgcattactaaagtaaaccgatttgacctctatgagcagaagcaactaacccatcatcatcacaatctaaaggaagagttgaacatttacaaaaaccgtcttcagaaatgtattgatattgtatttcctgaattcaattcattgttcaattctaaatacggaattgtttacatgagcattttgaagactttttcttctgccaatgccattgcaaatgctgatattagcagcattcgtaaatactttgaattcaaaggacaagggggacggcgaatttctctatctgccgaacagcttaaaacaactgccaagatttctattggcataccctctgccgccgaagaaattcaaatacaccaccttgtaggtcaaatcgaattactggaggaacagctttctgaaatagataaaaggatagcagagttctccatcaaaaacaactctgctatcctttcgataccgggcatttcacgtttttccggtacttctattttagcagaattaggagacatttgcaactaccaaaaatcatctcagataattaaatttgcaggtgttgccccttaccattatgaatccagtcagtttacggcacagcacacggctattacaaagaaaggctcgcgatatttggaaaaaccttgtatcagattattttgcctgtaatcaacaataatgaggttttgcgtacatattacaacaaaaagttagctgagggcaaaggtcacagatgtgctcagggacactgtatcagaaaactcctgagagttatctatcatcttttaaccacagggcaacaattcagccctgaacttttggtgtaagcaaacatttaatcacattttacaattcgtcttcccttgaaggcttgtttgtcatgccataaaatccactattatttatttttcaatgttcgtgctaaactatatttatttttcaaaaactacttgacttttatatagttag

SEQ ID NO: 4187 - DNA, 1390 bp, unidentified
  source 1..1390: mol_type = unassigned DNA; note = element_64f7abc
  misc_feature 1..2: note = core
  misc_feature 3..90: note = LE
  misc_feature 91..1107: note = CDS
  misc_feature 1108..1390: note = RE
  misc_feature 1155..1388: note = bridgeRNA
cgatgagatggtctcctcccattccacgaatcggcgtcacaatgcgccatgatgaaggtgtaaccatcatcaaggagacgggagaagaccatgaacaagattacgacaattggactggatctggcaaagaatgtatttcatgcaatctgttgtgatagtcgcggcaaggtacagagcaagaagatgctcagacgaggccagatgctgaactattttgccaagattccctctgccctggtcggaatggaagcctgtgctagtgcgcattactgggcacgggaactgaacaagctgggccatgaggtcaagttgattcccccgcagtacgtcaaagccttcttgcgtggcaacaagaatgactacaacgatgcacaggccatagctgaggcagtcacaagacccgagatgcgttttgtacagatcaaaaccgttgagcagcaggatatacaggcgattcaccgaatgcgggaacgctgccaaaagatgcgcaccgggctaagcaatcagttgcggggattgctggctgaatatggcatcgtgatgccccaaggtattcccacactgcgcaaacgcctacctgtcctgctggaggacggggagaatggcttgagccaagactttaggtgcttgctggcacaaggctatcagcagttgctggtagccgataaagacatggctttctatgaccgtgaactgaagcgccagagccagcaaagtgaagcctgccagcgtttgcagacgataccgggctttggtccgatcgtatcaagcgcctttcatggtgctgttggcgccggtgaggctttcaaacgtggacgcgatgtatcggcctcgttgggcctggtgccccgtcagcatagcagtggggggaaagagcgcctgctggggatcagcaagcggggagatcgctatctgcgtagcctgttggtacatggcgcccgcgctattttgtacagggcctcggctaaggatgaccgactcagttgttgggctgagaagatccggcagaaacgggggtttaacaaggccgtggttgctttggccaacaagctagcccgaatcggttgggccgtgctggctaacagaacggtttatcagatgtcatgaagatgactgcaagcaaactttgaattactgaaaaaacagagaggttacccaccagcgattgcgaagccattgttgacccagatgacacaacaggtcagaccggcgtattgaaaacctggtaactccgaaggccgatagaggccgtggggtcgaataggacgatacgcgcagatttcatcgaggccaggggcaaaaaagtcccacaaacaggccggatatacggaagcaaccttgtccctgtcatcgagatgcaatagcttgcaaagcgggaggagaccatata

SEQ ID NO: 4188 - DNA, 1345 bp, unidentified
  source 1..1345: mol_type = unassigned DNA; note = element_64fb1f9
  misc_feature 1: note = core
  misc_feature 2..69: note = LE
  misc_feature 70..861: note = CDS
  misc_feature 862..1345: note = RE
  misc_feature 1114..1339: note = bridgeRNA
gaatgacatggattccccctcttgaagatctgccacacttaggtgcggcctttaataccggaggtaaccatgtctactcaattcttttgtggcatagatctcgccaagcaccacttttctcttcacgcggtggatgaccacggaaaactcattctccataaatctgtttcacgcgctaaactactgggtacattagcaaatatgcccacgatgtgcataggcattgaggcctgcagtggggcacattattgggctagagaattcaacaagctcggccacgatacccgcatcatggccgcaaagtatgtcggtccttatcgcacaaaaggaaaaaatgacctgaacgatgccgttgccatttgtgacgcggttcagcgtccaaacagccggttcattcctgttaagtcacccgaacgccaagcgattctcgcgactcatcgtgtacgtgagcattgggtcaatgaacgtaccgccctcattaatcgtattcgtgcattactggcagagttcggcattattattctaacgggacgagccgccattcacagagaagtaccactcattctcgaggcagcagagaatggcctgcctgatattgctcgtgctgtcgtggcagattgttttgaccacctacaaacacttaatcagcgtatcgccgataccgagcagtgtttcgatatggttaccaaggccagtcctaatgcccagcgtattcttaatgttcgcggcattggcccacaaacagcaacggcgattatcgccactatcggaaaaggcgaacagtttgattccggtagagattttgctgcttggcttggattatgcccaaacagtactcaaccggaggaaagcctcgattaggtcgtattagtaaacgaggagataaatatctcagaacactcttagtgcatggcgcgagagccgtcatcacgaacctaggcgataagcaagataggctcagtgtttgggggcgaaatgtccttgagcgacgtggcatgaatcgcgccattgtcgctctcgcagccaaaaatgcacgcattgtgtgggcattattgcaccatcaaacggattatcaagattacgcggcctaactcgtcgctgtcgtaaggagaaatacaccaaccgggtcattgcacacgcaagttgatgagtatcggtgaagaccatttgcagagagcctgttaatgcggcgggcaccttgatgccttctaacgaattaggcactgcaaccgcgcaatgtcatcagggccatgacgtgagtcagtaaaaggccgaatgtagagcggcagtccaaaccaaactcaatacgcttcgcggatgcttgacgaacgggggaatccatgta

SEQ ID NO: 4189 - DNA, 1319 bp, unidentified
  source 1..1319: mol_type = unassigned DNA; note = element_64fea6f
  misc_feature 1..3: note = core
  misc_feature 4..232: note = LE
  misc_feature 233..1195: note = CDS
  misc_feature 1196..1319: note = RE
  misc_feature 50..207: note = bridgeRNA
gttgtatattatttgcatatttaaaatattttttgtatctttgcagccgatttaacatctaagtatggaataagaccgatatctaggttgtgccaaacaccgtaataaacgttccgtccccatacttatacatccaaaaactggatagttcattgggctttgaccccgcattagcaacgatagtgttcagatgtattgatgttaaaccagcacaactaaatcaacaaacattatgacctacattggtattgacgtaagcaaggattcgttcgtcgcagcttatccggcacaaagtggttacaccactaagacattcaaaaacaccaccggtggtgtgcgtgagtttatcaagtcgcttcctataggctgtcattgtgtaatggaggcaactggcaactacagcatgcttctcctctatctgcttcaaatggctaacatcaccgttagcatggagaacccacagaagattaagcattttgctcgtgctatgttgtccacaaccaagacagacgatatcgatgctaaactgattgctatgtatggtgagaagatggagcctacgccctacaagatcccttcagagtgcatcatgatgcttaaacagaaacgcactctcttaaggcaacttaagaagcagcttacaatgatgctcaatctacaacactccatgtcagtcctgcccaagcaagatcctacgaccaaggctgcaacagagcaaaccattaagtttttccgcaagaaaatagccatgttagaagatgagatcactcatctatctaataaggaatttaagcgtcaaatggagttgctcacatccatcaaaggcatcggcaaaaccctcgcgtcggcactcatagtagctactggaggctttgcgtactttagcaacgctaaacaaatctcgcgattcctgggactttgtcccacttaccagcaatcaggtacgtcagtaaatttcaaaggtcacattaatcgcaatggcgatacttatctacgtagtcaactatacattgctgctgtatcatcaatcaaattcaatgcagcttgtaaagagacattcgagcgtttgaaggccagaggtaaatccggcaaagttgctgtcatcgctgttgcaaacaaacttatccgtcaggctttcgctgttgtcactaacaaccgtccttacgtcaatgggtatgtatcagcattaccataaaatattttatttgttttcccgctgggagcgctgtcggcaagggagtgtcggaacactcccgacgagacacctgacaggtaaacattaaaatctatcattttttgactactttttaatatagttc

SEQ ID NO: 4190 - DNA, 1432 bp, unidentified
  source 1..1432: mol_type = unassigned DNA; note = element_6504c10
  misc_feature 1..2: note = core
  misc_feature 3..121: note = LE
  misc_feature 122..1159: note = CDS
  misc_feature 1160..1432: note = RE
  misc_feature 1184..1384: note = bridgeRNA
agatggggtattcggcttgagcccatccccggaggttggatgcaggggtgctgcgcttcgagctgatgataaaacgtggtctgtttggaacagccacaagcatcaggaaaggaagcgcagcatgaaacattatgccggattggacgtctcgttaaaagagatctcgatatgcgtcctggacgaagcgggtacgatctgccgcgagatcaaagtccccagccacccggatgacctcgttcaaaccttgaagaatcccgcgtggcaattcgttcggatcggacttgaagccgggccgttgtcgcaatggctattcagcggattggcggcggcgggcttgccggcgacttgcattgagacccgacatgcgaaggcattcctgaaagcgcaggtgaacaaaaccgatcgtaacgatgcgcgcggcatcgcgcagatgatgcgggtcagcctgttccggcccgtgcatgtcaagacgttggcgagccagcatcgccgggcgctgctgacagcccgcaaattgctgcaggaaaaagccatcgccatcgagaacgacatccgtggcttgctgcgcaactttgggctcaaggttggcatcgttggaacggtagggttcgacgatcgtatccatgagcttgttgacgatacaccggacctcggcgagatcatggagcctttgctggcggcacggcaaaagctgcgagaaacattcacggctcttcaccgcaagctgctgtcgatcgtccgggaagacgagacctgccgacgtttgatgacgattcccggtatcggtccggttacctcgcttgcgttcaccagcactatcgatgtcccggcgcgcttcagcaactcccgtgccgtcggcccggcactgggattgacgccggtgctcaaccaatctggcgagagccatcgcgttggtcgcgtttccctgtgcggtgatggcatgatgcgggccctgctctacgaagcggcccaggtcatgttgagccgggtgaagaaatggtcatggctgaaagcctgggcgatgaacgtcgccaaacggcgcggacggcaaaaggccatcgttgcactcgcacgccggctggcggtgatcatgcatcgcatgtggagcgatggcaccgaatttcgctggacaagggaaagcatgtccgcagctgtctgaacagactgacgggaaggagatgataaagttccgcctgccggtggaaagacgtccttcgcgggacgatggatgaggtgagttcgcttgggttcttgtatcgatcgcatcatcgcggtcaggacgcgcaacagattgggccgcctcattctactgatcccataatgggagggccaaagagccgatcccgaagagaagcaagggcccgcgaaagacgttaatcaccagccgagcggaaagctcgaaagcgcttgacctcaacacgccgaatagaga

SEQ ID NO: 4191 - DNA, 1476 bp, unidentified
  source 1..1476: mol_type = unassigned DNA; note = element_650b95c
  misc_feature 1..2: note = core
  misc_feature 3..186: note = LE
  misc_feature 187..1095: note = CDS
  misc_feature 1096..1476: note = RE
  misc_feature 1203..1433: note = bridgeRNA
tgatgatatggactcctccctcttcaacggtgtcataatgcaccaacgattagaaacgaagtaaaaaggagtccacaatgaataatagcgtaattggtttagatatagcaaagaacatcttccatatatgacagtgttggaaaagacaataagccaataaagaaaaaattaaaacgcgtagaattattggcttttttcgccaactatcctaccagtctaattggcatagaggcttgcggtagcgcccatcattgggcaagagaacttattaagctaggacatgaagtcattttgctcaatgcgcgttatgtcaaaggctttgtgatcggcaataaaaatgattttaacgatgcagcaggtatttttgatgcagtcacccggcccaataaacgaagtgtgccgattaaaacgattgaacaacaggatattcaattggtgcatacgatacgcaatggtttgattaggaagcgtaccacgctggctaaccaaacaagaggcttactcagtgagagaggaattgttattccaaagagcattaatcaattaagaaagcaattgcctttaatacttgaagatgcagaaaataatttaaccccattaagtcgagaaatgttcgctgagcactacgaaagattaaggggactggatgatgagataaaaactcaagaccagcgaatcaatcgtctttgtcaggccaatgaattgagtgaacgtttcacagaagtacgaggtgttggcgcattggtggccacggctgttttgtttgatataggtgatggcaaaggttacgctcggagttctgattattcagctaatttagggctagttccaagacagcacagtagtggagataaacaggtatttttagggattagcaaacgagggaaccgctacattcgcacattgctgatacatggtgcccgtgctgtattaactcactgcggaaaaaagcaggacaagttaagcttatggctgcatgcactcattgaacgtcgaggctttaatagagcggccgttgcactggcaaataaaaatgccagaatactctgggcgatgacaacacaaggaacaaaatatgatgcatcattggtataaccaaaatgcggaaacgggttacccaccctttgaccacagattccatgtgaagtggcattccatccgtggacaaagcgtggataaccctcaacatgctgtaaccgagtaaacaagattgcggaggcaagttaactattattgatgacaaaaacaggtcagacctgtgcttttaaaacccgagtgctcaaagagtttattaaaaaaaccgttcagttgatagggtaagaaagtacgcggatagcttcatcaggagtactgaggtaaaaaaacctctgttagagaccgaatatatggctgtaatatatatggctgcaatcttgacctctgttaaaaccatcaattatgtaaaacttggcttgcaataaatggggagtccatata

SEQ ID NO: 4192 - DNA, 1173 bp, unidentified
  source 1..1173: mol_type = unassigned DNA; note = element_650fc1b
  misc_feature 1..2: note = core
  misc_feature 3..207: note = LE
  misc_feature 208..1161: note = CDS
  misc_feature 1162..1173: note = RE
  misc_feature 3..183: note = bridgeRNA
cttgtatggttagacttgaaggggtggtgggacgcgaaagccgattctgactgtcagcagcagtacagactgtgggagacatcgccccaccccttccaccaaagcgccgataaagaatgcatcgtttttgaacgacgatagaagcaagccagcgcctcttggtgaaacccccttcaagccctagaaccataacgtgaggagccacccatggcaatgcaggtagatcggttaatcgtgggtgtagatgtcgcaaaagcggagctggttattcatcacgacgaccgcgatgaaattatcaagattaaaaacgctaagccagaaatcaagaagtggctcaaacagcaagcggcccacacggcgatcgccgttgaggctaccaatgtctaccacttggacttggttgaactagcccacgggatgggttttcaggtttatgtcgtcgacggattccagttaaacaactacagaaaaggtgtcgggggacgtgtaaagactgatccatctgatgctcgactactatcccgtttccttaggaacgaaggtaacgaactccggccctggagccctccgccagccgtctacggcaagctccagagcctgctgcggcgccgggcggctttggtgactgcgcgcactgcgatgacccaaagttgggccaacgaaaatctgcttagagccgccttcgagacctttgtgaaatcgattgatcggctggaccagttgatccaaaagaaactgaaagaagtgctgcgcgaggctggattgcaggagcaagttgcacgttgccaggcagtggaaggaatcggttttctcaccgccaccgcattggtaatggcatttgtgagaggtgaatttaagagcagcgactcatacatcgcctttttggggatggacttgagagtgagcgattctgggcagaagaatggacgtcgccgtcttaccaagcgcggctgctcggagatccgtcgtctacttcataacgctgcgatggcagccagccgatcggcggcatggaaagagctttatgagaaacagcgcacggcaggaaaagcgacgacccaagcactggtgattttggctaggaaacttgcgcgggtggcgttcgccctgatgagaaatcaggacgaatatgtcaccagaaaggggaaactggcttgctgaaaaccatagaat

SEQ ID NO: 4193 - DNA, 1151 bp, unidentified
  source 1..1151: mol_type = unassigned DNA; note = element_6510c0a
  misc_feature 1..3: note = core
  misc_feature 4..211: note = LE
  misc_feature 212..1129: note = CDS
  misc_feature 1130..1151: note = RE
  misc_feature 10..194: note = bridgeRNA
gcttgtgtcttgatctgggaataaactctgaggtgagaggggtggatggcaagctgtgagtccgcggtgctagaagcacgagtgggagcaaagctgccatccacctttccactctggccgacaagcccgaacagttggacgagcaccactcgaatcacaagcgtgggcatagccagagcactctcactcctgagtgtaagagggttttgccatgatttcctgggtcggcatcgatatctctaaattaaaccttgttgtctgggttcaacctcagaaagaaggcttcgagattccaaacacatctgaaggctttgttgagctgatcaaacgattgagctgctatgaggttggccgggtattgctggaggccacgggaggctacgagcgccaggtcatggcggcactgcaacagacgaatttccaagtgctccgaatcaatcctcgtcgggccagagccttcgcggtggccatgggcaaaaatgccaagaccgacccgattgatgcggcagttctggctgattttgccgaagtgctgcatgggtctcacgaaaaggtcatttctcctgagcgcgaagctctgcgcgaactgatccaattacgtgagcacttcgttcagcagcgcgacgacaataagcgtcgacttcagcaggctcagttgccaaccgttgtcagcgctaccaaagatcatattcgctacctgcaagcgcagatcaaagccctggaaaaacacctcgttcagggcatgtttgatttggatgcagaaaaggccaggcgactcatgtctgtgaaggggattggcaaagtcgcggccgccagtttgctggtttacttgccggagttgggcgagttggatcgcagagaagtggcggcgttagcgggcatagccccttacaacgacgacagcggaaaccacaatggaaaacggcagatatacggaggaagaacccgtgtcaggcatgcgttatacatgtcgagttgggttgttatccgctttcaagcagactttaaaacgcgctacgaggctctaagggagcgaggcaagagcgcgaaagtcgcgctcatcgcctgcatgcggatactgctgatcagactaaatgccatgctgcgagacggtacagaatggcgctgacggacggtgggttaagacagtt

SEQ ID NO: 4194 - DNA, 1122 bp, unidentified
  source 1..1122: mol_type = unassigned DNA; note = element_651ed9b
  misc_feature 1..2: note = core
  misc_feature 3..168: note = LE
  misc_feature 169..1098: note = CDS
  misc_feature 1099..1122: note = RE
  misc_feature 1..167: note = bridgeRNA
cctgtgtattgcacttgtgttataagggttgcgggcggaaggccgtcggggtcctggtcgattgagaccgtttgctggctttggcctccgcccgctcttgataatcccaacctgaacagttgatggaggccgtcaccacggacctcgcagcacaggatgaggcttgccatggtacaccctgtttacattggatgcgacgtctcaaaggcacatctcgatcttttcgatgccgcgacacaaaaagccgtccgcatcgccaatactgacaccgccatcgacgaatggctcgctacccttgaggggcgcgaggcgcacgtcgttctggaggcgaccggacgctacgaccggctcttgtgctcggcgctcgagaggcggcagcgaccctattgccgggtcaatccggccagggcccgggactttgcaaaagccaccggccagctcgccaaaaccgataccatcgatgcgcgactgctggcgcgcatgggcgagacactgtcgccagccgtgacggcgccatccgatccggcccgtcagcggctggaaagcctgcacacgcgccgtgatcagcttgtcgctatgcgtcagcaggaacggctgcgcctttatacagccgatccgtcggagcgcgacagtctcgagcggcatcttgactggctcgatgccgagattgcggcaatcgaaaagcagtgccggtcccatgtccgcaagagcccggcgctgaacgagcaaagcgaaagacttcgctccatccccggcatcggtcaggtcactgcgttcacgctgatggcgcatatgccggaactgggtgaaagctcttctggaagtatggcggcccttgcggggcttgcccccttcaatgccgatagcggcatccatcggggccagcgccatatccgcggcggacgaaagcgcgtgcgcgatgccctctatatggcggcgctggtcgcctatcgaatgcgagcaccattcgcgcggctggttcaggccatgcaggcaaagaacaaacccttcaaagtcatgatcatcgccatcgcccgcaaactgcttgtcattgcaaatgccattctcagggacaaaaccacattcaagacatgctgagaattaatatcaccaatacagttg

SEQ ID NO: 4195 - DNA, 1236 bp, unidentified
  source 1..1236: mol_type = unassigned DNA; note = element_6528fd8
  misc_feature 1..2: note = core
  misc_feature 3..222: note = LE
  misc_feature 223..1212: note = CDS
  misc_feature 1213..1236: note = RE
  misc_feature 23..210: note = bridgeRNA
atggtaagtttgtattaagaaatatagattactattttagttaaaaataataacaaagagaaaagcagcaggataaaggcagacgctcaattgatacttcgatatcgcccccgattttattcccctgctgctgttttcttccaaatccggatagaacgttgttttcggtaaacttttaccatggtggatcagaagaaaacctctttataaaaaagatttacgatgacaaaattatcaaaaaaagtgattggtgtggatgtaggagcgaagtttttaactgtgagcttcaatgacaacaataatcaggaccaggtgcaaaacattgaaaacagccagcgttcgattttatcttttttaaacaaattttcaacagatgattattgctgtgttatcgaagctacgggtaattacagcagcagagtgcttcatctttctttgggtaaaggctttgagacgagcctgattaattgcatgtcggtaaagcactttgccaggatgaagaatattatcactaaaacggattctgaagatgctcggctcataaggcattacggggagatgtttagccctgaatgttatcaacccaaaaatattgagattgaacatcttgatcaggaactcaaattgctgaacgatttggaagaagagaaacgcaggtatagtgttaagcttaaagctcttcgctttcatcctcacctgaatcccaatacagagaagcattatgaaaaaaggcttaaacaattggaaaaagagatcagggaagttgaacttcgtcttcctaaacttcaggatgatgaatttaaggaagtaaaagatttaatacaaagtgtctcgggaatcggtgagaaaacaacgcttcagttaatggctgccacttccggttttaagaattttgattctgccaaatcattggttaaatactttggcttggcaccccggatttaccagtccggcaggaaatcttattcaccgggtaaatgcagaacttctaaaacccatatccgaagccttctttatgtttgttcttggacagcaataaagcataatgtaccttgtaaagagctttaccttcgtttactgggaaaagggaagccaaaaaaattagccttaattgctgtttgcaacaagcttctaagaatctgttttggtgtggtgaaaaacaaaatggcttatcaggcagattatcaaaagaacttgaaaattttaacttaaataatttgcatatgaacatagaac

SEQ ID NO: 4196 - DNA, 1914 bp, unidentified
  source 1..1914: mol_type = unassigned DNA; note = element_652a29e
  misc_feature 1..18: note = core
  misc_feature 19..692: note = LE
  misc_feature 693..1682: note = CDS
  misc_feature 1683..1914: note = RE
  misc_feature 515..668: note = bridgeRNA
actaaggcaacgtgtaatggaataattggtggctgagcacagactgaaagtctgcgaacgaagttcacgaagccacagcatcaacaaataaactctgcttttcagatttaatgttcttttgtcttgaaacaaaagaaccaaaagttcaagtctggaaatcctcagctaaaaataaataaccttttctaaaaactctgaaactcactcggcagaatgccgagcttaaacagcagacttttttaacgaaaaggttattcattttttttacgcttgcggtttcctaggacatcaattaaaataggtaatttttcaacgtctatgttcctaggttaaaagttttaatatcacaaagttcacgaagatttgttgaaatgatactgtttttgagttctcaaaggaacatcagagatgttctatagagtgcacggattttaatgcaatagaaataatgtgccttcgacaggctattagatttgcaaaagaaaaagtaactttaaatattaatttaagttatactgataccagaggcgctatgttgaactagttcgactaataaataagacttatactgagcattagaccttagcgccttttaggttcttgaaccatttagaattttaagtttctagacttagtaatagcgttagttagaaccttgctggaaatcagaatgacttttcaattgtaaatttatgaaaaatctatttattggaattgatatttccaaagaggtatttgattattgtgctattgatgagcaaaaccaaataatcatcaataaacaagttgccccaaattccaaagatggaattgaaaaattttgtcaaaaacttgaccaattaaaagagtattctatctggattgccatggaacacactgggcattatggaagtttactatgttatgagttctctattcgtcaactttgttattccttaatcaatcctttagaaatgaaacatgctactggaattagcagaggaaaaactgatgcagtagatgcttggagaatcgcaagttatgctttagctaataaacataaactaaaaccatacatattaccagcaaaagaacttagaaaactcaaaatattaatgagttctagagaacgtttggttaaagtccatgtacaaatgaaaaacggcttaaaaagcttagagatagaagcaaaaataatctctctaaagtctcacactcaagaaatggagcgaattattcttcaaatagaaaaatctatattgtctacggaaaaacaaatgagagaaattattaaacaaaacgatgaattgaaaaacaactttcagaaaataacttctgttattggtgtaggagagattactgctataaaatgcattcttgaaacggataattttaccaaattcaacaacccaagaaagttcagttgccactgcggtttagccccttttaaatatcaatctggaagtagtattagagggaaaactaaaaccagttcgctctgtgacaaatcccttaaaagcatcctttttaaagctgcttgctcagctatacagcatgaccctcaactgaaaaattattacttaagaaaaacttctgagggaaaacacaaattatctgtaataaacgctgttgcaagtaaaattgtgctaagaatttttgccgtatctaaaagaaaacaaaattttgtaaaactttttaactaaactcttgtttttatcttagaatgctcaggcaccgagtgtagtaataaataatacggtgattgagcggagtcgaaatcacagggaggaataagaatttgccttcgactactctcaggcaccgtgtaatggaagaattggtggctgagcttgtcgaagccactgtgggtatgattttttttggtgatgtggtgatgaaattatgagttttttttatgatcctgccttcaactac

SEQ ID NO: 4197 - DNA, 1140 bp, unidentified
  source 1..1140: mol_type = unassigned DNA; note = element_6537bcd
  misc_feature 1..2: note = core
  misc_feature 3..168: note = LE
  misc_feature 169..1125: note = CDS
  misc_feature 1126..1140: note = RE
  misc_feature 10..183: note = bridgeRNA
cttgtatcttcaggcctcggaccagctcgggtagcccgagcggcctctgggccagttgttgaagcccgtgcctgagcactgggcgcccgagttggaccgtcctttcttgcagcccgaacggttgtaggaatctgcagttcgcatagacaaggatgggagcgagaggacgtgtccgactctgtttttgtgggtatcgatgtctccggccagacgctggaggttgccagcagtgcccaggtcaagacctggcaggtgagcaatgatgcggccggactggagacgttggtcagccagttgacgacgctcgccccggcgctgacggtgctggaggccaccgggggctacgagttcgaggcagcttgcgcgttgcaggccgttggcctggcggtggcggtggtcaatccgcgcacggcgcgggacttcgcccgggccatgggtgcgttggccaagacggacgcgctggacgccaggatgctggcggccttcgcccgtgtgctgcaccagcaccccgagcgtgaacgcttcgtcaagccactggccgacgccgagttgcagcgcctgcaggccttggtgctgcgccgcagacaactcgtgcagatgatcacgtccgagcgccagcgcatgcgcatctcccatagcgccgcccgcccgagcatcgagcgcgtcatcgagttcctcaagaccgagctgagcgactccgatactgacgtggcagcgcatgtgcaacgccatcacgccgaactcgctgctgccttggccagcgtgccaggtatcggcgcggcaagcgtggcggtgctgctggccgaactgccggagctgggcaagctcgaccgacgtcgagtggctgcgctggtgggggtggcgccgctgaaccgcgactccggccagatgcgcggccagcgggcgatctggggtgggcgcgccgatgtgcggcgcatcctctatatggcgaccctcaccgccgtacgacacaaccccatcctcaaggcccactacgaacgcctcttggcggctggcaagcgcaagaaggtcgcactcgtggcgtgcatgcgcaagctgctgacaatgctcaacgctatcgccaagcacggctcgagatgggacccgacgcttcatagcgcttgaccgccaagacggttg

SEQ ID NO: 4198 - DNA, 1801 bp, unidentified
  source 1..1801: mol_type = unassigned DNA; note = element_6544904
  misc_feature 1..2: note = core
  misc_feature 3..107: note = LE
  misc_feature 108..1382: note = CDS
  misc_feature 1383..1801: note = RE
  misc_feature 1468..1720: note = bridgeRNA
agcattcctgtagtgcgttaatttcgactttgaaaaaaatagagcccctcagtaagataagagtatagataccaaactaaaactcaaatctaaggaggagctcttatatgaagtttaaaatgcaagacaaacaaaatcaactaattgaaagaatttctgataaacatcttgttgttggtgtggatatagcacagcatgttcatgttgcacgagctgtaaatttccgtggtattgtcgtcggtgatcctctcacttttgaaaataacgagaaaggtttcgctagattaatggaatggatttgtcatttaaaactttcaaaaggattaaatactgaaatagttgggatggaacctaccggacattactggttgaacctatctaaatggttatatgatcaagatattgatgtagtaaccgttaatcctcaccatgtgaaaagaaataaagaaaatcgtgataatacccaatctaaaagcgataaaaaagatgcccttgtgattgcagatatgatcaagaatgggtattactcctttatccggcccacttctgaagcttttgaaaagcttcgagtgctaatggctaaccgagatgtaatcgttaaacgcctcaccagttctattaaccaaataaatcgttgggtagatattgtcttccctgaacttcgagaagtatttaaagatgtaaaaggaaaaggggcaatcgcaacacttcggttatttcctacaccttcagaactatgttccatgaaagcacaggatatagtgaaaggttggaaaacagtgatgaaacgtcacgcaggacttaaaaaagcacaatcgttaattgacttagcaaaaaattctgtaggcagtaaacaagcacacgaagcctataagcttcatttagaacatttacttgaagaattcgatttagcaaaagtccaactcgaaagagtagaaaaagaagtcacttccgtacttgatcaaattactttcgctaaaaaaataattgccattgaaggaattagtgaaatttcattggcgggtattttaggagaagctggtgatttaagtggcttcgcgcatggtaattctctattacgacatgcgggactacatctggcagaagcaagctcgggtaaatggaaaggacaaattgtcgtttcaaaacgtgggagatctcgactaaggcgatttttatttttaacgacattaagccttgtgagcaataactctgatttcaagcagattcattttaataatgttaaagtcaaaaagatgaaaaaaatgaaatctatcatgaaactcgtggggaaattagcaagaatattggtggcaatatctaaaaatcatgaatcatattgttctcagaaagtacaaccattagcacctatagcagcttaattctaatcgtaaactaagtaaggctttaaagtaattaaaagtagtttaataattcttgaatgttggcttattcgtaggattacagagaaagcgcggagtactggataccgttgtacctaagggcactgacccgtttgcgcagcaaaaccggcctccaccccttggataggcatgacgaaggaatgaaagggcaaatgacccgttgagacatgggagggatagcctccaggggcggcgtggagatgcgtgcagtatattatggaaataaatggagctactattgactcctctattcccgcatgccttcatgtagcctttattatcaaaactcattccattcatccgtcattgttcttagaagtggtctgaaatcctgcgaataagcgagcatttgtgagtaaatagaatctaactgaggg

SEQ ID NO: 4199 - DNA, 1161 bp, unidentified
  source 1..1161: mol_type = unassigned DNA; note = element_655269d
  misc_feature 1..2: note = core
  misc_feature 3..201: note = LE
  misc_feature 202..1149: note = CDS
  misc_feature 1150..1161: note = RE
  misc_feature 12..207: note = bridgeRNA
cttgtcttatgaaggtggcaatctttctggcaagaaaggccgtcgccgacgagccgcaaactcgtcgacgagggaagggacagatcgcaaaaccgcaggccgtaatgggccgagctagagattgatcgccctcctcttttcccgtggcctgaacggatacgtgggccttggcccgcatgacaagcagaggacctggaaaagatggagaccatcgtagcgcagaatgtcggtgtcgatatctccaaatcgacactcgacgtgcatcttcacccggcgggcatcgctcgccagtttgccaacgacgccaatggcatcaaggcgttgctcggttggcttggcgaccgtgacatcgcccgtatcgtcttcgaaccgactgggccatatcatcatcggctggagcggcgactgggcgacgcagggctccctttggcgaaggtcaatccgctacaggcgcggcgctttgcccaagccgctggcgcacacgccaaaaccgatgcgatcgatgccgctatgctggcccgcatgggcgcacttctgacaccgccggtgagacagattactagcgaagctatcgatgacatgagggagcttcacattgctcggctcgccttgatcaaggatcgtaccgctgccaggaaccgtgagcatgcgtgtcggtcgccattgctgaagcgacatgctgcgcaacggctaacacggatcgatcgtcagatcgccgccatcgacgctgccctgaacgcgcgtttgcagaccgatcctgagctggtgtcgcgcttcgagatactcatctccatacccggcgttggtgcactcaccgctatgattatgctcatcgagatgcctgaactcggtcaactcgagagcaagcaggtcgccagtctcgctggtctcgccccacaagcccgcgatagccggcagtatcgcggaaaacgccacatccgcggtgggcgcgccgttctcagccaagcgctctacatgccggccctcgtcgccacgcggttcaacgtcgatctgaaagccaaatatcagacgatggtcaccgccgggaagccgcccaaggtcgctatcaccgcaatcatgcgcaagctcatcgttctcgcaaatacgttgctcaaagccgaccgcaaatggattaataaggccgcttgatcataacggata

SEQ ID NO: 4200 - DNA, 1404 bp, unidentified
  source 1..1404: mol_type = unassigned DNA; note = element_6559463
  misc_feature 1: note = core
  misc_feature 2..85: note = LE
  misc_feature 86..1111: note = CDS
  misc_feature 1112..1404: note = RE
  misc_feature 1154..1390: note = bridgeRNA
tgatgtggtggacggcgcccgctcccggcatcgatgtgccataagggtgatcgtcgagacgaatcacattgagggggccgtccacatgcaagttatcacgattggcatcgatctggccaagaacgtgtttcaggtgcatggcgttgacgctaacgacaaggtggtcttcaacaagccgctgcgtcgatcacaagtgctgcctttcttcgccgagctcgcgccgtgcctgatcggcatggaagcgtgtgcgtcggcccactactgggcgcgcgagctcaagaagctcgggcataatgtacggttgatgccggccaaggacgtgatggcgtacgtcaagcgcggcaagaacgatgcgatcgatgctgcggcgtgctgcgaggccgtccgacgaccgacggtccgtacagtgccggtgaagacggtcgatcagcaagcgcggctcatgcagcaccgcgtgcgtgatctgatgattcgtcagcgcacacagagcatcaatgcgctgcgctcgcacatggccgagctcggcatcgttgcggcacaaggctacgaaggcctcaaggagctgcttgccatcgtcgccgacatgagcgatgcccgcctgcccgaggatgcgcgtgccagcctatctgcacttgttgcgcagattgcctcttgccaggccgaaatcggggcgatcgagaagcgccttctcgcgcagcatcgcaagaatgcggacagcaagcggctcgagaccattcccagcgttggtgtcatcggcgcgagcgccattgtcgccacggttccggaggcttcgatcttcaagacgggacgtgacttcgcggcctggatcggcattgtcccgcgcgaggattcgaccggcggcaagcagcggctgggacctatctcaaaacaaggcgaccaatacttgcggcgcatcctaatcgtcggagcgcttgccgtcttgaggcaggcgcgtgcccaccccgagaaatacccttgggtgacgcagctactggcacgcaagccggcaaaggtcgttgcggttgcgatcgccaacaagacggcgcgcatcgcttgggcagtgctgaccaagaaggagagctaccgcgtacagacgaacgcggttgcctgaaaagggaaggctcggttcatgaaatggtagggagcagagccatgtgactctcagcgtagcgttctcggattgcaggggtgaatacgacgtgatgcgaaacagtcgagcgttgatcgggaaaacccgttgtgtgccacgcgacaacgagcgcgtgaaattgattgggacccgatccgcggatcacatcatggccagcggccaaagcggctgcaacaacaggccgaatacatgaccgcacccgaccattcgcggaaacgtcagattcctcttgcaccgcgggcgccgtccttaca

SEQ ID NO: 4201 - DNA, 1296 bp, unidentified
  source 1..1296: mol_type = unassigned DNA; note = element_6560b99
  misc_feature 1..3: note = core
  misc_feature 4..215: note = LE
  misc_feature 216..986: note = CDS
  misc_feature 987..1296: note = RE
  misc_feature 36..200: note = bridgeRNA
cattgtataatttttaattattatatttttgcataaacattcaacatcaaagtgtggaataaggctgagttttcattagtcaaaaagaccgtgtagtatgttttaccccacactttatacatcagaaaccggatagttcaatgggcttttgagaccccgcattcgcaatgatggctcacgatgtacagatgttgttttaataaatcattcagactatgacttacgttggtattgatgtcagcaaggtgactttcgttgttgcctattcgtctgtaaagacaaacaagacgagaacattcaagaataccgtaaatggcgttcacgagttcgtccaaactatttcagcatccgaacataattgcgtgctggaagctacgggcaattacagcgcgttactcgtttacctgctttcagaggcaggcattaccatcagccttgaaaatccgttgaagataaagaacttcgcccgtgtcatgctcaccgttaccaaaacggatgagattgatgcacgcctgatagcactttacggagagaagatgcaacctgcgccatacaaacttcgcagtgatgcaatccttgtcctcaagcagaaacggacggtgctgcgccaactcaagaagcaacttgtagccacacgcaacctcaaaggctcgatggaggtccttccattctttgaccccaaatgcaagaaaaccatcgaaaagacgattacatttcttgaaaagcaaatcaaagagatggaagaggaactcgcttcattggcacaaggtgaatacaagaaacagatggacctgctcacctccatcaaaggcatcggtgtcacgctggcagctccgcttattgtagccaccggcagattctcttactttgataatgccaagcaactgacccgctacttgggcttgtcacctacttaccaacaatccggtacgtcagtcaatgtcaaaggccacatcaaccgaaacggggattcaagctttatgtagccgcattctcatcgctcaggtgcaataccgagtgtaaggcatgtttcgaccgtctcagatctaacggcaagcccggcaaggtggtggttattgcggtcgccaacaaacttgtgaggcaagccttcgctgtcgtcacgcaagggaaaccctatgtcgatggattcaaatccgaaaagccataacagctcctgcggagggaacgccatgcggcaagggactgagcacacagccccgacgagcttttcatgcacgataacttgcatgattatgctaattatcgttaaccgtattcagtttttatattatagtt

SEQ ID NO: 4202 - DNA, 1383 bp, unidentified
  source 1..1383: mol_type = unassigned DNA; note = element_656a0cf
  misc_feature 1..2: note = core
  misc_feature 3..88: note = LE
  misc_feature 89..1120: note = CDS
  misc_feature 1121..1383: note = RE
  misc_feature 1091..1370: note = bridgeRNA
agatggggtggttgccgccctccctgacggcatcgcaatgtgccaaaaatgtggtgttgagtgccactgagcggaaaagacggcaaccatgacgaaagatacaatgattggcgtggatctggcaaaggctgtttttcagctgcacactgcgtcgatgacgggagaaccgaagttccgcaggaagctatcgcggcggagttttcccaagttcatggcggaacagcctcctgcaatggtcgtgatggaggtctgtggcagcgcgcattactgggcacgcgagatgaccaagcttggccatgaggtgaagctgattgcaccgcggtacgtcaaaccgttcgtgaagcgccagaaaaacgacgcggcggacgccgaggcgattgtagtcgcggcccagcggcccgaaatgcgcttcgttgatccaaagtccgctgagcaacagagccgggcgattttgtttcgtgctagagaaaggctcgtccaccagcgcaccgaactggtcaacgcgctcagagcctgcctttatgaatacggccaccttgttccgcaggggatccaccagatcacgcggattgccgaaatcctgaatgcgccgaataacgatctgcccgatttaatgcgtgaggaatgccgcgacctgctggagcagatcgccgagcagacgcttcgcatcaacgcccgaaccgcgaagatcaaggttctcgcggctgaggctgacacagcgcggcgcttgcaaaccattcccggggttggcccattgaccgcgttggcagtcgaagcttttgccccacctatggaaagctttagctgtggtcgcgactttgcggcctggcttggccttgttccacgccagttctcctcaggaggtaaagagcgccttggccgcacctcaaaggcagggcaggccgacatccgcagactgctgatcatcgccgcgatgtcgcgtctgaactggatgggctgtaaatcaatacccgacgattcgtggctagcgcgcatggtagcgcgaaagccgaggatgctcgtggcgatcgctttagccaacaagacggcacgaaccatctgggctatgatgacgaagaatgaagattaccgagatccggcgcaggcagtggcggcatgaacaacctgccggccgccgaataagggaggtgtgagaaggcgacgacccgaatgggcaaaatgatcgaacagatctgggtcagaaaaaccagttcaggactctgagcgatatagctcgtcaatgagatttggatctgatccgcagatcaccataccggccagcggcttctgaatatgccgcaatcaaaggccttacagaaaaccgcactcgaacaccaacccacagattcagaaacttcttgcatcccgggcggcaaccacaga

SEQ ID NO: 4203 - DNA, 1430 bp, unidentified
  source 1..1430: mol_type = unassigned DNA; note = element_6573aa6
  misc_feature 1: note = core
  misc_feature 2..80: note = LE
  misc_feature 81..1112: note = CDS
  misc_feature 1113..1430: note = RE
  misc_feature 1203..1424: note = bridgeRNA
taatgagatggtccgccggcttgatcgactgctgaggagtggttgatcgtgaaggcaggtttctaaggaggatcatcgagatggagattcgctcggttggtatcgatcttggcaagacaagctttcatctggtcgcactgggcgagagtggccatgtgctttttcgcaagaagttcacacaaaggcagctcatcgtcttcacggcgaacctgtcgacgtcattgatgggtttggaagcctgctccggagcccactttctgggccgcgcactgcgagaacaaggtcacgatgtgagactcatccctgcgcagttcgtgaagccgtttgtaaagtcgaacaagaacgacttcgtcgacgccgaggccatcgcggaagcggtggatcggcaaaacatgaggttcgttccgatcaagacagacgatcaactcgatctgcaggcgatccatcgggtgcgggaccgtctgatcgcgcgccgcaccgcggtgatcaaccagctgcgggctttcctgctggaacgcggcatgatcttcgccaagagtcggccaagttgcgcaaaagagataccggaggtcttggaggacgctgatgcgaacctgacgccacgcatgcgcaatctgctcgatctgctgtggggcgagtggaagatgctcgagcagcaactcggaggtttaaacgagcagatagagcaaatcgcctctgccgatgccgcctgccaacgactacgaaagatccccggcatcggtccgctaatatcgacagccattgtggctgcgattggcaacggcgctgctttccacaagggccgcgacttcgcagcctggttgggccttgtaccgaagcagcactcaaccggcggtaaagctagactgcttggcatcagcaagcgcggcaaccgctacctacggaagatcctgatccacggagcgcgcgccgccgtccttcgcctcaagcgtgaacgagcacctatgggtgcatggatgacggcgctcgaagcaagagcgccgcgcaacgtgttgatcgtggccaccgccaacaaactggcgcggattgcctgggccgttttgtctagcggtgaagaatatcgcgcagaaacgagtttggttgcagtttaaagcaagcatggaaaagacgcctgtggcttggaaaacgcagatgcgtttcccactttcccacaccacgacggctgctgaatagcttgcccttcgggtctgcataggaatagttaagacgaaagaacagtcacaacggcgtgcctgaaccctgcgcctgaaaatggtcttccatgaccgagcgacttatcaggacaggcacgcgcgcaactcatcatggccaggagattcaatctccaccaaaaaggccgaatacatttgcgcagactttctccttacgttctgctacttttcccttgcagtcagacggcggaccataca

SEQ ID NO: 4204 - DNA, 1647 bp, unidentified
  source 1..1647: mol_type = unassigned DNA; note = element_657a7fb
  misc_feature 1: note = core
  misc_feature 2..252: note = LE
  misc_feature 253..1551: note = CDS
  misc_feature 1552..1647: note = RE
aatctccattccgccgctttcggtcggcggcacaaatagtgatgaaagtatcgactaccctctacgtcctgcctataattaaagcgagaagctatactacaaagcacggggaggtgagtcgtaaaaactctctcgttttagacagcatattaatcagtgtaagttccaccttccaagcacaaataagtggctctcttagaccgtacactaagaattgttttaactcttgttaaatgtgtggtggaacagtcaatggcttctctctatttttcaggaggagctttgcctatgaaagttgtttatcagacctgctgtggtgtcgatgttcacaaatcttttctcgttgccacaatcatcaaaaccacttccggagttcagccttcttaccagaagaagcgcttctccaccttcaacaattccattcttgagtttaagaaatggctgttggacaattcctgtcgtgatatctgcatggaatctactggtaagtactggatacctgtgttcaaccttttggaagacgagatcaacgtcaccatcgccaatcccaaatgggtaaaggctgtcaaaggtaacaaggacgataccaaagattccaagtggatcggggatctgttcagactggggcttgtgccgggaagttatataccgtgtaaagaaatccgtattctcagggagtttacgagataccggtataaacttacctcctgcagaagcagtgagaagaatcgatttcagaatgcgcttactgtctgtaatgtcgcattagattcggttgtttccgatatctttgggaaatcagccacctctgtgatcgattaccttctcgaacagtccgacaactccatcaaccacgaagaaatatcctccagactccttcgctcactcaagaagaagtccgagagtgtcattgaatccatcgaaggttatcagatgactgattcccagaaataccgcatgcgcctcgtccacgcacacatggattatatcacgtctacaatctccgatatagactcaatgattgattcgttggtcgaaccttatgataatgctgtcaagttactgtgtaccattcccggagttgatcgaaactctgcgatcaccatcatttctgagattggtacggatatgtcacagttttctaactccaagcgcttatgctgctgggctggcttgactccgggtaataacgagtcagccggtaagaagaaatctgttcggatcacacgtgccggtgtctacctcaaacctgcattggtacaagttgcccatgcagccgtgaaatccaacaagtctccttactacaaagccaaatatgagcgcatcatgaaacgccgtggtaagaaacgtgccattattgcgatcgccaggatgatccttacagccgcctatcaaatgctgtctacaggcgaagtatggaatcccaccgatctgtacaagattgatatgcccgaacccctcaaggaaaaacagaaagagaaggctatcaaacaggctaagaagcttttaattgcagaggggattatagaagaatccctgcttgcctcttagcaagcccatataaatcaaccttgtcgcaaaaggctatttttcaatagcttgcttaagtgcgccagtttttggctgtcctctactttctttcacact

SEQ ID NO: 4205 - DNA, 1153 bp, unidentified
  source 1..1153: mol_type = unassigned DNA; note = element_657ef43
  misc_feature 1..2: note = core
  misc_feature 3..161: note = LE
  misc_feature 162..1109: note = CDS
  misc_feature 1110..1153: note = RE
  misc_feature 24..170: note = bridgeRNA
cttgtatatctcaaatgagttaaactaagcaacacaaaccgttatcggcatctcgtacgcgcccttgaaaacacttcgtttcttagcttagagagccgataactttcatcacaaaaaccgaacagttgcacgaacacaacccgaatacaaggcaggttacgatgaatgaactcaatttctgcggcattgatgttgctaaacgtagttttgttattggtatcagcagccgtaaacagacgaaaacctttaccaataaccccaaaggcattcaacaagcggttgaatacttaaaacaatgtgcaaatctaagtctgattgtcttagaaagcaccggaggcttagaaattcctctcgctaaagcactttatcgtgctgattttcgtgtggtaatagccaatccacgccaaacgcatcagtttgcgatgtctaaatcactcgctaaaaccgatgcaaaagatgcaaaaatgcttgcttcttacgctaaaatgctggtattggacggtgaagttgaaacacaactttatattccgccaaccccggaaatggaacaattggaagcattggttctacgccgtacccaactcgtcgaaatgcgggtggcggagaaaaatcgcttacatcaagttcacgaaagccagcaagcaagcgtacgacaacttatcgcccattttgacggcttgattgatgagcttgaaaaacaaatagccgttgtaaacgagtcatttaacgatactttaaaaaagtttaatgacatcaaaggaataggtgcaatcacgagtgcgactttgatgtcaatgctgcctgaactcggcaaactcaaccataagcaaatcgcttcattggttggcgttgccccacacccgaaagagagcggcagccaaaaatggtacagccgctgttcgggtgggcgacaagcggtacgaaacgtactttataatgcggcgaatgtcgcacgccgacacgaaccgaagttcaaagcattttatgaacggttgattgctcgtggcaaaccgttcaaagtggcggtcaatgcctgtatgcgtaagcttttgagcgtgattaacaccatcgtccgtgatggttcgcaatggcaagctcacgctgtttaataatgaatttgtatcttgccaaaaattttggggagatacagttg

SEQ ID NO: 4206 - DNA, 1393 bp, unidentified
  source 1..1393: mol_type = unassigned DNA; note = element_6583155
  misc_feature 1: note = core
  misc_feature 2..87: note = LE
  misc_feature 88..1116: note = CDS
  misc_feature 1117..1393: note = RE
  misc_feature 1157..1388: note = bridgeRNA
taatggaatggtcgcccccttccggaaacggcatcattgtgccaaagtggaaccgcgacgtaccactaactgaaagaggcgaccaaaatgaagattactacattcgggattgatctggcaaaaaacgtatttcaagtacatggggtgaatgatcaagggaaagccgtacttagaaaagccctgaggcgcgatcaagttttggaattttttattaaattaagtccttgcttagtcggtatggaagcttgcgctagcgcacactattgggcgagaaaattgcagtcgcaagggcacactgtcaaattaatggctcctcaatatgtaaagccttacgttaaaacgaataagaatgatgcagcggatgctgaggcaatttgcgaagctgtaggtagaccaaatatgcggtttgtgccgatcaagaatgttgagcaacagtcagtgctgtctttgcaccgagcacgccaaggtttcgttaaatcgcgcacggctcaagccaatcagattcgcgatttattgtctgaatactgcattgtgatacgacagggaatttgcaacgttacaaaacgtcttcctcatattctggaggaatgtgcaaatgagcttccaggagttttttgtcaattaatccagcgacttggtgatcatttaaaagaacttgatcgtcaagttggcgaattagaagtacaaattaaaatttggcacaaacaaaacgaagcaagtaaaaaactagaagaaatacctggcgttggtccgataacggcaactgcgatcgtggcatcaattggcgatgcgaagtgcttcaaagatgggcggcaattggctgcatggttagggttggtgccacgtcagcattctagtggcggtaagcagatgctattgggaataagtaagcgcggcgattcttatttaaggacattgctgatacacggcgcgagatccgttcttcgggcagctgaacgcaaagtgcatcatgcgggaagttggttggctaatctgatggaacgcagaaatttcaacgttgccgtagtcgctttggcgaataaaaatgctcggatcatttgggcgctcttggcacacgaacgtaaatatcagattaactttgcatcaggtcattaaggttaggctgtaagctaaagcattaaacgatagaaaggaaaaactccaccgattgcacaggcaattatgaagtgatggcaagacaggttagaccgtggtaggtgaaacctatttgacacagggagcgtaaagctcgagagactgttgaggaacctaccagcaaattccatcagggacagaggcggcagccttgattaaaagtccggatctatggctgcaatctctaccttcttaacatcagtgaataaaagcttggcaaaatgggggcgaccatcta

SEQ ID NO: 4207 - DNA, 1276 bp, unidentified
  source 1..1276: mol_type = unassigned DNA; note = element_658856b
  misc_feature 1..2: note = core
  misc_feature 3..76: note = LE
  misc_feature 77..937: note = CDS
  misc_feature 938..1276: note = RE
  misc_feature 1045..1274: note = bridgeRNA
ttaatgaaatggtcactccctcttccaagcactaagctgaaaacaggcttaattcggagatccatcatggaaaacattgcgcttattggtatcgatctgggtaaaaactctttccacatccattgtcaggatagccacggaaaagcgcttttccgtaaaaaattcaccaggtcaagagtttgaatatttagcgacgtgtcaggcaacgactgtcgtgatggaagcctgtggtggtgctcattttatggtgcgcaagttgctcgagttagggcatacgccaaaactaatttccccccaatttgttcgaccatttgtcaaaagtaacaaaaatgactttgtggatgccgaagccatctgtgaagcggcagcacgcccctcaatgcggtttgttcagccaagaaccgagtcccaacaggcgatgcatgccctacaccgggtcagagaatcgctggtcagggataaggtaaaaactacaaatcagatgcatgcctttttactggagtttggcgtcagcgccccaaaaggtccaaccttgatgaggcgcttcgcagaaattctggatacgaacccgcttccaccttaccttatacggctgttgcagaaactgcgtgaacattatgagtatctcattgaacaaattaaggaattagagtctcagctaaagagatcgctggatgaagatacgactggtcggcaattactgacgatcccttgcgtcggccctctgattgcaagtctgctttccactcagttaggcgatggaaaacagtatgaaagcagcagggattttgcagcttcaacaggtctggttccacggcaacacagcacgggaggacgaaccacattgctggggatcagtaatatatctgcgaacactggagtatcgagccggccgacttgccggctgggtcagggagctgttactacgcaaaaataatttcatagtcacctgcgctctggcaaataagctggccaggatagcatgggccatgactatcagggataagccatttgaagcataactatcgacgattctaactattaaacattcacttacctggttttgcggatactgattactgatgatataaacggccaagcggcctgatgaagaacctgtggttaggagaggcctgaaggccgttgaatttataaggttcatcaggcgcggaactcatcgaggcgcgggcgtaatgcctattcagacgccggatagattcatgcaagccaacaatatcgtcaagatcggtgttgcaaaaacgggagtgaccataga

SEQ ID NO: 4208 - DNA, 1438 bp, unidentified
  source 1..1438: mol_type = unassigned DNA; note = element_6588e40
  misc_feature 1..2: note = core
  misc_feature 3..119: note = LE
  misc_feature 120..1154: note = CDS
  misc_feature 1155..1438: note = RE
  misc_feature 1190..1391: note = bridgeRNA
agatggggtaatcggccggcagcttgtggatagctgaagattttgggtgctgcgcttcaggctgatggtgaaacgaggtccgtgaacacggcctcaagcatcagaaggagaagcgcagcatggaccattttgctggactggacgtttcggtcaaggagacgagcatctgcattgtggatgacgcaggcaagatcgttcgggaagtaaaggtggcgagcgaacctgaagcgttgttggcggtgctgaagaaccccgcctaccacttcaagcgaattgggttggaagctggaccgttgtcgcaatggctgttcagcgctctcgccgaagcaggattgcctgtgatctgcgttgagacgcggcacatgcaagcggtgttgaaggcgcagatcaacaagacggaccgcaacgatgcgcgcggtattgcgcagatgatgcgggtggggctttaccgtccggtgcatgtgaagacattacgcagtcagaaactgcggatgctgctgactcatcgcaagctgctacagtcgaaggcgatcgcaatcgagaacgacctacgcggtactttgcgcaacttcggcctcaaggtcggaatggtcgggaaggtgaagtttgaggcccgtatcaaggagcttgtcgagaacctcccggacttagctgagttggtcgaaccactgctcattgtccggcgggtgctacgcgaacagatcgtcatcctgcatcgccgtttgctggccattgtccgggatgatgaggtgtgccggcgcctgatgacgacccccggtgtcggccccgttgtggcgttgacctatcgcgccaccgtcgacgtgcccgctcgcttccgaaaatccaaggcagtcggggccgtgtttgggctgacgtgctccaagtatcaatcgggcgaggtcgatcggaacggcagaatatcacgctgcggagatgagatgatgcgggtcatgctctacgaagcagctcagagcatgctgcggtcgaagaaatggtcctggctcaaagcctgggcgatgcagatcgccaggcgccgcgggatgaaaaaggcgatcgtggccctggcacgccggttggctgtgatcatgcaccgcatatgggttgacggcaccgagttccgctggacccgagaacaggccacagcagcagcatgaaaaccgtgcagcatctaatccaatagaaggaaactcgaattccaccgagcggtggaatgatgtccctcgcgggacgatggatgaggtgagttcgcatgtccgcttggacctaccgttcgtctgacggcaaggtcgcccaaaagattgttccacctcgttctcgaatcccatgatggaagggcccctggtgccgattccgaagagaagcacgagcccgtgagcgacatcgacaccgtagtggtggatagcctgaaagcgcttgaccctgaatggccgattagaga

SEQ ID NO: 4209 - DNA, 1448 bp, unidentified
  source 1..1448: mol_type = unassigned DNA; note = element_658f0e4
  misc_feature 1..2: note = core
  misc_feature 3..227: note = LE
  misc_feature 228..1433: note = CDS
  misc_feature 1434..1448: note = RE
  misc_feature 10..220: note = bridgeRNA
tccctaccttgttgatcgggatgagcgagccattcgtagggttggctcacccaggggtgtcgggtgtggctttcagtggtctgccgtccgtggcttcctacgattcgccgcccgacccccccgacgactcggctgctgattaggaagtgcgatctgatcgctgagtagggactcgccagcgaggtcgtctgtggtgcaggtaggcaagcgacccgtggagagtgcgcgtgacagcgatttgggccggtatcgacgccggtaagactcatcaccactgcgtggtgatcgatggcggcggcaagcggctgctgtcgcggcgggtggccaatgacgagccggagctgctgcggctcctggctgacgtcctcgtcctgggtgacgaggtcacctggggcatcgacctggccgacggcggtgccgcgctgctgatcgatctgctcctcaaccacggtcagctcacgctctacatccctggcatggccgtcaaccgggcctccgagggctaccggggcgagggcaagaccgatgccaaggacgctgcggtcattgccgaccaggcccgcatccggcgggacttgcacccccttcggcacggcgatgaactggtcaccgaactcaagatcctcaccgtccaccgccgtgacctcaccgacgaccgcacccgtgcgatcaaccggctgcgtggccacctcaccggcatcttccccgccctggagcgggccctggacctgaccaacgcgggccctctcgtcctgctcaccggctatcagaccccggcggcccttcgccggaccggagccaaacggctggagacctggctgcgcaaccgcaaggtccgcagcgctgcccagctgaccgagacggccctggcggccgccgagcgccagcacaccagcgtgaccggagagaagccgacggcccagctcgttcacaccctggtcagggaggtgatgcgtctcaacgaacagctcgccgagatcgacaagcttatcgaggcccggtttcgcgaacacaagcacgccgaagtgatcgccagcatgcccgggatcggctccctgctgggcgccgcattccttgctgccaccagcggggacatgacggccttcggcactccggaccgccttgctgggttcgccggcgtcgcgccggcaccccgggattctggcaagatcagcgggaatctgcaccggcccaagagatacagccgaggtcttcaacgggttttctatacctcggcgttgatcagcatccgctgctgcgacgagtcccgccgcttctacgaccgcaagcgcgccgagggcaagcgcgccgagggcaagcggcacacccaggctgtcctcgccctcgcccgaaggcgcgtcaacgttctgtggaccctgctgcgtgacggacggtgctacgagccgataccacccgtcacggcagctgcttgacaacgagattaggaa

SEQ ID NO: 4210 - DNA, 1349 bp, unidentified
  source 1..1349: mol_type = unassigned DNA; note = element_6594982
  misc_feature 1: note = core
  misc_feature 2..67: note = LE
  misc_feature 68..1153: note = CDS
  misc_feature 1154..1349: note = RE
  misc_feature 1126..1343: note = bridgeRNA
taatgggatggtccgccgcctttacccagctagcagctgggatataaggagcgtacggaggcatcccatggaactacacacaatcggtattgatctcggcaagacggtctttcatctggttgggcttaacctgcgcggcgaggtggtggtgcgcaagaagttttcgcgaacccagttgctgcgcttcaccatcaatcggcatgttcacttggtcggcatggaagcctgcggtggcgcacattttctcggccgggcattgcgcgagcaggagcatgaagttcggctaattccagcgcagtatgtgaagccatacgtgaagacgaacaagaacgacttcatcgatgcggaagcgatcgctgaggcggtgggacggcccacgatgcgcttcgtgccgatcaagagtgacgaccagttggacttgcagtcgctacatcgcgtgcgcgagcggtgggtaatgcgccggacagcggtggtcaatcagatgcgtagcctgcttctggagcgcggcctcacgttgcggaagggacgctgtcatctcaaagcggccttgccggggatcctagaagacgccaacgcgaaactgtcaggtgccttacgctcgctgctggcgcaactgaagctggaactcgagcaattggtccagcgagtggaggaggcggatcagctcatcgaaaagatcgcgcaggagagcgaagtgtgtcgccgactggacgccattcctggcatcggaccgattaccgcaacggcagtgatcgcggccatcggaaatggggcaggctttgctaagggccgggattttgccgcctgggttggtctagttccgcgccaagactcaaccggaggcaaacagaagctgctcggcatcagcaagcgcggtaatgcctatctccgacgactattcgtacaaggcgcacgcgccgtcttgcaattccgagagaagcagtcttccggtttaagggcgtggctcgcacaactaacctcgcgggtacatcatcatgtggccggcgtggcactggccaataagttggctcgcatggtctgggctgtgctcaccaagggagaagtctatcgacctcccatgctggtcagcagcccagctgctaccactggatttacattttcctgccaggtctgctggcgaagtacgagatgacaaaacggtcgaacccggcgctctctgaacccgttgtgggaagaagtcttgcaagactgcccaactaagtgggaagagaacgcagcgcattccatcgtggctcggagctttatgctccaacaaaagccgtatacatttgcgcagaccaactcggtcattctcagttttcgcttgcgacaaggcggcggaccataca

SEQ ID NO: 4211 - DNA, 1421 bp, unidentified
  source 1..1421: mol_type = unassigned DNA; note = element_659771f
  misc_feature 1: note = core
  misc_feature 2..229: note = LE
  misc_feature 230..1408: note = CDS
  misc_feature 1409..1421: note = RE
  misc_feature 14..239: note = bridgeRNA
ctacttgcttcattgacctacgaccgcggcccggccaggcttcggtcgaggcgcccgggctgtcgctctcatttcggctgcccacgctggtcgtgtggctctcatttggcctgcgcagcccgggcgtcgccgcagggcggggagaggctcaagaggggtttgctcggctcgaagtagcgttgccctcccggctcgacaacccagagtggatcgagcatcggaggacgcgttgagtggcacgtcggatcgcgtggtcatcgggatggacccgcacaagcgctcggccacgatcgaggtcatggccggcgacgaggccgtcgtcggcggcggccgcttcgacaccggccgggccggctacgcggctatgaggaagtacgccacgcggtggccgaaccgggtctgggcgatcgagggttgccagggcattggccggcacatcgccaaccggctgctcgccgatggcgaacaagtcgtcgatctgccaccgaagttgtccgcccgggcgcgggtgttcgccaccgggcagggccgcaagaccgacgccaccgacgcccactccattgcgctggtcggcacccggatggcggggttgcgcccggtcgtcaacgacgaacaactcgccctgctgcggatcctggccgaccgccgccgctctttgggcgaggaccacacccggatggtctcccagctgcaccaactgctgctggagctcatccccggcggagcgaaaaagaacctgtccgccgcccaggccaaggcactgccggccacggtcagaccccgcgacgccgtcggaaaggcccgacgccgggtcgctgcggagctgatcagtgacctcgaacggatctaccaacgctccaagcaagccgacaaggaactcaaggaactggtcgcctccaccggcaccacgctgatggacctgcacggcatcggaccctccggcgccgcccgcctgctgatcgaggtcggcgacatcacccggttccccaaccgggcccacttcgcctcctggaacggcaccgcccccatcgacgcctcctccggagaccagatacgccaccgactctcccgcgccggcaaccgacagatcaaccgcgtactgcacatcatggccaccgttcaactacgcaaccccaccgaaggacgcgcctacttcgacgggaagaaagcgtccggcaagacgtcaatggaagcgatgcgcgcgctgaaacgacgcctgtccgacatcgtcttccgacacatgatcgacaacgccgcggccaccgcggcgacgggcccgggaggacaccggggaacgactactgactccagcatgaccagctcacatccccatgccagctcttcggagaagtcacttcccggtcccgccgccacccagcatagaaccccgctcccgacagcgtcttaacacagaggggagc

SEQ ID NO: 4212 - DNA, 1430 bp, unidentified
  source 1..1430: mol_type = unassigned DNA; note = element_659e577
  misc_feature 1: note = core
  misc_feature 2..70: note = LE
  misc_feature 71..1108: note = CDS
  misc_feature 1109..1430: note = RE
  misc_feature 1209..1424: note = bridgeRNA
taatgggatggtccgccgcccttagccggccaacagccggggtataagaggtgaacggaggaggcatcccatggagctacatacgatcggcattgatcttggtaagacagtctttcatctggtgggagttaacctgcgcggcgaggttgtggtgcgcaagaagttttcgcgaaaacaactgctgcatttcacggcgaacctgcgagtcgaattgattggtatggaagcctgcggaggagcccattttctgggtcgagcgctgcaagagcaaggtcatgaggtgcggctcatgccggcccagtatgtgaagccgtacgtgaagaccaacaagagcgactacctcgacgccgaggcgatcgctgaggcggtcgggcggccgaggatgcgcttcgtgccgatcaagaccgatgaccaactggatctgcagtccctgcatcgggtacgtgagcgttgggtagcgcgccgcacagcggtcatcaaccagattcgtggcttgctgctggaacgtgggatcactctgcgaaagggacgttgccacgtcgacgcggcattgcccgggatactggaagacgccagcgcaaagctatcgggcgcattgcgcgtcctgctggcgcaactgaggctggagctcgatcacttggaaacgcggatcaacgaagccgatgctgtgatcaagaagacggttggagagaacgaagcctgccgacggttggttgcgatcccgggcgtcggaccggtgacggcgaccgcagtcatcgcggcgattggcaatggagcggccttccgcaagggtcgagagttcgcggcctggctgggagtagttccgcgcgaatactcaaccggcggcaagcaaaagctgctcggcatcagcaaacgcgggaactcttacttgcgaagacttttcgtgcaaggggcgcgtgccgtcctgcaacagagcgcgaagcaatcctccggtctgagtgcgtggttggcccaacttacatcacgcacccaccataacgtggccggagtggccttagccaataagctggcgcgcatggcctgggctgtactcaccaaaaacgaacactatcggcccccgatgttggccagcgcggctacagcgtgaccggcctgcagatgacgcctggctgaggccaggcttggaaatcgcattcgcgattcccacatctacagaccagcggctactccggagttgatgatctctgccaggtctgctggcgaactatgagatggcacaacggtcgaaccggcgccctctaaacctgtaaacaggaagagtcttccaagactgcattactaaataggaagagagcgcagcgcattccatcatggcccggagtcttgtgctccatcgaaggccgaatacatttgcgcagaccaacctgtcagtttcatttttcgcttgcgactcggcggcggaccataca

SEQ ID NO: 4213 - DNA, 1508 bp, unidentified
  source 1..1508: mol_type = unassigned DNA; note = element_65a4472
  misc_feature 1..6: note = core
  misc_feature 7..274: note = LE
  misc_feature 275..1483: note = CDS
  misc_feature 1484..1508: note = RE
ctcattggactaccctccctcgagcgacaaagttagcgtctctggtcaggtcgaggggagaaagtcgagtgatgcgatcggggttcggggagagcctgagtcgctcgccgcttgacggccaaaatgagacccgctcccccgaatcaaaacgagagaggcccagaccggccacaggatgacgcgccacgtgccccagcaggccagagcgccaatcagtgagcgaccggcaggacctctcgctgcgcagtgtctcgctgtccccggaggcgatgcaatgagatttttcgtcgggattgactgggcgagtcagacccacgcggtctgcgtcatcgaccaggccggccgcgtccactggcagacctcggtgtcgcacacccgtgagggcctcgcggagctcctcggccacctgcgccgcttcagccggcgtggccccgtccgcatcgctctcgaacgcccctcgggcctgctcgtcgacacgctcgtcgaggccgggctcgaggtggtgccgatccaccccaacgccctcaacgccagtcgctcccgctactcggcggcgggcggcaagagtgaccccggcgatgcctttatcctcgccgatctgctccgcaccgacggccatcgcttccggctcctgcgcccgccctccgatgacacgcgcgcgctgcgcgccctcgtgcgcggccgcgacgatctcgtcgcccagcgcgtcgcgctcaccaaccagcttcacgcactgctcgagcggttttggccgggcgcggccagcatttttgccgacatcgcctcgccgatcgcgctcgccttcctcgcccgctaccccacacccgacagcgcggcgcgcctcggcgaaaagcgtctcgcacagttcctcgggcaacatgcgtactgcggccgccgtccggtggccgcgctcctcgcccgccttcgcacggcgccggccggccaggtcggcgaggccgaagcggaggccagcggcgacgtcgtccgcgcgctcgtcgccgtcctcgccccgctcgtcggccacctccaccaactctccgcggtcatcgaggcggcgctgcctcagcatcccgatggccggctcgtgcagagcttgccgcgcagcggtgctgtgaacgcggcgcagatccttgccgagctcggggacgatcgcgcgcgctttcccaccgatgcccagctcgccgccgaggggggcctggcgcccgtcactcatgcctccggccagcaccgggccgtggtcttccgctgggcgtgcaacaagcggctgcggcgcgccctcaccaccttcgccgataattcccgtcacgcctcgcgctgggcagcgctcgtctaccaacgcgcgcgcgcccgcggctgtcgccatccacacgcgatccgcatcctcgcccgcgcgtgggtccgcatcctctggcgttgctggcaggaccgtacgccttacgacgtcagccggcatcgcgccgcgcaggcgctcgccgccgcgtgatggcgtcagggttgacacaggatgt

SEQ ID NO: 4214 - DNA, 1617 bp, unidentified
  source 1..1617: mol_type = unassigned DNA; note = element_65ab90e
  misc_feature 1..2: note = core
  misc_feature 3..280: note = LE
  misc_feature 281..1498: note = CDS
  misc_feature 1499..1617: note = RE
  misc_feature 13..300: note = bridgeRNA
ctactacaatgatttatgggtaaggtgccttacagccagtaaggcccttttccatcttattgcttaagctgtagaatgatgaagcaacggtatggcgtcctgtgacttggacctcgcgtccgcaggtgagactgccagccagcttctcattcgcagcattcgttttatgcaggttgaattgccctttcccacgggtacattcgtgtcacaccccagtagttagaacaggcaatgagtaaagctgacgtttaccgtgtcataactattcaggaggtggactatgaacgctgtaggtatcgatgtttctaaaggcaaaagcatggtgacgatccttcgcccatttggagagatcgtttcccgtcctcacgaggtccggcattcttccgcgcagatcaatgctcttatccgggagattcaatcccttgacggagatacgcggatcgttatggagtataccggccgctatcatgagccgatggcgcggtggctctccgatgcggggcttttcgtcagtgcagtcaatcccaaactcatcaaagactttgataatgcctcgcttcgtaaggtcaagaccgacaaagccgattctgtgaagattgcccgctatacgcttgacaagtggcacgatctcaaacagtatggactcatggacgaattaagaaatcaactcaaaaccatgaaccggcagttcgggtacttcacaaaggtcaagaccgcgatgaaaaacaacctcatcagtcttcttgatcagacatttcccggagccaacaccttctttgacagccccgccagaagtgacggatcccaaaagtgggtggactttgtggatacctactggcacgttgaccggatacgctgcatgtctctttctgcatttactgagcattatcagaaatggtgcagacggaaaggctatgccttccagccggataaaccggaagagatctatgaagcggttcgggacatcattgcagtcctcccaaaagacgaagtaacaaagtttcttgtccgtcaggctgtgactcaggtcaataccgtatctgccgctgttgaagaactgcgcgcccgtatgaacgagaccgcctcacagcttccggagtatcctgttgtgctcgccatgaaaggcgtcggcacctctcttggtccccagctgatagctgagataggggatgtgacccgatttgcccataaaggtgcgctgacagcgtttgccggtgttgacccaggaaaaaacgaatcgggctcctatgcccagaagagtgtccgcacaagtaaacgcggttctgcttcgctgcgcaagaccttgttccaggtcatggatgtcctgataaagacaatgccgcaggatgaccctgtttatgcattcatggacaagaagcggtcgcagggaaaaccttactatgtttacatgacagctggtgccaataagttcctgcgagtctactacggacgcgtcaaagaatatttgttggaacatacagaatcttcagagaactgatgatgatttcctgaagagcgtcccaggccgatgcccatcggtctttgttttgtgcattcattcagcctgtataaagttttcaagttacattatttcagccttgactttttatttgcagg

SEQ ID NO: 4215 - DNA, 1507 bp, unidentified
  source 1..1507: mol_type = unassigned DNA; note = element_65b1d60
  misc_feature 1..2: note = core
  misc_feature 3..250: note = LE
  misc_feature 251..1486: note = CDS
  misc_feature 1487..1507: note = RE
  misc_feature 7..247: note = bridgeRNA
ctaatgggagtgtaccggttggtccttgtcgggacagacttggtatccgagccgctggcaggtgagcactatacgagccaggatggtacctcagtcctatttcaagatcgtgcccctgccggtgagtgagggagggcgatagcgctggtgggatgtcgtgccggttgagcactgatccattaggtagcagctggttcccttcttcccggcggctcgaaacgataggacgccgttgaaaggaaggggtcagatgctgttcatcggtgatgactgggccgaggaccaccacgacattgccctggtcgacgaggaaggaaggctgctggtccaacgccgtttgccggagggtattcaagggatcgaagacctgcatgaactggtcgccgatcccttggatgagcaggacgggccggaccaggtgatggtgggcattgaaacggaccagggcccgtgggttgctgcgctgctggcggctggttacaccgttttcgctgtcaacccgttgcaggcggcccggtaccgggatcggcttgggacctcgggggcgaagagcgataagggcgacgctttggtgttggccgagctggtgcgcactgaccggagacatcaccgcccaattaccgcagacagtgacaccgccgaggaggtcaaggtgctggcccgttcccatcagtcactcatttgggcccggcagcggcaggtcaacgtgctgcgctcgaacctgcgtgagtactacccagccgccctggccgcgttcggtaacagccttgccgaccgggatgccgtagcggttctggccgcggccccgggtccggaggccgcccggaaactgactccagccagggtacagacgttgttgcggaaggccggacgccgtcgttacctggagtcgcggaccgaggagatcattaccgctttgcggagcgggcaattgggcgcccgcgccgggatcgaggccgcctacaccgccaccaccaaggccctgatagcggtcatcgctgagctgaatattcagatccaggcgctgcaagggcaggtggaggagtgttttggccggcacccggacgctgagatctacctgagccagcccggtctcggcgctgtcctcggcgcccgggtgctggccgagttcggcgacgacccgcaccgctacgcagacgctcgggcacggaagaactactccgggatgagcccgatcacccgcgcctccggcaagaaacgggtcgtactggcccgctatgcccgcaacagacgtctcagcgacgcactctacggacaggccttcgctgcactcaatgcctcgcccggagcacgcgcctactacgccgcccgcagatcccgcggagccacccatcaccaagccctgcgtgctctcgggaaccgcctggtgggcatcctccacggctgcctgcgccaccacacgctttacgacgaaaacaccgcctggcctgcagcccagaaggaagacatccccgccgctgcttgacagcttagacccgtgggatgt

SEQ ID NO: 4216 - DNA, 1180 bp, unidentified
  source 1..1180: mol_type = unassigned DNA; note = element_65b5e5b
  misc_feature 1..2: note = core
  misc_feature 3..202: note = LE
  misc_feature 203..1165: note = CDS
  misc_feature 1166..1180: note = RE
  misc_feature 6..207: note = bridgeRNA
cttgtatgttcaattccggccagcgcggtaaagttggagggccgagaaggccctcggacaggatcgtgtagcctggaaatcgctggggcctaacgagcccgtgcctgagtgttatgcgcacgatccccgcgctggtcttcgcgaagcccgaacggttaatcgcgcctcgagcgcgcagtgacaagcatgggaggcgaagaccatgtccgagcaacctgtcgtagtcgggatcgatgtggcgaagtcgcatgtggacgtcgccgtgttaggcacctcggcacccgcggctcgcttcgacaacgacgacccagggcacaagtgcctgatcgaagcgttgacgccgttggcaccggccctggtagtgatggaggcgacgggcggctacgaagcaccgctcgcctgttcgttgcaggcagtgggcctcgccgtggcggtagtgaacccgcgccaggcgcgcgactttgcacgctccttcggacagctcgccaagaccgaccgcatcgacgccctcgggttggccgagttcgccgcggcgctgcttggccgctcggaccttgctcgctacctcaaacctctggcgacggccgcgcagcaggacttggtggctctggtgaatcgtcgtcggcagttgttgacgatgcttggcatggaggagcaacgcctcgccatggcccgcccggccgtccgtcgcagcatccaagcgttgatcaaggcgatccgcaaacagctcgacgacgtcgacggggccatggccgagcacgtgagtcggcactttgccgagctcgccgggctactgcgttccaccagtggcatcggcccggtcgctagcgcgaccctcatcgccgatctgccggagctgggccacctcactcgtcggcaggtcagtgccttggtcggcgtggcgccgttcgcctgtgactcgggctcgatgcgggggcgacggcgcatccgaggcgggcgcttcgaactgcgccgaacgctttacatggctacgttggctgcaattaccttcaaccccgtgatccgcgctcactaccgtcggctggtcgatgctggcaagctcaagaaggtggcgctggtcgcctgcatgcgcaaacttctgaccatcctcaacgcgatggccagaacgcacacgccgttccaggagaactaccgaaacacttgactgcgaagacggtta

SEQ ID NO: 4217 - DNA, 1582 bp, unidentified
  source 1..1582: mol_type = unassigned DNA; note = element_65b66ff
  misc_feature 1: note = core
  misc_feature 2..249: note = LE
  misc_feature 250..1458: note = CDS
  misc_feature 1459..1582: note = RE
  misc_feature 6..227: note = bridgeRNA
tcgtattatgggatcaaccagttctttctggttgatccttttttcatttgcatagaggattaaggtagccggttcgaacgttcctgcccgtgggactttgatcccgagcgctatattgttcacccctacttgtcacgactatgattgaggctggttgggacgcgagatcccgtataacaagcgatgctatagagcgacaagaagtatcattaggggctgctggtaaatctacatgttgggagagatcaaatgaattcagttatcggtctagatatttctaaagaagagagccatggacaagcctttttagagcgtggaaaaccgtacagaggaacgttccatttcgagcatactcgagatggtctggcgaagctgcttcaagctgttcaggatcttgagcatgcggcaagacaacgtcctttgcttattctagaagcaactgggcattaccaaagctctgttgttcagttcctcgaggagcatcactatttatacatcgtcattaatccgctcatctcgaatcgacttaggaagtctaaccttcgtaaagtgaagacggatgctgcagatgcttatcttttaggagaactgtattacaaagaagaatttgaacctatcaaaaaaagaggtgtgcagctgctcaatctgcgctatctgacaaggcaatatgattctctttcaaagatgtgtgtacagactaaattgcagttccaagctgtgttggatcaggttttccctgcttacaaaggtgtctttggtgctatgtattcaggcatttcactacggtttttaagtgaatttccaacctcaaattcggttttgcaaatggacgaaaatacacttaatgctaaaatcaaagcgttgttatctccgatacgaggccgttcagaggaatggattaatgagagagtcaagcggttgctgcatgcagcaaaacaaaaccctttcgagcaaaccatgtacgcgagccacttaatcaatttaaaggttctcataacccttattcttcagtaccaggagcatcttgctaagttggaacaaaacatcgatgccctggctgaagaaatcgaagagtatgatttaatccagtcgatccccggtatcggccataaaattgcggcaacaattttatcggaaattggagaaatcgaccgatttgatcatccaaaaaaattggtcgcctttgctggcatcgaccccagtgtcttcgcttctggtaagtttacggcaacccgaaatcgaatcaccaaacgtggttccagacaacttcgttatgcgctcgttatggctgtccaatgtggacttatccgttcccgaaatacgcgaatcaaagcgttctacgatcgcaaacgagccgaaggaaagccacataaagtagctctagtcgcatgtgcaaataagatggttcattggctccatgccatcttgaaaaacaaaaaaacattccggatagactaaataacattggtataaccttccaagatgtagagtgaattggagggttatttggcattcttattttaactataacatatgatttaagttcactttactggtaatcttgacaagctattagctggta

SEQ ID NO: 4218 - DNA, 1617 bp, unidentified
  source 1..1617: mol_type = unassigned DNA; note = element_65c0e02
  misc_feature 1..3: note = core
  misc_feature 4..249: note = LE
  misc_feature 250..1488: note = CDS
  misc_feature 1489..1617: note = RE
  misc_feature 8..223: note = bridgeRNA
gttcgtaatataaggttagccagatatttctggttgacctttttctatatggtcttattataacggtagtcggggtagaacgtcgcctccgtgggactcgatcccgttagctaaactgttcaccccctacttgtataaacatgtttcaggctggttgggaccatgatcccgtttaacaagcgaacctatgacattacaaggagccttaggggataccgactaatcgaataaattgaaggagatgtatatatgaatccagtagttggcctggatgtttctaaaggtgaaagccaagtacaagcttttttagataaaggtaaaccatatcgtaagagttttagtattgagcataatgttaaaggtttagagatttttttagagtttcttcatgaggtagaaatagctgctaatggagttcaaccttcggtcgtaatggaatctacggggcattatcatatacctgtggttcaattcttagatgaacaaaaatatgtttatattatcatcaatccacttatctcacatcgagccaaaagctcaagtcttagaaaggttaaaacagatgcaattgatgcttatcacctttgtgaactgttttataaggaagaattagaaccttataaaaaaagaggaatacaactcttaaatcttcgtaaccttacgcggcaacaagagagtattgcggaaatcgctgcaaagacgaaagtacagctccattctttattagatcaggttttccccgaatatcgaggggtatttggaagcttgtattcaaaagtttcattacatactttactagccttccctacttctgaggcagtattaagtgttacggaagaagaattaacggagaaaatagcttcactatgtacgagtcgatctgaacaatgggcaaatgaacgagcaataaaattaaaagaagcagcacttcgtaacccgtttcaacataacctttacgaaagccatatttttaatcttgagatgttaataaagattgttcttcaataccaagagcatttatcaaagttagcagatgagattgattctctcgctcaagagattgaagaatatgaattactccaatctatccctggaatcggagaaaaaatcgctgcaacgattatttccgagattggagagatagatcggtttaatagtgccaaaaaactcgttgcattcgctggagtagatcctagtgtatattcatcaggaaaatttactgcatcaattaaccgaataaccaaacgaggatctaataggcttcgccatgccttatatatggccgttcagagcggtattcgagatgcacgaaaatctaagacaaccgaagagattattccacgaaataaaagactaagagagttttacgacaaaaaacgtgaagaaggaaaacccttcagagtcgccgtaatagcatgtgttaataagctcttacattggatttacgccttattaaaaagcagaactacgttccaggatatagcttaataactatatctaagttaatacaacaaaaccttccaataataattaggaaggttatttggcatgcacttttttagtatagcatgagcttattaatctttttatagaaaattattgacaaactattagctg

SEQ ID NO: 4219 - DNA, 1147 bp, unidentified
  source 1..1147: mol_type = unassigned DNA; note = element_65dc4d3
  misc_feature 1: note = core
  misc_feature 2..203: note = LE
  misc_feature 204..1136: note = CDS
  misc_feature 1137..1147: note = RE
  misc_feature 13..186: note = bridgeRNA
cttgtgtctgcaaagctctataagctcgaaggtgagagcgacgggaggcaagctgcaggtccgcggtgttggtcgcacgagtaggaactcaagctgcctcccgccgtcctctgacctagcccgaacagttgaacgagtgaacctcgaaccacaagcgtgggcagtcagagtgctctcgtcgaacagtttacgaggattggctcatgacaacagcttgggtaggtatcgatgttgccaaggattcactcgccgtttggatccggccacaaggtgtactcgtcagcgtttccaatgacgcaacgggatatcagcaattgctggagctctttgcccaggacaagccggggcggatcgttctggaggccacgggcgggtatgagcgaggtgtgctctttgccctgctgcgggcaggccatgtcgtttcccgcctgaatccaactcgagtacgagcattcgctacagcgatgggcaagctggccaaaaccgatccgattgacgctgcggtactggcacacctggcccaggttcttgaagaatcgcccagccaggcgccctcgccagcgcgcgagcggctgcttgcgctggtccagcgccgcgagcaattggtctgccagcgcgatgatgagcgccgccggttgccgcaggctagccaagcctttgtccgggattgcctggaaaatgccatcaagaccctgcaaagcaccatccgacgttacgaccaggagataaccaaggccctgaacgacctggacccggagcaggtcgagcagctacgccaagtcaaaggcgtagggccggtcactgtcgcaggcttgctcgcctacttgccggagttggggcaactcaatcgacggcaggttgccgcactggtggggttggctccgtacaactgcgacagcggccaaaagtcggggcagcgacgcatccgcggtggccgcagtgcaatacgacgcatcctctacatggcgacctggtcggtcattcgttatcagcaggagtttgctgatcgctaccaaaaactacgggacaaggggcggtgcccgaaggtcgcattagtggcatgcatgcgcgtactgatcgtgcggatcaacgcgatggtgagagacggcaccgggtggaggacaggtgccgtgtgaagacagttgct

SEQ ID NO: 4220 - DNA, 1178 bp, unidentified
  source 1..1178: mol_type = unassigned DNA; note = element_65de713
  misc_feature 1..2: note = core
  misc_feature 3..209: note = LE
  misc_feature 210..1175: note = CDS
  misc_feature 1176..1178: note = RE
  misc_feature 3..188: note = bridgeRNA
cttgtatggtgtcggtgctggggtggagagacccgcgtaacgatcggccgcagcaacggaccgaccaagcgagagttctcccgccccgccttccaacgtcgataaggaactgagcggcacccgagcgggcgaccgccgatctgcaggcaagtcaacgtggaaggggcgtgccaccccagcgtctcgattgtcggattgcaggaggcgccatgcaagtcaacccggtgtttgttggagtcgacgtagccaaggctacgctagtgatctgcattcatggcacagccacacgcgtgaagctggccaacgaggaagcggagattgagcgctggctcgagacgctgcccgccaacgtggtcgttgcgatggagtcgacgggtcgctatcacgcggcgttggcgcggcaggtccatcgcagtggccgcgaggcgtatgtgctcaacgccagggatgtttatttctacgccaaggggattggaacgcgcagcaagacggatcgagtggatgcgcaggttattgcccgttatgtagccgagcaccacggcgcgttgcacgcgtggaagccgggtagcgatgcgcaagtggcgctgcagacgctgttacagcggcgagcgcgcttggtgacgcatcgggtagcggtgcgtcaattgctgcgaggtgtggagggactggacgaaccagcgcaggacctggaggaacaattcgaacgactgctcgagcagatcgaccgccaagtcgacacgtgggtggccagcgagcccgatcttgcgcggcgctgccgcttgctacgcaccatcaccgggatagggctgcagagctcggcgctgctgacggcgttgctcagccgcattccgtttgccaacggcgatgcgctggtggcctacagcggactggatccgcgtgccaacgactccgggccaaagaatggtcggcgcagattgtccaagcgcggcaacgcggacctgcgtcgacagttgtatctggcggctttttcggccagtcacagcaaggctctcggcccgctttatcgctcactcaaagccaaaggcttcaagacgaccgaggcgatggtgatcttggcgcgcaagctactgcgagttgtctgggcggtctggaaaagtggcaaaccattcgatccaactcgcttcgcgtcgccagtgacttgcgcgcaaacatagaac

SEQ ID NO: 4221 - DNA, 1381 bp, unidentified
  source 1..1381: mol_type = unassigned DNA; note = element_65e21a7
  misc_feature 1..2: note = core
  misc_feature 3..83: note = LE
  misc_feature 84..1112: note = CDS
  misc_feature 1113..1381: note = RE
  misc_feature 1086..1368: note = bridgeRNA
tgatggagtggatgcccctcccggctgcgcctgggtgtgagaaggtgaaggattgcggatttacagcaaggggagaggacaacatgaatgacgtgagcatcatcggcgttgatctcgcaaaacgcgtcttccacgcgcatggcgcacgctcggacggtagcgtggcattccggaaacgattgtcacgatcgcaactgctgaccttctttgcaagacagcctcgctgcacggtggcgatggaagcttgtgccactgctcatgaatggggtcgagcgattggcgaactgggccacgagatccggctcatcccgcctgcttacgtcaagccgttcgtgaagcgccagaagaacgacacgtccgatgctgaagcgatcgctgaggcggcgtcgcggccaaccatgcggtttgttgctgttaagacggaagagcagcaggcacgctcgatgatcttccgaacgcgcgaccttctcgtgcgtcagcgaacgcagttgataaatgctcttcgaggacacttggcagaacatggcgtgattgcgcctcatggcccggcaaacgtgaagcttctggccgccgcgctgagtgattttgatcgttcgctccagccgctggtgcgcgacattggcgcagtctatctcgaacagatcagcatcttgaatggtaagattgcggatcttgagaaggttctccgacgtgaggctcagcgtggagctgacacctcacgtttgcaaactatgccaggcatcggcccgatcaccgcaatggcgatcgagacctttgcaccgcccatgcagaccttcaagcgtggccgcgactttgctgcctggctggggcttgtaccggttcagcattcgacgggcggtaaacagaggcttggtcgcacatcaaaaatgggtcagcgcgacatccgtcggctcctcattgtgggtgccatgtcggtcattcggtgggcgtcgcgccgaggtgcgccggagggatcatggctcagccgcatgctggcgcggaagcctttgatgctggttgccatggcgctggcgaacaagatggcgcgcacagcgtgggcgatgctgataaagcaggagaactacaggaatccggtgacgatgacggcctgatcaggcgatcaggcatcaaaaaagctggatcgtcgggcatgtgaggaggtcgacgacgtcaagggcaaacgatcggtctgatcgggattagaaaaagcaccgaggctccaagagctacgagctcgtcgagttgatttgctcctaatccgcgtatctccatgacggcctgcggcatggttcacgccgcaatttgaggcctgacatgaccgcacccgatcacatgctcgaagcgatcgaaaacagcttgcatgaaacggggcatccacaca

SEQ ID NO: 4222 - DNA, 1388 bp, unidentified
  source 1..1388: mol_type = unassigned DNA; note = element_65e48d3
  misc_feature 1: note = core
  misc_feature 2..222: note = LE
  misc_feature 223..1377: note = CDS
  misc_feature 1378..1388: note = RE
  misc_feature 22..237: note = bridgeRNA
ctacttgttagaaccaccacttgcagcccgaggcaggccagccttgggcgaggtgccagcgggtggctcgcgaaccggctgcccacccgaacagaggtgtggctcgcgaacggctagctcccgcctggcaccgcttgcggggagtggctcgagaggggactgaacacgctcgaagtagcgctgccctcctcgttctttcacgtgacgaccaaagggagagcggtggcgaaggtggtgatcggcgttgatccgcacaagcggatgaacgcggtggtggtcgtgaacgccaagggcaaggtgctggctcgccaacagttctcgaacacagcgcggggctttcgggagttgcgaacgttctctcggcagtggcgcccccggacgtgggcggtcgagggatgcaacggcgtgggcaagcatctggcgcagcgtctcgtggcccagcacgaaaccgtggtggatgtttccactcgccgcgccgcgctggtccgggtctacgccggcggcaacggacgcaagaccgacgacaccgacgcgcactcgatcgcgatggtcggcctccagactccaggcctgccggtggttcgccccgacgatcggaccgtgacgctgcggctgttggccaaccgtcgccacgagctcgtgggcctgcgaacccaggccgtgtgccgactccaccgagacctggccaacctggttcccggcggcgcaccaagggcgttgaccgccaagaaggccaaggaactgctggcaacgatccgtcctcgagacgaggtcggccgcctccgccgacagctcgccgccgaccagctcgccggcctggtcgccctcgaccggcgccttgccgaactcgaacgacagatcaacgcggcggtcgccgccacacccaccaggctggtgcgcatcttcggagtcggcccggtctcaacggcgaggatcctcggcgaggtcggcgacgtcgctcggttccgatctcgtcatcacttcgccagctacaacggcaccgcccccgccgaagagggcagcggcggcgcgccgatccaacgggtcaacctcaagggcaaccgcaagatcaaccacgccatccacatggtcgccatcacccaggtccgcaacgacactcccggccgcgcctactacctacgcaagcaagcgcagggcaagacccaaaaggaagccctccgcgctctcaagcgcaagatctccgacgcgatctaccgccagctcgtcgaagacgcgctcgctgaaaggggtccgggagggcaaacggggacgactcttcgatccagcgtggccggcccaaccccgacggccggctcttcggacaagccacaacccggacccaaaccccaagctacgccgctacccgcctccgcttgacagaggggtgc

SEQ ID NO: 4223 - DNA, 1347 bp, unidentified
  source 1..1347: mol_type = unassigned DNA; note = element_65ef7f7
  misc_feature 1: note = core
  misc_feature 2..63: note = LE
  misc_feature 64..1110: note = CDS
  misc_feature 1111..1347: note = RE
  misc_feature 1123..1341: note = bridgeRNA
taatgggatggtccgctccgtcctcctgcctcactctgaggcgccaaccaaaggaaggctgagatgattcgcaataagccgagcgcagcggtgtatgggatcgatttgggtaagaacgttttccacgtggtcggtactgatgcggctggcaatgtgatccagcgggccaggttccgccgagacaccctgcttgcgttctttgagcgcgccgagcgagcactggtggggatggaagcctgcccaggttcacaatggctggcaaggaagctgcaggcgatcggacattcggtccggatcatcccagctcaatttgtgaagccctatgtgaagtcgaataagaacgacacaattgacgcggcggccatcgcggaagcggtcgttcgtccaaccatgcggtttgtacagatcaaagagcctgaccaagtggatctgcaggcccttcaccgcattcgcgatcagctggttggtagtcgaacacggttgatctgccaaatgcgtgcgttttgccttgaatacggcgtcgcgatccgtcagggcgccggcgtctttaagctggatttgccccgggtaattgccgatgaatcgaatgacctgactccgacgatgcggcgcctcctcgccgagcttttcgatgatttgagccgattagagaagcggatcggcggagttacccgggagatcgagggactggcggcaacggatgagttggctcggcggcttatgacagtacctggaataggccccctcgtggcgacggcgttgcttgccgccgctggcaacgctcagcagttcaagaaagcgcgtgacatggccgcatggcttgggctggttccgcagcaatattcaaccggaggaagaacccaaatgctgggcatcagtaaacgcggaaaccggtatgtccgccggctactgatccatggggccaggtcctgcatgatgcatctcgatcgctctcgagaccgactcggcgcctggatcgacaggcttcaatcacgcatgcacgtcaacaaggtcaccgtggcgctcgcggcaaagatcgcgcgtattgcctgggtggtcatcaatcggcccggggctatctacgaacgtcgtgatcctgcgattgcctgacaagtcccggtcaacgattgcgaggctcgaggaggatgacgagacagtcgatcggcgcgccgtaagtccttcccgaaagaggaccctgtgtccggacaagctaagtggaaacggtgcgcgcggatctcatcatggcctgactgcaacagcagtccactcgcgagaggccggatacatttacgcaactgtcgtcgttgtcatacccaagaaccttgcatgggcggagcggaccataca

SEQ ID NO: 4224 - DNA, 1549 bp, unidentified
  source 1..1549: mol_type = unassigned DNA; note = element_65fd608
  misc_feature 1..2: note = core
  misc_feature 3..249: note = LE
  misc_feature 250..1419: note = CDS
  misc_feature 1420..1549: note = RE
  misc_feature 12..236: note = bridgeRNA
ctagtataatgattatgacttatccaatgagtcatttacatatatctctttctagctgattttgttaaaatggaaaagtgaatgtgtactttgatttatccttgtagcctgactacctaagaaagtctattgccacagcacttgaccgtaattgtgataagttggataagtcttgaacttgtatttcacactaggctctttggtttcttgtttgtggtcacatcacattgttagaaaggtcgtgtttttatgaattacataggtattgatgttggtaagttcaatcattgctgtgctgttatgaactctgaaggtgaagttcttgtagaaccattcttctttgctaataacagcgatggttttgatgctctcttacatatcatcaaacccttccaatcctctcgtcatatgagcggattagaatctactggtcactatggtgataatctactgcgttttctgcttgctaacgactttcaagtaggtatcattaatcctatttctacggatgccaagcgtaaacagaagattcgtaaaaccaagaatgacaagaaagattctttaacgatatgcgctgttctccaatccagagattatacacatatgactaaaaataagttgtccttgcgtgagggtaaacagttgactcgctatcatcatgatctcactgcctctttgaatcaagccaaaaacaaacttcaaaaatgcattgatattgtatttcctgaatataactctatctttgcaacgaaatattcaaaagcctatatggccgttttaaaggaatgtggctctgcgaaagtcatcagagaaactcatctaaaacatctcaagaaaatcgtctcagacgcctcacacggcaagatcaattcggattatcctacacgtctgaaagaatcagctaaaacttccatcggtgaggataacgcggtcatgactcttgaaatcaaacaactcatcgccagtattgaactgcttatggatcaacttgatattgtggatagaaaaatagaagaattagcacgcacgctgaactctcctatttttacgattcccggcatcggttggattaccggaatgtcgatcttatgtgaattagggcctattgataacttcagctctcacacaaaagttatcgcttacaccggtttagattgcgcagtttatcaatcaggacaatacaatgcagataagactgcgatcaccaagcgtggttctcctcacataagactctcactttaccaagcagcacttcctctttgtagattcaatgctactttcaatgagtattataaccgaaaacgctcagaaggtaaatcccatcgttgcgctcaaggccatgttgttcgtaaattactaagagtcatttttaagttgcttactgaaaacatgagctttgattctgctttgtgtaaataataacgctatatcatcatttattaaatggctactcgttagttgttttcagtgtacacatattcacttttcaaagatcttcatctatttccaacagaaaagtcaatttaactattgacatctatatagttgg

SEQ ID NO: 4225 - DNA, 1509 bp, unidentified
  source 1..1509: mol_type = unassigned DNA; note = element_660895d
  misc_feature 1..4: note = core
  misc_feature 5..108: note = LE
  misc_feature 109..1218: note = CDS
  misc_feature 1219..1509: note = RE
  misc_feature 1233..1435: note = bridgeRNA
agacgtcatgttccgaggcctgagatcggtggcccgccctttcgtgcgattaagagacgagggttgctcggataggccgagccgatcctcacgcacggaggacgagccatgggagagtatagcgaagcatttgtcgcgtttgatgtagccaagaagaagcatgcggtggcgatcgcagcgggcggccgcacgggcgaagtccggtttctcggtgaggtcgagaataggccggctgcgatagagcggacgatcaagaagctgggaaaaaggtacgatcgactgcacgtctgcttcgaggccggaccgactggttacggactttgccgtcaggtccgcgatcttggtcacgactgcatggtggttgcgcccgccctgattccgaagcggtcgggcgagcgcatcaagacgaaccgaagggacgcggtcactctggcgcggctgcatcgggcgggcgaactgaccggagtgtgggtaccggacgtcgtccacgaggctgtccgcgatttggtgcgggctcgggaatccggagccgacgacctgcgccgcaaacgccagcagctgctctccttccttctgcgccatggtcggatctacgagggcggcggtcattggacattggcgcaccggcgctggcttgcccgccagagcttcgagcatccggcgcagcagatcgtgttccaagagaagatcgacgcgatcgaggacgcggttcagcggctacgccgcttggacgagcagctgagcgccgtcgtgcccacctggtccatggcgcgggtcgtcgaggcctatcaggcgatgcgcggtgcctcgttcctggtcgcagtaatcttcgcggccgagatcggggatgtgcgccgcttcgatacaccgccgcagttgatggccttcctcggcctggttccgggggagcgttcgaccggcgacacggtccgcaggtcgagccttacactcgccggcaatcgacgcgcccgccgcgccttggtcgaagcggcctggacttaccgctatcccgccagggtcagcgaggccctgaggctccggctcgaggggttacccaaagctgtccgcgacatcgcctggaaggcgcaggtccggctctgcgctcgctatcgtcgcctcaacgccgccggcaagaagccaccggtggtcgtggccgcgatcgcgcgcgagatggccgccttcctgtgggccattgggcaggaggtcgaaccgtcatagacgagtctcgacccagcccgctgcacagggccgggggtggggccacggtggggaactcccgtcgctagttatgtggccgagccaatccgcccgacgcccgccctctagaccgaggacagccccgagacgaagacacggaaggcggtatccaacccgcggatgagagtctgatcaaccgtcgtctctgagctccacccccgaccctgtgcagttccagccaatccgactgctttgcacactcgcgccaagcagttgttccctctcgccttcagccttgacagggaacatgag

SEQ ID NO: 4226 - DNA, 1807 bp, unidentified
  source 1..1807: mol_type = unassigned DNA; note = element_66097bc
  misc_feature 1: note = core
  misc_feature 2..358: note = LE
  misc_feature 359..1675: note = CDS
  misc_feature 1676..1807: note = RE
  misc_feature 112..289: note = bridgeRNA
tagtataataatggtgtagtcaatcaagactacttggttaataagtttctgtaaatcagataacaaaagaagggattcttccttcatcagatgttatccataataattatcatgtctgacggttcctgatagacaccagataaaacataaggtattatctcttaggataggacaaagaatgttcacctccttgggaagtcacttctgtgactgatacctgcaataaagtcaattagtccattcgacagggttttatgttttagctggttgggagcctgaaggccatacccgaataacacgctaggttgtgtacctgccagattggaaatggattcctatcagaaaggggctattgctcatgtcaaacaaagttatttttaatcttgatgaactattcatctctgttggtattgatgtcggtgctgatttctcatggatgtctatagcacttccaaaccaacaattcgtaggaaaaccttacaaaatcctacataacagtattgattcccttacaaccgctgtttctaaaataaaagaagcagaagagttgtattctttggaaagtcgcattttcctcgaatctacgggaatttatcattacccactcttctgctatcttcgtgataagggttttaactgctcggttattaatcctatcatcactaagaatagcacaaacattaacatacgaaaagtacataatgatcgttttgattctaaaaaagctgctttagttggcttgaagcctgatttaaaggtttcacttatgccatcagatcttgctctaaactgccgtaatctgtgccgtgaatactacgatttaatggataatcgcagtgcctatgtgaataaacttcaaggtgaattacgcatggcgtttcctcagtatcttggcatcttttccaaggttactatcaacacttctcttacattgttggaaacttatacatctccatcggcttttcttgaagcagacaagcaagagattattgatatcatcaaatccacagctcgatttgggcttacatatgctcaaaataagtataatgccctaattcaggcggcaactgatgcaaatcagtttgggtacattatagacagcaacatcaaacgtattcgcctttatatcagcttcatacgtaaatatgatgaagaactcaacagcattcttgaatcactccacgagcttgttgatgctcatgaagatgctgactttgtcaagcagattcatttgattgaaacatttaaaggtgctggtttcttgtctgctgtatccattatgggtgagataggtgacttttcagcattttcaaaacccaaacaacttttcgcttattttggtcttgatccagcagtaaagcaatccggtaaatttgaaggcaccaaggttcaaatgtctaagcgtggttccgccatcgccagatgtgtgattcacacgttaaccctacaaagcatcagtatctcccgtaatggagaagctaaaaatccagtccttcgtgaatactatatcaagaagtgtgattcaaaaccaaaactcgtagcaatgggggctgtttcacataaagtatgcaacatgatatttgcaatactcagagacaacaaaccattcaaaatcattgctcctcaggagcatatcaaacaatacaatgctgctaaatgcgacatagctgcataaaatactatgaccccaatgaatcaatatctttcaaaaaacgatattttcaccaaggggaaagtccgcccttttttagtcagaaaataaaataaattttttctcatttaactattgacatttattagctggact

SEQ ID NO: 4227 - DNA, 1317 bp, unidentified
  source 1..1317: mol_type = unassigned DNA; note = element_660aff8
  misc_feature 1: note = core
  misc_feature 2..274: note = LE
  misc_feature 275..1270: note = CDS
  misc_feature 1271..1317: note = RE
  misc_feature 64..266: note = bridgeRNA
cctttagatttgttctataaatataatctattgtgatgatgttgaaaagagggggtccgggggagactcataactcatagaaatgttcataactttagtgtagaacaaaaaaagaacggggtgaacttactctgcctctggccttaagggccgtacctcgtattagtccccgttcttattaatcaatcggtcgtctagaaccaaataggattatagcctacctgcccttttaaaggtgttagtttaagcgaccattttaaagcactataaaattatggaaataaaagaagttatcggaatcgatgcgagtaaattaacactggattgttgcattcataccatcggtgagcaagcggtgttcgagaattcacctgaagctatttcaaagatggcagactggtctatcaaaacaagcgatatgggcaaggcgaaccttttgttcgtttttgagcatacaggtctatatacccatcagcttatccaatatctaggtgccaatggttatactttccatgtagttcccggtctggagatcaaacgttcccttggtatttccaggggcaaggaagatagggcggatgccaaacgtatcgccctgtacggctatcgtgtacgtgaggaagtggagccttaccgggttcgtggcgaagccttggaaagcctgaaaggcctgatgtcgatgcgcagaaaattggtctcgcaacgggcggggcacaaaagtactttgggggaacagcaaaggatattggacaagaaatccggcaaggtactgttcgaggtacagcaggcacttatcgatgcccttgacgtgcaggtttcccatatcgaaaacgaacttgaaaggattatcgggcaaaacccgagccttcgaaacctgtaccggctcttggtaggcatcagggggatcggtccggtgaccgcgaggttcctgatcgtctataccgtcggcttcacggctttcaagaattggagaaagttctcttcctattgcggtacggcaccatttccccatagttcgggaaccagtatcaggggcaggaccaaggtaagccatctcgccaacaaggaaggcaagaccctgctcaatatgtgtgcggtctccgctatccagttcaatcctgaaatgaaagcatattacgaaagacgagtggaagcgggaaaaaataaaatgagcactttgaacataatcaggaacaaattactggccagggcctttgccgtggtcgctagggggactccctatgtcaataccatgaaatatgcatcctgaacaatagagaaaaattatagcaataaatttgttttaatcataggata

SEQ ID NO: 4228 - DNA, 1593 bp, unidentified
  source 1..1593: mol_type = unassigned DNA; note = element_6612327
  misc_feature 1: note = core
  misc_feature 2..78: note = LE
  misc_feature 79..1149: note = CDS
  misc_feature 1150..1593: note = RE
  misc_feature 1355..1584: note = bridgeRNA
taatgggatggtccggccgcgctcccgccccgccagtgatagatgctggctcggggcagcgaagacaaggagcacgccatgtctcagcaatccaactgcgcaatcgccgtgatcggcatcgatattggtaagaactcgttccacgtcgtagggcaggatcagcgtggtgcgatcgtactgcgacagaaatggtcgcgcggccaagtcgaggcgcgacttgctaaccagccaccgtgcctaatcggcatggaggcttgcgtgggcgcgcatcatctcagccgtaagctgcagctactcggccacaatgcccggctgatgccggccaaatacgtgcggccgtatagcaagggacagaagaacgacttccgcgatgcggaggcgattgccgaggcggtgcaacgcccgaccatgaagttcgttgcgaccaagacggcggaccaacttgacctgcaggccttgcaccgcgtccgcgagcgcctggtcagtcagcgtaccggcattatcaatcagatccgcgccttcctgctggagcggggcgttgcggtacggcagggaccgcgtttcctgcgactcgagctgccgggcatcgtggcgacgcgcaccgatgttctctcgccccgcatgtcgcgcgtcatcgaggagttggcaggagattggcgccacctggatgtgcgtatcgagggcctttccagcgagattgaaacgctcgcccatcaggatcagcactgcgagcgactgatgacggtccccggcatcggtccgatcatctcgagcgcgatggtggccgcgatcggcaccggtgacgtgttccccaaaggccgcgactttggcgcctggctcgggctggtaccgaaacaaatctcgacgggagaccggacgatcctcggcagcatatcaaggcgcggcaatcgctatctgcgcgctctcttcgttcaggcagcctgggtcgtgctggtcaagctcgggcccaagcagtgggaacgctatgggctcaaatcctggatcgaggcggcgaagaagcgactgcaccacaacgtgcttgccattgcgctggccaataagcttgcccgcatcgcgtgggcggttctcaacaaggggcgcaccttcacgtgcgtcaagaccgatgcgatagcgtcccgtccagcgtaatcctcgcgccgtgctcggggccgtacaaggcgtggcctgggcagcatggacgcgaggggcaagggcctgcgcaacggccagccttgacggcccctgcgcgcggcgcgtccgtggctcgcaggtcgggacgaaggaacggccgccaggcacgaacaaaggaacagcgcaagcaagatgaggagctatcgatgacctagcttagtttgcccgccgaggtctgcgagaggatgagacgaccatggaggatcggtcttcccggcgcatgcgaacactggtgaccccaatggcccggtcgaggcctgtccgctaatcagatcgtatgcgcgctgatatccatgatggcccggagcacacgctccaagcagaggccggatacattgatgcaagaccgttatcttgccgggatcgacgaaagcctcttgcaacgcgcggccggaccataca

SEQ ID NO: 4229 - DNA, 1360 bp, unidentified
  source 1..1360: mol_type = unassigned DNA; note = element_6622338
  misc_feature 1..2: note = core
  misc_feature 3..235: note = LE
  misc_feature 236..1102: note = CDS
  misc_feature 1103..1360: note = RE
  misc_feature 1078..1351: note = bridgeRNA
tgatgatgtaaccgccccccgacggcatctgtgtgccaaggtgggtcacttaggatccacaaaggggagcggtcatgtcggagattctcacggtcgggctcgatttggcaaagaatgtgtttcaggttcatggagcggatagcgctggtcacgcggtgctgcgtaaaaagctgcggcgggcgcaggtgctggatttcttcagcaagctgcccccttgtgtcgtggcgatggaagcttgcggcggagccacttttggggccgcgagattggcaagctgggtcatgacgttcggctgatcccgcctgcttacgtcaagcccttcgtcaagcgccagaaaaatgacgcgacagatgctgaggcgatttgtgaagccgcggtccgccccaccatgcgttttgttccggtgaagagcgaagagacccaaggcgcggcgatgatctttcgtgtccgcgaattgctgatccggcagcgcacccaggcgatcaatgctctgcgtggtcatctgaccgaattcggccagatcgtgcctcagggcgcggcgaacgcatcaaaattgattgccgtcgtcgaggacccggaaagcggcatacccgccgatgccatcgccactttgaaggtgctggtcatggcactcgcccacctcgaggcagagatcgggaaactgaatgcagagatcgcccgtcgggccaaagagaatgacgtggcgcggcggctgatgacggttccgggcatcggtccgttgatcgccacggccattgcggtcctagccccaccgcccgataccttccgcaaggcccgtgattttgccgcctggctgggcctggtgccacgacagcattcgaccggcggcaaacagcggctcggggcgacaacaaagatgggcgagcgctccttgcgacgcttgctgatcattggcgccaacagcgtcatcatcaaacgacatgtccatgctgccgctaagcccggcacgtggttgggcgggatgctgacacgtaagccaccgatgctggtgcgggtggcgctggcaaacaaaatggcacggatcgtttgggccttgatggcccgcggtggtgtctacaaggctccggccacggcggtgtaagccgtcagggccgcgaggacgtcggagcgaaagagaggcaaggagcagtttggcgcaatcgtcgtgagacgggatcgggagaaccagtgtgcaacagagtgcctttgagcacgcggctttgatctggatccgatcttcgaacaccatacgggcccgcggcaggtgtgacgccgcatcatgaggccggacacatgtcagcacccgatgacgcgctaaaatcagctctaaaatacctcttgcgcttggggcggttacaca

SEQ ID NO: 4230 - DNA, 1592 bp, unidentified
  source 1..1592: mol_type = unassigned DNA; note = element_6636392
  misc_feature 1..4: note = core
  misc_feature 5..163: note = LE
  misc_feature 164..1441: note = CDS
  misc_feature 1442..1592: note = RE
ctcctatctttaagtcgttgcatttttaagccttttatcgaatgcttatggatgcaatgcagattctggcgggcagggttgccgacatgcggtgtgagagccttgcttctcgtaaaggagtctggcaacctgccccattcgggcgaggccgcggataagctggatgagggtggccctccgcgccattcctcggatctcttctaggaggttgcggtcccgggtgcggaagcaggagcccgccgccgagcagaagggggatcccatgatctacgcaggcgtcgacatcgccaaggcggaccacgtgatcggcgccgtcgacgagacgggggcccaggccgccaagcccatggccttcaagaacagcgaggccggcttcgagaggtgcatagcgtggctggaatccgtcgcgcagacggaagacgacgtcttcgtcggcatggaggcgaccgggcactactggatggcctgcttcgcccacctcacggccgccggctacagggtctgcgtggtcaaccccatgcaggtgagcgccatgcgcaggctcaagggcctctccggcgtgaagaacgaccgcatagactccctcctcgtagccgagacgctcaggcagggcgactacgaccagaccaggctcgccaccgacgaggtgcaggcgctcaagcagctcacccgctaccaccaggggctcaagcgggagctcgcgaccgtgaagacccaggccatctgcgtgctcgacgcctacttccccgagtacgcggggctgttctccgacatgttcggggcagcgtcgctcaaggtgctctccgagtgcccgaccccctccgaggcggcccgcaagcgcgcctcgtcgatagcgaagatgctgtcggaggggtcgcacggcaggctcggcgccgagagggccgcccagatcaaggccgcagcccggtcgtctgtcggcatcaggctcggcgaggacgccgcatcgttccagatcaagacgatggtctcccagatcgagttcctgaaccggaccatcgccaaggtggagcgggaggtcgaggggctgctcgagaggatcgagcccaacatcacgaccatacccggcgtgtcaaccacgaccggcgcgcagatcgtggcggaggtcggcgacgtcaaaaggttcaagaacgctgcctctatagtgaagtacgcgggcctcaactccggcgtcgacgaatcgggcaagttctccgccgagggcgtccccataaccaagcaggggtcgccctacctgcgaaggtcgctctggctcgccgcgaaccgggcgcgccagtacgaccccaggctcaaggccttctacgacaagaagcggcgggaggggaagccccaccgggtggcggtgaccgccgtcgccaggaagctgtgccacgtggtctatgcggtcatgcgcgacggggagccctacgacccgagcaagtagggcggcccgattgcggcctttcccacatcgccgcggcgatgcgccccattgcgcccaaaagcattcgatattcggctttcaaaatgcggaatccggtaaattcgaaactctcaatttcttacggtttcgcccttgacttcatatagctggt

SEQ ID NO: 4231 - DNA, 1166 bp, unidentified
  source 1..1166: mol_type = unassigned DNA; note = element_6636f87
  misc_feature 1..2: note = core
  misc_feature 3..206: note = LE
  misc_feature 207..1154: note = CDS
  misc_feature 1155..1166: note = RE
  misc_feature 12..212: note = bridgeRNA
cttgtcttatgattttccctgcggatcaggcaaattgagtgccatcaccggcggctcgaccccgccggtgatgagaggggatggatcgtcgacgcgctgacctttgaagggccgaactaaagtttgatcacccctttcttttccatgtggcctgaacggataccggggttttcaagacccggatgacaagctgaggacaggaaaagatgacccagacgatagcatttttcgccggtatcgacatctctaaagagacgctcgatctcgccttttcgaatgacgtcgccgtcgttcagttcgacaataccaaggccggctgccgcaggcttgtggcgcttttggccaagcatcaacctgagtgcatcgtcttcgaggcgaccgggccttaccatcgcgagttggagatggcgctggcggcagcagggcttgcctatgccaaggccaacccgcgcaaggtgcgccgctttgccgacgtcatcgggatccatgccaagactgaccgagtcgatgcaaggctgctggcccgcttcgcagccatggtcgacatgaggccgacagcgcaaaagagtgcatcgctgcaaagccttggcgaactcatcaatgcccgtcaaggcctgattgccgaccgcaccgccctcaagaaccgcagccatgtgcagcgctcgaagctcatcatccgccagaaccaggcacgactggcgctgatcgaaagccagattaaggcgatcgatcaggaagcgattacgctcgtcaagcaggatgaggcgctcgccgcccgcttcgacattctcatatcgattcccggcatctcgacattgacggccatcgtcatactcaccgaaatgcctgaactgggtacgctcgaccagcgacaggtcgcctccctggcaggccttgctccgcatccgcgtgaatcgggagcctggaagggcaagcgcttcatttgcggtggacgcgccaatctgcgccaggcactctacatgcccgccctcgtcgcagcccggttcaatgcagacctcaagaccaaatacgacgcccttatcgcagccaggaaaccaccaaaggtcgccatcaccgcaatcatgcgaaaactcattattctcgccaacgctctcatcagagatcagcgaaaatggtgccaaaaaccggcttgatcaaaacggata

SEQ ID NO: 4232 - DNA, 1361 bp, unidentified
  source 1..1361: mol_type = unassigned DNA; note = element_6639202
  misc_feature 1..3: note = core
  misc_feature 4..86: note = LE
  misc_feature 87..1115: note = CDS
  misc_feature 1116..1361: note = RE
  misc_feature 1102..1347: note = bridgeRNA
tgatggggtggacggcccctgctcaccggcgtcgcaatgcgccaagatggtggttgtcgaaacacaccatttgaagggggccgtccatgaccgaggttagcacgattgggttggatctggcgaagcgggttttccaggttcacggcatcgatgccactggtgcggcagtgcttcggcggcaattgcgccgtgccgaagtcgtcaagttcttcgccaagcttacgccctgcgtcgtggggatggaggcgtgtgcctcggcccactattgggcccggacactggtcaaactgggtcacgaggtgcgactgatcccgccatcgcaggtcaagccctacgtcaagcggggccggaagaacgacgcagccgatgcggcggcgatcgccgaggcggtgacgcggccgcacatgcagtttgtgccgatcaagagcgaggacacgcaggcggttctgatgctccatcgcacccgccgccttttggtcagccaacgcacgatgctcgccaatgccttgcgatcacactttgccgaattcggcatcgtcgagccggaaggacaggcgggactgacacggctggtggtgctggccctggatgcgccggatgcggccttgccccaggccgcccgcgaagccttggcgatggtggcggcccacctgcgcgataccgaagtcaagatcgacgcgctggaccacgaaattctgctgtggcatcggggcaatgccgacagccagcgggttgcctccatccccggcattggcccgttgaccgccagcgccatcgtcgcggccatgggcgatcccggccgcttcaggaccggcagggattttgccgcctggcttggcctggtgccatcccagaattccaccggcggcaagaccgtgctggggccgatcaccaagaccggtgaccggtacgtgcggacactcctggtgatcggcgccaccagcaccctgtggcggcggcgcaaggaaagcggcacatggctggccgcgatgatggcgcgcggcaagacggcacggcagatttccgttgccctggccaacaagatggcccgcatcgcctgggccatccttgccaagggcgacacctaccgcgaaccggcggcgcaggccgcctgagaacgacacgacagcgaaccagttgcgagggcgatgaaagcgtgatggcgaccggtcattccacgaaacggcaaaacccaaaacgagtcatggcccgcgaggtcgttgaactgatcgggagccgttgcgcggatcacatcatggccagcggtcaagtggccgcgcaaacaggccggacacatgactgcacccgaccggggcacccatacgcagaaatctccttgcaacgcaggggccgtccacaca

SEQ ID NO: 4233 - DNA, 1405 bp, unidentified
  source 1..1405: mol_type = unassigned DNA; note = element_663b69c
  misc_feature 1..2: note = core
  misc_feature 3..165: note = LE
  misc_feature 166..1395: note = CDS
  misc_feature 1396..1405: note = RE
ctcctaccttcaattcctttataactttattagaaagcaggtaagattgcctccaggaaaggcggggggacttagtacttcctgggtcgccgaacccttatttcagtctgtcccccgcctcctggagccctgatatgttgattgggcctttgagccctcgtgaccatggaggcttggccggaggcaatcccgcttttccgtttcttgatcgaggaggtttgtatggctctgttcgttgggatcgatgtatcgaaagacaagtttgacgcgtgcggtatcggagaggagggagagaaggtattttccctcactgccactatggacaggaaggggtttgagaaactgatcgttcatctgaagatgaaatcctcgttgcttctcggcctcgaatccacggcctgttatcacatagccctcttctcatatcttaccgcaaaagggtacaaggttgtcatcattaatcctcttcttatctccaatttcgtgaagctacagctgagaaagacgaagacggacaagaaggacgcccttaccattgccaggttccttatgctaaggcgagaagtactggagaagcaaacattctcggccgatctgatggagcttcgggacctggcccgcagaagggagaggctcaccgaccaggtgacgaagctgaagggcaacatgaagaggatactatccgtcaccttccccgagctcgaacagcttacagggatcttcaccaagtcgatccttcaactccttacccggttcccctcggctgatgcattgcggaaggctgatgtcgatacgatagcagctatcgtagttccccggtcatgggggagaaaatccagggcatgggtggagacactcatggccaccgcatcaacatccgttggactctcaagtccggcaaaggaacttattctgaaacaggacgcctctcttcttctctatgtcgaagagcagatcaaagagacgacgaagcttctcatgagtgtctgcaatgacagggtgaagaaggatatcgagatcctcacttctataaagggcataggaaagactacagcgatgaattttctcatcgagatgggtggagatgttaggctctacgaaaacgacaagaagctcattgccgctgccggccttgatccttcaacctaccagtcgggcaaatacgagggggcgagcaggataagcaagagggggaacagacacctgagaagggtgatctggttgatggcaaagtccactgtgctctccaatgctcccttcagggcttacttctacaagaggaggaaagaagggttgccttacaaaaaggccgttcttgctacggcccataagcttatacgggtgatgttctcgatgctcgttcatcagaagtgctttgagcaggggggaaagtgaagatagttga

SEQ ID NO: 4234 - DNA, 1380 bp, unidentified
  source 1..1380: mol_type = unassigned DNA; note = element_663d0f8
  misc_feature 1..2: note = core
  misc_feature 3..80: note = LE
  misc_feature 81..1115: note = CDS
  misc_feature 1116..1380: note = RE
  misc_feature 1150..1366: note = bridgeRNA
gatgggctggatggctcccgctcccggcgctgcggcgccaagaaggtgctgtcatgcagcaggagcttggagccactacgatggagatcacgaccgtcggcctcgacctggccaagaacgtcttccaagtgcacgccatcagttgcacgggcgaggttctcgtccggcgcgcgctcaggcgggcgcaggtgatgcccttcttccgcaagctcccgccttgtctgatcggcatggaagcttgcggcacgagccatcattgggcgcgcgaactcacggccctcggtcacgaggtgcgactgatgccgccggcctacgtcaaaccgtacgtaaagcgcggtaagactgatgcggcggacgccgaggcgatctgcgaggctgtcacgcgcccgaccatgcgcttcgtgccgatcaaatcggtcgagcagcaatcagccttgtctctgcatcggacgcgcgatctcctggtccggcagcgcacgcagttggtcaacatggtccgcgggctgctggccgagttcggcatcgatatcccgaagggcctcactcatgccctcgccttcgtacggcgtgcgatcgccggtgaggcgcacgaggtcccgaagctggccgccaaggtgatcggcgccctggccgagcaggcgatcgcggtgcaggacagcatccaccggctcgaacgcgacctgctggcttggtaccgctcgaacgatctcgcccgacgcatcgccaccgtgcccggcgtcggcttgctcggcgcgaccgcgctggccgccaccgtcactgatccgagccacttccgctccgggcgtcagtttgcggcctggctgggtttgacaccgctcaacaactccagcggcggcaaggaacggctcggccggatctcgaagatgggcgaccagtacctgcgccggcttctcgtcaccggcatgacctcgctcgtccggcgcaacaagcaccatcccagcgccgccgacccgcgcctgaacgcactgctcgctcgcaagccggtccgcctcgccacggtcgcgatggccaaccgcacggcgcgggcgatctgggccatcatggtccggggcgaggtctaccggacgcccgcactcggcatcgcggcggtctgaggaggaactcaccaatcagcgcggtaccgcgtgaaggaggttgcgaggaccctgtgaagtgatggcgcaccggtcagaccggggacgaggacaacccgctaaacgtcgagggcgtcgaagcccgcgaagcagaatgggacctcatccgcggaaaccatcagggccagcggtcgatgaccgcgcgaacaggccgaacacaagacggcacccgaccagcccgccagccttcagagacccacttgcaacgcgggagccatccacacag

SEQ ID NO: 4235 - DNA, 1555 bp, unidentified
  source 1..1555: mol_type = unassigned DNA; note = element_663d813
  misc_feature 1..4: note = core
  misc_feature 5..266: note = LE
  misc_feature 267..1526: note = CDS
  misc_feature 1527..1555: note = RE
ctcctatctttaagtcgttgcatctgagagccggttaccggatgctttggtgcaatgcagactctggcgggcagggacgccgacatggcagttggggcgccgcgcgcgaccccgcaggggagagtggcgtcccgccccacccgggcatttccgcggatcagctggatgaggggccatgcgccacctcggatctcttctaggaggctgcggtcccgggtgacgcgggcaggcggcccgccgccctgcggcggagaggaggggcggacatggtgtacgccggtgtggacatcgccaaggtggaccacgtgataggggccgtggacgagcgcggcgaggagcagggcaagcggatgcccttcaagaacagcgccgccggcttcgagcggtgcgaggcctggctcgagggggtggccgagaggccctcggacgtcctcgtcggcatggaggccaccgggcactactggatggcgctctacgccttcctggtctcgaggggctactcggtcgcggtgatcgaccccgtgcaggtgcgcgccgtgcgcaggctgaaggggctcgacagggtgaagaacgaccgcgtggacgcgggcctcatcgccgagacgctgcgcatcggccagtacgacccgacgaggctcgccaccgacgaggtccagtcgctgcgctcgctcacgcgataccggcagtcgctcaaggccgagctcgccgaggcgaagacgcagtgcctgtgcctgctggactcctacttcccggagctccccggggcgttctccgacgtgttcggggccgccgggcgcgccgtgctctccaggagcccgctgccctccgagctcgcgcgcaggcgcacggactcgctgcagcgcgacatctccgaggccgcgcgcggcagcaggcgcatggacggcaaggccgccgagctcagggcgctcgcgaagggctccgtcggcatcaggctcggcgaggcggcggcgtcgatgcaggtgaggtcgctcgtgcgccagatggacttcctcgacgcggagtgcgccaagttcgacgcgctcatcagggagctgctggagagggtggagccgctcgtgctcaccatccccggcgtctcctacgccaccggcgcccagatcgtcgccgagataggcgacatctcgcgcttccgcaacgcccccgcgctcgtgagctacgccgggctgaactccggggtgaaccagtccgggaagttcgacagcgggggcgggcccatcaccaagcacgggtcgccctacctgaggagggccctctggctcgcggccagcagggcccggcagtacgacccgtccctgcgcgccttctacgagaggaagcgcgcggagggcaagtgccaccgggtggccgtgaccgccgtggcgcgcaagctatgccacatcgtgttcgcggtgatgcgggacggggtcccgtacgacccggcgaggccgggcagggacccctcaaagcattcggtatccggttctcaaggtgctggttccgatgaatctggaaacgagaaaagctagccctcgggtcttgacttcatatagctggt

SEQ ID NO: 4236 - DNA, 1588 bp, unidentified
  source 1..1588: mol_type = unassigned DNA; note = element_664f354
  misc_feature 1: note = core
  misc_feature 2..78: note = LE
  misc_feature 79..1143: note = CDS
  misc_feature 1144..1588: note = RE
  misc_feature 1353..1579: note = bridgeRNA
taatgggatggaccgaccgtgctcccgccccacccagccgctaggctgtactggggctgcatcccgaggagccatcccatgacccgcaagtcccatgacagcgtcgccgtgatcggcatcgatcttggcaagaatgtcttccatctcatcggcttgaacaagcgcggcgccatcgtgctgcgccagaagatgtcacgctcgcagctcgagacgcggctggcgaacacgccgccgtgtctcattggcatggaggcctgtgtcggcgcccaccacctgggccgtcgactgaaagcgctcgggcacgacgccaagctgatgccagcgaagtacgtgaggccttattccaaggggcagaagaacgatttcaaggatgccgaggcgatcgccgaggcggtgcagcgcccgaccatgcgtttcgtggcgatcaagaccgttgcgcagctcgacctgcaagccttgcatcgcatccgcgagcggttggtgtcgcagcggactggtgtgatcaatcaaattcgcgccttcatgctcgaacgcggcatcgccgtgcgccaaggcttgcggttcctgcgcgccgagctgcctggcctcctggcgacgcgcggcgacgtgctgtcgccgcacatgatccacctgatcgaggatttggccggggactggcggcgccttgacgagcgcatcgatgccctgacggccgagatcgagggaattgcgcgcgccgacgtccactgtcagcgcaccatgagcgtgcctggcgtagggccgatcgtctccagcgcgatggtcgccgcgattggcaccggcgaggggttctgcaaggggcgcgacttcgccgcctggctcggcattgtgcccaagcagatctccaccggcgatcgcaccatcctcggctcgatctccaagaggggcaacaaatacctgcgcaagttgttcgtgcaggcggcgtgggtcgtgctggtcaagccgatgagctgggagcggcacggcctcaagagctggatcgaggccgccaagaagcggctgcatcgcaatgtgttggcgatcgcgcttgccaacaagttggcccgtatcgcctgggcggtgcttgccaagggtcgcggcttcgaggtgacgaggaagaccaatgtcgccgcccaatacgcctgagcctgccgccgtgctcgccgccgtcaaggtgcggcctgccgagtgcgcagtcagtgtcagagtcggcgtgacggccgaccttgacggcgtctgcgcgcgtcggccgatacgatccgcggtcggggcgggagaaagcctgcggcgcggtcgaacaaaagaaattaccccatagctcgaggagagatccgatgtagccccgtcagcagtttccccaccgaggtctgcgagagaatgagaagagatggagatcggtcttcccggcgcaaccgaaaactggtgacccggacagcccccttgaggcttatccgcttatgagatcggatgcgcgctgaaatccatgatggccgggagcgcaaacgctccaccctgaggccggatacattgatgcaagaccgcaaagctccagatctacgaaacctcttgcaacgcacggtcggtccataca

SEQ ID NO: 4237 - DNA, 1518 bp, unidentified
  source 1..1518: mol_type = unassigned DNA; note = element_6651016
  misc_feature 1..4: note = core
  misc_feature 5..284: note = LE
  misc_feature 285..1391: note = CDS
  misc_feature 1392..1518: note = RE
  misc_feature 13..334: note = bridgeRNA
ctcctacaatatagttacggttaaaggcgcggcagccagccgcgtctttttccatctcaaagccgaagctgttagaatgggagagtaatggcctgacagcaatttccatgggctaacatgcccgttttggagtccgtcagccgcctctctcgttcgcagcatccgatttgctcaggtagagccacttcgtcgggacaagcttcatatccatcgctttcgcctaccggcggaagctcgctcaatacgctgtccctcctctccccaccgagctcggtctggagcagatggcctacgccatcatcgcgctggggaaagatacccgcgtcgtcatggagaccaccgggcgctaccacaagccggtcgtggcggcgctgcatgagtacggcatttatgtctgcgtcctcaatccgttattcatcaagcagagcgggagcggctccatccgcaaggtcaagaccgacaaggcagacgccatgaaaattgccaagtacggccttgacaactgggtggatctgcgggaatatactcctatggacacggtaagacaacaactgaagctgtgcagccgccagtacaacctctacatgaaaacggtggtatcgctgcaaaacaatctcatttcattgaccgacaaggcctttctcggcgtgaacgagctgttctccagcccggagcgcgccgatggtcaccagaaatgggtggactttgtcatgaccttttggcactgcgactgcatctgccgcgtcagcaagaaagcattcaccgagcgttaccagaggtggtgcaaacgcaagggttatcacttcagcgcagaaaaggcactggatgtttacgccggaagctgcgaccatttcaccacactaccgaagaacgacaacacgaaactacttatcaccacagcggcgcagcagttgcttgccagcaagatgacattggccgctttgcgcgccgagatgatacgacttgcaaagcagctgccggagtacgatactgtgctggccatgtacggtgttggcgaaaccactgccgcgcagctcatgactgagatcggggatgtacgccgttttccccgccgcagctctatcgtgggcttcgctggcgtcgatccggctgtaaaccagtccggcaagcacagtgcccaaagcgtctctacgaccaaacgcggctctccgcatcttcggaaaacgctgtaccagatcatctgtatctacctgaaaaaggtccctgcggatgagccggtgtaccagttcctcgataaaaaacgcggcgagggtaagccttattttgtctacatgaccgccgcgcagaacaagttcctgcgcatttactacgcccgcgtgaaagagtgccttgaggcattcgacgcgcagcaaaattccgcgcagggctaagcaaacaaccaactgcatcccggctggcgatgcgttttctctccagcctgttttgttatactctttttcggtctcgtaaactttgcgggacttttttcgtttctgctattgacttttgtttgcagga

SEQ ID NO: 4238 - DNA, 1252 bp, unidentified
  source 1..1252: mol_type = unassigned DNA; note = element_66533e8
  misc_feature 1..2: note = core
  misc_feature 3..244: note = LE
  misc_feature 245..1237: note = CDS
  misc_feature 1238..1252: note = RE
  misc_feature 41..189: note = bridgeRNA
cttgtatgttaagactcaacgaaatgatagggttcttcaccagttaccggggaggccgctggctcctggaggcagctctgactgacctcgtccgtagagtggctccccgcctcattgccaacctcgaagagtatcaggaagccagtcagactggatttcgcatcacaaggtcgaggcagcatcaagtgcgaggtcggggaaccggtttctattgtgaagcaaacttgacctggagtgaaagtcagtgagtgtgtttgtcggtgtggatatttcagccaagacgtttgatctcgtcagcaggaaagccggacatagttcaaagactgagcagttcaagcagacaccggacggtcatgccaaggcgatcaaacggctcaccgcactccagcccacggtcatcgtgctggaagccacagggatctactacttggacttggcggtggcgttggtccaggcagggctgcctgtcgccgtcataaacccgaagagcttccgccatttcgcggaactcatgttgacgggcagtaagactgacggcatcgatgcggccctgcttgctgagtatggtgaacgcatgaggcccagactctggacgcctcccgatgaagcgtgcctagccttgcgagacttggggaggcagatcaaccgcttgaccgcgacgcgaactcaggccaaaaaccggttacacgctctgcagtccaaacgctctacgatgccactgctgattgaggacgagcaggaaggcatcgacttgctggatcgacgtattgagcggttgagcaaggctgctctggcgctgatagcccagaacagaaccctttcaaggagtttggagaatatgcgggcggcgaaggggataggggaggcttcggctatcgccatactggccgagctatgcgtgcttccgcaacacctgaaagcgccacaggtaagccgctttgctggcttggatgtacgactgacccagtcaggcaccagcgtaaacaggccagcgcgcctgagcaaggcaggcaatgcctacctgcgtgctgcgctgtacatgccagcgatgagtgcggtacgacatgacccgagggcgaaagcgttctacgaggcgctggtatcgagaggtaagaaaaaaatccaggcccagtgtgcggtcatgaggaagtacctgaccggattatgggcctgtattcagactgaagccgcgttcgactcaacactgctgttcagtgacgagcacatgaacgcttgactctcaacagagtat

SEQ ID NO: 4239 - DNA, 1505 bp, unidentified
  source 1..1505: mol_type = unassigned DNA; note = element_66676b2
  misc_feature 1..4: note = core
  misc_feature 5..238: note = LE
  misc_feature 239..1489: note = CDS
  misc_feature 1490..1505: note = RE
  misc_feature 18..206: note = bridgeRNA
gtcactagggcaccatccttgttgcgggtaccgatacggtgctcgttgttgggactcggcgggagccggggtgacggtctgtggcggtcgccggaagacggccatcatgacaccaccgcccccggtttctccggggacacggactggcaacagggagacgcgccgcagagcgccggttagtgaccacccggtagctgtcctcctcgccgggtcgtcgctgccatcttgaggagtttctgtgccgtttgcgctgcctgacgcgctgtttttcaccgggatcgactgggccgccgagacgcatgccgtgtgcgtgctggacgccgggggcaagatcgcggccgcgttcacgatcgagcattccgcggacgggatcgccgcgctgatccgccggctggcccgctacggtgaggccggcggcatgccggtcgcgatcgagcggccggacggccggctggtggacctgctgctggaggccgggcatccggtggtgccggtcaagccgaacgcgatcaaggcctggcgggacggcgaggtgctctcgggcgccaagtccgatgccggggacgccgcggtgatcgccgagtacctgcggctgcgggcgcacaagctggccatcgccgccccgtattccgatcagaccagggcgctgcgcgctgtcgtgcgggcccgcggcgacctggtcgagctgcgggtcgcggccaccaaccagctgtcggcgctgctggacgcccactggcccggcgccagggcgatcttcgccgacgtcgagtcgccggtcagcctggagttcctgacccgctaccccaccccggccgccgccgcgcacctgggcgagaagcggatggccgcgttctgcatcaagcacggctactccggccggcgcagccccgccgagctgctcgcccgcctgcgcgccgcgcccgcgggcaccggcctggagtcgctcaccgaggcactgcgcgacgccgtactcgccgcagtcagcgtcctgcaggccctgaacgcggcggtgaaaaacctcgaccgctccgcagccgcccacctcagggagcacccggacgggaagatcttcacgtcgctgccaaggtcgggtcagatcaacgccgcccaggtgctcgccgagtggggcgactgccgggaagcctacgccgccccggactccgtcgccgccctcgccggggtcaccccggtcaccacgcaatccggcaagcaccgctcggtccacttccgctgggcctgcaacatgcggttccgcgccgcgatcaccaccttcgccgacaacagccgccacgccagcccctgggcagcccagatctacgccagcgcgatcgccggcggcaaggaccacccgcacgccatccgcatcctggcccgcgcctggatccgcgtcatctaccgatgctggctcgacggcatcccctacgaccccgcccggcacgccgccgccgccgcgctcgccgaacacccagctaagcaaatcgcggcctgaggttgacacagggagt

SEQ ID NO: 4240 - DNA, 1432 bp, unidentified
  source 1..1432: mol_type = unassigned DNA; note = element_667307b
  misc_feature 1..2: note = core
  misc_feature 3..108: note = LE
  misc_feature 109..1143: note = CDS
  misc_feature 1144..1432: note = RE
  misc_feature 1195..1429: note = bridgeRNA
taatgaaatggacccagccttcttcccacatgtgtctcacacgaggcacaatgggtggtgttgcgtgcgcaactcacactcatcattaggaagaagggaggggctgttatgcacatcacgacattggggattgatttggcgaagaacgtgttccagttgcacggggtggatgcgcgagggcgagcggtgctcagccgacgcgtgaagcgcggtcagttgttgcaggcggtggcgaatctgccgccctgcgtgatcgggatggaggcgtgcggaagtgcgcatcactggggacgggcgttcgaacagcttgggcataccgtcaagctgatgcaccccaagtatgtcaaaccctacgtcaagaccaacaagaatgatggacgagatgcggaagcaatctgcgaagcggtgagtcggcccaccatgcgatttgtctcgatcaaaacggtggagcaagctgacctgcaggccgtacatcggacgcgatcgctcttcgtgaaacatcggaccgccgtcatcaatcagatccgaggcttgttggccgagtatgggttggtgattgcgccatccccggggaaggtccggcccgccctcgtccgttttctggatgacacggcgtcgggattgaccgcgtttgcccgggacaccttctccgagttgtacgcgcaactgacggagctcgactcgcgtatcgagcgggtgacgcactgggtggagcgcgtgtaccgggcgcatccggtctgccagaaactggcggcggtgccggggattggtccgttgacggccaccgcgctggtggcgactgtcggtcggccccaggcgtttcacaacggccggcatctggcggcctggttggggctggtgcctcggcaatattcgagtgggggcaaggagcgcttagacgggatttcgaaacgcgggagtcggtatgtgcggacgctgctgattcatggggcccgcgccgtcgtgcagcgggccgagcggcggaccgatacgcagggacagtggctgtgcgcgctcaaacaccgcaaaggcaccaatgtggccgcggtcgccttagccaacaaaaatgcccgagtgatctgggccttgttggcccatgatgaggcgtatcgaccacccgcctcggagccggcagggtcgtaacggtctttgcgagggagcggcgagccgcattacaccaggaggatttacaccaaggagtgcagcgcggacatccgtgatgacaccagagggacacccagcgcgttcagaccctggacaaattgtcggccccaacaaggccgttatgctaatgaggagaacgcgcgcgtatttcatcaaggcccggacacatctgtggtccatcgagaggccggatatataaacgcagccctgttttttaatggttcatcacgtgacacgccgtcgttgcagcgaaggctgggtccatata

SEQ ID NO: 4241 - DNA, 1139 bp, unidentified
  source 1..1139: mol_type = unassigned DNA; note = element_6676e31
  misc_feature 1..2: note = core
  misc_feature 3..168: note = LE
  misc_feature 169..1002: note = CDS
  misc_feature 1003..1139: note = RE
  misc_feature 11..153: note = bridgeRNA
ctagtatgatgaaaaggacacggcagaccgagtgaaactaggtttggaaaaccgacacagagcgcgggtcgccgtgtccttatcaataaatgcccgaacagttgtaaggacggtcgagtccgaattttgctagagcgggctaattgaaaatcttggcgtgagggcaaaatgaaagaaacaacagactcatacgtaggcatcgatgtttccaaaaaggtattggatacggctgttgaccaagaaggcgatttttggcaatcagccaatgacaagcaagggattgcggtgacagttgctaagctccaagagttgcacccaaccttaattgttgtggaatccaccggcggattggaaatccggttattaactgctttgtatgaagctaagttgccgttttgccgggtccatcccggcagggtgcgcgagtttgctcgttcagttgggctgttggccaaaaccgaccatctggatgctcggttgctggcacgttttgccgcagcagttaagccgccagtcaccagcttgcccggcgaagacgaacagcggttgtcagccttgctgacccgccgtcgccaggtggtagaaatgttaacggccgaaaagaatcgtctgggtacagcccccgcaaccacccaagaccgcattagccaacatatcttgtggctggaagaagagcgggacaagttgaatgaagaaattgaccagttcatcgaccaaacgcctatctttcgccaaaaacaagatattctccaaagcactcccggtattgggtcggtcacctcggccatcttgatcgccgacttacctgagctgggccatctgagccgccagaaaattgccgcgttggtaggcttagctcctttcaacaatgacagcggaccgcgtcgcggcaagcggcgtgtcaaaggggccgggcggctattcggtctactttgtatatggcaactttatccagcatacaatttaaccctgttattcaaacgttttaccagagcttggtaaaacgaggcaaagaaaagaaagttgccgtcgtggcgtgtatgcgcaaattattgacgattctcaacgccatgattcgtgacaacaatacttggaataccaagcaatctgtgcaaaaggcttgacttttatcacagttg

SEQ ID NO: 4242 - DNA, 1360 bp, unidentified
  source 1..1360: mol_type = unassigned DNA; note = element_6678c01
  misc_feature 1..2: note = core
  misc_feature 3..222: note = LE
  misc_feature 223..1245: note = CDS
  misc_feature 1246..1360: note = RE
  misc_feature 2..201: note = bridgeRNA
ctatgtttgttatctaaataagataagtgaaaaagcgtgagagtagaggagccttcaaacagccttaaagcatgtacttcagtagataatacctcacgcttttttacccttaagagtcagaacagaatgtaaggaacatggcagggccatatatccagaatatccagcaggagaaaagacggaaaagggtgactcacttattgaaatattaaacataagatgatgacaaacattgtaaaacaggtagcgggcattgatgtagctcaaaaagaattggtggtttctattggccggatggatcaggaattaacactggaaatctacggctacaagacattccccaacaacgaaaaggggtttaaagctttgattgagtgggcacaaaagatcacagcagaagaaattaagttgcgttacgtaatggaggctaccggtgtttatcatgaaccattggcttattatttggcagacaacggatttgaattaagtatagtactgcctaataagatcagtaattacttcagaacgctggaggtaaacaccattacagataaaacagcctcgcaaacgataacccgctttggactggaaagaaagctggagacatggcagaagccgaaaaagatcttcagggaacttaaacaattaacccgtgagcgggatcagctgatcgctgaacgcaccctgttgaaaaaccaattgcatgctgaacaggcagaggcttttccccatgagaaaagcattcatagagttcatacacggatcgcactccttaatgaccaggaaaaagagatcaaaggggaaatagctgaaattgtaaaacgggataaagatctggttaaaaaggtggagacgattacttctataccgggagtagggaagcttacggcaataatcgtattggcagaaacaaacgggtttgaactaatccgcagcaaaaagcaactggtcagttatagcggattggatgtcagagaaaaacagtcaggtacatcggtcaaaggaaagcccaggatatcaaaaaaagggaacaggcacctgcgtaaggctatgcatttacccgcgctgtcagcgattaaacataacgaccggttcaaagccattttcacgcggctcgtatccaggcatggtataaaaatgaaagcggcggtagccctgcaaaggaaattattagaacttatatatgtgatctggaaaacaggcaaactttacgataaagattacctgatcataaaaacaaattagatccactataaatacttagggcagccattacgaaaatgcactgccctaatcaggctgacttatagtcgcctttaataaatcaaaattaaaaaatatttggatagcatcacagaat

SEQ ID NO: 4243 - DNA, 1501 bp, unidentified
  source 1..1501: mol_type = unassigned DNA; note = element_667d285
  misc_feature 1..2: note = core
  misc_feature 3..217: note = LE
  misc_feature 218..1483: note = CDS
  misc_feature 1484..1501: note = RE
  misc_feature 1..221: note = bridgeRNA
ccgttaccttgttcttgcctccaaggtgggggtgtaggccagcggccccggtatgactcgaagcccctgtcgtcatgatcgaaaaggtggtgtcgccgggaccgcagggcgctcgtgaccgctgatagggacctggccgcattcgtgtaggccctccgtaacgtggctgccggcgcggtgtccaggctggcctggcagcggtgcggaaggagcggtcttgtccggatccgacaagcgccaccatggcgcagactccgacgatggtctcggctatgccgtgttctgcggcctcgacgtcgcgcgggagaaccatcatgccgtcgctttgaacaccgctgggcgacgtctggctgatgcgccgctgcgcaacgacgagaccgcgctgcgagcgttgttcaccagcttgtccgagcacggcccggtactggtgatcgtggaccagcccgcctccatcggcgccctggccgtcgaggttgcccggtcgatgggcctggacgtggcttacctgccgggtctggtgatgcgccgcctggccgacctgcaccccggcgaagccaagaccgacgcccgcgatggctacgtcatcgccgacgctgcccgcaccctgccgcacacactgcgccgggtcggccctgacgatgaaaccgtcatcgcgctgggcgtgctggccggctacgacgccgacctggccgccgaagccacccgcctaaccaaccgcctgcacgacgcgctcctgcacgttcacccggctctggagcgactgctgggcaggcacttgcgtcgtggtggtgtgctcgacctgctcgctgaagcgggaactccgcagcaattgcaggcagtgggcaaggagggcatggcggcggtgatggccaagcgctcaccccagctggccaagacgctgcccacgcggatccttgccgccttggctgagcagagcgtcgtcatcgccggcaccgctcagtacggccgggtgatcagcggcctcgctgcctcattgcgcacggttttggacacccgtgccgagctggctgcggaactggaagatctgctggaggcgcaccctcttgccccggtcctcacctcgatgcccggggtcggagtgaggaccgccatccagctcctgctcaccctcggcgatggctcggccttccgaactgccgcgcacctggcgtcctacgccggcctggcgccggtgacgcggaagtctgggcgcagcatccgcggcgagcaccccgcccgccgcggcaaccgtgatctgaagcgggtgctctacttgtcggctttcgccagcctgcgcgacccggccagccgggcctactacgaccgcaaacgtcgcgaaggtaagcaccacgttgctgcggtgctctgcctggcgcggcgtcgatgcgacgtcctgcatgccatgatcagaacggggcagccctaccgccggccaactccggatcccgccgtcacaccgcctgctgggctggctgccgcttgacggaggtcatagggacac

SEQ ID NO: 4244 - DNA, 1308 bp, unidentified
  source 1..1308: mol_type = unassigned DNA; note = element_66803d8
  misc_feature 1..3: note = core
  misc_feature 4..214: note = LE
  misc_feature 215..1180: note = CDS
  misc_feature 1181..1308: note = RE
  misc_feature 36..200: note = bridgeRNA
cattgtataataatttatcgttataaatttgtataaacattcaacatcaaagtgtggaataaggctgagctttcattagtcaaaaagaccgtgtagtatgttttgcccccacactttatacatcagaaaccggatagttcaatgggctttcagaccccgcattcgcaatgatggctcacgatgtacagatgttgtttaaaaaatcattcagaccatgacttacgttggaatcgatgtcagcaaggcgacttttgttgttgcttattcatctgtaaagacaaacaaaacgagaacattcaagaacaccgtaaagggagttcacgagtttatccagaccatttctccgacaacacatcattgcgtgctggaagccaccggcaattacagtgcgttgctcgtttacctgctttctgaagccggcattatcgtcagcctcgaaaatccgctgaaggtaaagaacttcgcccgtgtcatgctcaccgtcatcaaaacggacgagatcgatgcacgcctcatagccctttacggggagaagatgcagccagccccttataaactccgcagcgatgccattctcaccttgaagcagaaacggacagtcatacgccagctcaagaagcaactcatagccaccagtaatctgaaaggctccatggaagcactgcctttcttcgaccccaagtgcaagaaagccattgaaaagactatcgatttccttgaaaagcaagtcaagaacttagaggaggaactggcggttctggcacaaagcaagtacaagaagcagatggatctgcttacttctatcaaaggaataggtatcacgcttgcagccgccttgataatggcaacgggaggtttcacctactttgataatgccaagcagcttacacgatacttggggctgtcacctacttaccaacaatccggtacgtcagtcaatctcaaagggcacatcaaccgtaacggtgactcgtccttgcgaagccagctttatattgctgccatggcatctctgaggtgcaatgccgaatgcaaggaatgtttcaatcggttacggtctaacggcaagccggggaaagtggcagtcgttgcggtcgccaacaaactcgtaaggcaagcctttgctgtcgtcacgcaagggaagccctatgtcgatggattcaagtccgaaaagccataacagctcctgcggagggaacgccatgcggcaaggggctgagcagtcagccccgacgagctttccatgcacgataacttgcataattatgctaattatcgttaaccgtatgcagtttttatattatagtt

SEQ ID NO: 4245 - DNA, 1201 bp, unidentified
  source 1..1201: mol_type = unassigned DNA; note = element_6682d1a
  misc_feature 1..2: note = core
  misc_feature 3..220: note = LE
  misc_feature 221..1198: note = CDS
  misc_feature 1199..1201: note = RE
  misc_feature 43..201: note = bridgeRNA
tcctttagattagcaataagaaaaaaaacaattaatttgaagataaagagataagtgtttaagtaaactattatttactctgagaaaacctcatagttcgattaagacttaaacacttactctatcaaaacctcaaatagaaattcgggataaaaagcccattataaaggagttgagttgttgatagagctctctttaccgttaagctaaaatcaaagttatggaaaaagtttttattgggatagacattagtaaagcaactctggacatttatgtagcgtcaacttcattagcccaacattatcaattggaaaatacaccaaaagcaattttaaagtttttcaaaacttttgacaatactccaaacattattgttgcaatggaggatacaggtcgatacaattttgcattatatgcgattttaagtacaatgaacttcagtgtctatgttgttaatcccttacatctgaagagaagtattggattattaagaggaaaaaatgataaaattgacagtcaaagaatctgtcgcttcattgaaaaacattatatggatttagagctttggcaattttcttctttagccattcagaaattaagtgtattaaggacagaacgccgtcatcgtatcaaaataaagtccggcttaaaggctcagctaaaagatgaagagttcttaaaaggcattatagataaagagatgataaagcttaacaaggcgatgattacccttattgataaacaaatcagagttatagaagaaaaaatgatgagaatcataaatgccagcactgaactcaaagatcaataccaacgtttacaaagtattcctggagtaggtaaagtattagctaccttaatgattattaaaaccaaaggatttacagaaataaaatcagccagaaaaatggcgtgttactcaggtattgccccgtttgaacatcgatcaggatcttccatttattataagccaagagtctcgacaatggccgatagggaactgaagaaaatattaaatttagctgcgatgagtgctattagattaaaaaatgatctggctctctattatcacaggaaagtacaggaaggtaaaaataaaatggcagtgctaaatgcagtgagaaataaaattatacacagaatatatgctattataaagaataattctgtgtatcaaaataatttgtttttgtcatagaaa

SEQ ID NO: 4246 - DNA, 1638 bp, unidentified
  source 1..1638: mol_type = unassigned DNA; note = element_668c931
  misc_feature 1..2: note = core
  misc_feature 3..333: note = LE
  misc_feature 334..1506: note = CDS
  misc_feature 1507..1638: note = RE
  misc_feature 100..312: note = bridgeRNA
cttgtatattatagtcagtaccaaaactgacttgttttctgtatttaagttacctatgtaatttctacttgcacaatcatctgtggtatcttcccctaggggaagacgcgtgccgattttacataattacatttttgttttggtataatcgtatagtgcactgtggcttatttttctctcctatcgctagacgatttaaattaggctataaccacagtcctatgcaattttgttaattagttagatagcacttagatgctttatttcgcacaaggatacatagcatagagtctgtggacccataggcacaataattttatttggaggtgttctatgttatatgtaggcatcgatgtatcaaaagaaaagcatgactgtcatattatgaactcagagggcgagattctatgtgataatttttcttttgagaattcaagaagcgggtttaacagtttccttaagttattaaaaaactgtaacggtaacgagttgacagacataaaggtagggctggagtcaactggacattattcagacaatctaatcgggtttttaaaacagtctaagctgtacgtttctatatttaatcctttacaaatcacactatcacgtaaagcgaaaaccttacgcaaaaccaagactgacaagtgcgatgctagatttatctgcagaaaacttgtcgaagatgctcctgcgccctatctacctaaagaatatcatatttctgaattaaagacactatccagatttagggttcggttaattaacgatttatctaaacaaaagactttacttgttaggttagttgatattatctttccagaacttaacaagctcttttgcaaaattcatctaaaatctgtatatgctatgttagccgaattgcctagtgcaaaagccattgctaaatgccacttaacgaaactcaccaatattctttctggcaactctagaggcagatattctaaagctaaggcaatggaaattagggaatgtgctagaaactcaatcggaagtcaaagcttatcactttcttttgaactgcaagaaacaattgacaatattaactttttgcaaactaaaattgacagagtagattcagaaatcaaaactattatggataaaattgattctccgattttatctatcctaggaatttcatacactctaggagcaatgataatttcagaaattggcaatattaacaactttgattcacccgctaaactacttgcatttgctggttgtgagccctctaaattccaatcaggtaaatacaatgctgatcacacagctatggtcaagcgaggatctaaatatttacgttacgcattatttagtgctgctagaatggtaagtatcaactgcgatgtatttgcggattatctagcaaaaaagagagctgaaaacaaacattactttgttgcactttcacatacggttaggaaattagtaagagttatattccatcttctaaccaccaacaccactttcgtggctatctaaaactatttaactttcaaggttcttttgcagccgattatcggctgtggtttgctatgcaacaaattcgatatttataccaattttatcacttcaagtaatttctaattttatgcttgactttatatagttagt

SEQ ID NO: 4247 - DNA, 1152 bp, unidentified
  source 1..1152: mol_type = unassigned DNA; note = element_668dedd
  misc_feature 1..2: note = core
  misc_feature 3..180: note = LE
  misc_feature 181..1137: note = CDS
  misc_feature 1138..1152: note = RE
  misc_feature 14..195: note = bridgeRNA
cttgtatctttagagtttgatttcggactggctcatgcagcccggtacgcctctgggcgaaagagcccgtgactgagtcttgggcgcatgagctggaccgtctttctggagcccgaacggttgtcggaaactggttcgtggaatcgaagttcgcatagacaaggatgggataggaaggacatgtccgaagcggtattcataggaatcgacgtatccaaggacaccctggaagttgccagcagcgcgcaagcatcgagttggcaggctgtcaacgacaccgccggcatcgaggcgttgagtacgcaattgctggcgatggcgccggcgctggtggtgttggaagccacgggtggctacgagttcgaggctgcctgtgcgttgcaggctgcaggcctggacgtggcggtggtcaaccctcgccaggcgcgcgacttcgcccgtgccatgggcgcgctggccaagaccgacagcctggatgccaggatgctggcggcattcgctcgggtgctgcaccagcaccccgagcgcagtcgattcgtcaagccgctggccgacgaggccttgcaacgcctgcaggctttggtgctgcgccgccgccaattggtaggcatgctcaccagtgagcggcaacgcttgcgtatgtcccacgccagcgcccgcccgagcatcgagcgcacgatcgagttcctcaaggcgcagatccacgacatggagatcgaggcaggcgagcacgtgcgagcccaccacggcgctctggccgcggcgctgtccagcgtcaagggcgtgggagcggccaccgtctgcacgctgctggcggagttgcccgaactcggacaactctgccgcaggaggattgcagccttggtgggcgtggccccattgaatcgcgacagcggccagatgcgcgggcaacgctccatctggggcgggcgcgccgatgtgcgcaagacgctctacatggccaccctcgtcgccgtgcgccacagcccggtcttcaaagccttttacgagcgactggtcgcagccggcaagcccaagaaggtcgccctggttgcggccatgcgcaagctgctgaccacgctcaacgccattgcgaagtccggaaaacactgggaggaatctctccacgcttcttgacttttaagacggttg

SEQ ID NO: 4248 - DNA, 1796 bp, unidentified
  source 1..1796: mol_type = unassigned DNA; note = element_669969b
  misc_feature 1..2: note = core
  misc_feature 3..362: note = LE
  misc_feature 363..1679: note = CDS
  misc_feature 1680..1796: note = RE
  misc_feature 116..293: note = bridgeRNA
ctctagtataattaatggtgtagtcaatcaagactacttggttaataagtttctataaatcagataacagaagaagggattcttccttcatcagatgttatccataataattatcatgtctgacggttcctgatagacaccagataaaacataaggtattatctcttaggataggacaaagaatgttcacctccttgggaagtcacttctgtgactgatacctacaaaaaagtcaattagtccattcgacagggttttatgttttagctggttgggagccggtaggcaatacccgaatgacgcgctaggttgtgtacctgccagattggaaatggattcctatccgaaaggaggttatccacatgccaaacaatgttatttttaatttcgatgaattattcatctccgttggtattgatgtcggtgccgacttctcctggatgtcgattgtacttcctaaccaacagtttgtaggaaagccttacaaaatcctacacaacagcatggattcccttgcttcggctgtctctaaaataaaagaagcagaagaaatgtattctttggaaagtcgcattttccttgaatccacgggaatttatcattacccactcttctgctatcttcgtgataagggttttaactgctcagttatcaatcctatcatcacaaagaatagcacaaatatcaatatacgaaaagtacataatgaccgttttgattctaaaaaagctgctttagttggcttaaaacctgatttaaaagtttctcttatgccatctgaccttgctttgaactgtcgcaatctatgccgtgaatactacgatttgatggacagccgtaatgcttacgtgaacaagcttattgacgaactgcgtatggttttccctcagtatcttggcattttttccaaggttacgattgatacgtctcttatcttgttggaaacttacacatctccatctgcctttattaacgcagacaaacaagagattattgatctcatcaggtcaacagctcgttttggacttacatacgcttgtaacaagtataatgccattattcaggctgctaatgatgcagacgagttcggttacatccttgacagcaacatcaagagaatccgtctatatattggttttatccgtaaatatgatgaagaaatcaacagcattctggaatccatgcatgagcttgctgccgctaatgaggataccgattttgtgaaacagattcgcctaattgaaacattcaaaggggctggtttcttgtccgctatgtcccttatgggagagattggtgatttttctgcattttcaaaaccaaaacaactttttgcttactttggtcttgatccagctgtaaaacagtctggaaaatttgaaggtactaaaatccagatgtcgaaaagaggctctgccatagcaagacgggttattcacacactgaccttgcaaagtatcagtgcttcccgtaccggtgaatcaaaaaatccagtactccttgattactatctcaaaaagtgtgaatcaaaaccaaaactagttgcaatgggagctgtttcacacaaggtatgcaacatgatatttgcaatccttcgagatagcaaaccttttgaaatcattacaccgcaggaacatataaaaaaatacaacgctgctaaatgcgacgtagctgcgtaaaataataccacctactgaatcaatatcttttttgaatgatattttccccaagggataagcacgcccttttttaaagaaaaatatttttcatttacctattgacatttattagctgga

SEQ ID NO: 4249 - DNA, 1499 bp, unidentified
  source 1..1499: mol_type = unassigned DNA; note = element_66b7462
  misc_feature 1..2: note = core
  misc_feature 3..243: note = LE
  misc_feature 244..1479: note = CDS
  misc_feature 1480..1499: note = RE
  misc_feature 15..239: note = bridgeRNA
ctaatgagtgttagcgggtcggccatacggcagactcggtgcctggtggccgccagcaggtgagcacattcgcttcccgggctttgagccctgccgaaagaccgtgcccctgctggtgaccgggagagttgatcgctgctgggatgtcgtgcccgcctgctggcgtgagcacagtttcattaggtcgctgatagttctcccgcaggctgctgcaagttttcgacattctggacgggagaactggtgcggctgttcgtaggcgatgactgggctgaggaccatcacgacgtggagctgatggacgcggggggccgggtgctggcgaagcggcggctgcccgagggcatcgcggggatggcccggctgcacgagatgatcgggcagcagctgggcgaggacgccgatgatgcggaggtggcggtcgggatcgagaccgaccgcggcccgtgggtggccgcgctggccgcggccggctgcacggtctacggggtgaaccctttgcaggcctcgcggtaccgggaacggcacggcgtgtccggggccaagagcgacagcggcgacgcgcacatgctcacggacatggtccgcaccgattcgcaccagctgcgggcggtggcgggcgacagcgcggacgcggagggcatcaaggtgctggcccgcacgcacaagacgctgatctgggagcggacccggcaggcgcggcggctgcggcaccagctgctggcgtacttcgccgccgccctggaggccttcgacgacctggacgcccccgacgccctcgagctgccgggcaaggccccggacccggcccgggccgcgaagctgacccgcgcgcaggtcagcgccgcgctcaagcgcgcccgccgccggaacatcccggacaaggcgacagcgatcctggccgcgctgcgcagcgagcacctgggccagccgccggccgtcaccgccgcctacgccgccaccgtgcggtccctgatcgcggtcatcaccgtcctgaacgagcaggtcaaggtcctgcaagggcaggtggaggcggattttggccggcacccggacgctgagatctaccggtcccagcccggcatcggcgcggttctcggcgcccgggcgctcggcgagctcggcgacgaccccgaccggcacgccgacggcaaggcccgccggaactacgccggcaccagccctctcacccgcgcctcgggcaagaaaaaggtggtcgccgcccggttcatccataatgaccggctcgtcgacgcgctgaacgcgcaggccttcgccgccctgaacgcctcgcccggcgcacgcgccctctacgacgagctccgcgcccgcggcatcgagcacaacgacgccctgcggcggctcgccaacaggctcgtcggcatcctgcacggatgcctgaagacccgcaccctctacgacgaggcaaccgcctggtcccaccggcaaaacctccctcaatcttccgtagcggcttgacacttaagctcctgggatgt

SEQ ID NO: 4250 - DNA, 1167 bp, unidentified
  source 1..1167: mol_type = unassigned DNA; note = element_66c50ae
  misc_feature 1..2: note = core
  misc_feature 3..177: note = LE
  misc_feature 178..1146: note = CDS
  misc_feature 1147..1167: note = RE
  misc_feature 34..198: note = bridgeRNA
cttgtatcttaaatgtaggttaaaataaatacgattagatttggtgcggtgtatgcagcctgataccgcctagggttcctagcccgtctgtaagcgattggcgcatacacccagccactcatctgaaacccgaacagttgtccgtattccataacgtatttgcaaggaggggtaataatgagtctgccaaatccactgtgtgtgggcattgatgtttctaaagcaacactggacatcgctgccagtcatgagtttgcacagttcactgcaagtaacgactctgatggttttgatgccgttcttgctgagttgagaacgcattccgttgcgctgattctgatggaggccactggcgggcttgaagccgccgtggcctgctcgcttcaggcagaaggttttgacgttgctgttattaaccccagacaggcacgtgactttgcccgggcgatgggatatctggcaaaaactgaccgtattgacgccagagtactcgcacagatggcggaggtcattaatcgtcatccggaacgggaacgttttatccgggctctgccagacgctgaacgtcagattcttgtggctatggtggtgcgcagacgccagttaattacgatgttggtggctgaacgtaaccggctgtacccttcccatccgcaaaacagaaaaagcattaatatcattatcaaagcgctggaaagtgaacttgcccgaatcgatacagacatgaaccagcatctcaagagccactttaaagcgctttctgaacggttgagcagcgttaaaggtgttggcactatgacggttgccgccttgttggctgaggttccggaactgggtcatctctcacgacgtgaaatcagcgcacttgtgggggttgcgcccgtaaaccgcgactcgggcactatgcgcggtcggcgaaccatttttggcggcagggctggggtaagaacagcactgtacatgtctgcactcgtgacagcccgatttaatctcgtgataaaggcgttttacatgcgtctgcttgccgccggaaaagccaaaaaagtggtgctggttgcctgtatgcgtaagttgctgactatcctgaatgcaatgctcagaaagaacgaagaatggaatgaatcttaccatcacgttgcgccataatttttatgttcaagacagttg

SEQ ID NO: 4251 - DNA, 1557 bp, unidentified
  source 1..1557: mol_type = unassigned DNA; note = element_66c9a92
  misc_feature 1..2: note = core
  misc_feature 3..77: note = LE
  misc_feature 78..1178: note = CDS
  misc_feature 1179..1557: note = RE
  misc_feature 1286..1544: note = bridgeRNA
tgttggggtggacggcccccaacggcatcgctgtgccagaatgaggtcggtttagatctcagacaagggagccgtccatgagcgagattatccgaattggtgtggacacgtccaagagtgttttccagctccatggggtggatgcagcggagcaaccggtgctgcgcaagaagctgcgccgacgcgatttgctggtctttttcgaacggctgccggcgacgaaggtcggcatggaggcctgcggcgggacgtattactgggcccgcgagctgaccgcgctggggcacgaggtgaaactgatgccgccgcagcacgtgaagccatacgtacggcgcggcaagaacgaccggaacgatgccgatgcgatctgcgaggcgatgagccggccgcgcatgagcttcgtggccatcaagactgcggagagccaagccgcgcaaatgttgatgacaacgcgcgagcggctggtcgcctatcgcacgcaactcatcaacacgatccgcggtcacgcggccgagttcggcctcacggccgccaaagggcctgcccatgtcgagccgctgctgacgcgcattgccgaagacggaagggtgcccgagcttgccaaagagctgttcgccatgcacggtcaggagttgagccggctgaagatcgagctgcgcgagatcgaggcgaagctgaaggcctggcatcggcagaacgagatgagccggcgccttgccgaaattgatggcatcggcccgatcggcggctgtctgctggcgatcaaggctcccgatccgcaggccttccgctgcggccgcgacttcgcggcctggatgggtttgaccccgaaggatcattccaccgcgggcaagatgcggctcggggtgattacccgcgccggcgacgaggccttgcgccgcaccttggtggtcggcgccacctcggtgatcaagcaggtgagcaagggcaatccctcgccttggctgcgcgatctggtggcacgcaagccgccgaagctcgcggccgtggcgctcgccaacaaggtcgcgcgcatcgcctggagattgatggtcagcggcgaacgctacgacgcggcacgggccggcatcgtctccccgatcgcaaggatagcaccgtgctcgcgccgtcaaggccgctgcgcgccgcctgcggcggtggcctccggccagccttgacgaccctgcgcgcggtgctcaaagcgccgccatcggtgaaacgacgcaatccgggccccgcccacacacacaaggtgatcaatgacccctcattcgacccgcagatcatgaacttcggtgcgagccctcatcctcgcgccgcaggccgaagcttgctcgagaacggaagatggacctgatcgatcgatcacagtcacgaggcaaaaactccgtgggacccattggtgccagacaccgccgctatgtttggaactcgtgctgtggaccccatcttggcagcggtcatgtgcgaccgcatcaacagaccggacatatggccgcaatcgcttcgatcagaaacccgctttccgcctcttgccagccgggggccgtccacata

SEQ ID NO: 4252 - DNA, 1543 bp, unidentified
  source 1..1543: mol_type = unassigned DNA; note = element_66d0785
  misc_feature 1..2: note = core
  misc_feature 3..238: note = LE
  misc_feature 239..1420: note = CDS
  misc_feature 1421..1543: note = RE
  misc_feature 3..218: note = bridgeRNA
cttgtattatagagtagtagttttagtgccccttttcaggagcgtgtgctacactgtaagggatgctgtggattggttttttcctcctaccgcaagacggttcacgataggctccaaccacagtcctttacagtattgttaatcagttagataccgccagacggtttatgtggaacaaggttacaagagtaaagtatcctgtggaaccagcatcaaataaactaccgggggtatcatcatgatttgcgtgggtattgatgtggccaaggacaagcacgactgctttatccttagttcggaaggcgaagtcctggcagatgtattcactattccaaacaatgcagaaggttttgacacgcttctgcaaaccattcgccgctacactcgtccgacagacaaaataaaagtaggacttgaggctaccggacattacagctacaacattctcggatatctgcttgacaaaggtctggccacctacgtcatcaatccgctgcacaccaacctttaccgaaaaagtctcagcctccgcaaaacgaagacggatcgtgtcgatgcgcgaactattgcaactatgctcatgtctgatgtggacctcaagtcctacacggacacagcatatcacaacgaagaattaaaatcactaaccagatatagatttgacaaggtcaaggagcgggcaaagctaaaacagtcggtttcccgtctggttaccattctgtttcctgaactggaaaagctggttccaacactccatatggcctctgtttatgcgcttctcaacgagtttcccggagccaaacaggtggctgaagctcatctgacacacttaaaaaccgttttgagcgatgcatccaaaggccgctatggacgagacatggcaacggaacttcgggacgcggccagacgctctgtcggctctgttatgcctgccaagtctcttgaattgcagcatacgattcgcttgatccgtgagctggataccgaaattgaggacattgaagccgctatcgaagccatgatgaatgaaatgcgatctcccatcaccacgattccgggtattggtgtccgcatgggagctatgattctggccgaaattggagatttctcacgttttgactcgccggacaaaatccttgcctatgccggcatgtcaccgtctacctaccaatctgggcagctttcgctatctggtacatattcgcacatggaaaagcgaggctccaggtatttgcgctacgctctctacaatgcaaccaaatacgtctgcctttgggatccaaccttcgcaacctatctggcaaagaaacgcacagaaggaaagcactacaacgtcgcaatctcccatgccgccaagaagttagtccggttgatctacgcgatggagatatccaggcggccgtacaccagcgccgcataatccctttttctcataagcttgggtaggcatccaaccggacgtcagctttgctatgcccttttggagaccgtctgtgattcggtgacaatccacacttttcagacttgacatttaatagttagt

SEQ ID NO: 4253 - DNA, 1261 bp, unidentified
  source 1..1261: mol_type = unassigned DNA; note = element_66d6152
  misc_feature 1..3: note = core
  misc_feature 4..210: note = LE
  misc_feature 211..1224: note = CDS
  misc_feature 1225..1261: note = RE
  misc_feature 8..200: note = bridgeRNA
tgcctttagtttgcaaaatgaataaaaataggataaattaactgaaaaggaaacgggtgaactataacgttttgtaggacttagacctaatagccgcataagtcccgtttcctttgatcagacttgtcagagctcattggaatgataggcttaaaggcctgctaaaggcaatcgcacaacaagttttttattcactttaaaagtaaaattatgaaaaaaattaaagaagaaagattgtttttggaaagcgtaggcattgatgtttcaaaattaactatagatgtatttctttataacaaaaagcatcatcgtcaattttcaaattcatcaagaggatttgttgaaatgcaaaaatggattaaagctgagttgggaagtttaactgatctcatttattgttttgaacataccggctggtattgtattttgcttggccattttttacatgaacaagggatgaattacagctgcattaatccgatagaactaaagcgttctattggctttaaaaggggtaagtccgacaaaacagattcctatgagattgcaagatttgcctggttaagaagagatgagttaaaaacctccattccacttccgatcaaattactagaactacaaaggctcatgagtgttcgagagcaacttgtaaaacaaagcacctcactaaaaaacttagagaagggattgttggtgaccattgaaaaaatcacgggagatattgggttaaaaactgttcgacagtccataaaacagctagagcaacaaatacaaaaaatagaaaaagctatggaatcattgatagcaagtgaacctaaaatgaagagtaattacaaattgaccaaaagtgtaaaaggagtaggtcgaatcctagcaatacaaatgcttttacatacacacaactattccagatttgaagaatggcggcagttttcagcatattgtggtttggttccctatccctatcaatcaggaacaagtatacatggaaggaaaaaaattcatgcaatcagcgatattaaaatgaaaagcttattgtcaatgtcagcaataagcgcaattcaacatgatgcagaacttaaaatttattatcaaaagcgagtggaagaaggtaagccaaagatggtcgttttaaacattatcagaaataaaattgtatccagagtatttgcaaccgttaaacgaggaacaccttatgttgtgataaataaattcgcagcgtaaaaaataattacgaattaacttgtttttgatcttggaa

SEQ ID NO: 4254 - DNA, 1343 bp, unidentified
  source 1..1343: mol_type = unassigned DNA; note = element_66ddad6
  misc_feature 1..2: note = core
  misc_feature 3..207: note = LE
  misc_feature 208..1323: note = CDS
  misc_feature 1324..1343: note = RE
  misc_feature 6..243: note = bridgeRNA
ctaatgacggttaccggggccaggcgacggcagacttggccctggtagctgctggtgggtgagcactcgtgggtcctggacaccgtcgggtagtcctcttggcagaccgtgcccccgccggtggtcgggagagtcaaccgctaatgaaccagtgcccgccacctggcgcgagcactggttcattaggttgctgggactcccccgctgttgccgcaggtagccgctggcctcgaggaaggcatcaccgggatcgaccggctccacagcctgctcgccacccacaccgacccgggcgcggaccctgatgaggtggtgatcggtatcgagaccgagcggggcccttgggtgcgggccctgctcgccgccgggtaccgggtccacgcgatcaacccgttgcaggtcgcccgctaccgggaacggcagaccatctcgggggccaagtccgacgcgggggacgcccacgccctggccgacatggtccgcaccgacggccaccagctgcgcaccatcgccggggactccgacaccgccgccgcgctcaaggtcgtggcccgcgcccacaagacgctggtctgggaacggacccggcacgtgctgcggctgcggcacgcgttgcgggacttcttccccgctgccctggcggcgttcgatgacctcaccgcccccgacgccctcgagctgctcaccaaggcccccgaccccgccgccgcggcccggctcaccaccacccagatcaccgtcgcggccgcgatccgagtggcgctacgcaccccgcacctcacccagcccgccgcggtgaccgccgcctacgccgccgtggtccggtcccaagcggcgatcctgggtgcgctgcgcaccgagatcaccaccctgcagaccgaggtcgagacactgttcacccgccaccccgccgccgaggtgtacctcagccaacccggcctcggatctatcctcgccgcccgggtgctggccgagttcggggacgaccccacccgatacgacggggcccgcgcccgcaagaactacgccggcaccagccccatcacccgggcctccggcaagagcagagccgtccacgcccgccacgtccacaacgaccagctcctcgacgccctcggccgccaggcctacgccgccctcagcggctcccccggcgcccgcgcctactacgaccagctccgcagccgcggaaccccccaccacgccgccctgcggcagctcgcgaaccgcctcgtcggcatcctgcacggcagcctcaaaaccggcaccccctacaacgagaccaccgcctggaaccaccacaccccacccctcgccgcttgaccaccaacggcatgggatgt

SEQ ID NO: 4255 - DNA, 1222 bp, unidentified
  source 1..1222: mol_type = unassigned DNA; note = element_66df92b
  misc_feature 1..2: note = core
  misc_feature 3..209: note = LE
  misc_feature 210..1124: note = CDS
  misc_feature 1125..1222: note = RE
  misc_feature 12..191: note = bridgeRNA
cttatctgatcggaatctggcagtttaggtgtcgagagccggcgtgggccgccgtgtgagcctggatctcgacgatcgccgtgtagcttggcgcccacgccggaatctcccttgatccgcccgaacagttgctggagctgtcactcgaagcgataagactgggcaagcgggggagctctcgacccttccagactatacggagtcgggcgatgaacgggatcgggattgatgtaagcaagcgccggctggatgttggaacctccgacggccaaaccctgcaggtcagcaatgacccctccggtttcgctgaattggacctctggctgaggcagcgcccgagtaaccagatcgtgctggaggccaccggtggctacgaacagcctgtgctggattttctgcacaaggccggtcatccggtggttcgggccaatgccttgcgggcgcggaagcttgctcaggggctgggccagagggccaagaccgaccgcttggatgcctatgcattggcacagatggccacgctggtgaagctgccggcctatcagccgttggaggcttggcagcagaaactgcgggagtttgtgcgggcacgtcgacagatgatccaggccttggccgtcgcgcgacagcagcaggaaatggtgggtgatcgtgaactgcgccggcttttgcaggccaacatcacccacctgaagacactggtcaaacgcctgggaaagcagattgccgagcagctcgctcaacagccccagctcacggttctgaagtcgatgaagggcgtggggccggtggtacaggcggtgctggccagctacctgcctgagctgggccatatcagtggaaaggccatcgccagcctggtgggcgtggcgccgatgtcccacgacagcgggacgatgcgtggaaaacgaagcatccacggcggtcgagccgagatccgtcaggtgctttacatggccggcatgtcagccctgcagcacgaaccgcgcatacgggacttttaccggtcgctacgggcccgcggcaaggaggccaaagtagccatcgtggcggtaatgcgaaagatgctggtgatcctcaacgcccgcgtgcgcgacgctcaaagcggaccgatccccgcctgaagcgcgcccgggcacatctccaacggctgccggccagcggccggcactaccgtgcccgtctgctggaggggccgaagcctcctccagcaacacagttg

SEQ ID NO: 4256 - DNA, 1785 bp, unidentified
  source 1..1785: mol_type = unassigned DNA; note = element_66e9815
  misc_feature 1..2: note = core
  misc_feature 3..110: note = LE
  misc_feature 111..1199: note = CDS
  misc_feature 1200..1785: note = RE
  misc_feature 1452..1703: note = bridgeRNA
agcattcctgtagaacgttaattatcaactttgaaaaaaatagagcccctcagtaagatatgagtatagacaccactctaaaactcacattctaaggaggaagctctaatatgaagtttaaaatgcaagacaaacaaaatcaactaatagaaagaatttcagataaacatctcgttgttggggtagatattgcacaaaaaacgcatgttgcccgagctgtgaattttcgtggaatagtgattggtgaaccccttacttttgaaaataatgaagaagggttcgacagtttatttcagtggattaataggttaaaaatttcaaaaggttatagtaccgaaatagttggtatggaaccgactggacattactggttaaacttatctaaatggctatacgatcaaggtgtggatgtagtaactgtaaatcctcatcttgttaaaaggaacaaagaaaatcgtgataacacccaatccaaaagtgataagaaggatgcccttgtgattgcggatatggtcaagaatggatactactcctttattcgcccaacttcggaagcatttgaggaacttagagtactaatgtcaaatcgagacgttattgttaaacgtcttgtgagctctgcgaatcaaattaaccgatgggtagatgttgtattccctgaatttcgggaggtttttaaagatgtaaaaggaaaaggagccattacgactcttcgcttatttccaacaccaaaggaactgcgttccttagatgtcaaagatatagtaaatggatggaaatcattaatgaaacgacaacctggcttgaagaaagctcaattattgattaagctatctaagaattctgtaggtaccactcaagcctacgatgcttataaactacacctaaaaatgttactcgacgaatttgatctcgccacaatccaacttgaaacagtcgaaaaagaagtaagtgaagtacttaaaaacattactttttcagataaattacttggtattaaaggattaactgaagtaaccctaggtggcattttaggtgaaactggcgacctcagtaagttcgcacatggtaattctctattacgtcatgcaggtctacatctagtagaggctagctcaggtaaatggaaaggacaaattgtaatttctaaattgaggatggtctcgtttaaggcgatatttatttctagcaacacttagtcttgtggcaaataatcctgagtttaaagctcttcactcttataatgttgaggttaaaaagatgaagaaaatgaagtcaataatgaaacttattggtaagttggcaagattattagttggagtggcccggcgaaacgagtcttattgtccagaaaaagtatacccattaataccagcagcataacccaattatcttcagttgaacacgactaataaaaattgttgaatattggcttattcgtaggatctcaaagaaagcacggagtactggaatacttaaacaaaagggcattgcgacccattccgttagcaaaaccggcctccaccccttggataggcatgacgaaggaatgaaagggcttagacccgttgagacatgggagggatagcctccaggggcggcgtggagtaagcgtgcagtatactggaaataagtggggtatttgttctactcctctattcccgcatgcattcatgtagcccaaatatctataattatttcaatcatccgttattgttcttacaaagtggtttgaaatcctgcgaataagcgagcatttgagagaaaacagaatctatctgaggg

SEQ ID NO: 4257 - DNA, 1359 bp, unidentified
  source 1..1359: mol_type = unassigned DNA; note = element_66f90ef
  misc_feature 1..2: note = core
  misc_feature 3..77: note = LE
  misc_feature 78..1214: note = CDS
  misc_feature 1215..1359: note = RE
tgatggggtggacgcccccccggcggcatcgatgtgccaaagtggaggtgttgaacacaccacttgaggaggcgcccatgtcggaagttaccacaatcggtctggatatcgcgaagaacgttttccacgcacacggtgcagatgcgagcggcagtccggtgttcagccgcaagatcagccgcgcgaagttgctggaattcttcgccaacagccgcgttgcctggtggcgttggaggcatgcggaggagcacaccactgggctcgcgaactcacagtgtgggtcacgaggtgaaactgatccctccggcctatgtgaagcccttcgtgaagcggaacaagaacgatgcgtcgatgcggaggccatctgcgaggcagctcagcgacctaacatgcggttcgtggcgatcaagcgtgaggagcaacaggcctcggccctggtgttccgcacacgcgatctgatggtgcggcagcggactcaattgatcaatgcgatccgcggtcacctgaccggatacggctgggtcgcacccaagggaccgtcgcacatagctgtactgagtaaccagctcgatggcgagattggctcgtcacttccgaatgcggccaccccgatgttccgcacgatgctcgacctgctggagatactcaacgggaggatcagcgaactggacaaagagatcacacgacgagcccgtgaggatgtgatcgccaagcggctcatgaccataccaggcgtcggtccgatcaccgccacagcgattgctgccctcgcgccgccggttgagacgttcaccaaaggtcgagactttgccgcatggttgggtctggcgcctcgtcagctctcgagtggaggcaaacagaaactcggatcgatcacgaagatgggcgaacgaacgctgcggcgtctcatcatcattggctatagcgcagtcgtgctgcacgcgagcaagcgaggtgcgccggcaggttcctggcttgaacagatgatggcacggaagccgcgtatgctggtcaccgttgcccttgcccaacaagacggcgcgcatcatctgggcggtcccgatgaagcaagaggaatacaaagctccggctgcagctgcggcgtaagacaaggcggaccagaggtcgtcggagacggagtcggtcgaaggaaggtatggcacaacagtcggcgagatgggctcggtaagccagcgcaaaccactgtgccttgagcacgccgtgggtgatatggatccgatccgcgaactcccatacgggcgcgcagctggtgctgcatcagaggccggacagatggcagcatccgacaacgtgttcgatcttcaaaatgccgcttgcgtcttacggggcgtccacaga

SEQ ID NO: 4258 - DNA, 1451 bp, unidentified
  source 1..1451: mol_type = unassigned DNA; note = element_6700045
  misc_feature 1: note = core
  misc_feature 2..230: note = LE
  misc_feature 231..1448: note = CDS
  misc_feature 1449..1451: note = RE
  misc_feature 10..234: note = bridgeRNA
ccgttaccttgttcgtgaccccgggtaagctggggttggccagctaggcccggcatgattcctgcccccagtcgaccatgatccggggggtgttgtcaccgggcctggcaggcaactggtgatcgctgataggggccggacccggtgtattccgaggtcgcctgtaacgtggatgccgagactagttgccatggtttgctggcccatcgtagttaacctcaggagcaggcatgactgacatcgagcagcatgacagtgtcgaagtcttcgtcggtgtagacgtgggcaaaggcacgcatcatgcggttgcattggatcgcaagggaaaacgtcttttggatagcgccttgcctaatgacgagaccaagctgagagcgctgatcggaaaattgaaggagtacggcaagatcttgcttgtggtggatcagcccgccacagtcggtgctcttccggttgcggtggctggcgctgaaggcgtcctggtagcctatttgccggggttggcgatgcggcgcattgccgacttgcacgccggtgaagccaagaccgacgcgcgggacgcgtacattatcgccgaagccgcgcgcagcatgccgcatacgctgcgatcgctgaaaatagccgatagccaagttgcagagctgacgatgctgtgcggctttgacgaggacctggcgggccaaatcactgccaccagcaatcgcatccgcggcctgctgacgcagatccatccggcgctggagcgcgcggtgggacctcatctggatcatccggccatgttggacttgcttgagcgatatccttcgcccgcgcaactctcttcgttcagccagaaacagttggccacgcggctgctcaaactcgctccccgaatgggaaagacttgggcaactgaaatcgttcaggccctcgctgagcaaacggtcgtcgtcgctggtacgcaagccgccagcatcgtgctgccgcgtctggcgttgcagctggcggcactgcgaaagcaacgggaagaggttgcgaaggaagtcgaacgccttgtgcttgcgcaccctcttcatccggtcctgaccagcatgccgggggtccgggttaggaccgctgcgagactcctggtcgacgtggcgactcgcgccttcgcgtccgctgcccatctggccgcttacgccgggctggcaccagtaactcggcgctctggctcgtcgatccgcggcgaactgccttccagacggggaaacaaacagctcaggcgagcgatgttcctgtcggccttcgtcgctctgcgcgatccgatctctagggcctactacacccggaagattactcagggcaaacgccataatcaggccctcattgcgctggcacgccgccgctgtgacgtgctgttcgccatgttgcgcgacgggacactttatagcccgccgcgacccgaaaatttattgacaacaacatagggg

SEQ ID NO: 4259 - DNA, 1397 bp, unidentified
  source 1..1397: mol_type = unassigned DNA; note = element_6703f26
  misc_feature 1..2: note = core
  misc_feature 3..79: note = LE
  misc_feature 80..1114: note = CDS
  misc_feature 1115..1397: note = RE
  misc_feature 1113..1385: note = bridgeRNA
tgttggggtggacggctcccaacggcatcgcaatgtgccagaatgagttcgttgagagctcaatcgagggagaccgtccgtggaacagattattcgaattggtatggacacgtcaaagagtgttttccaattgcatggcgtgaacgctgccgagcaaccactcctgcgcaagaagctttcgcgtagagagatggtgaagttcttcgagaaagcgccgccgactactatcgcgctggaatcctgtggtggatctcatcattgggcgcggctgttaagttcgtttggccatgaggtgaagctgatcgcgccccaactagcgaagccttatgtcaaacgcggcaagaacgacgcggcagacgcggaggctttgtgcgaggcgatgagccgacccactatgcgcttcgtaccggtcaagaccgcggaccagcaggcggcgttgatgctggtcggtgtgcgagaaaggctcattcgcaatcgaacgcagctcgccaatgccatccgcggctttgcgatggagttcggcatcgccgcagccaaaggcacgtgccggatcgaaccgttgctggagcgcattgcggctgatcaatctctgccagaactggcgcgcgaactcttcgccatgcacggtgaggaatatcgcgacctgcttgccgaaacgaaaacgatcgaggagaaactgatggccttgcatcgctccgatgagtgcagcaagcgtctggccgaaattccaggtgtcggaccggtcggtgcatcactattgataatgaagacaccagatccccgaatgttcaagtcgggtcgcgattttgccgcctggatagggcttacgcccaaggaccactcgaccgcaggcaaggtcaggctcggggtgatcacccgagccggcgacgaaatgctcagaagcatattggtggttggtgcaactgcccttctgcagcatgtcagagcaggtcgaagcagacatacttcccgatggctgatcgagcttttgcaacggaagaagccaaagctggttgcggtagcgctcgccaacaagatcgcccgtattgcctggaagcttatggtgagcggcgaaacatatcggcgaccggaaggacaaccactggcagtataggagattggccatcacggcgagcatgatatgaacgcaaccgtgttgagctgatgctgtgaacttgcaagagaaaagcagatggtgcgatcgatcgatccaaacgcgtgacactccgtcattcccaatggccattcaaggccgatgccttgttaggaacacgcgttgcggaaaccatcttggccagtggtcatgtgcgaccatacctaaaggccgcacatatggaagcaagcgatccgatcaaaaatactgcaaaaaacacttgcaagtgggagccgtccacata

SEQ ID NO: 4260 - DNA, 1310 bp, unidentified
  source 1..1310: mol_type = unassigned DNA; note = element_670a96b
  misc_feature 1..2: note = core
  misc_feature 3..67: note = LE
  misc_feature 68..1063: note = CDS
  misc_feature 1064..1310: note = RE
  misc_feature 1086..1304: note = bridgeRNA
ttaattagatggtccgcctcacccctaagctaaacttagagtttggcaatcaaagaggcgaaccatcatgtctactattaaagtcattggaatcgatttaggcaaatcttcttttcaccttgttgggcatgatcacactggtcgtgaacaattacgtcaacacttaagccgttcaaagctcattcaatttttatcacaaacagctcaaactacgatagcaatggaatcatgtggtggttcccactggttggcaagaaaatgccaagccctcggtcatgaggttaaactcattcccccgcagtacgttaagccttacgttaaaaccaataaaaatgattacatcgatgctgatgcgatcgcagaagcgtcaacacgcccgtcgatgcgctttgtgggcgtaaaaactgaagccgcacaagttatctctgtgattcaacgcattcgcgccagctatgttaaagaacgtacagcatgcatgtcgcgcattggggctatcttgcttgaatttggtatgagctttcctaaagggcatggcaagatgaaagttttgtttcaatggctcgctgacaacggcgaaccgcttcctgccatgttgatgcaagaattgctagagcaccatgagtactatttacagcttaataagcgtatcgcagggcaggataaaaagctgaaacagcttgtcgagcaaaatgaagatgctcaactactgaagtctatcccaggtgtgggggatttaacggcgagtcagtgtttagccgatatctctgatgcaggtaactttaaaaatggacgacagttagccgcgtggataggattagtgccgcaccaatactccacaggcggtaaaaccacgttgttggggataagtaagcgtggtaacaaagcgttaaggaccttgtttatccacggagcacggtcaattttatcgaggccagacgttgcggttgcggtgtttggtgaatggatacttgagcttagagcgagaaagccatttaatgtcgcagtcgtagcattagcgaataaattggtacgaatagcgtggtcggtgttatcgaccaagtgagcctttgaaattagagtttaacccgagtttgcagatgatagagaagatgacagaacggtcagaccactagattgaagacctgacacaaaaaacagcaacgcagtatgcttttggctttttgaggacaatctagcgcggaactcatcgtggagcgggtggtaagcacctaatgaagactccgaatacattagcgcaaaccaacctcgttatcgaaaatatcatttgcaataacgaggcggaccataca

SEQ ID NO: 4261 - DNA, 1216 bp, unidentified
  source 1..1216: mol_type = unassigned DNA; note = element_670c342
  misc_feature 1..2: note = core
  misc_feature 3..208: note = LE
  misc_feature 209..1117: note = CDS
  misc_feature 1118..1216: note = RE
  misc_feature 12..190: note = bridgeRNA
cttatctgttcggtttctgtcagtgtgggtgtcgagagccggcgtgggccaccgtcagagcctggatctaagcgatcgccgtgtagctgggtgcccacgccggtttctcccctgtgtcgctcgaacagttgccagagttgccgctcgtagacgtaaggctgggcaggcgggggagctctcgacccttcaagcctaacggagttcgcccatgaacggcatcgggattgatgtgtgcaaggccatgttggatgtcgctgtccatcacggcccttttgcgcggtttcacaacacccccgcaggccaccgcaagctcgtgtcctggctggcagcgcagcaggctggccagatcgtgctggaggcctctggtggttatgagcagcggttgctggatacgctattcgaggccggtcaccgcgtcgtgcgtgccaatgcgcaccgctgccatgccttcgctgccgccatcggattatcggcaaaaacagatcgcctggacgcgactaatctcgcatgcatggcagccaagctggagctgcgtgcttaccagccgatggagccgtggcggcggcgactgcgcgagttcgtgcgcgcacgacagcagctgatggggctggcgatcagcgcccaaaaccagttagagcaggtgaccaacgcggccctgcgccgcacgctgcaggccaacattgcgcagctgaagaagacctgtgcacgcctggacgcgcagattgccgagcaggtcggccaacaaccgcaactgcaggcgatgcgcgcgttcaagggcgtgggagcgacgctgcaggcggtgatggccagctacttgccggagttgggaaccctcagtggcaaggccattgccaagctggtcggtgttgccccgatcgcccgcgacagcggcaccttgcgcggcatccgccgaatctgcggcgggcgggtcgaggtccgcaacgtgctgtacatggcgtgcctgtctgccatccagcacgagccacggatcagggagttttatcgcgctctgcgtgcacgcggcaaacctggaaaagtcgcggtggtcgcagccatgcgcaagatgctggtcatcctcaacgcccgcgccagagacgcccaagccgcgacgacgtgagtggcgatgggctggaaaaaaccgatggctgccgagaggtggcacgtctgcgcttgcccggtcctcggagtggccagagccactccaacaccacagttg

SEQ ID NO: 4262 - DNA, 1589 bp, unidentified
  source 1..1589: mol_type = unassigned DNA; note = element_670c800
  misc_feature 1..4: note = core
  misc_feature 5..367: note = LE
  misc_feature 368..1579: note = CDS
  misc_feature 1580..1589: note = RE
ctcactgggctaccttccagtccatgaaggacgttgcgcggtgcagggttgtccacggcggcgctcgttcggcgcttgcgacgaaccgagcgagcgccgcggtgggcaacccgtgtccagcgcgatcacttgacgggcggcgccgctgcccagaaggtgtgcatcgacttccgtgcccccgaggcgactgcctgcttcgctggccgctcgacggcccgcatgagacccgcagccctcggggtgccggaagacccagacgggcaacaggatgtagcgccgcggtcagcagccaagagcgccaatcagtgagcgacccgcgtgggcttccggcacggccagtcataccgcaacttgcaggagtttgtccatgagcaactactttgccgggctggactgggccagcaaggcgcatgcgctgtgcgtcgtcgacgagcgcggtggcgtcgtcgatcggttcgagatcggccacgacgcgctcgggctcggcgagctgcagcgccgcctgcgtcgtctggactcgccaccgatcgccatcgagcggccctcgggactgctggtcgacaccttggtcgaggccggcttgacggtcgtgccgatccaccccaacgccgtcaaggccagtcggccgcgctacaggagccatggcggcaagagcgacgcctcggacgcctacgtgctggccgacttgctgcgcaccgacggccatcgcttcaaggccctgaccccgcagggcgatgagatcaaggcgctgcaggcgttggttcgcgggcgcgacgatctggtggcaacccgcgtgcaactggccaatcagttgcgcaccctcctggagtcgttctggccgggcgcggctgtggtcttcgccgacatcgactcgccgatcgcgctggccttcgtcgagcgctacccgacgcccgagtccgccaggacgctcggccccaagcgcatggccgccttctgcgcccagcatgcctactgcggcagaaggagcaccgtggacttgctcgcccggctgcatcaagcacctactgcagtctgcgccgagctcgagatggaggccaagggcgagctcgctcgatcgcttgctcgcactctgaagtgcctggtcgagcagattcgactcctgtccagccgtatcgagcaccacgtcgcttcgctcgaggacggcaagatcatcatgagcttcccacgcgccggacgcatctgcgccgctcagctcctggccgagctcggcagcgtgcgcgagcgcttcctcagcgacgagcacctcgccgccgaggccggggtcgctcccgtcacttacgcgtcgggcaagtccaaggcggtcgtcttccgctgggcctgcaaccaccgtctgcgcgcagcgcttacctgcctggccgacaactcgcgccatgccaatgattgggctgctcatgtctatgccaaggccaaggcccgtggctgcgaccacccacacgccgttcgcatcctcgctcgtgcctggctgcgcgtcatctggcgcgcctggaccgaccacaaaacctacgatccaactcaacaccgcgccgctcaactgctcctcaagacagcggggggttgacacaggatgt

SEQ ID NO: 4263 - DNA, 1390 bp, unidentified
  source 1..1390: mol_type = unassigned DNA; note = element_670fa1e
  misc_feature 1: note = core
  misc_feature 2..71: note = LE
  misc_feature 72..1103: note = CDS
  misc_feature 1104..1390: note = RE
  misc_feature 1148..1385: note = bridgeRNA
caatggtatggaccccgcccttgatgggcggtggaatctccgaacgccaactgcgttcaaggaggaatgccatgcagatcattcgtattgggctggacctggccaagtatgtctttgaggttcacggcgtcgactgccacggtaaggccgtgcttcggaaaacactgcgccgtgatgtggtatccggcttcttcgcaaacttgccgccttgccaaattggtatggaagcctcgaatggtgcgcattattgggcaaaggtgctcactgaattcggccatgaggtgcgcctgatcagtccccagttcgtcacgccgtatgtcaagtccaacaagaacgaccgcaatgacgccgaggccatctgcgaagcagtcgggcgaccgcacatgcgcttcgtaccggtgaagtccgtcgatcagttggcggtacaggcggttcatcgtattcgtagccgcctggtcgggggtcggacgaggctcgcaaatcaaatccgtggcgttctcgccgaacatggaatcgtcattgcccgcaacatcgccaagctgcgtcggagtctcgctgatatcgcggggagcgatgagaatggtcttagcgacttggtccgagattttgtcagagaactgcagctggaattggtcgaactcgaccgacggatagcgacctatgatcggcgaatccgcgaactctaccgcagcagcgagcagtgtcagcgtctcggccaaatcgaaggtatcggcccgttgagcgcgacggcgctgatggccgcggtcggtgatcggcggtgcttcaagaacggtcgccagtttgccgcctggcttgggcttgtgcccaggcagcgatcgagtggaggccatgctcgtctgtttggcatcagcaaacgtggcgatcgctacttgcgcaccttgctgatccatggcgctcgtgccgctcttagtcgggccgggggcaggcagaatccgagaagccaatggctcgttaaactgcgggaacgacggcatcccaatatcgcggcggtcgcgctcgccaacaagaatgcacggatcgcctgggccatgctctcaggcgacgaaacctacgatcccggtctgacggttgggccggcctgaataggtccgacataccggcaacagaacgaaggaggtcccacccaagcaattgcaacgatcggcagaagatggtgaaaacggtcaccccgtcgcttcccgaacctggtgtgtggaccggcatagcctcggctaatgtctcggagccattgaggtggaagcgggcgaagacccatcgaggctcgcggcacgactaccaagccgcattaggaagccggatatacgtcagcagttgtgaccttcgatcctgaacttgtcgaacttcgttacaatcgggcggggtccatata

SEQ ID NO: 4264 - DNA, 1385 bp, unidentified
  source 1..1385: mol_type = unassigned DNA; note = element_67159d6
  misc_feature 1: note = core
  misc_feature 2..107: note = LE
  misc_feature 108..1121: note = CDS
  misc_feature 1122..1385: note = RE
  misc_feature 1151..1374: note = bridgeRNA
caatgggatggactcctcctctccttaacggcatctaaagtgccagactggagaagcgatagttcccagtaacaggtagagaaggagtccactcatgaagcttagctatgttggcgttgatttggcaaagaacgtatttcagctgcacggtgtggatcggacgggtaaggcggtatggcgacgccggctgccgacgtgaccagtggctgaaggtgctgctggagaagattgaaccgggctgcgagatcggcatggaagcgtgtaccggcgcgcaccattgggcccgagagctgcaggccgagggctaccgggtgaagctgattgcgccgcagttcgtcaagccgtacgtgaagagccagaagaacgatgccaacgatgccgaggcgatctgcgaggcgatgagccggccgcacatgcgcttcgtggcggtcaagacggtcgagcagcaggacatccaggcgctgcatcgggtgcgttcggagttgattggtcaacgcacggctaaggcgaaccagatccgcggcctggtggccgagtacgggctggtcgcgccgcgcgagctgagttcgctgcgccgcgcgataccgggttggctcgaggatgcagagaatagcctgacgatgcagttccgcgtgctgctggacgctttatggagtgacctgcgacatctggatggtcgagtcgcagagctggatgccgacatccggcaactggccaacacggacccgcaggcgaagcggctgcagcagctgcgcggtgtcgggccgttgatcgccaccgccctgttggcgacggtggggacgggtgagcaatttgccaacggccggcagatgtcggcagccctggggttggtaccgaggcagcatgactccggcgacaagcgacgccggctagggatcaccaagcgcggcgatgcgtatctgcgcagcttactgatccacggtgcgcgggcggtgatccggaccgccggcaacaaggaggaccggctcagccaatgggtgaccgcgctggctgatcggcgacacccgaatgtggcggccgttgccctggccaacaagaccgtccgcatggcctgggcgatgctcagccgcgatgcggattaccagccgtggtcggcataatgcgccgcagcacacccggataggaggccctcaacgacgattgcatggcaacccgcggatggcgaacaggtcggaccggcgtcggcagaacccgagaatgtccaggagcgatcagcccgtcaaagcgatagggagtcggcgcgcgaatagcccatcgaggccgggcatcacgtagatgccaccttcagaggccggatatacgtgagcagtcgtacctgccgccatctacccgggaagcttgcagcccgaggaggagtccatata

SEQ ID NO: 4265 - DNA, 1612 bp, unidentified
  source 1..1612: mol_type = unassigned DNA; note = element_6717876
  misc_feature 1..2: note = core
  misc_feature 3..273: note = LE
  misc_feature 274..1491: note = CDS
  misc_feature 1492..1612: note = RE
  misc_feature 14..293: note = bridgeRNA
ctattacaatatatttatggttaataccccttacagccagtaaggaattacccatcttgttgcttaagctgttagaatgagtatggcaaaggtctggcctttacctcctggtactttacgtccgtaaaaaagtcagccaaccagccgctcattcccagcattcgatttacgcaggttgaacctcccgttcgtgtgaatcccccaatagattgaacaggcaatgagtaacgctggtattgaccattgctaatctatttcaaaggagtattcttgatgaacgctgttggtattgatgtttctaaaggtaaaagcacggtcacgatccgcaggcccggcgatgagatcctcatgccccctcgtgacattcctcacacacagtccgctatatcggaactaatcaggcagatcaaaaaccttgatggtgaaaccaaggtctgcatggagcatactggcaggtattatgaggcggttgcctcctggctttctgattccggtatctttgtcagcgccgtcaatcctatcctcatcaaagattttggcgacgattccttacgtgctcccaaaacagataaggccgattctaaaaaaatcgcacgctatgctcttgaccgctgggcgaatctaaggcaatatggaagcatggataaaacacgtaaccaactcaaaaccatgaaccggcagttcggtttctatatggaccaaaagaccgctatgaagaacaatcttatcgctcttctggatcagacttaccccggtgccaatgccttctttgacagccccgcacgcagtgacggcagccagaaatgggtagattttatcgatacctactggcatgtggactgtgtccgcgcaaaatcgctggaggcttttacggcgcactatcaaaactggtgtaagcgtaagggctataacttcagctctgataaggcggcaaagatctatcaggcgtcccgcgacctcattgccgtatttccgaaagatgacaacacaaagctgctcatacgccaggctgccgcaatgctgaacaccgcttccgcaacggtggaatccctccgccagaagatggacgcggctgccgccacacttccggaatacccgattgttatggcaatgaacggtgtaggccctaccctcggccctcagctcatggccgagatcggagatgtgacccgtttcacacaccggggcgcgctgactgcttttgcaggcgttgaccctggaagaaatgattccggccagcgcgtccagaaaagcgtccgtataacgaagaagggttccccaagcttacgaaagaccctctttcagatcatggacggccttatcaagcgttcccctgcggaggacgctgtttacgcttttatggataagaagcgggcggaggggaagccttattacgtttacatgactgccggagcaaacaagtttctgcgtatatactacggacgggtaaacgaatatcttgctgccctgcctgaaaacaaagaaagctaaatcaccttttatcgaccgatcagaccagcgtttaaacggtggtctttttgtgatacttatttttcaacctgtgtaaaattttcaaggttctttattttctgcttgactttttctttgcaga

SEQ ID NO: 4266 - DNA, 1468 bp, unidentified
  source 1..1468: mol_type = unassigned DNA; note = element_672ea7b
  misc_feature 1: note = core
  misc_feature 2..233: note = LE
  misc_feature 234..1454: note = CDS
  misc_feature 1455..1468: note = RE
  misc_feature 15..245: note = bridgeRNA
ctaattgagactgaaggtggacgttggggttttgccctagcgttcgagaggtcccgatgggctggctcccgaaccgcctgccgaccgcctgcggtctggctttagatcgaggtgctggcctgttgggtcctcgccgtggtgtggctcgaaagaggagcgaacgctcgcagatccggaattaggcatgcccgccacggtccttccccttagcacgactgatgaaggagcggtggatgacggcagtgatgattggcgtggatccgcacaagggctcgcacacggcggtggcgatcgacgggacggaggagccgctgggcgaggtccgggtgcgcgcgtcggcggcccaggctgagcggctcgtgacgtgggcagctggctggccggagcggacgtgggcggtggagggcgcgggcggcctggggcatctgctggcccagcagctcgttgccgccggcgagcgggtgctggatgtgcagccgaagctgggcgcgcgggtgcggctgctggcgaccggggcgagtaacaagaatgacccgaacgacgcccggtccgtcgcaatcgcggcgctgcgctccaagggcccgcgggcggtcgccgctgatgatcaccctgcggtgctgaaggtctgggccaagcgccaccgtgacctggggcgctcccggaaccaggtcgcctgccggctccacgccgtgctctgcgacctgatccccggcggcatcgcccaggagatctccgcagctcaggcggcccgtgtcctggagtcgatcacgccgtccggggctgtggagaccgcccgctgcgagctcgccgccgagttcctggctgacctgcgccacctcgacacccagatccgcgacacaaagaagaagctggcgaccgccgtccgggcaagcgggacgaccctcaccgagatcttcggcgtcgggccggtcatcgccggcaccgtgatcggcgacgtcgccgatgtgtcccgcttccccggccgggaccagttcgccgcgtacaacggcaccgcaccggtcgaggtgtcctccgggaaccggaagatctaccggctgtccctgcgcgggaaccggcggatcaaccacgccatccacatggccgcggtcacccagatccggcaccggcacagcgacggccgcgcctattacgacaagaaagtagccgagggcaagacgcacaaagaggcactgcggtgcctgaagcggcggatcagcgacgccatcttcgcccgcctccttgccgacgcccggcgggccgccggcgcaccgcctatcgcgggcccgggagggcagccggggaacgactctgactccagcgcggccggctcacaccccggaaaccggctcttcggacaagccactcccgagcccggtaccaccctacggcccgccgccccgcacaggcgaacagcgccgaagccgaccccaaagaagacccccgaaaccccttgacaacaaagaggtct

SEQ ID NO: 4267 - DNA, 1546 bp, unidentified
  source 1..1546: mol_type = unassigned DNA; note = element_6741a40
  misc_feature 1: note = core
  misc_feature 2..83: note = LE
  misc_feature 84..1142: note = CDS
  misc_feature 1143..1546: note = RE
  misc_feature 1310..1537: note = bridgeRNA
taatgggatggcccggccgcgctcagcggctaatctgccggactgaggctgggaggcgtgaagcaaggctcaaggagcatgcgatgcgcacatctcagaagacagctggaatcatcaccacgatcgggatcgacctcggcaagaacacgttccacctcatcgggtttgaccggcgcggtgcaatcatcctgcagcagaaggtatcccgtggccagctcgaacgccgtctcgccaatattccgcgctgcctgatcggcatggaggcctgttcgggctcccatcacatcggccggcagctgcaagctgctggccacgatgtgcgtctgatcccggcgcaatacgtgaagccgttcctcaagggtcacaagaacgactaccgcgatgccgaggcgattgcggaggccgtgctgcggccgaccatgcattttgtggcgatcaagacgcccgagcagatggatctgctggctctgcatcgcgtgcgctcgcgcctcgtcagccagcgtacgggtgtgatcaaccaaatccgcggcttcctcatcgaacgcggcatcattgtgcgtcaaggcgtagtgcccttgcgcaaagcgctgcctgagatcctgagctcgcagactggcccgctctcgccaagaatgatcggccttattgccgaccttacgcaggactggcgtcggctggacgagcgcattgcggcggtgtcggccgagatcgaagcgctggcggagcaggatgagagttgccagcgcctgatgacggtgccgggcgtcggcccgatcatctcgagcgccgtggtggcggcgatcggcaatggcgccggcttcaggcagggacgcgacttcggcgcctggctggggctcgtgccgaagcaggagtcgaccggggatcgcacgatcctgggcaagatctccaagcgcggcaacaagtacctgaggacgctgttcgtgcaggccgcgcacgtcgtcctggtgcggcggccgcgtgcggcgatgcggggtttgtggccttggatcgagcaggcttcgaagcggctccaccgcaacatgctggcgatcgcactcgccaacaagctcgcccgcatcgcctgggcggttctcgcccgcggtcgcgcctatcagccgaggatcaccgccgatgccgcgtgacaaaggttcgctcaggtccaccaaggggatgcccgccacccctctgcgcccccatcgctcgccagccctaatgagcgagcgacggtggctccgaggggatggcttcacatgatccctctgacgtcaaccatcagaacggagactgaacagcttaggatcgacagcttccccgccgaggtctgcgaggtggaatgaagagatggacgaacggtctgcccggcgcaaccaagagactgggtgccaacttggtccttgaggcctttccgttagtcagtctggatgcgcgcggatacccatgatggcccggagcaaaatcgctccacttcgaggcctaatacattgatgcagctctcacgttcgtcgctcttggaactccgtcttgcaacgcgcggccgggccataca

SEQ ID NO: 4268 - DNA, 1722 bp, unidentified
  source 1..1722: mol_type = unassigned DNA; note = element_6746738
  misc_feature 1..3: note = core
  misc_feature 4..69: note = LE
  misc_feature 70..1227: note = CDS
  misc_feature 1228..1722: note = RE
  misc_feature 1268..1487: note = bridgeRNA
aagatgctatggggcggcggcgaggatattgcattccatcgtcgctgatgtgaaccgatggagcgccccatgcagaagttgaacgacctgagccgatccctcaccgcccttgaaccgaacggcacgctgatcgcagtcattgagatgagcctgtcgagctggctcgttgccggtatcgtgcctggcgtcgagcgccagccgttgaaaaagctcgctgtcgacgagagcgcattgctgaagctgctacatcgatggcgagaggaagcagagaaagcaggacgcaggatcgagcgcattgcagtcgccttcgaggctggccgtgacggcttctggctggcgcgctggctcaaggcgcgcggcatcgaggcctacgtcattcacgcatcgagtgtggcggtgtctcgcgagcatcggcgcgccaagactgaccgtctcgacaccgagctgctcaaacgctcctttctcggctggctgcgcggcgagcgtgatcactgcaagatggtcgagatcccgacgatgcaggacgaggatgccaagcggcccaaccgcgagcatgacagcctcatcggagagcgaagtcggatcgtcaaccgaatgaaggcagcgttggttcggctcggcatccgcggcttcaatcctaagctgaaaagggccagcacgcgccttgacggcttgcgcacgcctgagggcgagccaatcccgcccaacgcgctggctgagttacgtcgcgacatggagcgccgacggctcgtcaataatcaaatccggcagattgaggaggaacgcctgaagcgtatcgaacaagcgccctgtgatggaccgcacgtcatggtgcgcctgttagcgcgcgtgatgggggtcggcatagagacagccgacatgctggtgcacgaggtgttgtcgcgaaacatgcgcgaccgacgggccgtagcgcgttatgccggcctcactggttcacccgacgagagcggaaggaaacgccgagagaaagggctggcccgctcgggcaatacccgggtccgacgaggcatgattcaattggcgtggcggttccttctacaccagaagaacagcgccttgacgaagtggtttcgatcccgcaccgagaacgctcgcggtactcgaaagcccatgatcgtggccttggcgcgcaagctactgatcgccctgtggcgtctcgtgcgggagggcgtggtgccggacggcgtcgttctgcggccggcataatgaacggagatcactgaaggacacccaacagtttcggcccggtccgtccactggtgacgggtcgccgatgacggttcgaggtggcggagtcccgacgtgtttccttggctttcaatgccgaaagggagaatgggtccgccgcttcggagcttcgctgccgatgcgtatgactgcatcatggttcgggtccttggacccaccgaatacaaggttgtggcgcgactgatccgcgcccgaaagcgggctcccctctgatcgtcatcccgatcgcaccaagcgtgccgtcgtgctcgaagctgtcaaggtatggcctggcaagctcggagcatgccgcaaggtcggcgcggcggccaaccttgacagctcctgcgcgcgacgacgtcagcgaaccgcgggtcgggacaaagaaacgggctttgagatcgaacaaagaaactgacgaaggacaaaagattttccgccctggcgaacttcttgacaaagaaagccccatac

SEQ ID NO: 4269 - DNA, 1381 bp, unidentified
  source 1..1381: mol_type = unassigned DNA; note = element_674ae72
  misc_feature 1..3: note = core
  misc_feature 4..87: note = LE
  misc_feature 88..1116: note = CDS
  misc_feature 1117..1381: note = RE
  misc_feature 1118..1367: note = bridgeRNA
tgatggtgtggacgaccgctgcccaccggcatcgaagtgccatagggtggtagttgctgaaacgccacattcgggagggccgtccacatggcgattgttacgataggtcttgatcttgccaagaacgtttttcaggtccactgcgtcgatgagagcggattggctgtggtccgccgtcaactccgccgggcggaggtcgaggctttcttcaaggcggttccgccgtgtcttgtcggcatagaggcctgcggctcggcgcatcactgggcgcggctgattgcagggctggggcatgacgtgcagttgatcgcaccaacccgagtcaaggcctacgttcagcgtggcaagaagaacgatgccaatgacgcggccgccatcgccgaggcgatcacccgtccccatatgacctttgttccggtcaaaagcgaggagcagcaaggcatgctgatgctgcatcggagccgcgatctgctggtgcgccagcgcaccatgctgatcaacgccctgcggagccatctggcggaattcggcctcgttgccgcgcaggggtggagcaagctgagggaactggtcgccggtcttggtaaggctgagattcccgatctggctcggaccgctctgaagctgatcgcggaacagatcgacgaatgcgaccggcgtgtcgaggcgctggagaagcagatcgtcacttggcataggtccaacgagaccagccgcaacctcgccactatccccggcatcggcccgattaccgcttcggctctcgccgccacaatcaccgatccctccgctttcgacagcgggcggaaactggcggcatggctggggctggtgccacgacaaagctcgaccgggggcaaggaccgccttggcggcatcaccaaggccggggacagctacattcgccggcttctggtcatcggcgccaccagcgtcatccgttacgcccaagccaaggctccgggcgaggctgaatggctgaagcgattgcttgaccgcaagccggcccggctggcatcggtcgccttggccaacaagatggcgcgcatcgcctggtcagtgctgaccaggggcgaggttttcagagaaaatgccctctccttgaaagcggcctaaacaaaaaaggctcggcaatgaaggagggggcaaacgtgcgagggtgaattgtgacgtgatggcaacccggtcaagcaggggattgggaagacccgccgaactcagtgcacaccatgtgcgataacctgattgggacccgatccgcggatttcatcatggcccgcggtcgtatgtaccgtacctttcgaggccgaacacatgaccgcacctgaccccgttgccgatcctatcatttcctccttgcatccaggcggtcgtccacaca

SEQ ID NO: 4270 - DNA, 1398 bp, unidentified
  source 1..1398: mol_type = unassigned DNA; note = element_67592a0
  misc_feature 1: note = core
  misc_feature 2..88: note = LE
  misc_feature 89..1114: note = CDS
  misc_feature 1115..1398: note = RE
  misc_feature 1167..1390: note = bridgeRNA
taatgggatggtcgcccccttctgaaacggcatcgatgtgccaaagtggagttgtgacacaaccacttgaacgaaaggggcgaccgagatgaagcttacgacgattgggattgatctggcaaagaacgtgtttcaggtgcatggggcggatgacaaggggcgggcggtactgaggaagcagctcaagcgcacgcagatgctgcccttcttcgccaagctctcgccctgcagggttgggctggaggcctgcggcagtgcccactactgggcgaggaagctgcaggcgctcggccacacggtggaactgattgcgccgcagtacgtgaagcccttcgtcaagcgaaacaagaacgatgccgcggacgcggcggccatctgcgaagccgtgacgcggccggacatgccgacggtgccgatcaagaacgccgatcagcaggcgatcctgagcgtgcatcgcgcgcggcaaggtttcgtcaaggcgcgcacggcccaatcgaaccagatccgcgggctgctggccgaattcggcttcgtccttccgaaggggatcggcctgcttctgcgacgggtgcccgagatcatcgaggacgctgagaacgacctgccgggcaatttccggctgctcatggcgcgcctgctcgaccacctcaaggaactcgaccgccaggtcggcgagttggctgccgaaatccaattgtggcaccggcagaacacggccagccagaggctggcggcgattccgggcttgggcccgctgacggccaccgcgctggtggcctccatcggggatgccaggaacttcaagaacggccggcaactggccgcctggctgggcatcgtgcccaggcaacattcgaccggcggcaaaccgacgctgttgggcatcagcaaacggggcgatgcgtacctgcgcacattgctcatccacggcgcccgggcggtgattcgaaccgccgaacgcaagccggacgccgatccctggctccggcaactgctggccaggcgcaacaagaacgtggcggcggtggccttggcgaacaagaacgcgcgaacgatctgggcactcctggcgcatgaccgggagtaccaagcggattacaggatggcggcatgaacaaccttgtggcgtaacggtacgacacgaaccggcttcgaaaggagaacctccaccgattgcacaggcactcacgacgtgatggcaagacaggtcagaccggggccccgccaacctggtaaaagtctggcgcttcgagcgcgggcgactgataaggacggggccagcgtattccatcagggacagaggcttgtggcctcgatcaaagtccggatctatggccgcaatctctacctacttaccgtcatcgattgaaggcttggcaaaacgggggcgaccatcta

SEQ ID NO: 4271 - DNA, 1311 bp, unidentified
  source 1..1311: mol_type = unassigned DNA; note = element_676bdec
  misc_feature 1..2: note = core
  misc_feature 3..189: note = LE
  misc_feature 190..1155: note = CDS
  misc_feature 1156..1311: note = RE
  misc_feature 28..202: note = bridgeRNA
cttgtgtccgcaagatgtgccagaatgtgcgaacgggcggttctcaccaaccgcccgtcgctggatctgagcccgttcgcgctcaaaggcccgagagcctgacggggagcgtgggacagatccggtgtcttcctcaacccgaacagttgcatgggcttcgagcccggaccgagcaaggaagggagctggatgatggcacaaaacgatctcgttgtcgccggtatcgacgtgtccaaggacaaggtggatgcctgcattcgatcactgtctctgcgacgcacatttccagctagcgcgcaggggcggcgccagttgatcgcgtggcttcgcaagcacaaggtgggcaaggccgccgtcatggaggcgagcggtggctacgagcgggactgggccaaggcgctgcgcgaggccgatatcgaggtgcggatcgtcgaccccaagcgggtgcgcagcttcgcccgatcggccgggcggttggccaagaacgatgtgatcgatgccgagatgatcgcctggtttgccgagaccttcggcgaggccaggggccaagtctacgatgcggcccgcgagaagcttgtccagatcgtccatgcgcggcaggggctgctcgacctgcagaccagcctgcaaaacaggggcgagcacgccgcgccggaaccagtgcaaaaaatgcaggctcggctgttgcgccagatcgctctcgaacttgccgggctcgaggctgcgatcgcagccctgatcaaggcgacggcgcattttgccgagcgcgccgagatcatcgagagcgtgccaggacttgccgagaccaccgccgccggcctgatcgcggcgatgccggaactgggccaggtgagcaacaaggcgatctccgccctgctcggcgtcgctccttacgatgacgatagcggcaaacggcgcggcgagcgccagatcaagggcggacgccgcagggtccgcaatctcttctacatggcttgtctcggggccgcgacccggcataaccccatgctcaaggccttctatcaacgtttgctggcaaaaggaaaggagaagaaggtcgcgcttgtcgcctgcatgcgcaagctcatcgtcatcctcaacaccttgatcgcgcgcggcgagaaatgggatgccagtcgctacgcggtgagctaacgagcgcgccatgacgcgctcggtcctcgaccgagcgcgtgcaaagccaacagaccggtgagcggacggggtcaaggccgtcagccgccgaaggcgggggcgcggcacgcgccagccttgagcccggccgatcactggtctacttcaacacagttg

SEQ ID NO: 4272 - DNA, 1609 bp, unidentified
  source 1..1609: mol_type = unassigned DNA; note = element_6778e13
  misc_feature 1..2: note = core
  misc_feature 3..278: note = LE
  misc_feature 279..1487: note = CDS
  misc_feature 1488..1609: note = RE
  misc_feature 14..298: note = bridgeRNA
ctcctacaatagaactatggattggaaacggatagctaccgttcctatccacctcgttgtttaagctggtaaaatagtgaggtaatggttagacgggattcctcctaggacctacatgtccgtatacgagtctgtttaccatcctctcattcccagctgttcgatttatgcaggttgggctatctttccagatgcgtccgtgtcaacccacaggagattgaatcggcaatgaggagtatggttcgccattgcaattctatcttcaaggagcgatgtacatgaacgcagtagggattgatgtctcgaaaggcagaagcacagttgccgtagtaaagccttttggtgagacagtagccaaaccttttgaggtacgtcacactaaaagcggcatgaacgacctcgtgaattatttaaataccttagacggcgaatgccgcgttgtcttggagcacacaggccgctactacgaaccaatggttcgctggctttctggtgccggcctgtttgttagtgctgtgaaccccaagttaatcaagaacttcgataacaactccctgcgccgcgtcaaaacagataaagctgatgcaaagaagattgcacgctacgcccttgacaaatggcctgagctgcgtcagtatacagctatggataaaatacgtacacagctcaaactcatgaaccgccagatgagcttctaccagaagcagcagacggcatacaaaaacaatttaatagccttagttgatgaaacctatccgggagccaataaattcttcaccagccccaagcggccagatggcagcgaaaagtggatagacttcatcgaaaaattttggcatgtggattgtgtttgcaatatcagcctgtcttcctttacagacaagtaccagaagtggtgcaaaaagcacggctataatttccagcctgacaagccaaaggaaatacgtgatgcttcgttggaactgattgccatattacctaaagatgatatgacgaaaatgtttatccatcaggctgtagaacagctaaatgccatttccaaggccgtagaggaacttcgtcaacaaatggatagcctagcttccaaactgccggaatatcctgttgttatgtccatgttcggcgtaggaacgactcttggcccacagctcattgccgagattggcgatgtgcataaattcaccaagcgcagtcagcttacagcctttgcaggtgtagaccctggagttaatgaatctggtgactatgcccaaaagagcgttcacaccactaaacatgggtctccatatctgagaaaaacgttatacctcataatggatgtcttgattaagctacaaccagaagacgaccctgtatacagattcatggtgaaaaaacgtgatgagggtaagccctactacgtttacatgacagccggagcaaataagttcctgcgaatctactttggtaaagtcaaggaatacttaagcagcttacctttggaataataacaatttcagaaaattctttacaggttgacgcattgcggcagcctttttgtcgtgccataaaatcacttcatagaaatttactccattccgaaatttatgcttgactttttatttgcagg

SEQ ID NO: 4273 - DNA, 1397 bp, unidentified
  source 1..1397: mol_type = unassigned DNA; note = element_6779282
  misc_feature 1..2: note = core
  misc_feature 3..90: note = LE
  misc_feature 91..1125: note = CDS
  misc_feature 1126..1397: note = RE
  misc_feature 1096..1384: note = bridgeRNA
agatgggatggttgccgccctccccgacggcatcgcaatgtgccaacatgtcggtagtgaaaccacatatgaagcggagaggacggcaaagtgaatgatatgataatcggcgtagatttggcaaagtccattttccaggttcacggggcgttgatggcgaccggggagatccagttcaaaaagaagctgacgcgtgaacagttccgtgtgttcatgccgaagctggccccgagcgtggttatcttcgaagcctgcggcagcgcgaactactgggcaggccaaatggaagcgatgggtcatcaggccaagctgatcgctccgcagtttgttcggcctttcgtgaagcgccacaaaaagaatgatgcagccgacgcagatgcgatcatcatcgctgcgcgccagcctgagatgctgtttgtcacgccaaagacggttgatcagcaggcgcgggctgccttgttccggggccgggagcgattgattaggcaacgcacagaagacgtgaacgctgttcgtgcaattctctatgaacacggtcacgtctttccaatcggcatagggcacatcaagcgcatgcaagacttggttgaatcagagacctgcgacttgtgcggcatcgtccgtgaagagtgtcgggaccttctggcacagatcgcagagaagacggcgcgcatcacatcgcgtgacgggaaactcaaggaactggccgctcagtcggatacggcgcgacgcgtgcaaaccctgcccggagtcgggccattgacggctctggccgttgaagccttcgcgcccgacatgtctcagttcaagagagggcgcgactttgcggcctggctgggtcttgtcccacgccaacattcttcaggcggcaaggaacgactcggccggatctccaaggctggacaggccgatatccgtcggcttctgatcattggtgcaatgagtcggattatcggccgcgcgcgccataagataccggcggagagctggatcggtcgcatcttggagcggaagccgaagcttctggtcgggatcgcgcttgcgaacaagatggcgcgtcagatctgggcgatgctgacgaagaacgaggattacagagatccgacgctggcggctacggcatgagctacatgtcgtaatcagccagagtcggggccaaggggagtgtgagaagacgacgacctgaatgggcacaatgatcgaacagatctgggtcaggaaaaccagttgtccactatgcgcttatagcgcgctcgatagatttggacctgatccgcagatcaccatcccggcccgcggcttctggaaatgccgcacaacgaggcctgaaagaagttcgcactcgatcacacgccaagactgtcaaaacttcttgcattacgggcggcaaccaaaga

SEQ ID NO: 4274 - DNA, 1410 bp, unidentified
  source 1..1410: mol_type = unassigned DNA; note = element_678181f
  misc_feature 1: note = core
  misc_feature 2..307: note = LE
  misc_feature 308..1384: note = CDS
  misc_feature 1385..1410: note = RE
  misc_feature 119..274: note = bridgeRNA
ctttaactttgcagccttaaataagagtctttagcgaactcttaaaattattaacgtttaaaatactcaataacatggaaagatagaccagttattccttacctttgttgtagaaaggaaggattgactgccggaggtcaccctaattgcccttgaaggccatgagcttatgccctgttacaggccctccggatttccagctgcaaatgccaaataggaaggtaggctcggagcctaattaaagtaatagtcacagacagctttccttcagtcaatcgcttcctgtaattaaaaacggtacaaagatatgaaaagaatcgttatcggcatcgacatttccaaagaaaaaatcgatgcaagcgcaattgacatgcaaaacgcccaccttggcatccagaaactggactatcagtcgttcgagaaccgtccgatggggttccgtcgcatgctggtctgggcacggcacctgatcaagggcgttactcttgatgaagtcctgttctgctgcgagaccacgggcggatacgaccgatgcctgtgcgactacatctatgccaaggaccttgacatctggcgtgagagcgcgctgcagatcaagcgcagcatgggcgttcgtaaggggaaggacgacaaggcggactcgctgatgattgccgagtatgccatgcggcacatggacaaggccgtcatctaccagacgcccagcagcaccgtccgcgaactgaaggcgttgctgcaataccgtcacaagctggtgcaggagaagacggaaaagaaggtgcgcatgtcgcacctggcggacacggcggccaagagcaagtccatgagcttcatcctgcgtgatgcccgcaagagcatcaagacgcttgaaaaaagcatcaagctgtgcgagcagcagattctcgaactgatcaaggatgacgaggaactccatagcagctacaggcacatcgtatccgtcaacggaataggtatcgtcaatgccacggcactcatcgcctacagcaacaacttcaaggggattaccacggcaaacaggatggcgtcctactacggcatagcagccttcagggacacatctgggagtagcgtggacaagaaggcatacgtcaaatgctattccaactccctgctcaaggcctacctcacacaggcggctgaatggactatcagggaaaatggcatataccacgactactacctcagattgaaagaaaaaggaaagccatacggcatcatcatcaacaatgcaagaaacaaactcatacacctcgttttctctctcgtacaaaacgacatggattatgaacatgaccatgaggccatcaggacgcaaagaataggaaatgactacacaacaacaccattaaagaaaattaactaaatttgtttgcagaaaatcataggaag

SEQ ID NO: 4275 - DNA, 1592 bp, unidentified
  source 1..1592: mol_type = unassigned DNA; note = element_678255f
  misc_feature 1..4: note = core
  misc_feature 5..358: note = LE
  misc_feature 359..1567: note = CDS
  misc_feature 1568..1592: note = RE
ctcactgggctaccctcccccagaaatgttcgaagagcgtccggttcgaggggataccgaggtatggcccggtgaccgatcgtcgatccggcgggcaatacgcgatcggatttcttgggcggcgcctgcgtgaccgttcatcctggggcggaatggacctggacgggttcggggagagccccattcgctcgccgctcgacggccagcatgagatctgctcccccgactcaaacgacgagaggcccagaccggccacaggatgttgcgccaggggcaactgaagcccggagcgcctatcagtgagcgaccggcaggacctctcaccgcgcagtgtctcgcggtccccgggagacgcgcaatgaatttcttcgtcggcctcgactgggcgagtcaagcgcacgccgtgtgcgtcctcgatgctacgggccaggtgtgctggcagggcagcgtggagcactcggcggacggcttggcggagctgctccgccgtctggcgcgctttggcccgcccgcctctctccccgtcgccctcgaacgcccctcgggtctcgtcgtcgataccctgatggacgccggctaccgggtcgtccccatccaccccaacgccctcaaggcgagccgcccccggtactccgcggccggcggcaagagtgatccgggtgacgccttcatcctcggcgatctgctccgcaccgacggccatcgctttcgcccgctccagcccctgtccgacgagacgcgcgccctccgcgccctggtgcggggccgcgacgacctggtcgccgagcgcgtcgccctcgccaatcagctccgggcgctgctcgaccgtttctggcccggggccgccgcgatcttcgccgacgtcgattcgcccatcgccctggccttcctcagccgctatcccacccctcacagcgccgagcggctcggcgagaaacggctcgcacggttcctcgtgcagcacgcctactgcggccgccggccagccgccgagctcctcgcgcggttgcgctcggcgcccattacgcagacgagcgagctcgaggccgaagccagtggagaaatcgtccgcgcgctcgtgacggtgctgctcccactcgtgactcagatccagcaactctcgacggccatcgccgccgccctgccgcagcaccccgatggccccctgctgcagtcgttcccgcgcagcggcagtgtgaacgccgctcagatcctcgctgagctcggggatgatcgcagccgttttgccaccgacgagcagctggccgccgagggaggcgtcgcgcccgtcacccgtgaatccggcaagcaccgcggcgtcgcctttcgccgggcgtgcaacaaacgcctccgccaggcgctcaccagtttcgccgaccactcccgccatgcctcgccctgggcggcggcgatctacgccgccgcgcgccgacggggctgccatcatccccacgcgatccgcgtcctggcccgcgcgtgggtgcgcgtgctgtggcgctgctggcaagaccgccgcccttacgacctcacgcttcaccgcgccgcccagcgcgtggccgccgcatgaccattcgagggttgacacaggatgt

SEQ ID NO: 4276 - DNA, 1493 bp, unidentified
  source 1..1493: mol_type = unassigned DNA; note = element_67a7a3a
  misc_feature 1..2: note = core
  misc_feature 3..246: note = LE
  misc_feature 247..1473: note = CDS
  misc_feature 1474..1493: note = RE
  misc_feature 6..241: note = bridgeRNA
ctaatgggagctaccgggtcagccgctggcagactcggtagctggtagccgcgagcgggtgagcacttcccttgcctggaccgaggttgagtcctggtgtcagaccgtgcccccgctcgtggtcgggagacgaacggctgatggggtgtcgtgcccgccgggtgttggcgtgagcactggtccattagggcgctgaagtcttccgcaggcggccgttgtggatctgtggcagggcggagatcgcaagtgctgttcgtcggtgatgactgggcggaagaccaccacgacgtggagatacaggacgtacacggccgggctgtacgcgcggcccggctacccgagggcgtggacgggatgacccggttccacgagctcgtcgccgggttcctgcccgatgacgcgaaaccgtcggacgtgctggtctgcatcgagaccgaccgcgggccgtgggtacgggcgctggtcgcggccggctaccaggtctacggtgtgaatccgaagcaggccgcccggcatcgtgagctgctgtcgctgtccggggccaagagcgacaaggccgacgcgcacaccctggccgacatggtgagaacccgccgtcaccagctgcggcaggtcgccgcggactccgacatcgccgaggccgtcaaggtcgtggcccgcgctcaccagacgctgatctgggaacgcacccggcacacgctgcggctacgggcagcgctacgcgattacttccccgcggcgctggcggcctaccagccgttgacgctgaccggcgcggacgccctggaactgctggccaaggcacccactccggccgcggcagcgaaactgaccatcgggcagatcagcgccgtgttgaagaaggcccgccgtcgtgacctcgtggccaaggccgccgcgatccagcaggtcctgcgcaccgagcacctgggccaggccgacatcgtcgccggcgcctacgccgccaccgtccgtgccaccgtcgcgatcctgcaaaccctcaacaccgagatccgcactctcgaagggcaggtcgaggcccattttggtcagcacccggacgctgaggtctacctcagccagcccggcatcggcgtgatcctcggcgcccgggtgctcgcagagttcggcgacgctgacggccgctacgccgacgccaagtcccgcaagaactacgccggcaccgcaccgatcacccggcagtccggcaagtccaagaccgtccacgcccggttcatccacaacgaccgcctcgtcgacgccctgcacatgcaggccggcgccgcgatcctgcacgaccccggcgtccgcgcctactacgacgaactccgcggccgcgaggtcggccacaacgccgccctgcgccaggtcggcaaccgcctcgtcggcatcctccacggctgcctcaaaaccaccacccgctacgaccagacgactgcctggtcacaccgcacacaacctgccgcagcttgacattcaagaagctggggtgt

SEQ ID NO: 4277 - DNA, 1439 bp, unidentified
  source 1..1439: mol_type = unassigned DNA; note = element_67aa0b1
  misc_feature 1..2: note = core
  misc_feature 3..147: note = LE
  misc_feature 148..1167: note = CDS
  misc_feature 1168..1439: note = RE
  misc_feature 1204..1439: note = bridgeRNA
aaatgcaatgaacgcatcccacttcttaagcacaccagatgatggttgaaagagtgaagttggcaggtgtggagcctcgcagatttccggcatcattgtgcccaatacgggatgcataaagccccctcagacaggagactccacagcatgaaatgtacaccggttggcgttgatatcgcaaagcatttaattcaggttcacttcatcaatgagcatacgggtgaagtggtggataagcagctacgcagcagagattttctggcgttcttcagtaaccgggaaccctgcctgattggcatggaggcttgtggtggctctcagcactgggctcgcgagcttaaaaaactgggacatgaagtccggttgatgcaggctcgtttcgttaaagccttcgtcatgggcaacaagaatgatgtgatggatgccagggctatctggatggcggtgcagcaacccggtaaagcgatctccgttaaaacggaggaacagcagtcggtgctggtcctgcatcacactcgcaggcagttggtgaagtttcgcaccgcgcagattaactcccttcacggaacattactggagtttggcgagactatccacaaaagccgggcagcgttggaaagagagctaccggcagcactggaacggatgaagataaggttgccaccgtatcttatcagtgtacttgaagaccagtacaacaggctgagtgaactggactcgctgatagatggtctggaaaaacagcttaacagcgtggctcgacagaatgaaacctgtaagcgcctgatggaaatctccggtgtgggcccgttaattgccaccgctgcagttgccactatgggtgaggcatcagcgtttaaatccgggagagcattcgctgcttatgtcggtctggttccgaagcaaactggttcgggaggaaaagtccgtctgttggggataagcaaacgaggtgacacctatctgcgaacgttgtttatccacggggcaagggcagcatcgctacgtgcaaaagaacctggttcatggataacggaactgagaaagcggcgtccgaccagcgtggccatagtggcgatggcaaacaagctggcgcgaacagtatgggcgatagctgcccatgaacgtaaatatgataaaaattatgtcagtgtcagaccgtattaatcgctgataccgataaacattaactcttaacaaagggtgaatgctgaaaggttgctctggcagccatagtgatgacaaagacaggtaagaccgggactcactaaacctgaatgggttagtgggcttaaagcccgctgaggaaataaggcgtgagtcagcgaattgcatagtggctcgcagctttatagctgcaaaaaagccggatataaagctgcaacctacccatcaatgtcaaaacaatggatgccttgcaaacgggatgcgttcatata

SEQ ID NO: 4278 - DNA, 1607 bp, unidentified
  source 1..1607: mol_type = unassigned DNA; note = element_67ae441
  misc_feature 1..3: note = core
  misc_feature 4..274: note = LE
  misc_feature 275..1486: note = CDS
  misc_feature 1487..1607: note = RE
  misc_feature 15..294: note = bridgeRNA
actactactatacaagtgtggttgatattcctgttttccagataggatgttatccatcttattgcttaagctgttagaatgatggggcaatcggtctggcccgttaattactggacttttcgtccgttcatgagtcagccaaccagccctcattcgcagcgttcgttttacgcaggttgaacctcccgttcgtgtgaaacacccagtagattgaataggcaatgagaaaaactggtatcgaccattgctattaaatcttgaaggagtggtttccatgaacgcagttggtattgatgtttccaaaggcaagagtaccgtggcaatatttcagccgggagagaaggtcgttctcaagccccgtgatttccggcatactcagtccggcataggttctctgatcgagattatcaaaggactggacggcgatacaaaggtctgcatggaacacaccgggaggtattatgaaccggtcgccacctggctctctgatgccggcatcttcgtcagcgctgtaaaccccacactgatccgaagcttcggcgatgattcccttcgagcccctaaaaccgataaggcggatgcgaagaaaattgcccggtatacccttgaccgctggaccaaactgaagcagtatggtcatatggacgagacacgaaaccaactgaaaaccatgaatcggcagttcgggttttacatggaccagaagaccgctatgaagaataatctcatcgcgctcctcgaccagacctatcccggtgccaacgccttctttgacagccctgcacgcagtgacggcagtcagaaatgggtagactttgtctatacctactggcatgcagactgtgtacgcggtaagtccctgaatgcctttaccgagcactacaagagctggtgcaaacgcaaaggctataacttttgtgctgctaaagccgaaaaaatctataatgattctgccgacctcatcgcggtgttttccaaaaatgccaatacgaagatgttggtccatcaggctgtggaaatgctgaacctcgtttccaaaaccgttgaatcccttcgagaagaaatgaaccgtttagcagcaacccttcccgaatacccggtcgtcatggccatgaacggcgtaggtcccactctcggtccccagcttatggccgagatcggagacgttacccgctttgaaaagcggggttctttaacggcatttgcaggcgttgatccaggtaaaaacgattccggacagcattcacaaaaaagcgtacccacttcaaagaaaggatctccacacctaagaaaaacgcttttccttatcatggaaagcctgatccagcgtgcaccggaagatgatcctgtttatgcctttatggataagaaacgtgcccagggtaaaccgtactatgtgtacatgacggctggatctaataaatttcttcggatctattacggacgcgtgaacgagtatctggcatcgctttctgaaagcaactaattaccgtttacaaccatccatcagaccagcgccttaagatggcgttttttgtggtacctttaattcagcctgcgtatgattttcatagagtatacatttctgcttgacattttatttgcag

SEQ ID NO: 4279 - DNA, 1604 bp, unidentified
  source 1..1604: mol_type = unassigned DNA; note = element_67aefd4
  misc_feature 1..2: note = core
  misc_feature 3..224: note = LE
  misc_feature 225..1469: note = CDS
  misc_feature 1470..1604: note = RE
ctattacaatataatttggttggaaccctcggcagccagccgggggtttcgtccgtctcgtgccaaagctacaataagaggagcaactggctgaccataccctccttgggcagaaaagtccgtttttaagactgtcagccatcctcttgttgcggcgttcggtttaagcaggttgagccttgagttcgcgtcacccaatagatcgaatcggcagcgagaaaaagatgggtcccagttgcgaattttgtattgggggaatgaacgtgaactgtgtaggcgttgatgtttccaaaggcaaaagcatgatcgccgtcatgcgtcctttgggggagctggtgatcccgccctttgaggtgggacacaccggcattgagttgtgtgagctgtcgagccggttgagggaactgggcggcgagacccgcgtggtgatggaggccacggggaactaccatttgccggttgccagcttcctctacgattccgggttctatgtctccgtggtgaacgccatgctggtacatagctacgggaacaacagcctgcggcgggccaagaccgataagaaggacgcgatcaagctggcaaactacggccttgaccactggctggcactgcccagatacatcccggaggatgaagtacggctgatgctgaaaactacataccgccagtatcagcaatgtgccaaggtgcagaccatgctcaaaaacaatttgatttccctgctcgacaccgctttcccagacgcaaaccgcttgttttccagccctgccagggcggacggcagcgagaaatgggtggactttgttgccgccttttggcattgcgagtgtgtctgcgggttgtccgaaaaggcatttgcagccaagtaccagaagtggtgcaagaagcacggctataacttcagtcaggacaaggcgctggacatctacgcctccgcctgtgggcatttcagcgtcatgcctaagaccgatacggccaagctcctggtggaacaggcggtgtcccagcttcgggccgcttccgccgccctggccacgctccgaaatgaaatgcagtccctggcggcatccctgccggaataccctgttgtgatggggatgttcggagttggcccggccctcggcccccagctcatggcggagatcggcgatgtgcgccgcttccactccaagaaggcgctggtggcctttgcgggtattgatgccccgccgtaccagtccggccagatggaagtccgcagccgaagcatttccaagcgtggctcctccgccctgcgcaggacgctgttcctggtgatgagtgccatcctccgctgttctcctgccgatgaacctgtgtatcagttcatggacaagaagcgcgccgagggcaagccctaccgcgtctacatgatggcctctgccaacaagttcctgcgtatctactatgccaccgtgaagcggcatctggacagtctcgaagcctaacgtccaacctcgaatccgcttatctcaggcctgcgccaaaaaatttcaatggcggtggcttggttttctataccctttttgcggtgcctaaaaaatcccgcttcccttcaatttagctcttgacttttagcaggt

SEQ ID NO: 4280 - DNA, 1541 bp, unidentified
  source 1..1541: mol_type = unassigned DNA; note = element_67b82c7
  misc_feature 1..2: note = core
  misc_feature 3..238: note = LE
  misc_feature 239..1420: note = CDS
  misc_feature 1421..1541: note = RE
  misc_feature 3..217: note = bridgeRNA
cttgtattatagagtagtagtttttatagcccctctccaagggctgtgctacactgtaggggatgctgtggattggttaattcctcctaccgcaagacggttcgtgaaaggctccaaccacagccctttacagtattgttaatcagttagataccgccgacggtttatgtagaacaaggttacaagagtaaagcgtcctgtggacccagcatcaaataaacacaccggaggtattttcatggtttgcgttggaattgacgttgcaaaggacaagcacgattgcttcatcctcagcttggaagatgaagtcctggcagatgtattcaccatccaaaacaatgcggagggctttgacaggctcctgcaaaccattcgccgctgcacccgtccagaagataaaataaaagtagggcttgaggctaccggacactacagctacaacatcctcggatttctgcttgacaaaggcctacccacctacgtcatcaatccgctgcacaccaacctctaccgaaaaagtctgagtcttcggaaaacgaagacagaccgtgtcgatgcgcgaaccattgcagctatgctcatgtctgatgtggacctcaagtcctacacagacacagcataccacaacgaggaactaaagtcactcacaagataccgttttgataaagttcgtgaacgggcgaagctgaagcagtctgtttcccgcctggtcacgattctgtttccagaactggaaaagctggttcctacactgcacatgacatccgtttacgcacttctcagtgagtttcccggcaccaaacaggttgccgaagcgcacctgacgcatttgaaagcagttctaagcaattcctccagaggtcactacggacgagatatggctgaaaccattcgggatgcggcacgttgctctgtcggttctgtcatgcccgccaagtctctggaactaaagcacacaattcgcttgattcgtgaattggatgccgaaatcaaagatattgaaaacgccattcaagccatcatggacgaaatacagtctcccattaccactatcccaggtaagggcgtccgtatgggagctgttttcctggctgaaataggtgatttctcccgattcgactcgccagatgaaatcctcgcatacgctgggatgtcgccttccacttaccagtctgggcagctttcgctgtctggagcctactcgcacatggaaaaacgaggttcccgttatttgcgctacgccatttacaacgccacgaaatacgtctgccattgggacccgacctttgccgcttaccttgccaagaaatgggccgaggggaagcactacaacgttgcgctctctcatgcggcaaagaaattggtgcgtctgatttacgcgatggagaaatcccggcagccatacagcagcgctgcataagtcctttttctcataagctcaagcaggcgtccggcaggacgtcagctttgctgtaccctttttgaccgtctacatttttctcacctttcctcgcattcaggcttgacttttaatagttagt

SEQ ID NO: 4281 - DNA, 1359 bp, unidentified
  source 1..1359: mol_type = unassigned DNA; note = element_67c12ec
  misc_feature 1: note = core
  misc_feature 2..71: note = LE
  misc_feature 72..1100: note = CDS
  misc_feature 1101..1359: note = RE
  misc_feature 1106..1349: note = bridgeRNA
tatgggatggcccgcccctctaccctcggcgctaggctggcagggaaacctgagggacgggagctggtgctatggaaatcgtggttcttggggtcgacctgggcaagaacagctgcagtgtcgcgggtttggacgcgagtgggcgggtggtcctgcggcggcgtctgcaccgggacggtgtgatcaagctggcggaagggctgccgagttgcgtgatggcgatggaggcctgctgcggcgcgcaccacctcggtcgcgtgctgcagggtcacggccacgaagtgcggctgatgtcgccggagtatgttcgcccttacgtcaaggcgcagaagaatgatgatcgcgatgcggaagcgatcgccgaggcggcgacccggccaacgatgcgattcgttgagctcaagagcgaggggcagctcgacatgcagagcctgcaccgcgcccgtgaccggctggtgggtgtgcggacggcgctgatcaatcagttgcgcgccttcctcctggagcgcggcatcatcgtgccgcaagggcgacgcaagatggaggcgcaccttgatgccgtgatggcggcggagcaaatctcgctgagcccacgtacccggcggctgatcgaggaccagcgcgccgagtggtgcgagctgaaccgccggatccgggcgttcgacgaggagttcgcgctgcaggcccggacggaggagagcgcccggctgctgaccacgatcccggggatcgggccgctgaacgccacggcgttggtcgctgcgattggcagagccgagacgttcgcgcggggccgcgacctggctgcgtggataggactggtgcccaggcagatgaccacgggtggcaagccgaagctgctggggatcagcaagcgcggcaacgagtacctgcgcaggatgctgatccacggcgcgcgtgctgccctgccggcgttggccaagggagagacgccgctgggaggctggctgcgaggcctgctggcacgggcccatgtgaacaccgtggtggtggcgcttgccgcgaagctggcgcggatcatctgcgcgatcctccacagcgggcagcggttccggatgcaggcggcgacagcatcgtaaccaaagagatctgccgttcgcgctcacccggcgcggtcggctgacgaggtctgcgggtggtaggaacgagatggcctgacagtcgatcggcgttctggaaccctggtcaaaaaaatggcgctcgacgccgtgaagtttatgagggccgggacgcgcggatctccatcttggccgaggcgacgcctcgagaccggatacgttggcgtagactgatctggcacgattgtgaaagccgcttgcagatggggcgggccatacg

SEQ ID NO: 4282 - DNA, 1234 bp, unidentified
  source 1..1234: mol_type = unassigned DNA; note = element_67c4d68
  misc_feature 1..2: note = core
  misc_feature 3..262: note = LE
  misc_feature 263..1219: note = CDS
  misc_feature 1220..1234: note = RE
  misc_feature 6..211: note = bridgeRNA
cttatatctcgattctgcgttccacaagaggcagaatctccgactgatcatcggacccagacgctgggcaagacgttgccgaccttgggcctgaagcccgcgccgtagatcgtcccccagcgtcccttcctcgccattgagttcgaacagtatcgtagggctgccttgggcagaaccctggatggataaggctgaacccggcaggagcggttccgagcgatcggccccttcatcgttcccgaacgaaccccaaggagacttcatgacgttcacccccatcggtatcgacatcgccaaagccaagttcgacgccgccgcactacgcaacggcaagtacaaaaccaaggtcttccagaatacgcccgaagggtttaaggcgttcctggcctggctgcaggccttcccagcgccccacgtgtgtctggaggccaccggccgctatggtgagggcttggccctgttcctggtcgaccacggcctcgccgtcagcgtggtcaaccccgcccaaatccacgccttcggccaagccgaactgagccgcaccaagaccgacaagaccgatgccaagctcatcgcccgcttctgtcatagccaaagacctctgctctggcagccgcctccgctggccgtgcgccaattacaagcgctggtccgtcggctcgagagcctcctcgagatgcggcagatggaacgcaaccgcctggacggggccgatcccaccgtacgcccctccatcgaagccgtgctcgccaccctcgatgccgagatcgccgcgacccaaaagcgcatccgggagcacatcgaccctgatccggacctccgccaacggcgtgacctgctcgacaccattcccggcttgggcaatgccacgatcccggtgctgctggccgccctgggcgacgttcaccgcttcgaaaacgcgcgcagcgtcgccgcctttgccggcctctcgcccaaagagcaccagtccggaaaatggaaaggccacacccgtctatccaaaaccggcgatgccttgctccgcaaagccctttacatgccggccatcgtcgcccggcgccataacccactgatccgcgccttctgcgagcgccttaaagcccaaggcaagaacggcaaactcatcgtgggcgccgccatgcgcaagctcctcgtcctcgcctacggcgtccttaaatccggtcaaccgttcaatcccaattttgcgcttgcatcgtgattcttaagacagtat

SEQ ID NO: 4283 - DNA, 1393 bp, unidentified
  source 1..1393: mol_type = unassigned DNA; note = element_67d080b
  misc_feature 1: note = core
  misc_feature 2..78: note = LE
  misc_feature 79..1134: note = CDS
  misc_feature 1135..1393: note = RE
  misc_feature 1158..1384: note = bridgeRNA
taatggaatggtccggccgtgctcctgccccgccggcgatcgaagctggtaaggggcgccaacgacaaggagcatgctatgtctcagaatctcaacagcgcggtcgctgtcatcggcattgatatcggcaagaactcattccacatcgtcggcctagatgcacgcggtgccatcgtgctgcgtcagaagtggtcgcgcggtcagattgaagcacggctggccaatatgccgtcgtgcctggtcggcatggaggcctgcgtcggtgcgcatcatctcagtcggaagctcaaggcgcttggtcacgacgcacggctgatgccggcgaagtacgtgcgcccctactcgaagggacagaagaatgacttccgcgatgccgaggcgattgccgaggctgtgcagcgtccaacgatgaagttcgtggcgacgaagaccgccgatcaactcgacctgcaggcgctgcatcgtgtgcgcgagcgattggtcagccagcgcactggcataatcaatcaaatccgcgctttcctcctggagcgcggcgtcgcagtgcggcaaggtctacggttcttgcgcgctgagttgtctcgccttctcgccacgccacccgatgtactatcgccccgcatggtgcgcatcattgagggattggccgcagactggcgtcggctcgatgagcgtatcgatcacttatctgacgagatcacagcccttgcgcggcaggacgctgggtgcgagcggctggtaagcgttccaggcatcggaccaatcatctccagcgctatggtggccgcgatcggcaccggtgacgcgttctctaaaggccgcgacttcgccgcttggctgggtcttgtaccgaagcagatctcgactggcgatcgcaccatcctcggtaagatatcgaagcggggtaaccgctacctgcgcgttctgttcgtgcaagcagcgtgggttgtgctgatcaagccgcagagctgggagcggcatgggctcaagccgtggatcgaggcggccaaaaagcggctgcaccgcaatgttcttgcgattgcgctcgctaacaaactggcccggatcgcttggagcgttctggctcgtggccgaagcttcgaggcaaggccgaccatggcgtcagccgcttagttctgcctgagtaattgactcttacctgccgaggtctgcgagaggataagacgagatggaggttcggtcttcccggcgcatgcgaacactggtgacccgaatggcccgatcgaggcctgtccgctaatgagatcgcacgcgcgctgatatccatgatggccaggagccaatgctccaataaaaggccggatacattgatgcaagatcgctcaccgccaactcgacgaagttctcttgcaacgcacggccggaccataca

SEQ ID NO: 4284 - DNA, 1406 bp, unidentified
  source 1..1406: mol_type = unassigned DNA; note = element_67d58ac
  misc_feature 1: note = core
  misc_feature 2..229: note = LE
  misc_feature 230..1393: note = CDS
  misc_feature 1394..1406: note = RE
  misc_feature 14..244: note = bridgeRNA
ctacttagagacttggttcaggatcgatgtccggccagactcggtccaggtgcccggcgagacgctcccacattgcggctgcccaccggtgtcattggtgtggctctctcatggcctgcggtctcgccgggcaccgcgcgaggagaggctggaaaggggtttgtcctgctcgaagtagcggtgccctccttgctgacaaccccatccggttcagccaagggaggcgccgatgtctgtgatcatcgggatggacccgcacaagcgctcggccaccatcgaggtcgtcgacgaacgtgcccgggtgctcgcagtgggcaggtacggcaccgacaagaccggctacgcgcagatgctcgccgccggccgccagtacgccgatcgggtgtgggcggtcgagggttgcaacggcatcggcaagcacatcgcccaccgcctgctgcatgacggtgagacggtgctcgacgtacccgcgaagctgtcggcgcaggtgcgggtgttcgccagcggcaacggccgcaagaccgacccggtggatgcgcactcggtcgcgatggtcgcactgcgcaccccgaacctcgtgcaagtccagctcgacccggacctgcaggtgatgggaatgctggtcgaccgtcgcgacgagttgggccgcgccaggacgcagaccatcaaccggctgcaccggctgctgctggagctttttcccggcggggcaaagcaattcctgtccgcacgacaggcacgggcgctgatcgcgaccatcaaaccccgcgacatcgtgggcaagacccggcgccgtctcgccgtcgagctcatcggtgaactcgagggcatcgacaagaagatcaagaccgcggagaaggacctcaaggaactggtggtcgcccgcagctccaccctgatggacctgcacggcatcggcccctcaggtgcagcccggctgctggcagacgtcggcgacatccgccgcttcgccgaccgcgaccggttcgcgtcctggaacggcaccgccccgctggacgcctcctccggcgaccagaagcgtcaccgactctcccgcgccggcaaccgccgcatcaaccgcacactgcacatcatggccgtcgtccagctgcgcaaccgcaccgaaggccgcgcctacttcgacgcgaagaaggccgccgggaagacctccatggaagccatgcgcgccctcaaacgccgactgtccaacgtcgtctacgcccgcatgatcaccgaccacaaacgcaggcaggcggcggatccgggagggcactcggggacgactctgcaatccagcgtgaccgacctaaccccggacatcggcccttcggacaagccacttcccggacccgccaccaaccaccctaaacccctggtgtcagcggcgccttgacataaaggggtgc

SEQ ID NO: 4285 - DNA, 1380 bp, unidentified
  source 1..1380: mol_type = unassigned DNA; note = element_67d6c4a
  misc_feature 1: note = core
  misc_feature 2..66: note = LE
  misc_feature 67..1098: note = CDS
  misc_feature 1099..1380: note = RE
  misc_feature 1139..1375: note = bridgeRNA
caatggtatggaccccgccgcccccaaatggggtagcgtcggataggaaacaggaggatgcataccatgcaaatttgtaggatcggccttgatttggccaaatatgtttttcaagtacacggtgtcgatgctcaggatgagatcgttctgaggaagacattgcggcgggatggcgttgcacaattctttgctgaacttgaaccatgtatcgtcggaatggaagcgtgctgcgggtcacattactgggcacgtgttctgacggatttgggtcacgaagtgcgtctgatctcaccacaattcgtgaaaccttatgtgaaatcgaacaagaacgatcgcaacgatgcagaggccatttgtgaggccgtcggtcgcccctcgatgcgctttgtgccacgaaagtcccctgaacagttggaaatacaggcggtccatcgtatccggcagcgcgtcgtcgcaagtcgaacacggttggtgaaccaggttcgcggtttgctcggagaacatggggttgtggtggctcgggatattacccgcatccggcgggcgctaggtgagatcgctgacagcaacgcgagcggatttggggatattttcattgatatgttgcgcgacatgcgcgacgagttaggtgaactggatgtacggctcgcgggttacaatcgtaggattaagaacctcttccgttcgaatgagatgtgccaacgcattggtcgaattgaaggtgttgggccaatcacagcaacagctttggtagcagcaattggtgataagtcctgcttcaagaacggtcgtcaatttgcggcttggttgggattagttcccaagcagcactcaagcggcggaaaagcccgattgttcggtatcagcaaacgcggcgaccgatacttgcgaacattgctcattcatggtgcgcgagctgtgctcagccgcgctgccgggaaaaccgatgcgcgcagtcaatggattggccggatgcgggaacggcggcatccaaatgtggtcgccgttgcgctagctaacaagaacgccagaattatatggtcgcttctatcaaaagatcaggagtaccgcccggctcatgaggagtcattcagctgaaaaccatatcgatagactgacataaggagggctatctcaggaatattgcaacatctgccaggagatggaaaagggtcacacccgttgcttctcgaacctgatgtgtggatcggcaaggtcaacatcgatgccttaggggcgatgagggggaagcaagcggaaatccatcggggctcgcggctacgatatatcgggccgcccaaagaagccggatatacatcagcaatcgcgacctcgaaaccagagccaaacagaccgttgcaattaggcggggtccatata

SEQ ID NO: 4286 - DNA, 1394 bp, unidentified
  source 1..1394: mol_type = unassigned DNA; note = element_67d77ad
  misc_feature 1..2: note = core
  misc_feature 3..86: note = LE
  misc_feature 87..1118: note = CDS
  misc_feature 1119..1394: note = RE
  misc_feature 1163..1382: note = bridgeRNA
tgatgctgtggacggctcctccacctggtgcgcaagtgccataggattggtggccaaaaggtgaccacgattcggaggagctcgatatgcaagcggtgacgacaatcggtttcgacattgcgaagtctgttttccaggttcacggcattgacgcagacggccagggggttattcgccagcgtctcaagcggtcacgggttctcggtttcttcaggaagctttcgccttgtgtggttggtatcgaggcatgcgcgtcctcgcaccactggtcgcgcgagttgcaggcactcgggcacacggttcgattgatgccgccggcctatgtgaagccgtatgtgaaacgccagaagaacgatgcggccgatgccgaggccatttgcgaggcggtgcagcggccaagcatgcggttcgtgccgaccaagacacccgaccagcaagcctgtctgatgctccaccgtacgcggcatctgttcattcgccagcagactgcgctgatcaatgcgatccgcgcccaccttgccgagtttggcattgtcgcaccagtcggccgcaatggcgtcgagaagctgctcgatgtggttgccgatcccgacgatggacgcgtgcccgagattgcgcgcgagtgcctggaggcactgggccgtcaactatggcagctgaagcggcagatcctgacgttcgaccagcatatcaacgcctggcatcgctcaaacgagaccagccgtcggctcgacgaactccccggggtcggtccggcgctggcaaccgcgctggtcgccagtattcccgatccgagggcgtttcgctcgggacgcgacttctcagcctggattgggctggtgccgaagcagaactccagtggaggcagggagaggcttggcaatatcaccaaacagggcgatcgatacctgcgctcgctgttctgtgctggcgcgttggcggtgatccgatacgcgaaaatccacggcaccaagcatcggccatggcttgccaagctgctggagcggcggccgacaaaggtggccgcgatcgcgttcgccaacaagattgcccgcatggcctgggcgatgatggccaagggcgagcgttacagggaacccgtcgcgctggctcgctagggcacggcgactttggacgagatcgcgccggcaacggcgtgatgtgaaggctggaaaggactgacagcaggtaacgcagaaccggtcgatccggcgatcaggacaacccacatgggccacagcattgtcgaatgcgagcttttgaccgggacctgatccgcggaaggcattatggccagcggccctatgagccgcgctcaaaggccgaacacatggctgctacgaccagcgctgcgacatgcaaaagaaccttgacagcccggagccgtccacaca

SEQ ID NO: 4287 - DNA, 1324 bp, unidentified
  source 1..1324: mol_type = unassigned DNA; note = element_67eb8be
  misc_feature 1: note = core
  misc_feature 2..254: note = LE
  misc_feature 255..1313: note = CDS
  misc_feature 1314..1324: note = RE
  misc_feature 40..248: note = bridgeRNA
ctattgctgcaggatgagccgggcctgagcattttcgacgggaggtgctcgggctcgggccgccgggtgactcggagaacacgtgccaccaggccttccgttgatctgtctatggcggcccgcacggcgagagcctgactgggagtgacttgatagaagcttgctgagccgtcaactcgcaataggtgtgtccctcggtcaggctctcgaccgctgtcccgtcgtccgcatcggcgcagaggaaggacatcacgatggtgacagtgggaatcgacccgcacaagcacgttcacgtggcagtagccattgatgccagtggcaggcagatcggcaagccgctgacggtgaagaacggcccgcatctgatcattggactgttgacctgggtccgctcgatcagcgacggcgcatcggtgacctgggcaatcgaagacggccgcggattcgcccgccggcttgccgatggcctgctcctcgccggccaggaggtgatctgggtccctacccggctcatgatggcccaccgcaagttgctcgccgctactggcgccaagtctgaccccgttgatgcagcggcagccgcccacgctgcgatcgccacccccgatctggaccgacaccgcatcgacgagcgagtgcgtgagctgcgcgtacttgtcgaccatcgcgccgatctcgtcaagcggcgcaccatggtgatcaatcagctgaagtcgcagttgcatctgtggctcgattacaccccgggtgacctcctgcgggtcaagtcagtggcctcgttgaccgcgctgctgcatgatgtgccgttgggttcacaggtccgccatgcgctcggcgacatgctcggcgaggtagccgacctcaaccgtcgggtccgcgaactcgacatcacgatcaagcagctggtcggccccctggcgcctacgctgctgcagatcaccgggatcagctacaactccgccgctgtcctcgttgctgagatcggagacatcacccgcttctccagctcagcaaagctcgcccgctattgcggctgcgctcccatccccgtctactcctcggacaaggaacggtaccgcctgcatcgaggaggcaaccgacgcctgaacagcgtgctctacaccgcggcgctcgtgcagaagcgacacaaccgtgccgcccaaaaactgctggaacaccaccagccggctaagggcacccgcggtgctcgccgcatccttcaacgacacctggtcgacgtcgtctaccgagccatgcaagccgaccaggcaacatggacacatcacatcgcccgatgccaacaggccgcttgacatagaagcat

SEQ ID NO: 4288 - DNA, 1441 bp, unidentified
  source 1..1441: mol_type = unassigned DNA; note = element_67ed8c0
  misc_feature 1..5: note = core
  misc_feature 6..233: note = LE
  misc_feature 234..1427: note = CDS
  misc_feature 1428..1441: note = RE
  misc_feature 1..237: note = bridgeRNA
cacccgttaccttcttcgtagctcctgatcaaggagttgtggtcgccaggtccggcatgactaatgcccccagtcgcaggcatgatccggggggtggtgtcaccgagcctggtggcatcgagggaccgctgatagggacacggccacccatgggtaggtctcgtcgtaacgtgggtgccggccttcgatgcccgactgcggtgaccactcgcgacgaacgaacggcttgatagatgaccagcggtttcggggtgtttctcggcctggatgtcggcaaaggtgagcatcacgccgtcggcctggacccggccgggaagcggctgcacgacgggccgctgcccaacagcgagccgaagctgcgggcgttgttggacaagctcgccgtccacgggccgctgctggtggtggtcgatcaaccggccacgatcggggcgttgccggtcgcggtggcccgcgcatccggccaccaggtcgcttacttgcccggcctggccatgcgccgcatcgccgacctctaccccggccgcgcgaagaccgatgcgcgggacgcgttcatcatcgccgacgccgcccgcaccctgccgcacacgctgcgcccggtcgacgtcggcgacgacgccttggccgagctggacgtgctggtcggcttcgacgacgacctggccggcgaggccacccggatcggcaaccgcatccgtggcctgctcaccggcatccaccccgccctggaacgcgccatcggcccgaggatcagccacccggcggtgctggagatcctgtcccgttgcggcgggccaaccggcatccgtgcgaccggtcgccgcaagctcacctcaatcgcggccgcgcacgcaccgagaataggcgacaagctcgtcgcggcgatcatgacggcgctggacgagcagaccgtcaccgtcccgggcaccgccgccgcggacaccgtgctgccccgactggccgacagcctgaaaaccgttctccaccaacgcaaacaggtcgccaccgaggtcgaggagatactcgatgcgcaccctcttgccggggtcctgacctcgatgcccggcatcggcgtcaggaccgcagcccgcatcctgctcgagatcggcgacgcctcggcgttcaagtcctccggtcacctcgccgcctacgcaggcatcgcaccggtcacccgcaactccggatcctccatcaagggcgagcaccccgcccgaaccggcaaccgcaagctcaaacgagcgttcttcctggccgcattcgccgccctgtccgacccggtcagccgcgcctactacgaccggaagagagccgaaggcaagaaacacaacgccgccctcatctgcctcgcccgccgacgctgcgacgtcctgttcgccatgctccgcaacaagacctactaccgacaccccgagccagcagcggcttgacaaccacataggga

SEQ ID NO: 4289 - DNA, 1581 bp, unidentified
  source 1..1581: mol_type = unassigned DNA; note = element_67f742d
  misc_feature 1..3: note = core
  misc_feature 4..260: note = LE
  misc_feature 261..1466: note = CDS
  misc_feature 1467..1581: note = RE
tttggtactataaaagtgtagtaattaattactaagaagtaattgattattgcacttatttttattatgattgaatggattggataacggggcttatttagagataaagttctcgccaaaaaaacagttatccaacattcacataatatattcgcttaagcaagttgagactgaaataactctcgtgtaagcaaccaaaatgaggatatgtagaagagttggaaccaatcataataaaaaatatagaaaggaaaattaagatgaagtatggagtaggaattgatatttcaaaaggaaaaagtactgtagcaatattatcagttgaaggagaaataattgaagagccattcgaaataactcataatattgaaggattaaatttactagaagaaaagatgaaaatatttcctaaagagaatatcagaatagtgatggaagaaacaggaacatatcatttaccagttttgggttatttactagataaagattattttgttactacagaaaatgcatttaaaataaagaaatatttagaccgaggattaaggaaagcaaaaacagataaaaaagatgcttataaactagcagagtatgcttgtgaaaattggtacaaaataaacaaagtaagagaaaatgatgaaatatatgacaatctaaaatttttatctagacagtatttatcaacaatagctgtgcaagtaaagcaaaaagtaaatttctctaatctatgtgatttgttatttcctggatactatcaattactagatgataatacatttatgctaggcttagaaatatttaaaaaatattttcatcctgaaatagttaaaaataaaaaagagaacagctttattgatgaagttgataaattagcgagagaattaggacataaaggtgcaggcataagtttagctactaaaatttatgcacttgcacaaactaccatttctccacgtcctaataatcaatatacacaactatcagctacaagttgtgtagatgccttaattataactataaaaacatctaatacaattataacagaaatggacaaacttgcaagagaattaccagaatatgatgtgataaatgaaataactggatgtggaaagaaattaacatcaagagtaatagctgaaattggagatataagaagatttaaaaatgctggcagtattatagcatatgcaggtttagatgctccaccatatcaatcaggacaatttgaagccacaaatagacatatatcaaagaggggaaataaatatttacgaaaaactggatatgaaattatgaaatcaataaaaggtagttgcaaagaagataatgaattaaaagcatatataataaaaaaagaaaatgaaggaaaattaaaaaaagtagcaaaaatagctggtttaaataaatttataagaatgtattatggaaaagtaaaaaagaaatatagagaattaaatatttggtgaaattgttaacataactggtaatagacctataaaaataggtctatttgtcatgtttaaaagttttataaaaataatttaaaaaatattataaacactattgacttttgttagcaag

SEQ ID NO: 4290 - DNA, 1313 bp, unidentified
  source 1..1313: mol_type = unassigned DNA; note = element_67ffb1c
  misc_feature 1..2: note = core
  misc_feature 3..230: note = LE
  misc_feature 231..1301: note = CDS
  misc_feature 1302..1313: note = RE
  misc_feature 34..241: note = bridgeRNA
ccaacttgttgaatctgggcggggttcgtggtctgcagccatgatcttcaaggctgtgatcggggtcgctcgggaaacacctgtcgccctgttgggctgactgtctaacggcctgcgtcctggtcacagccgcccggtgggagtggctcgagagaggtctgcaacgcccgaagttggtctgccctccgaccggattccagtgatcatcgaccggttggaggaagcgtcgaatgcccgcatcacctgaacgaggtctgtcgccgagcggcgtggtcatcgccatcgacccgcacaaggcctcctggactgccgtggtcgtcaccgcggacctggcatcggccggctcggtccgggtcgaggccaaccgcgccggctatcggcagttgcgacgcttcgcggcgggctggaccgatgttcgttgggcgatcgagggcgcggccgggttgggtgcaccgctgagcgagcgtctgcatgaggacggcatcacggtcgtcgacgtgccggcgaagctggcccgtcgcgtgcggctgctctccaccggccacggccgtaagaacgacccggccgatgcgctttcggttgggatcgcagcgtggtcggcgaccgccttgcgcacggtggagatcgaccaggcgattgccgccctgcgtgcgctgaccgagcaccgcgacgatctggtccgcgcgagaacccagctgatcaaccgcctgcacgtgctcctggtcaagctgatcccgtccggcgtggcccgcggcctaagcgccgagtccgccgctcaagcgctgcgcggcgtgcggccgcgcgacaccctggggcgcaccctgcgtgcgctcgccgtcgacctggtggccgaactgcgccgactggaccgtcgcatcgccgagaccacacagacgctcagtaatgcggtcacggcctcaggcacgaggctcaccgggctgctcggcatcggagacgtggtggccgccaagatcctggcccacaccggaccgatcagccggttcccgtcagcttcgaccttcgcctcgttctgcggcgtggcgccgatcgaagtctcctccggtgacgtcgtgcgccaccggctctcccgcgccggcgaccgccagctcaactacgcactgcacgtcatggcccttgcccagatccgatacgacggccccggccgcaactactaccagcgcaagcgcagcgccgggaagagccacaaagaagcgatgcgctgtttgaaacgccgcctgtccgacgtcgtctaccggaccatgatcaacgactcggtttcctctctggccccggcggcttgactcagagaggtg

SEQ ID NO: 4291 - DNA, 1431 bp, unidentified
  source 1..1431: mol_type = unassigned DNA; note = element_6810c2b
  misc_feature 1..3: note = core
  misc_feature 4..121: note = LE
  misc_feature 122..1159: note = CDS
  misc_feature 1160..1431: note = RE
  misc_feature 1185..1382: note = bridgeRNA
agatggggtattcggcttgcgccccatcttccacggtgatgcagggaggtgctgcgcttcgagctgatgatagaacgtggtctgtccaaacagccacaagcatcaggaaaggaagcgcagcatgaagcactttattggcctcgatgtctcggtaaaagagaccgccgtttgcattatcaacgaatccggcaagatctgtcgtgagataaaggtggtcagccaccctgacgatctcattacagtgctgaaggactcgacctggaacgttgtgcgggtcggactggaagccggacctttgtcgcagtggttattcgaggggttggccaaggcgggattgccggtcatctgcatcgagacgcgccacgtgaaggcattcctgaaggcgcagcccaacaagacggatcgcaacgatgcgcgcggcatcgcacagatgatacgcgtcaatctgtatcgccccgtgcatgtgaagacgctgacgagccagaagcggcgggcgctcttgacggcccgcaagttgctgcaggaaaaggcgattgccatcgagaacgacatccgcggcctcctgcgcaattttgggctgaaggttgctgctgtgggaacggcgaagttcgaagagcgcattcgcgagctcatcgaaggcatgcccgatctcgcggcgatcatggagccactgcttgctgctcgacggaagctgcgtaccgaatttgtgcgcctgcacaggcaaactctggcggtcgtgaaggatgatgccacctgccggcgcctgatgacgatccctggggtcggccctgtggtggcgcttgcctataccgcgacaatcgacattccgcagcgcttcagaaactccaaggccgtaggggcgatcctggggctaacgccgaagctcgacgagtccggggaaagtaagcgcgtcggctgcatatcgctgtgcggagacggcatgatgcgaactttgctctatgaggctgcccaaatcctcctgacgcgcgtgaggaaatggtcgtcgctgaaggcctgggcgatgaacatcgccaagcggcgcggcacggcgaaagcgaaagtcgcgctcgctcgtcgcctagcggtcgtcatgcatcgcatgtggctcgacggcactgaattccgctggacgcgggaatcgatgacatcagcgagctgacaacaggccggaaggagaaagacacaaagttccgccagccggcggaaggacgtccttcgcaggacgatggatgaggcaagttcgaacccatgtctgtgccgtcgcatcacgcggtaatcacgctccggagattgaaccgcctcattctcctaaccccatgctgggagggcgaaacgccgatcccgaagagaagcgaggacctgcggaagatgtcatgccccgaagaggcggagacgctcgtaagcgcttgacctcaacacgccgaatagaga

SEQ ID NO: 4292 - DNA, 1355 bp, unidentified
  source 1..1355: mol_type = unassigned DNA; note = element_6818883
  misc_feature 1: note = core
  misc_feature 2..65: note = LE
  misc_feature 66..1115: note = CDS
  misc_feature 1116..1355: note = RE
  misc_feature 1129..1349: note = bridgeRNA
taatgggatgacctgccccgccctcccgccgcatccttgtggcgcctgaacaggagggactgaccatgactcgtgatacctccgccgaagccgccgtccacggtgtcgatctcggcaagaacatcttccacgtagtgagcctcgatgatcacggggccgtcgttcggcgggcgaagttcaggcgggatgcgttgctcgactttttcgaacgcgcacctcgagccattgtcggtatggaagcctgccctggttcgcaatggctggcgcgcaagctgctcgcgatgggtcatcgagtccggatcatccccgcccagttcgtcaaaccgtacgtgaagtcaaagaagaacgacacgatcgacgcggaggcgattgccgaggcggtgacgcggccgacgatgcggttcacgcagattcggacccctgatcaggttgatcttcaggcgcttcatcgcgttcgtgatcagttgatctcgagccgaaccaggcttatcaatcaaatgcgcgcattctgcctggaatacggcttagcgatacggcaaggttcggagttcttccggaaggcattgcctgatatggtcgcagacgagacgaatgacctcactccagccatgcggaggatgttgaaggatctcttcgacgacttgagccggctcgaccaacggatcgaccggatcacccgtgaagtggaaacgctcgcggccggcgatgaacgggccagacggctgatgaccattcccggcatcggacctctcgctgctacggcgctgctcgcggccatcggcgatggccaccaattccgtcgagcgcgagatctggcagcgtggctcggcctcgttccccgagaatactcgaccggagggaagacgaccctcctcgggatcagtaagcgtggaaaccgatatgttcgtcgcctcctgatccacggcgcccgttcctgcgtggcacacttgaaccgaacgagggatcggctcggcaactggatggcggcactcgaggcaagaatgcacgtgaacaaggtcgtcgtcgcgcttgcggcgaagatcgccaggatcacatgggtgatcgtgaccaaacccggcgctctctacgagcgcagagatcccgctgtcgtctgacgacggcggcggagcagaaagcgaggctcgaggaagtgatgacgaaacagtcgatcggcgccgcgtaagccctggctaaaaaacgtgctcctgcacgaacgattatgtgggaacgtggcgcgcgcatctcatcatggcctggctgcaacagcagctcgctcgcgagaggccggatacatttaggcggactgccgtcgtcagaacgaccgagtgccttgcccgggcggggcaggtcataca

SEQ ID NO: 4293 - DNA, 1370 bp, unidentified
  source 1..1370: mol_type = unassigned DNA; note = element_6819fbf
  misc_feature 1..2: note = core
  misc_feature 3..234: note = LE
  misc_feature 235..1266: note = CDS
  misc_feature 1267..1370: note = RE
  misc_feature 11..214: note = bridgeRNA
ctcctatgtttgtaaaagcataatattgcatagattttatgagtgaaaaggatgagagcgcagcaatcccaaacagctacaggcatgttgagcgttagataaagcctcatccttttacttttttgagttggaacagaatgtaaggaatacggctaagcagtatatccaggataaccagacaggaggaacgacgaagaaaggttttcacttataaaagctcaaacacttttatcaatgacaaacaggttattaaaacaggtagtgggtatcgatgtagcccaaaaagagttagtggtatccttaggcaaaatggatgatatggcagcaatgactgtatatgcaaataagacttttgccaatactaaaggtggttttatggcgcttataagctggataagcaagcatactgaccaagcttatccgttgcggtttgtcatggaggccactggtgtttatcatgaatcactggcttattatcttttcgataaaagctattcggtcagtatcgttatgcccaataagatatctaactttttcaggacactggaaatcaaaacggtaacggacaaatccatgtcggcggccatagccatgttcgggatggaaaagcaactggataactgggtgccgccaaaacgggtatatagaagcctgcggcaactgacccgtgagcgctcacagctcgttacggagagaaccatcatcaagaatcagttacatgctgaactatcggaagcttttccgggagatgataccatccgcagaatgcaggacaggataaagatggtcgatggccagctcaaagaggtattgacagagatcaggggagccataaataatgataagggggtcaaagcagcgcttgatatgatcaccactatccccggtatcggattgctgacagcagcagtgatcctggcagagaccaacgggtttgaactgatccggagcaaaaagcaactgaccagctatgccgggttggatgtcagggaaaaagaatcaggcacttcggtcaaaggcaaacccaaaatatcaaaacgggggaataaacatctgcggaaggctatgcacctgcctgcattgtccgccataagacattctgaaaggtataaggccgtattcgttagggtggtatcccggaacggcataaaaatgaaaggtgcagtagctgtgcaaagaaaactattggaaatggcctacacgatttacaaaaccaataagccttatcaaaaaggctatttacaggaaatggtcgaaaatagttagagcagtcacctcatagaaggactgccctaaacaggctgacataaagccgccttaagtctcaaaaataaaaaaatcaattcaatacttgcatattaacacagaat

SEQ ID NO: 4294 - DNA, 1570 bp, unidentified
  source 1..1570: mol_type = unassigned DNA; note = element_681d42f
  misc_feature 1..2: note = core
  misc_feature 3..250: note = LE
  misc_feature 251..1426: note = CDS
  misc_feature 1427..1570: note = RE
  misc_feature 3..228: note = bridgeRNA
ctcgtattataaagtagtagtgtttatagaccctctccaaggtctgtatgctatactattggagatactgtggattgttatttttctcctaccacttgatggtttagtaaaggctacaaccacagtctctttgtatatttgttaatcagttagataccgcatgacggtttatttagaacgaggttacaattgcaaagagtaccagtggttctataaacagtatcaaaatatttactcaaaggagttttttatgatatacgttggaattgatgttgcaaaggacaaacacgactgctttatcactaattcagatggtgaagtattgttcaaatcttttaccatacctaacaatcgtgatggatttgaaaccttatttcaaaaaatacagtccgtatcagatgatttaactaaaataaaagtagggcttgaagccaccggacactatagttacaatcttctgggattccttctcgataaaggtctgaccacctttgttatcaatccgttacataccaatctttacagaaaaagtctaagccttagaaagacgaaaacggataaagttgattcccgtactattgctactatgatgatgtctgacatgaacttaaagtcctactcagacacatcttatcacaatgaggagctaaagtcattaactcgttatcgttttgataaggtacaggagcgagcaaaactcaaaacttctgtatctaggcttgtttgtatccttttccctgaattagagaaacttgttccatcacttcatatggcatccgtttatgccctattatctgaatttccgtctgctcattctgttgcatccgcacatcttacaagacttacaaatctgctctctgagagttcacgtggcagatatggtaaagataccgcaataacgtttcgtgaatctgccaggaactcaatcggttcaaatatgcccgcaaaatctctggaactaaaacataccattaagctcattcaggaactaacttctgagattgacgaaatagaaaccaaaatcaaatccattatggatgaaatcaactcgccaatccttactatccctggaatcagttatagcatgggagccatgatccttgctgaaatcggagacttcagtcgttttgactcagctgataagatacttgcctacgctggaatgtctccatctacttaccaatcggggcagttagataactgctactcccatatggaaaaacgtggttctcgctatcttcgatatgccctttacaatgcgaccaaatatgtctgccattgggacgaatcctttggagcatacctcgctaagaagcgatcggaaggtaagcattataatgttgctttatcccatgccacaaagaaacttgtaagaaccatttatgcaatggaaaaatcaaggcaaacataccgtattacagcctaatccttttctgtaaatatctcctagttgagtgtctaaagtgacactctatttgtcatgcagttttcaaggtacaaatatatctgaaatgcatttctgcaattcattcaaaaaattcatttttagtctttacttttaatagttagt

SEQ ID NO: 4295 - DNA, 1385 bp, unidentified
  source 1..1385: mol_type = unassigned DNA; note = element_6824804
  misc_feature 1: note = core
  misc_feature 2..70: note = LE
  misc_feature 71..904: note = CDS
  misc_feature 905..1385: note = RE
  misc_feature 1143..1380: note = bridgeRNA
caatggtatggaccccgccgtcaaaatacggtgaccttttgaaggttaattgaagctagggaggaatgtcatggatatcgtccgaattggtttggatttagcgaagagcgtctttgaagtgtgcggcgttgatatgcgagatcacgttgttttgagaaagaccctgcggcgcgatgcggttccgcagttctttgcggaattgccgccttgtctaatcggcatggaagcctgcagtagctcgcattattgggcgaaggtgctcaccgatcttggtcatcaggttcggttgatcgctccgcagtttgtgactccgtacgtgaagtcaaacaaaaatgatcgcaacgacgctgaagcgatctgcgaggcaattagtcggccatcaatgcgctttgtggcgccgaaaccttctgaacagcttgaaatacaagcggtccatcgtatccgccaacgtttggtgtctagccgcacccggcttgttaaccagatacgtggcctgctggcggagcatggcgttgtcattggtcgcgacatctcacgacttcgccgtgcgttatcgcaaatagtagaggggtcggaatgcaatcttggcgatttgatccaggaattggcgtctgacattcatcaggaattagccgctctcgacgaacacattgcttcctacgaccgcaggatccggaacctatttcgaacgaatgagatgtgtcagcgcatcgggaagatcgagggcattggcccgatcacggccacagcgctggtcgctgcagttggagaccagtcctgctttaagaatgggcgccagttcgcggcatggctgggctggttcccaaacaaagatcaagcgggggcaagtcccgattgtttgggatcagcaagcgcggtgaccggtacttgcgcacgcttttgatccacggagccagagccgttcttggaaaggctggcggaaaacaggacgccagaagcgtctggatcaaccgaatgcgtgagcggcggcacccaaatgtggttgcagtggcgcttgcaaacaaaaatgctcgaattgtgtggtccatcttatctaaaaacgaggagtaccgcggacccgaaatgatgcaaacagtctagaaagaactcagaccaaaaccaaaaggggaggacttacccgacagaattgcagcaacttggcaggagatggtgagacgacacgttccgtagcttctcaaacctgatgtgtggatcggcaaggcgaaagccgatgccttggagccaatgaggaagaagcgcgcggaaatccatcggggctcgcggtgacgatatttcgggccgcattcagaagccggatatacgtcagcaaccgtgaaacctatccagctctaactaaggcgttgcaaaaaggcggggtccatata

SEQ ID NO: 4296 - DNA, 1575 bp, unidentified
  source 1..1575: mol_type = unassigned DNA; note = element_6830109
  misc_feature 1..2: note = core
  misc_feature 3..279: note = LE
  misc_feature 280..1455: note = CDS
  misc_feature 1456..1575: note = RE
  misc_feature 46..256: note = bridgeRNA
cacgtataatccaatcatcgatgatggtgattggattttcctttctcccggattatccgggttattttttaaccatctctgatatacttactttggcgctgtggatctgtacctataaaactacagctttgactggtatgaggtgactcagaccacagcttttcgtctattactgttaatcagtttgttaacgctcgacgtttctatttacgtgattacacagccggattctctgtggaagacaacagcgccaatttttccttaaggaggtgtttcaccatgtctctatactttgttggaattgatatttccaagtacaaacatgattgctgtattatctcttcagctgagcagcaggtcgtttcaaagttcaccttcaaaaacaataaagatggcttctctgaacttctaactactctgcattctctctccaatcccaagaacataagaatagggtttgaatctacttctcattatgccctcaatcttgaactctttcttgagaaagcccaccacagctttatggaagttaatccagttctcatttctcagtacaagaagtccactactcttcgcagaacgaagacggaccgtatcgattgtgaatcgattgcctgctggctaatgaccgtagagtacaaaccccatccaaaaggattttatcatgcttattctctaaagtcattaacacgtttacgggacaaacttatacggcagcgttctttctatctcgtgaagatcaccaatgtcctggatcacacttttccggagtttaagccttttttcaatgagcacttcagcaagacagctctgtatctgctagaaaactacggctccgcagaaaagatggcacatatgaatactgcctcttatgagaggctatattctctttctcgtggaaagttctctcctcaacagttccttgaactaaaatctcttgcaaccaataccattggcgtaaacaattccatctttgaaatggagttgaatactcttcttacgctttataaggctacagctgaacagatatgcattcttgagacccaaataaccgaattaatcgaagaaattcaccctcactacatgtcgattccgggaatcgggccaatatcggcagctgtcatctacgctgaatatggagatatctccaacttctcaaagccatcacaaatgttagcatttgcagggctagagcctggcgtaaatgattccggcacagaaagccacggtggaagaatggttaagcgtggatcttcacagcttcgttatgtactgatgaactgtgctttaccattaatccgctttgatgtaacttttgctgcttactatgcaaaaaaacgttcagaaggtaagccacacagagtagccttgtcccatgtcgtcaagaagcttgtcagagtaatttttgcattggagaggcagaacaccgacttcatacctcagtctcttcgctgactaatattgtctctcatccgatgccacctgaaatacaacttcttcagatggcttgtttgctgtgcaattttcacgattcattaaaaatcttcattttttacttgactgtttatagtttgt

SEQ ID NO: 4297 - DNA, 1461 bp, unidentified
  source 1..1461: mol_type = unassigned DNA; note = element_6830bc6
  misc_feature 1..2: note = core
  misc_feature 3..225: note = LE
  misc_feature 226..1440: note = CDS
  misc_feature 1441..1461: note = RE
  misc_feature 7..223: note = bridgeRNA
ctaatggggtccgatcggttcggccttcgggcaggctggtcaccgagccgccagcagggcagcactgtttcggcccgagccttgagctctagttctagatcgtgcccctgctggtcggtgaggaggtcgacagcttgtggggtggcgtgccgttgagcactgatccattaggtcgctgcggaactcctcgaggctcaacaacccatcgagcagaggaggggtccgatgatcttcgttggcgtcgactgggccgaggcccatcacgacgtctgtgtgctcgacgaccagggcgctgtgctgggccgccgccgggtgagcgacggtgtcgccggtgtcgcggagctgcacgcgctgctggctgaacacgccgaggaccccagtgacgtggcggtcgggatcgaactggaccgtggcctgctggtcggggcgctggtcacggtgggctacgaggtctacgcggtgaacccgatggcgtcagcccgctatcgggaacgccacggggtgtcgggtgctaagtcggaccggggcgacgccaaggtgctggccgatctggtccgcaccgaccggcacaaccatcgccgcattgccggtgactctgagctggtggaagcggtgaaggtggtggcccgggcccaccagtcggcgatctggtcccggcaacgtcatctgaacagcctccggtcggcgttgcgggagtactacccggctgcgctgatcgcgttcggcaccgacctggccagcagcgacgccacgtcggtgctcgccatcgccccgacacccgagcagggccgcctgctgtcccggtccaagatcgcgtcggcgttgcgccgcggcggccggcaacgcaacgtcgacgctcgagccgccgagatccaggcggcgttgcggtccgagcagctcgctgctcccggccggctcagcgccgcctacggcgtcgtggcccgctccacggtggccgtgatcgtgtcgcagacccgggagatcgccgcgctggaggaggccctcggcgaggggttcgacgagcacccggacgccaagatcgtccgatccctgccaggactggggacggttctcggcgcccgggtgctgggcgagttcggtgatgaccgaacccgtttcgccaccgccaagtgtcgcaagaacttcgccggcagcgcacccatcaccaaggcgtccggccgatcccacgtcgtgctggcacgccacgcccgaccccgccgcttggccgacgcgctcgaccagtgggccttctgctccctcacccactcacctggggcccgccgctaccacgaccagctcagagcccggaacaagacgcaccgccaagcgctccgccagctcgccaaccgctgggtcggcatcctccacacctgcctcgaacgcaacgagctctaccacgagcacctcgcctggggccaccacctccccgtcgccgcttgaccccttccagccgtggggtgt

SEQ ID NO: 4298 - DNA, 1362 bp, unidentified
  source 1..1362: mol_type = unassigned DNA; note = element_6838d3e
  misc_feature 1..2: note = core
  misc_feature 3..75: note = LE
  misc_feature 76..1101: note = CDS
  misc_feature 1102..1362: note = RE
  misc_feature 1077..1350: note = bridgeRNA
tgatggggtggacgccccccgacggcatcttgtgtgccaaggtggagtgtcgagcttcacctgagggaggcgtccatggagaaggttaccacgatcggcttggacatcgccaagcatgttttccacgcgcacggggcggatccggctgggcatatggtgttcagccgcaagctgagccgggccaagttgatctcgttcttcgccgctcagccgcgctgcgtggtggcgctggaagcgtgcgcaggcgcgcaccactggggccgcgagctccagcggctgggccatgacgtccggctcatcccgccggcttacgtgaagccgtttgtgaagcggcagaagaacgatgcagccgatgccgaggcgatctgcgaggccgcgcagcggcccagcatgcggttcgtagcggtgaagtcggaagaacagcaggcaagcgcgctcgtgttccgggcgcgcgacctggtggtgcgccagcgcacgcagctcgccaacgcatgccgcagccacatggccgagctgggctgggtggcgccgcaaggcttggcgcatatcaaaaggctggccgaactggtcgacgacccggcctccgacgtgcccgatgccgcgcgcccggtcctgcgcatgatgctggacatgctggccgggctggacgggcgcatcgcccaactcgaccgcgagatcgtacgccgggcgcgcgaggacgaggccgcgcgccggctcatgggcgtgccgggcataggacccgtgaccgccaccgcgctgctggcgctggcacctgcgccggaggtgttcaaccgcggccgcgacttcgcggcctggctggggcttgtgcccaggcagaactccagcggcggcaaggaacggctgggcgcgatcacccgcatgggcgagcgcagcttgcggcggttgctcatcctgggcgccagcgcggtggtgcgccacgccagccacaagggcgcgcccgacggctcgtggctggccggcatgctggcgcgcaagccgcgcatgctggtcacggtcgcgctggccaacaaaacagcgcgggtcgtctgggcggtgatgcgcacaggagagagctaccgggctccggcgctggcggcctagtgctgctcagggcctgagacgtcggagggcgtgggcggtcgaaggagggtatggcgcaacagtcggctagacgggaccgggcaagccagggctttccaccgtgctgtccaagcacgccttgggtgatgtggcacccggtccagctcactcccatacgggccagcggccaccgcgccgcaccaacaggccggacagatggcagcacccgaccacgcgccagaacctcacgaaaccgcttgcacccgaaggggcgtccacaga

SEQ ID NO: 4299 - DNA, 1364 bp, unidentified
  source 1..1364: mol_type = unassigned DNA; note = element_683ad47
  misc_feature 1..2: note = core
  misc_feature 3..74: note = LE
  misc_feature 75..1103: note = CDS
  misc_feature 1104..1364: note = RE
  misc_feature 1079..1354: note = bridgeRNA
tgatgatgtaaccgccccccggcggcatctctgtgtcaaggtgggtctgcgacaatctacacagggaggcggtcatgtcggagattaccacgatcgggctcgatctggcgaagaacgtgtttcaggtccacggggctgatagctcgggccgagccctcctgcgcaggaaactacggcggcatcaggtattagctttcttcactacgctcccgccatgcactgtcgctgtggaggcttgtggtagtgctcacttctggggccgtgaacttgcaaaactaggccacgatgtgcggctgatcccacctgcctacgtcaaacccttcgtgaagcggcagaagaacgatgccgccgatgcggaagccatctgcgaagcggctttgcgcccgacgatgcgattcgtaccgctgaagagcgaagagacccaaggagctgcgatgctcttccgcgtgcgcgaacttctgatccggcagcggacacaggggatcaacgccctgcgcggccatctggccgagttcggacagatcgtgccccaaggtgctgccaatgccgcacggctgatcgccattgtcgaggatccagacagtggtctgcccggcccggccaccgccacgctgcaggtgctggtcgtggcgctcgcccatctcgagatagagatcggcaagcttgatgccgagatcgcacggcaagcgaaggagaacgaggtcgctcgacgtctgatgacggtgcccggcatcggcccgttgatcgccacggccctcgcggtcctggctccgccacccgagacgttccgcaaggctcgggactttgcggcttggctcggtctcacaccccggcaacattcgaccggcggcaagcagcggctcggggccacgacgaggatgggcgaacgctccctgaggcggttgctgatcctcggtgccaacagcgtcatcatcaaacgccacgtccatgccgcggcacagccgggcacctggctcggcgggatgctgatgcgcaagccgcggatgctggtacgagtagccctggcgaacaagatggcacggatcgtctgggccctgatgacccgcggcggcgtctaccagtctccggctgcggccgcgtaaaagccaccgtcagtcgtgaggacgtcggagcggaggagagcaaggagcagtatggcgcaacggtcgtgagacgggatcagaggaaccagcctgtaacaaagtgcctccgagcacgtggcgttgatctggggcctgatccgcgaacaccatacgggcccgcggcatgacaatggccgcatcagaggccggacacatgtcagcacccgacaccgcgccaagaccagctccgaagatccctcttgcacatggggcggttacaca

SEQ ID NO: 4300 - DNA, 1171 bp, unidentified
  source 1..1171: mol_type = unassigned DNA; note = element_6850723
  misc_feature 1..2: note = core
  misc_feature 3..208: note = LE
  misc_feature 209..1159: note = CDS
  misc_feature 1160..1171: note = RE
  misc_feature 37..214: note = bridgeRNA
cttgtcttatgacattcgctgccgaacggggcagaaaggaaccgctgggagagggtagccgccctcccgcagcggcgagggtcggatcggtggaattgccgaccgtttgacgggtcgagctagagtcggatcgccctcgtctttcccttgaggcctgaacggatacccggagttcggctccgaacgacaagcacaggacaagcgaaagatgaccaacgataccatcggggtcgacatatcgaaagaccatctcgatgcccacaggctgagcgacggtgcgagccggcgcttcgccaacgacagccgcggccacaaggcgttgatgggctggctgagcccgagccagttggacccgcccagcgtccgcatcgtctacgagccgacaggtccctatcatcgggccttcgagcggggtctggcggcagcgggcctggcgttggtcaaggtcaacccacgccaggcccggcgcttcgccgaggccaccggcaggctcgccaagacggaccggctggacgccgccatgctcgcccgcatgggcgcgctgctcgatctggaggcgcggccgctgcgcggtccgctcctcaacgatctcaaggacctgcagatggcgcgccaggcgctggtgaagaaccggacggcggcgaggaacagggccaaggcgctgacccttcccatcctcaagcgccacaatgccgagcagctcaggcagatcgatcgtcaaatggctgctgtcgaaaaggagatcatggcgctcatccaggccgatccagatctctcccgccgcttcgccatcctcgtctcgattccgggcgtctcggcaatcaccgcctgcgcgcttctcatcgacatgcccgaactcggcacgctcggccaggctcaggccgcttccctcgcaggcctcgctccagtcgcccggcagtctggacaatggaccggccgcgccttcatccgcggcgggcgggccatggtccgacaggcactctacatgcccgccctcgtcgccatgcgcttcaatcccgatctcaaggcaaaatacggcaagttgaaagccgccggcaaaccctcaaaggtggctctcacggcaatcatgcgaaaactcatcattctcgcaaacaccctccttagggaccaacgaaactggaccccaaaccggccttgaccaacatggata

SEQ ID NO: 4301 - DNA, 1544 bp, unidentified
  source 1..1544: mol_type = unassigned DNA; note = element_685929b
  misc_feature 1..2: note = core
  misc_feature 3..261: note = LE
  misc_feature 262..1437: note = CDS
  misc_feature 1438..1544: note = RE
  misc_feature 17..233: note = bridgeRNA
ctcgtataatatacttgtagttaaaactactttttttcttttctatcccctcttctttgtgggataatattagtatagatagaggtcgtagctacccccttgaagtcatatcttccttttaaaggcttacgcctcttctttacgtctttatgcgtattagctggatagcactaagttgctgtatatctaacgaggttgcattgtcgtaaagttttagagggttctttctctatctaaaatatatgaaagctaggtgattttatgttttacataggtattgatattgctaagaaaaaccacgaagcttcaataattgattcttctggaaagagcttatccaaaagtatttcctttcccaattctacaaaagggatagaaaagttcaataattttatttctgaatttggtgtaacaactaataattgcattattggaatggaggcaactggtcactactggataagtttgttctcatacatcattgatctaggatttacgtgttatgttataaatccaattcagtctgatgcttttaggaaaatgtacgttagacaaactaagaatgattcagttgattcatttataattgctcaaataatgcgttttggagagttctctatatctaatttttccgatgaaaatacatttgcccttagaaatttaactagatataggtttgccttagttgatgaatgctcagattggaaaagaaagcttgtagctatacttgaccaagttttccctgagtactcaagtcttttttcaaatatatatggtgttgcctcaaaggagctgttgtcaaaatatcctttaccggaagacatgctgtcaattcctgctgaggagcttggcaacttactttatgagtgtagcaagggtcgtcttggcataaataaagccgaagaaatccaatcccgtgccagggaatcttttggaattaagtttgcaaaaaggtctttttctttccaaatcaagcaaataattagccaaatttcattcctagaagaacaacttaaagaaattgaaattgagattagttgcttgcttgaggatatatgtccagtcattactacaataacaggtattggaagtgttttaggtgcgtccatagtatccgagataggcaatattactaggtttgaaagggcaaatcaacttgttgcctatgccggtttagacacacgcgtaaaacagtctggcgatttttcagctacaaatacaaaactttccaagcgaggttcgccttacttaaggcgttctatttggcttgctgccactgtagcagcctttaaggaccctgccttatccatatactatcaaggattgagagcacgaggcaaagctcatggcacagctataggagctgttgcaaggaaattgaccaatattatatttgctgtcttgagagatcaaaaaccgtatactccaaatatttagttgtcaatattattaatttttcaaacctattcattaggcttatttgctatgcaataatgtcagtgtgaaatttcttttttattttgtattgacatttgatagctggt

SEQ ID NO: 4302 - DNA, 1434 bp, unidentified
  source 1..1434: mol_type = unassigned DNA; note = element_685fb2b
  misc_feature 1..2: note = core
  misc_feature 3..121: note = LE
  misc_feature 122..1156: note = CDS
  misc_feature 1157..1434: note = RE
  misc_feature 1189..1388: note = bridgeRNA
agatgggctaatcggcctagcgttcttgtggatagctgaagattttgggtgctgcgcttcaggctgatggtgaaacgaggtccgttgtcacggcctcaagcatcagaaggagaagcgcagcatggagcattttgccggactggacgtgtcagtcaatgagacgagcatctgcattgtggacgatgcgggcaggatcgttcgcgaaacaaaggtggcgagcgaaccggacgctctgctggcggtactgaaaaacactgcctaccacttcaagcgcattggactggaagccggaccactgtcgcagtggctttacagcgcgctgggtgaagcaaacttgccggtcatctgtgtcgagacacggcacatgcgggctattttgcaggcgcagatcaacaagaccgaccgcaatgacgcccgcggtatcgcgcagatgatgcgggcgggactttatcgcccggtgcatgtgaagacgttacgcagccagaaactgcggatgctgctgacccatcgcaagctgctgcagtcgaaagccatcgccattgagaatgacctgcgcggcaccttgcgcaacttcgggctcaaggtgggcacagttggagcagtcaagttcgaggtgcgcatcaaggagctggtcgagaatcttcccgatctggccacgctggtcgagccgttgctcgttgtccggcgggtgctgcgcgagcagattgcagttctgcaccgccgattgctggcgatcgcccgggacgatgaggtgtgccggcggctgatgacgatccccggtgtcggtccggtggtggcgttgacatatcgcgccaccgtcgatgtgccggcgcgcttccgcaactccagatcggtcggggcggtcttgggcctgacaccttgcaagtatcaatcaggtgagagcgactacaccggcgccatatcaaaatgcggcgacgagatgatgcgggtcatgctctacgaggcggcgcagatcctgctgatgcgcgcaacaaaatggtcctggctcaaggcctgggcgatgcaggtcgccaggcgccgcgggatgaaaaaggcgatcgtcgcattggcgcgccggctggccgtgatcatgcaccgcgtctggactgacggcaccgaattctggtggacccggcaacaggctgccgcagcatgacaacgcaaaaccaaatccgataggaggaaacacgacttccaccgcgtggtggaatgatgtccctcgcgggacgatggatgaggcgagatcgcatgtccgcttggacctgccatcagtctgatggcaaggccgaccgaaagattgttccgcctcgttctcgaaccccatgctggaagggcctagtgccgattccgaagagaagcacgagcccgtgagcgacatcgacaccgaccagtggacagtctgaaagcgcttgaccccaaacggccgattagaga

SEQ ID NO: 4303 - DNA, 1602 bp, unidentified
  source 1..1602: mol_type = unassigned DNA; note = element_6861cb3
  misc_feature 1..4: note = core
  misc_feature 5..425: note = LE
  misc_feature 426..1463: note = CDS
  misc_feature 1464..1602: note = RE
  misc_feature 1..223: note = bridgeRNA
ccccgttaccttgagagtatccccgataatggggatagtcgctggacccggtatggcttaattgccctgtagttcacatgatccgggggtgttgccgccgggactccaggacaaccgttgactgctaatagggacacggacgacccctcaaggttcagttctcttcgtaacgtgggtgccagcatcggatgtcaagacaccagcgacgtagtttcacccgtcactgttgctacgacattcaaggaggccgggacatgaccaccgacatcatcgacgtcaccatcggattggacgtcggaaaaaccgcccaccacgcctgtgcgatgctcgcatcaggcgagatcatctaggataaacccctacctcaagacgaaaccaccctacccaaggtcttcacagatctacaagaacacggcaccgttctgatggtcgttgaccaacccaataccatcggcgccttgccgatcgcggtcgcacgcgatgtcggctgtgtggtgggttacctgccaggattagcgatgcgcaaagccgctgatcttcatccaggtagatccaaaaccgaccggcgggatgccttcattatcgctgataccgcccacaccatgccgcacacgttgcgggccgtggaccgggataacgaggtcctatcagcgttgaaaatgctctcaggctttgatgacgacatcgccaaagacgccaccaggaccatcaatcgactgcgtagcgtgctcacccagatctacccaagctttgaacgagcgctagttggcagcatcattaccaggccactgatcctggacatgctcattcattacggcggtcccaccaagttaaagaaggccgacgactaccaccaggttttaggctggatgagcacacgagcgaagaaagatcccaccaaattggtcgacacgatcttcgacggtttgaaagcccaaaccgtgaccgtgcctggcactgccgctgcggaaatcgtcatcccgcagttggcggccaccatcaaggcactgctggaacaacgcaattcaatcgcagaacaagtcgaggagttactcgaagaattccctcttcatcaggtcttgatgtccatgccaggaatcggcattaagaccgcagctaatatcctcctggctatgggggattgctctgacttccggtccgccgggcacctagctgcctacgcggggatcgccccagtaacccgacgatccggtacgtctatccgtggtgaattcccagccagatcaggcaacaagcgactcaagaacgcgttgttctactcggctttcgcatcgattcggttccatgagccgtcgaagacctactatgaacgaaaacgagctgagggcaagcgccataacgccgcgatcatgtgtctggccaggcggcggtgcaatgtcatctacgcgatgttgacccgagctgaattcttccgggaggttcctgccagggcggctgtctaacccaccgtcagaacgatcagctggtcaacaacgtcccggtcgaccagccaatcacccacgcccaacatcaagatcaacaactacccccgaagtggcttcctgagtacagggcttacctcttgacaaaaacatagggaca

SEQ ID NO: 4304 - DNA, 1408 bp, unidentified
  source 1..1408: mol_type = unassigned DNA; note = element_686b695
  misc_feature 1..3: note = core
  misc_feature 4..84: note = LE
  misc_feature 85..1119: note = CDS
  misc_feature 1120..1408: note = RE
  misc_feature 1146..1380: note = bridgeRNA
agcatgcgtaattgggctgcctttcgcttttaggccgagttcccactaagatcacaggatagctgtgaacaagggagatagatgatggattactttgttggactagatgtatcacttcggtcatgtgcactttgcatcgttgatacgaagggcaatgttattcttgaacgtgagctggcttgcgagattgatgacattgtagagtgcctttctgattgcgcgttcccgattgagcgtgtcggctttgaggcggggacgatgagccagcacctttactttggactggaggctgcaggttttgatgtcgtttgcatggaagcgcgacaagtgaacgcggccctgtcggcgatgagaaacaagaccgataagaatgatgcccggggaatcgcgcatgttctgcgcaccggctggttcagcccggttcatatgaagagccgcgaagcccatggcaatcgcgcgctgctgagtgcgcgaaaggcacttctgaagaaaacgatggaccttgcaaacgaagtccgtggattgttgaaaatcttcggtatccgtctgcccaagactgtgaagcatggcagctttgatgatgtcgtcagaccaatgatcctaatagacgatgttctggcacacgcccttgtgcctctgctcgatgcaagggtgatactctatcagcatttcctcgaactggatcgacgggtcaaccgtgcagcaagccacgatgtggtctgtatgagattgatgactattccaggggttggtcccattacagcactgacgtttaaaagtgccgttgatgatcctacacgattcaagcggtctcgcactgttggggcacattttggacttacgccccgacgataccaatccggggagcgcgataatcctggccgtatatcaaaggctggggatcgagatgtccgcgcggcgctatacgctgccgcaaatgcgctgctcatgcgaacgatggcaggctcacagatcaaatcttggggtatgcggctgatgcgcacaaaagggcgacgccgagcagttgttgcggttgcacgcaagttggctgtcctaatgcaccgcatgtggattgatggtacagaattccgtcaggaacaggtggggggaacggcatgatctaaaacgccacccaccgaatcctaacggggtcgtcctcactggacgaggtttgtgccctctcgggcatgtaaacatgccctgtcaggtaatagatgaagccgaaaatgtctgctgcgcatcttgaagcgcgccggaaagcggggctctccacagccaatccaacacatgcatgcagcgatgccatcacggcatcaaccagactgcggagagaagcgtgacccggatgagagacaatgacccgattaaacaaaggaaaaagagcttgacctaagcactcaattagaga

SEQ ID NO: 4305 - DNA, 1389 bp, unidentified
  source 1..1389: mol_type = unassigned DNA; note = element_6872eb7
  misc_feature 1: note = core
  misc_feature 2..89: note = LE
  misc_feature 90..1124: note = CDS
  misc_feature 1125..1389: note = RE
  misc_feature 1160..1384: note = bridgeRNA
caatgggatggactcctcctcccctaaacggcatccaggtgccagactggaagtgtgatccaccagtcaacgaagaaaaggagtccaccatgaacaagcttaatcgcgtgggtattgatttggcaaagagcgtctttcaattacatggcgctgatcggcatggcaaggcgttgtggaaacggcgtctgtcacggaataaatggcttaaggccttgttggaggtggccgcgcccgactgcgagatcggcatggaggcctgcgggggcgcacatcactgggcccgggtccttcaatcctacggatacacggtcaagctgattccgccccagttcgtcaaaccctatgttaagagcaataaaaatgatgccaaggatgccgaggccatctgtgaggccatgagtcgccccggcatgcgttttgtctcggtcaagacggttgagcagcaggatatacaggcagtacaccgggtccgctcggggttaatgaccgagcgcaccgcactcgcgaaccggattcggggattggtggccgagtacggcctggtggcaccccgggcattgactgccttaaggcgtgcgctgccggattggctggaggacgccgacaacggcttaagtgattgcttccgttcgctgttgcgcgggctctgggaagacctgcaacgattgaatcaacggattggtgaactggataaagagatcattttaattgcgcaaaacaactcagtgacccaacgattgcaacaactgcgtggtgtaggtccgctggtggccacggcattagttgccaccgtcggcacggggcaacaatatggcaagggcaaacaaatggcagcctccatcggactcacgcccaggcaacacagttcaggcaacaaagaccggttattggggatcagcaaacggggggatgcctatctgcggaccctcttgatccacggggcaagggccgtggtctcccaggccaaacaccgggacgatcgtttaagtcgctggtgcaccgatcttgcccggcgaagccaccccaatgtagcggcagtggcactggccaacaagaccgtccgtatggcctgggcgatgatgcaaaatgagtcagattacgatcccgggttctcgtcgccttgatgtaaacccaggatcatcaccccttaaccaacattaacgattgcgaagcaaattgatagatggttaacaggtcgaaccggcgttgatcaaacccgtgaatgtccaggtgcatcaagcacggagaaacgattgggagtcaacgcgcgaatagcccattatggcccggcatcaacgcatgccaactgatcgaggccgaatatacgtgcgcagtcgatcctaaaaaaccaaaagacagtttgcttgcaaatgaggaggagtccatata

SEQ ID NO: 4306 - DNA, 1626 bp, unidentified
  source 1..1626: mol_type = unassigned DNA; note = element_6878015
  misc_feature 1..3: note = core
  misc_feature 4..480: note = LE
  misc_feature 481..1494: note = CDS
  misc_feature 1495..1626: note = RE
  misc_feature 8..233: note = bridgeRNA
gttcgtattataaggttaaccagaatgctaaatatttctggttgaccttatttattttggtcttattatatcagtagccagggtagaacgtaactgcccgtggggctttgaccccgtcaagtaaaccgttcgccccctacttgtagaaacatgattgaggctggttgggacttagatctcgtataacaagcgaagctgtgacactgcatggaggattaggggttactggcaaatcactagattaggaggagatacaatatgaatccagtcgtaggtctggatatatctaaaggagaaagtcaggttcaagcatttctggataagggtagaccttatcgaaagagttttaaagtagatcatactaataaggggcttagttcacttgtaacgtttcttgaggaagttaaaaatgagtcaggaaagaaaccttcggtcatattagaggctacagggcattatcaaacttcagttgtttaatacttggaagaacgaggatatttattaattatcatcaatcctttgatttcatataaggcaagaggttcaagtttaagaaaagtaaaaactgatgccattgatgcctatctcctctgtgagttgttttataaagaggaatttgaaccgtatagaaagcgtggtgttcagctattgaaccttcgtaatcttacaagacaacatgaaaatataactggtgtgatgatacaaacaaaacttcaatttcaggcagtgcttgagcaagtttttcccgagtatattggggtctttggagatttatattctgtggtgtcactcttaactctttcagagtttccctcttcagaagacattttgaaggctagtgaagaaacaatttcagaaaaaatttttcaagtatgtaaaagtcgatcaatcaggtgggcaaaagaaaaagcgattgaacttaaagctgcggcgtcacgtaacccttttgaaaagacagtttatcagagtcatattttaagccttggtatgtatataagtatgattcttcagtataaagagcatctatcaaagttagagtcggagatagatgccctcgctaaggaaattgaagaatataatatcatcaaatctatcccaggtatcggagaaaagatcgctgcaacgatcatttctgaaattggggaaatagatcgatttaatgaccctaaaaagcttgtagcattcgctggagttgatccaagtgtttttgaatctggtaaattttctgccaccaaaaatcgaatcactaaaagaggatctagtagacttagacatgccttgtatatggcagtccgttgtgccattcgtgattgtcgtaaaaagaaaacaactgaagaaatcatcccgcgaaacaaaagaatgcgagagtattacgacaagaaacgtgaagaaggaaagccttttaaagtagctgtaatagcatgtgtaaataagctcttacattggatatttgcccttttaaagaacaaaactactttccaagatatagcttagaacctaaatctaactagataacgtaaaaccttccaaaaataaactacaggaaggttatttggcatgcacatttttagtataacatgagatattttaagtttttaatgaaaaatattgacaaactattagctg

SEQ ID NO: 4307 - DNA, 1641 bp, unidentified
  source 1..1641: mol_type = unassigned DNA; note = element_687facf
  misc_feature 1: note = core
  misc_feature 2..307: note = LE
  misc_feature 308..1546: note = CDS
  misc_feature 1547..1641: note = RE
tgaccattcctttccgctgcgctccaaggcaccaaaggggatgaaactgaggtagccctgacgcagcaagtggtaatttgttagaatatgcttgaggaaacaggcacactacagagcacgtgaaggagagtaggcccagcagtatgccggactgaataagtatgtgtgccggacgctctttcaagcaccaataaatagggcaaagaaccctgtaaccttatctttggagagacggactacttcaatctttcagtgagtgtccagtccctgcctgtttctctcaaatatcattttcaggggatgtgttatgctcaaaattgtttacccgatctgctgcgggatggatgttcacaaatcctttgtagtggcttgtattgccacaacgaatgatcacggcgttactacttacaagagcaagcgtttttccacattcaccaacgatctgcggcggtgcgctgcttggctggcagaaaatcattgcagggatgtgtgtatggaatccacagggaaatattggatccccatttacaacattctggaggcttcctgtaccattgttctggcccaccctaagtatgtcaaagcaattcgtgggaagaaaacggacaagaaagatgccaagtggatcgccgacatcttcaaacacgatttggtatccggcagttttatccctcctgctgatattcggcagctcagggacctggtgcgctatcactggaaattgacaaattacaccacaggggaaaagaaccgcgcccaaaactgcctgaccgtttccaatattaagctggatgatgtgttttctgatgtctttggcaaagctgcttctgctattacgacccagttgctggaaagcaacgaaccttttgatgtgaccccgtatcttaccaaaggcatcaaggccccggtagagaaaatccaggccgctgtggacggggagatgtgtgctgaacaggctgaaaaactccgcatcatccgcactcacatggatactctggaattgtgcaaactgaatcttcattcgctgatcctgactatcgctgaaaagtaccttcctcaactcaacattgttacaacggctccgggcatccaagccttttccgccatcggcattatctctgaaattggcgtggatatgtccgtgttcccctcctcaaagcatctttgctcctgggctgggcttacgccacagaacaacgagagcgccggaaagaaaaagaccaccagaatcagccgcgccggagcctatatcaagcccctgctcgttcagtgtgctttgtgcgccatccgggccaagcagtttcctgaagtccgccgccgttacctcgccttgaaaaagcggcggggtcacaagaaagcgattattgccatcgccagaatgcttttgaccgccgtttacaatatgctcaagaaaaatgagccttacaatcctgaactctactgcaaagatgatcgtcctcctgctcaccgtgaggtttctgtggaagaagctgtctacattttgcagcgccagggatatttggtgactgctccgtcttcaccctaattcctcgaacatattttctttttcgcccgcttttgggggggcttgggtttgtatacccttttcggaatggtgcttaaatcacaatgtttcaacct

SEQ ID NO: 4308 - DNA, 1456 bp, unidentified
  source 1..1456: mol_type = unassigned DNA; note = element_68877e4
  misc_feature 1: note = core
  misc_feature 2..78: note = LE
  misc_feature 79..1143: note = CDS
  misc_feature 1144..1456: note = RE
  misc_feature 1222..1446: note = bridgeRNA
taatgggatggtccggccgtgctcctgccccgccagcgatagaagctggccaggggcgccaaagacaaggagcacgccatgtccgagaccgctcataccgcagtcgccgtagtcggcattgatatcggcaagaactcattccacgtcgtagggcacgatgaacgtggcgcgatcgtgctgcatcagaagtggtcgcgtggtcaggtcgaggcacgccttgccaccatgccgccgtgcctgatcggcatggaggcctgtgtcggcgcacatcatctcagtcggaagctgaaggcgcttggccacgatgccaggctgatgccggcgaagtatgtgcggccctattcgaaaggtcagaagaacgacttccgcgatgcagaggcaatcgccgaggccgtgcagcggccaacgatgaagttcgttgccaccaagacgggcgatcagctcgacctgcaggcattgcaccgggtgcgggagcgactggtcagccagcgcaccggcattatcaatcagattcgcggcttcctgctggaacgtggcgtcgcggtgcgacagggacaacgcttcttgcgcgcggagctgtcacgcgtcctggccacgccgcccgatgtgctgtcaccccgcatggtgcaggtgattgaggacttggccagtgactggcgccggcttgatgagcgcatcgagggtttatcgagcgagatcaaagccattgcgtgccaggactcaggctgcgagcggctgatgagcgttcccggcatcggcccgatcatctccagcgcaatggtcgccgccatcggcgccggcgatggcttctccaaaggccgcgacttcgccgcttggctcggccttgtcccgagacagatgtcgacgggcgaccgcaccatcctcggcaggatatcgaaacgcggcaatcgctacctgcgtgtcctgttcgtgcaggcagcctgggtcgtgctgatcaagccgaacatctgggagcgccacggtctcaagccctggatcgaggcggccaagaaacggctgcaccacaacgtgttggcgatcgcgcttgccaacaaactcgcacgcatcgcctggagcgttctggctcgtggccgtgccttcgaggctcggacaatcaatgaggcagctgctcagtcttcttgagccctcattctgcaccaacgatcttagcgccgcgtgacaggaggagcccgcgatgacgtagccagatcaatacgcctttcctgccgaggtctgcgagaggatgagacgagatggaggttcggtcttcccggcgcatgcgaacactggtgacccgactggcccggtagaggcctgtccgacaatgagatcgcacgcgcgctgatatccatgatggccaggagcacgctccaatcaaaggccggatacattgatgcaagaccgctcaccgccagctcgacgaaatcttcttgctacgcacggccggaccatacat

SEQ ID NO: 4309 - DNA, 1362 bp, unidentified
  source 1..1362: mol_type = unassigned DNA; note = element_6889079
  misc_feature 1..2: note = core
  misc_feature 3..74: note = LE
  misc_feature 75..1100: note = CDS
  misc_feature 1101..1362: note = RE
  misc_feature 1129..1358: note = bridgeRNA
ttaatgagatggtcacctcgcaccctgcaaacggtaacgtttgcagggtgtttttctttcaaggagaggccatcatgcaagacgtcacactggttggaatcgatttaggcaagcattcctttcacctgcatgggcaggatcggaagggaaaagcggttttccgaaagaaggccagccgcaagcagctgattgagtttttcgccaatttccaagcctgcacggtggtcatggaagcctgtgccggcgcgcatcacatggcgcgcaaactcgcgtcgttcgggcaccgggtgaggcttatttcacctcaattcgtgcggcccttcgtcaagagcaacaaaaacgacttcgtcgacgccgaagccatgtgcgaggcggcttcccgtcccgccatgcgctttgtaacccccaagaccgaatcccagcaaaccctgtcggccctgcatcgagtccgcgaatcgctgatccgcgatcggaccaaggtcatcaatcagatccatggcttcctgctggagttcggcatcagcctgccgatcggcaatgccgtcatcaagcggcttcccactgtactggccgagcattcccttccaccccggctggtggccgtcctagagcgcctgcacggccatttcaagcacctggatgcccagatcggggagatcgaccgggagctggtacggcagttatccgaggacgacgtgggacagcgcctgctgaccatccccggcgtcggcccaatcaccgccagcgtgctcgccgccgaaatgggcgatggcaagcaattcggctgcagccgcgacttcgccgcctccatcgggctggtcccccggcaatacggcaccggcggaaaagccaacctgctgggcatcagcaagcgtggcgacaagaatatccggcgcctgctggtgcagtgtgcccgcgcctacatgatgcgactggatcggcagaccggccgtctggccgattgggtccgcggcatgctgacccggcgacactccaacgtcgtggcctgtgccctggccaacaagctcgccaggaccgcctgggcgctcgctgcccatcacgccaccttcaatcctggaccggccaggctacccgcctgaccggtcggttcggctgtccgctttaccccgtttcacccatctggttttgcgacgctgaaatttgatgacgtaaacggctcaccggcctgacgaataacctggcaaagaaatcggctctcgaagccgaggggttttttaggatcgtcaggcgcgactctcatcgtggcgcggggaacaatccccacctagacgccggatagatttaagcaagccaaccacaccatcaaaaagcagtgttgcaaaaagggaggtgaccatagat

SEQ ID NO: 4310 - DNA, 1588 bp, unidentified
  source 1..1588: mol_type = unassigned DNA; note = element_688d203
  misc_feature 1..3: note = core
  misc_feature 4..262: note = LE
  misc_feature 263..1468: note = CDS
  misc_feature 1469..1588: note = RE
  misc_feature 19..230: note = bridgeRNA
tttggtactataaaagtgtaataagtaaatcctaacaagattgaacattacactattttatattatgattgaagtgattggttaacgagggcacgaatgagataaagttctcgggaacaaaacagttaaccaaccttcacataatgtattcgattaagcaagttgagtctgaaataatactcgtgtaacgaaccaaaatgagagtatgtggatgcgttggaaccagtcataatatatgaataaagaggaaggaaaatgtaaaatgaagtatggtgtagaaatcgatatttcaaaagggaaaagtacagtttctataatatcacaagcaggtgaagttatggaattaccttttgaaattaatcacgattcaaatggattaaaaatattaaaagatacaattgacaaatatcctaaagaagatattaaaattgtcatggaggaaacaggaacatatcatttaccagttctaaatttcttattagatgaaggttattttgtttgtgccgataatgcatttaaaattaagaaatatttagatcgtgatttaagaaaagtaaaaaatgataataaagattcattaaaaattgctgagtattgttgtgataattggtatagaattaaaaaatatgaaaattctagtcaaacttataaggatttaaagtttttatctagacagtataccgcacaaatgtcagtccaaacaaaagaaaaagttcaattatcgaatctatgtgatttattatttccaggatattattcattattaaatgaaaataattttatattaggaatcacagtttttaaaaaatattatcatccaactttagtgattaagaaaaataaagaatcatttataaaagatgttgataaaattgcaaaaaaactaggacatagaagtgctggtattactatagctaacaaaatttacgaactagccaaaaatacagtatctccacatcctagtaatgaatattcacaactatccgttgattgttgtgttgacttattaattttaacaattaatacgactaataaaattatatcaaaaatggatgaacttgcaagtactttaccagaatatgatacagtaaaatcaatggaaggttgtggaaataagctaacatcaagaattattgcagaaatcggtgatattagaagatttaagaatgccggttccattattgcttatggtggtttagatgctcctccctatcagtcaggtcaatttgaagcgactattagacatatatctaaacgtggcaataaatatttaagaaaaacaggatatgaaattgtaaaatgtatcaaaagtaataaaaaaactggtgaagaaatctatgaatatatcatccaaaaagaagttgaaggaaaagcaaaaaaagtggcaaaaattgcaggattaaataagtttttaagaatatattatggattagtaaaaaagaaatataaagaactacaaatttggtaattttttatattttcaacacttttaaaatagatctagcaataggtctgcgttagcatgccctaacatattattagattttttataaatttttttaaataaccattgacttttgttagcaag

SEQ ID NO: 4311 - DNA, 1422 bp, unidentified
  source 1..1422: mol_type = unassigned DNA; note = element_68944b8
  misc_feature 1: note = core
  misc_feature 2..90: note = LE
  misc_feature 91..1134: note = CDS
  misc_feature 1135..1422: note = RE
  misc_feature 1187..1414: note = bridgeRNA
taatggcatggacgcccctgctcagcacggcatcagttgtgccaaagtggaggtgttacgcaaccactcaaaccagcaggagcgtccaggatgaacattacgacgattgggcttgatctggcaaaaaacgtgtttcaggtccacggcgtcaaccagcagggtaaggccgtgctccgcaagacattgaagcgcgcggacgtgatgacgtttttcgcaaagttgttgccatgcctgattgggatggaggcctgcggaagcgcgcattactgggcgcgcaagctcgccgagctcggccacacggtgaaactgatggccccacagtttgttaagccgtacgtgaagacgaacaagagcgacgcgcgcgatgcggaggggatctgtgaagctgtcggtcggccgagcatgcgttttgtgccagtaaagaatgttgagcaacaagcgatgctgagcctgcatcgggcgcgacaaggctttgtcgtagagcgtacggcacaggccaatcagatccgtggattgctgagcgagtttggcatcgtgattcccaagggaaaccgatacctcgaacagcggttgcctgaaattctcgcggatgcgcagaacggtttggcagatatgacccgcgatctgttcaatcgactgttcaaccactttcgcgagttggatcggcaagtgaaagaattggaagagcagatcaaggcctggcatcgcgtgaatgcagatagccaacggctgcaaagcatcccgggaattgggccgctcaccgccaccgccttgattgcctcgatcggtaacgcgagtgcgttcgagaatgcgcggcaattggcggcgtggctgggcttagtacctcgtcaagactcctcgggtggcaaggagcgcttgctgggaatcagtaagcgcggagacgtatatctgcgaaccctactcattcacggcgcgcgctcagtgctgctgcgcgtgaagagtcgcaccgatcagtccgagggatggcttgcgcagctcgtgaagcggcgcaaccccaatatcgccgcggtcgcactggcgaacaagaacgcacgtatcgcctgggcattgctggcgcatggccgggagtatcagcctggatatgtctccacacgtgcccaggcagcggcctgatagcgctcaccctcgcggcagcgagcaacccattttaaccacagcactctctccacagattgcataggcgtttttgagcgtgatggcatcacaggtcagaccggggtcgatcaagccttcccatcgcactggacttcaacagtccgcagatgtgatcaggcatcgaccagcgaattccatcagggcccgcggcttcgcgccgcaaacggaggccggatgtatggctgcaatctcctcctgtgatccggaatgcaaagaaaacgcttggcaaaggggggcgtccatgta

SEQ ID NO: 4312 - DNA, 1396 bp, unidentified
  source 1..1396: mol_type = unassigned DNA; note = element_689eb57
  misc_feature 1: note = core
  misc_feature 2..94: note = LE
  misc_feature 95..1123: note = CDS
  misc_feature 1124..1396: note = RE
  misc_feature 1166..1388: note = bridgeRNA
caatgggatggacgcccccaccccgtaacggtatcgatgtgccagagtgggagctgttgggcaaccacttgaaccgaaggtaggagcgtccgtcatgaagattacgacagtcggcctcgatttggcgaagaacgtcttccaggtgcatggcattgacgaccacggaaaggtcctgctgaagaagcagctgcggcggcatcaggtgtcagggttcttcgtgaacctgccgccgtgcctgatcgggatggaggcgtgcggcagcgcgcaccactgggcccgcaagctgcagggactgggccacaccgtgcggctcatctcccctcagttcgtcaagccgtacgtgaagacgaacaagaacgacgcggccgatgccgaggcaatctgcgaagcggtcgggcggccgaacatgcgcttcgtgccgatcaagagcgttgagcaacagggcgcgctggcattgcaccgcgtgcgccagggcttcgtgaaggcgcgtacggcgcaggcgaaccagattcgcggcctgcttgcggagttcggcgtgatcatcccgcagggtatcgcgcagctcttcaggaagctgtccgaggtgctcgaggatgcgacgaacgagttgccggactcggtgcgcgcgctgatccagcgcctactcgagcatctgaaggagctcgaccgtcaggccaaggagatcgaggcacagatcgcggcatggcacggccagaacgagctgagccggaaacttgcagagatcccgggcattggcctgctcggtgcgagtgcgctggcggcaacggtgggcaatgcgaagagcttctcaagtgggcggcagctggccgcttggctcgggttggttcctcgccagagctcaagtggcggcaagaacgtgttgctgggcatgagcaagcgcggcgatgcgtatctgcgcacgctgctgatacacggggcgcgagcagtcatataccgagcgcggcagaatccgcagggtagcggctggctgcacaagctgatcgggcggcgcaacgcgaatgtcgccgccgtggcgctggccaacaagaacgcgcgcattgcgtgggcgctgctggccagagatcgacagtatcgagctgactacgctgccgcgtcggtctgatgtgaccgaaccacactggagcaggcgaagcgaattccaaccacagattgctcaggcagttatgtagtgatggcaagacaggtcagaccgcggtcggcaaagcccgttgttaccgaagcactccgagtgcgcgtaagcgatcgaggtgccggccggcagaacccatcagggacagtgagcagcgctcacagcaaaagtccggatgtacgggtgcaatcttcacctcctggtcatcagaacgtgagtgcttggcaatgtgggggcgtccatgta

SEQ ID NO: 4313 - DNA, 1429 bp, unidentified
  source 1..1429: mol_type = unassigned DNA; note = element_68ae771
  misc_feature 1: note = core
  misc_feature 2..349: note = LE
  misc_feature 350..1243: note = CDS
  misc_feature 1244..1429: note = RE
  misc_feature 15..233: note = bridgeRNA
ctgattgagactgttggcagacgctgccgctgattcgtagcgttcagaggaccctggtggggtcactcccgaagtgcctgccggcggctgttgccgtctggttttctaacgaagagcccccaccaggtccttgccgtccagtggctcgaaagaggaacgtgcaccgcgatctgaatcaggagtgccctggcggttcctaaccgacgaaccaggaggtactcatgaacgccatcatcgggatcgacccacataaggcaacccacacggcagtggccatcgggtgtgacgaggccgagctggccaccgtgacgatccgagccacaaggcaacagacagacaggttggtcaaatgggccgagccgttcacgaagcgcacctgggccatcgagtccgccgggggctcggttatctgctggcccagcagctcgtcgatgccggtgagcaggtgctcgacgtgcctgcgaccctggcctcgagagtacgggtgctcgggacagggaagtcggacaagaacgatcccaacgatgcccggtcggtggctgtcgccgccctgcgctccccggggctccggtcggtccaggcggccaatcatgccgacgtgctgcgcctcctcgccaggcgcaacgaggacatcggaaacctacgcaccaagctggtctgtcgcctgcacgcgcagatcgcctcgctgtctgccggcggaattgccaaggaactcaacgcttccgacgccgacgggctgctcgaagtattcgagccgtcctccccggccgaagccacccggcaccagttggccctggagctgctggaggacgtgcgtcgtctcgatgcccagttgaaggagtcccacaagcggatcagggtggcggtccgcgcatcggggacctcgctcaccgatgtctacgggatcggcccggtgctggcctgtgcgctcatcggctacaccggcgatgtctcccgcttcacgagccgggaccagttcgccgcctacaacggcaccgcaccggtcgaggtgtcctctggaggccgggtcacccaccgactctctcggagaggcaaccggaagctcaaccacgccgtccacatggtggccatctgccagatccgccagaccaactcggaaggtcggctctacttcgagaagaaagtggctgagggaaagaccaagagggacgctattcgctcgttgaagcgccagatctccaacaccgtctatcggcacctcgtcctcgacgcccagcgctaaggggcccgggaggacaagcgggaacgactcgtggcctgtgtgaccggctctgcaccctgacgaccggctcttcggcgaagtcactcccggacccagcaaaaccttaggcacttgcgcccctcgatggcggactgactcgtcgcgcccgaaagctcttgaaattgaccccttgactcaaagaggatt

SEQ ID NO: 4314 - DNA, 1386 bp, unidentified
  source 1..1386: mol_type = unassigned DNA; note = element_68b17e9
  misc_feature 1..2: note = core
  misc_feature 3..86: note = LE
  misc_feature 87..1118: note = CDS
  misc_feature 1119..1386: note = RE
  misc_feature 1089..1373: note = bridgeRNA
agatggggtggttgccgccctccctgacggcatcgcgatgtgccaagatagtggtgcttcaaccacgagcagagaggacggcaaccatgaatataaatacaatgattggtgtagatctggcaaagtctgttttccaggttcacggggcgtcgatgaacggcgagatccggtttcaacacaagctgtcgcggaaggcttttggaacgttcatggccaaacagcctacctccatcgttataatggaggcctgcggtagcgctcattactgggcccgtgtgctcactggacttggtcacgaggtgaggctgatcgcgcccagctacgtccgtccatttgtgaagcggcaaaagaacgacgctgcggatgccgaagcgatcgtgatcgccgcccagcgacccgagatgcgctttgttgaacggaaaagcgaggagcagcagagcgcggcgatcctgtatcgatcacgccagcgcattgtgcgtcagcggacccaggcggtgaacgcattgcgggcagcattgtatgagttcgggcacattatcccgcaaggcgtccatcatattccgcgcatccgtgggattttggagatgccggacagcgatctgcccgctttgatgcgcgaggagtgcttggcaatgcttgagcaaatcgccgtactcagtggctggattgacacgaagacagcgaagatcaaggaacttgcgtctactacgccggtatcgaagcgattgcagactatgcccggcatcggcccgcttgttgcgatggctgtggaagcctttgcacctgacatgtcgagctttcgcagtggtcgcgactttgcagcttggcttggattggtgccgagacagttttcatcaggcggcaaggaacggctcgggcggatcagcaaagccggtcaggctgacatccggcagatgctgatcattggcgctatgtcacgcttgaactggatgggacgcaagtcgatcccggaaaactcttggctggcacgtatgatgagccgcaaaccgcgaatgctggtcgcgatcgccttggcaaacaagatggcgcgccagatctgggccatgctgacgaagaacgaagatttcagagatccggtactggtcatggctgcctgataggaggctgcctgagacaggctggatgaaagggagtgtgagaaggcgacgacccgaatgggcaaatgatcgaatagatctggatcaggaaaaccagttcaggactctgagcactcagctcggtaatgagttttggacctgatccgcggatcaccataccggccagcggcctctgaaagcgccgcagtaaaggcctgacagaagaccgcactcgatcaccagctcaaaaggtcacaaaccctcttgcattacaggcggcaaccacaga

SEQ ID NO: 4315 - DNA, 1587 bp, unidentified
  source 1..1587: mol_type = unassigned DNA; note = element_68b1d9a
  misc_feature 1..4: note = core
  misc_feature 5..313: note = LE
  misc_feature 314..1477: note = CDS
  misc_feature 1478..1587: note = RE
tcacgtataatcaatcttatagaaatattaattaatttcttattgattgatccctttctatttatattttcttattatatgtttagatatataataagaatcgcactgtggatttgtttctatatctttacagccactttgtggactggttctaggtgactcaaaccacagatttttaattgaattgttaattagttagttaacacgttagttttttactaatcgatgttttattaaattacgtgattacatgattagaaatcctgtggcaaacttttcagtgcataaaaactaattaaggaggtgcttattcatgatatattatgttggtattgatatatcaaagtacaaacacgatttctgtattatctcaaatacaggtgaagtaattgttgaaaatggttcgtttgaaaacaacaaaaaaggatttcaatttttattggaccaattgaaaccctataataaatccaatgtccatattgcttgtgaagcaactggtcattactctttgaatttggaactgtttttatccagtcatggttattcatttatgaaaatgaatccacttatcgtacaccagtttttaaaagctcgtagcttaagaagaactaagacagataaagctgatagtattactattgcgaattatcttatgtcagttccatataaaccaaattcagatttattatatcacatttatactttaaaatcactttgtagatctagagaacaattaataaaagaaaaaagcaagtttcaagtcctattaaccaacgaattagataaagcttttcctgagttaaaaactttctttaataataaaatttcggagactttactttatattttaaataaatataaaaacccaaaacacatatcaatcatgaaagattatgattctttaagaaaaatttctcatggtaagtttacttattctaaatttgttaaattgaaaactcttgccaagaatactgttggtcattatgatgacaatactgatttactaatttctagctatgtttctcttatctacatgtttaataataaaattgatccaatagataaacgaatttcaacaattatcaaagaacttaatcctagaatgttatccattcctgggatgggtgaaatatctgctgctacgattttatctgaatatggagatattaataatttttcttctccaagtaaaatgctagcttttgctggtttagaaccaagtattatccaatcaggaacattacatacgaatggcaaaatggtaaaacatggctctggacatcttcgatattccatcatgaatatttcaatgtctattttaagatattcacctacattttatgactattacctcaagaaacgttccgaaggtaaatgtcatagagttgctttatctcatgtttctaaaaaactaatcagagtaatttactctcttgagaaaaacaacactaattttaatccgtctttattgaaataattaatttaatattaatttttcaaaaatttcactatgtgaaatctttttggcatgggattttttccattttataacaaactattaaaatactattgacttttaatagttag

SEQ ID NO: 4316 - DNA, 1387 bp, unidentified
  source 1..1387: mol_type = unassigned DNA; note = element_68b3673
  misc_feature 1..2: note = core
  misc_feature 3..88: note = LE
  misc_feature 89..1117: note = CDS
  misc_feature 1118..1387: note = RE
  misc_feature 1088..1374: note = bridgeRNA
agatggagtggttgccgccctccccagacggcatcgcaatgtgccaaagtcgtggtgctcaacgccacgcaaacaggaggacggcgagatgaaggatatgatgatcggggtcgatctggcaaagaatgttttccaggtccatggcgcgctgcggacaggagacgtccagtttcgtaaaaagctcacgcgaaagcagttcccggtgttcatggcccgccaggagccctgcctggtcctttttgaggcttgcggcagcgcgcaccactgggcgcgcgagatggaggcgttcgggcacgaggtgaagctgatcgcaccacaatacgtgcgccccttcgtcaaacgccaaaagaacgatgccgctgacgccgaggcgatcgtcatcgcgggccgccagcccgagatgcgctttgtggcgccaaagacggttgagcagcagtctcgcgcggccgtcttccgtggccgggagcgcctgatccatcagcgcaccgcggatgtgaacgccttgcgggcgctcctgcatgagcatggtcacgtgtttcccatcggaatacgccacctcgatcgcatcacggcgctcgtggaggatgagacctccgacttgcctgcgctgatccgggaggagtgccaggacctgctggcgcagattggcgagaaaaaggcgcgtattgccgagcgcaccacgaaactgaagacgctggccacccggtcggacagggtgcgccggctccagaccatgccgggtgtcggaccgctgacggcagttgctgtggaagcgttcggacctgacatggcgcagttcgaaaccgggcgcgacttcgcggcttggttgggccttgtgcccaggcaacattcttccggaggcaaggagcgtctggggcgcatgaccaaggccggccaggtcgatatccgacgcctcctgatcatcggtgcaatgtcgcgattgggctggcttgggcagcgcacaataccggagggcagctggctggcacgcatgttggcgcgcaagcccaggatgctggtcgcgatcgcgctggccaacaagatggcgcggcagatctgggcgatgctgacgaaggacgaggattacagggatccggcgctggcaggcgcggcatgatgctcatgtcaaaccgccagtgacggtgccagggggtgtgagaagacgatgacctgaatgggcaaaatgatcgaacagatccggattgggaaaaccagcaggctgctgcgagcctgagagctcgttcttcagatttggacccgatccgctgatcaccatcccggcccgcggcttctggaaatgccgcatactgaggcctgacagaagttcgcactcgatcacatgctcgaacggtcagaaatttcttgcactacgggcggcaaccacaga

SEQ ID NO: 4317 - DNA, 1241 bp, unidentified
  source 1..1241: mol_type = unassigned DNA; note = element_68b3a4c
  misc_feature 1..3: note = core
  misc_feature 4..204: note = LE
  misc_feature 205..1227: note = CDS
  misc_feature 1228..1241: note = RE
  misc_feature 4..174: note = bridgeRNA
ctccgtaagttgttaggcggcccgggagggccggatgtggctgatggtggcttgcctctggtggctcccaaggagtggccgtccggctctccggggcgccctgaccgctgattgagatctgcgtcctggtcgctgtttacggagctgacggcggggtgttcctcgggccaaggagagtgctggtttcggcgtggggagcgtgggatgacagagcggcgggctcggatctgggtggggatcgacgcgggcaagggccaccactgggcggcggcggtcgacgagtcggggttccaggtctggtcgaagaagattgacaacgacgaggccgcgatcctggaagcggtcgccgaagcgctggccatggcgggtgcggtggactgggcgatcgacctgtccggcaccgcgtccgcgctgctgctggccctgctcgcgtcgcacgggcagaagccggtctacgttcccggccgcaccgtcaaccggatgtccggcgcctaccgaggcgaggcgaagacggatgcccgcgacgcgttcgtgatcgcggagacctcgcgcctgcgcagggacttcgcggccgtggacgtccccgcccagctggtggccgatctggcgctgctggtcgcgcaccgcactgacctggtcgccgaccgggtccgcatggtcaaccggctccgtgacgtgctgaccgggatcttcccggccctggagcgggccttcgactggtccggcagcaagggcgcgctgaccctgctgacctaccggcagaccccggccgggatacgccgggtgggccgcgcccgtctggagtcttggctgcgcaagcgtggtgtccgctcggccgacaaggtcgccgccaccgcgctggaggcggccggggcccagcacactgtcgtcgctgcgggcgacctgtcggcctacgcggatgccggccggctggcctccgcggccggcctggttccggtgccccgcgactcgggccgacgcaccggcaacctgcaccggcccaagcgttacagccgtcgcctgcgcagggtgttttacatgtccgcgcagaccagcatgatcaaggacggcccgaaccggggcttctacctcaagaagcgtgccgagggctgcggccacgtccaggctctcatcgcccttgcccggcgccgggtgaacgtcctgtgggcgctgttgcgcgacggacgggagttcacccccgcacagccggtcgcgcaggcggcttgactcggtcattgaaa

SEQ ID NO: 4318 - DNA, 1570 bp, unidentified
  source 1..1570: mol_type = unassigned DNA; note = element_68c02ff
  misc_feature 1..3: note = core
  misc_feature 4..257: note = LE
  misc_feature 258..1466: note = CDS
  misc_feature 1467..1570: note = RE
  misc_feature 18..236: note = bridgeRNA
tttggtaccatataagtgtaattagtaaatccattgatcaggattgaaaattacactctttttgttattatggaagtgattggataacgttcgccactttgaggttttccctcgctcatgaaagtgttatccaaccttctcataatacattcgattaagcaagttgaaatacaattatgtactttcgtgtaaataaccaagatgaaaatatgtgaaagagttggtcccaatcaaataattaattaggaggtaaaattatgttttattcaattggtattgatgtttcaatggggaaaagtacaatttctattatttctaccgacggtgaagtaattagtgaaccatttgaaattgaacatacaaaatcaggttttaatttaattttagaaaaaattaaaaatattccaaaagacaatgtaaaatttgttatggaatccacaggtaattattgtaagtctatacttaaaataattatagacaatggttattttgttactgtagaaaatccattaacaattaaaaagtattgtgatattaacattagaaaagtaaaaacagataagaaagatgccttaaaaattgcttgttatggtagtgaaagatggcataagttaatagaatatacaccgtctgatgaaatatattctgaactaagatttttatcaagacaatatgatgagcagatgacattgaaagtaatgaagaaaattcatttaagtggattaattgaagttacttttccaggtttaaaaaaaatatttaatggcgatagtgtttatatgttaatgttggatgtttataaaaaatattatcatccaagtttagttttatctaaatcaaaatcttcttttataaaagatgttgaaaaaatttcaaaaaaaacaggacatagagttggaacaagagttgcagaagaaatgtattctctagcaagtgagtgtattccatctagtccttgtaatgaatcaacgcaacttgccgtatcaaattgcgtgttacttcttcaaaatttagaagagataaccaataacattatagcaaaaatggataaacttgcaaggaatttacctgaatttgaaatagtaagtaatatgagtggtgttggaaacaaaattagatcaagacttatagctgaaattggtgatgtgagaagatttaaaaactctaattgcttaattgcttatgcaggcatagatgttccaccatttcagtctggacaatttatagctactaatagaagaataactaaacgtggaaataagcatttaagaaaagtgggttatgaagtaatgaagtcactaaaaacagttaaacctacaaaagataatgccgtatatttatttattttaaaaaaagaaaatgaaggaaaaggatctattactgcaaaaatcgctggattaaataaatttttaagaatatattacgcacgagtaatggaagtatataaaaatctagaaaacacataattatttaataatagttttgggggtaagggggaattctgcccttttttacatattttaaataaatttaatttttttgtaaaaaacaattgatttatgttagcaag

SEQ ID NO: 4319 - DNA, 1238 bp, unidentified
  source 1..1238: mol_type = unassigned DNA; note = element_68c6fa4
  misc_feature 1..2: note = core
  misc_feature 3..260: note = LE
  misc_feature 261..1220: note = CDS
  misc_feature 1221..1238: note = RE
  misc_feature 6..212: note = bridgeRNA
cttatatctcgattttacccaattagggataaaatccccggctgatcaccgggcgggaagcggagaagccgggcgtaccctgaggcttcgagcctgctgcgtagatttcgctctccgtttccctcatccgcctcataagttcgtacggtatgcgtaggcccccgtttcgccgggagagcctgtatgatctaaggctgaaccaggcgtatgccttaaaattgatcttattgattttatatagttttttggagtgtttaaagatgtcccaagtgacggttggtgtggatattgccaagcataaattcgatgttgcccgcctggagaacggcaaatacaagcataaaaaattcgacaacacgccggaaggttttgccgctttgatcgtctggctgacgacgttcggcggcgtcaagccctcggtttgcatggaagcgactggcgcctacagcatccctctggccgaatgcctggcccaatcaggctatccggtggctgtcgtcaatcctgccagaattaagggattcgccaagagcgaattgagccgaatcaagaccgacaaggctgacgccaagctgatcgcccggtatgcccaggaaaagaaaccgcctttgtggacgccgccacctgccaatatccgcgaactgcaagccttattacgccggatcgaagacctgctggaaatgcagcaaatggagaaaaacagactggatacggctgaccccacgattgccgaatccatcagagccgtcttggcacatctggagcaggcgcttaaaaccacacgcgaacgcgttcaacgtcttatcgatcaagaccctgatctcaggcaccggcgcgctttgctggaaacgattcctggcatcggcgaagcctcctctgcccacctcatggtcgctttgagcgatcactacggcttcaccaccgccaagcaagctgtcgcctttgctggactcaatcccgccttgaacgaatccggcaagtggaaaggcaaaacccgcatttccaagatgggtgatccgatgttgcgcgcgaagctatacatgcccgccgtggtcgcgggaagacacaatcccgtcatccgccttttccgcgaacgcttggctgcacgcggcaagaatggcatggccatcgcctgtgcttcaatgcgcaaactcgtccatatcgcctttgccatcctgaaatcgaataaacctttcgaccccaattttgcgcttgcataatgggcaacaagacggtat

SEQ ID NO: 4320 - DNA, 1468 bp, unidentified
  source 1..1468: mol_type = unassigned DNA; note = element_68c8378
  misc_feature 1: note = core
  misc_feature 2..219: note = LE
  misc_feature 220..1452: note = CDS
  misc_feature 1453..1468: note = RE
  misc_feature 1..209: note = bridgeRNA
ccgttaccttgctcgcaggcccgaaacgggctgttcaggccaccgtctccggcatgactgatcgcccctgtcgcccatgacctggggggtgttgtcaccggagacggcggacggacgtgaccgctgatagagacctggcgtgggtgatgcctgctcgtaacgtggctgccggcacgctgtccatggtcggcctggaccccgccacagaaggtgatccacttggaggagaccgacaacctcaccgagccctacaccgtgttctgcgggctcgacgtcggtaaggaaacccaccacgccaccgccctgaaccccgccggcaagaagctccacgaccggcccctccccaacgacgaacccgcccttcggcaggtcttcacccagctcaccgaagccggacgagtgctggtgatcgtcgaccagcccgcgagtatcggcgctctgtcgatcgcggtcgcccgccagatgggcctggacgtcgcctacctgccaggactcgcgatgcgccgcctggccgacctgcaccccggtgagtcgaagaccgacgcccgcgacgcctacgtcatcgccgacgccgccagaaccctgccccgcaccctgcgccgtgtcggcaccgacgatgagaccctcgccggactgaccgtgctcgtcggctacgacagcgacctcgccgccgaatccacccggctcaccaaccggctgcgcgacgccctgctgcacatccatccggccgcggaacgcctgctgggcaagcacatccaccgacccggggtcctcgaactgctcgccgacgcacccaccccggccgactggcgacagctcggcggtgccggcatcgccacgacgatgcgcccacgatcgcctcggctcgccaagaccctgcccgcccaactggtccgtgtcctcgacgagcagaccgtgaccgttcccggcaccgccgcgttcgaccgcgtcatcgccggcgtcgcccgcaagctcctcggcgtgctcgacgaacgcgccgacctcgcccaggacgtcgaggccgccctggaggcccaccctcttgccgaggtcctgatctcgatgcccggcgtcgggatcaggaccgccgccagccttctgacgatcatcggggacgtctccgcgttcccgaccgcagcccacctcgccgcctacgccggcctggccccggtcacccgccgttccggcagctcgatccgcggcgaggtccgttcccaacgcggcaaccacgccctgaaatcaaccctgttcctgtcggcgttcgccagtctcggtgacccgaccagccggggctactacgaccgcaaacgcgccgaaggcaaacggcacaacgccgccctgatctgcctcgcccgccgccgcgtcgacgtcctctacgccatgatccgcgaccgcaagcactaccagccgcccgctaccaaccccacacccgagccggcccgcgccgcttgacaacgccatagagaca

SEQ ID NO: 4321 - DNA, 1384 bp, unidentified
  source 1..1384: mol_type = unassigned DNA; note = element_68d1be1
  misc_feature 1..3: note = core
  misc_feature 4..80: note = LE
  misc_feature 81..1127: note = CDS
  misc_feature 1128..1384: note = RE
  misc_feature 1157..1378: note = bridgeRNA
tgatgggatggacgcccccatcggcttcgcgatgagccatactgggttgtgtcgaagcaatccaggaacaggaggcgtccatgaagaatgttactacagttggtttggatttagcaaagtcggcttttcaggttcattgtgccgatgacgatggcaggccggttgtgcgcaggaaactgcgccgttcacaggtagccggtttctttgcacaactgccagcctgcctgatcggacttgaggcctgtgccagtgcacaccattgggcccggacgttgcaggcccttggccatgaggtgcggttgatcccgccgcaatatgtcaaacccttcgtcaagaccaacaagaacgatgccgtggatgccgaggcgatctgtgaggctctgatgcgaccgaccatgcggtttgcaccggtcaagagtgctgagcagcaggccgtgctgaccctgcaccgtgcccgggaactgctggtgcgccagcgcaccatggtgagcaatgcccttcgtggacattgtgccgagttcggccttgtcgtcgcacaaggaacaagcagcgttcgaaagctgatcgagatcatcgaagatagagatgatgagcgccttccggatctggcaaggcaatccctcgggtttctggtcgaacaattgcacatgcttcgatcccggatcaccggtcttgaacgcaaactaatggcctggcatcgggccaatgaagccagccggcggcttgtcaccattcccggcgttggcgtaatgacggcgacggcgctggtggcaaccattggggatgcatcgcagtttcattccggccggcaattggcggcgtggcttggcctggttcccaaacagaactctagcggcggcaaggaacggttgggacggatatcaaaacgcggggacggatatctgagacgcttgctggttcatggcgcccgcgcggtcttgcgatggtctcgcgacagcaacaaacggggtcttaagcagggccgaaccgcatggcagcgatcgcttcttgcgcggcgtccgaccaatgtcgttctggtggccatggccaacaagacggcacgcatcgtctgggccatgctgacacgtggtgaggtttacagggctgaggcgctgcaggcggcataacaatagccaaggaagccaaaccacaggagattgattgcgagggtgaatgatgtgatggcaaacagggcaaccgggatcagccaaacccgataaactgtccgagcctcgagctcgctacggtgatggggcgttgatcctcggattccatcagggccagcgggctataaataccgcatctcaaaggccggatagatgactgcaaacccaacttgccagaacaatcacaaaacacttgcaatcaagggggcgtccataga

SEQ ID NO: 4322 - DNA, 1717 bp, unidentified
  source 1..1717: mol_type = unassigned DNA; note = element_68d311b
  misc_feature 1..2: note = core
  misc_feature 3..67: note = LE
  misc_feature 68..1225: note = CDS
  misc_feature 1226..1717: note = RE
  misc_feature 1262..1479: note = bridgeRNA
agatgctatggggcggcggcgaggagatagcatccatcgccctgatgcgagccgatgggagcccccaatgcaaacgctgaatgacctgagtcaatcccgtatcgtcctgaaacaggacagcaccctgatcgcggtgatcgaaatgagcttgtcgagttggctcgtcgccggcctcgtgcctggcgtcgagcgtcagccgcttaagaagctcgcggtcgacgagagtgttttgctgaagctgttgcatcgctggggagaggaagcagagaaaactggacgcaggatcgaacgcattgcagttgcttttgaggctggccgagatggtttctggctggcgcgctggctcagggcacgcggtatcgaggcccacgttatccatgcatcgagcgcagccgtatcgcgcgagcatcggcgccccaagaccgaccgtctcgacaccgaactgctcaaacgcgtctttctcggctggctgcgtggcgagcgtgatcactgcaagatggtcacggtcccgacaatccgggacgaagatgccaagcggcccaaccgcgagcgcgagagtctcgtcggagagcaaactcggattgtcaaccgaatgaaagcagcgttgagtcggctcggcatccgcggcttcaatcccaagctaaagaaggccgccgcgcgccttgaagacttgcgcacgcccgaggacgaaccaataccgcccaatactttggctgagctgcgtcgtgacatggagcgccgtcggctgatcagtgatcagatccggcagatcgaggatgctcgcttagagcgtttggagcgcatgcccaatgatggatcacacgcaatggtgcgcctgttggcacgtgtgatcggcgttggtatcgagacggctgacatgctggtgcaggaggtgctgtcgcgaaccatgcgcgaccgacgtgctgtagcgcgttatgctggcctcactggcgcgcccgacgagagcggcgcaaaacgccgggagaaggggctggcgcgttctggcaacgctcgagttcggcgaggcatgatacaattggcgtggcgatttctcatgtaccagaaggacagcacgttggcgcagtggtttcgagcccgtaccgagaacgcgcgcggtactcgcaagacgatgatcgtagccctggcgcgcaagctgctaattgctctgtggcgcctggtgaccactggcgaggtcccggctggcgtcgtattgcgagcagcctgagaaggagaactcagacacgacaggatctcggagcctacgaacagaacatcgttggtatccgatgacgatccgaggtggcggtcacccgaagcaagccttggtgttgacaccggtttcgagaatgggtccgccgccgaggagcttcgccgccgatgcgcatggatgcatcatggtcgggtccttatggacccaccggatacaaggttgcggcgcgaatccctcgtgcccaacagcgagctcccctcggaggcgtcatcccgaccacaacgagcctgccgacgtgctcgggtctatcaaggcgcggcctggaagcaatgaagcgtgaggctaacgcagagcgacggccggccttgacagcccctgcgcgcgccggcttcccaacacgtgtgggtcggggcgaagaaacgggtttccaggtcgaacaaagaaactgggatgaggaagaagtggagaatgccgtgaaatagtgcttgacttcgaaagctccataca

SEQ ID NO: 4323 - DNA, 1369 bp, unidentified
  source 1..1369: mol_type = unassigned DNA; note = element_68d7820
  misc_feature 1: note = core
  misc_feature 2..70: note = LE
  misc_feature 71..1096: note = CDS
  misc_feature 1097..1369: note = RE
  misc_feature 1130..1366: note = bridgeRNA
tactgagatggacccgacgcttcccttcgggggacactatcggcctcaacctgacacgtggaggttcatcatggaaatcgacatcctcggcatcgatctcgccaaacatgtgttccagctccatggcgccgaccgccgcggacggcctgtgcatcgagcaaaggtctcgcgtggctcgctcctggaggcggtgcgtacactgaagccagcgatggttgttatggaagcctgcagtacagcgcaccactgggcacggcgcttccagtcgctcggcattgaggttcggctgatcagcccacagtatgtgtcgcccttcgtcaagaccaacaaaaatgaccgcaacgacgccgaggcgatcgtcgaagccgccagccggcccgccatgcgtttcgttaccgtcaaatcggttgagcaacaggacattcaggctgcgcaccgcatgcgtgcgatcctgctacgccaccgtaccgccatgatcaatcagatgcgcggcctgctcggcgagcgcggactgacgatttcgcgctccccagaggcgttcaagcgtgcaatcccggaactgcttagcaagagcaccgacgaactgacgtcgttctgccagacgctgctgactgaactgctgcagcacctgcatgcgatcgaggagcgagtccacctgatcgaaacatcgatccaatcgttcatgaagcgatccgcgctgtgcaagaagatcgcggaagtgcctggcatcggcccgatcaccgccacggctatggtcgccgccgtcggcgatgccaagcaattcaggaacggccgacatttggcggcctggctcggcctggtgccacgtcagtactcctcgggcggcaagcctcgtctgcacggcatcagccggcgcggcgacacatacttgcggaccctgctcatccacggggcccgggcggtcctccgctacgcaacgagaaaagttgatccgcagagcgtctggctgcagcagctgattgcgcgacgcggccacaactgtgcggcagtcgcgctggccaacaagaacgcccgcatcatccaggcactgctcagcagcgactcgacctatatgaagcgaagcgcggcagcatagcccaaaaccgcttgcagggagggaatacccacgcaggtttgcgaagcttctcaaagcgatgacgaaattggttgaaccagcatcctaaagcctgtttttcgtgccggctgccgtgttcggcgagccgtgaatttgctaaggacgggatgcgcggatctcatcgaggctgcggggcgtgcttcggcaagcccccattgggaaagccggatacatgcatgcagaccgtttcgacatcacgaacaagaagcttgcaaaaggcgtcgggtccataca

SEQ ID NO: 4324 - DNA, 1385 bp, unidentified
  source 1..1385: mol_type = unassigned DNA; note = element_68d8596
  misc_feature 1..2: note = core
  misc_feature 3..86: note = LE
  misc_feature 87..1109: note = CDS
  misc_feature 1110..1385: note = RE
  misc_feature 1086..1372: note = bridgeRNA
agatggggtggttgccgcctgcccctcaccgcatcgtagggtagcgcgcggcgttaccgatgtcagggagaaatggaggcaacgacatggatgcagcaatcataggcgtagatttagccaaacgtgtgatccagatacacggggcagaaaaatctggcgagacggtgtaccgaaagaaactgaccagagatcagttctaccggttcatgactgagataccttcttgcattgttgcgttcgaggcatgcggcagcgcaaatcactgggcgcgtcaaatggagctgatcgggcatgaggcacgactgatcccgccccagtacgttcgcccctttgtcaagcggcagaagaacgatgcggcggacgccgaagcgattgttaccgcggcaaggcagcccggtatgcgttttgtcagcgcaaaaacggaggagcagcagagcaagatcgttgtctttcgtgggcgtgaacgcttggtccatcaacgcaccgagcttgtgaacgctctacggtcaacactttatgagtttggctatgtgttcccaatcgggcgcgccagcatgccgcaaattgctgctctgatcgatgacccaagtgcggatttaccctcgattgtgcgcctggaatgccaggatctgctgcagcagatcgctgaaaagacagctcgtatcgatgaaaagtccaagaagctgcaggaagctggcgctcaaggcgaaaagggcaagctgcttcaatcaatgccgggcgtgggcccgatgacagcgttggcagttcaagcctttgcgccggaaatgacacaattcaaatctggccgagacttcgctgcctggcttggtctggtccctcgacaattctcgtcgggaggaaaagctcgactcggacgggtctccaaggcgggtcaggccgatatacgaaggcttttgatcatcggggcgatgtcacgaattgtgggccgggcacgaaataacatcgccccggacacatggttgggccggatgctcgctcggaagcccaagatgctggtggctgttgcgttggctaacaagatggcgcgacagatttgggcgatgctaacacgtgaagagagatatcgagatccggtcatgtctgcgtaatggaaaacgacgtgccatgagcagctggaccggtaaactgggggtgtaagaagacgacgactagatgggcgccatgatcgaacagatctgggtcgggagaaccagccagggacttcgagcttgcaagctcgtttttaagatttggacctgacccgcagatcaccatctcggcccgcggtttctgaaatgccgcacatagaggcctgacagaagaccgcactcgattacgcgcacatgatgtcggaaaattcttgcatgccaggcggcaaccacaga

SEQ ID NO: 4325 - DNA, 1469 bp, unidentified
  source 1..1469: mol_type = unassigned DNA; note = element_68dd72b
  misc_feature 1..2: note = core
  misc_feature 3..222: note = LE
  misc_feature 223..1185: note = CDS
  misc_feature 1186..1469: note = RE
  misc_feature 9..181: note = bridgeRNA
cttgtatattaaaaagagtagtagaccgtcacaccctaggtcaattaagaccgcttcgtagcatgggtcactacaacaatctccatgacagaactcgaacagtcgccaggggcaaaacttgaattactgagatttaaagtatacagcccgtatcgggcaaggatgagtgaaatcaaggggatgttaatctaccaatatctacagaatctgtgagaatcaaacatggaaaatattggtcaatgggtaggcattgatgtgagtaaagccactctagatgtttatatccgtccaatgggtaaagccatgaaagtggcaaacacagaaatggaaatatcaactcttgtagagcaactcaaatcctacgatttaaagttgattgtactggaagcaactggaggtttagaaacagaattaattattcaattacaggcaggacttttaccagtagcattaatcaatccgcgacaaggacgaaattttgccaaagctacgggtagactggcgaaaacagatgccattgatgcacaaattctggcacattttggggaagcaatgaaaccccaattgttagcaattgaatcagaatcagcgcgtcaattatcagaactaattagtcgtagaagacaattagttgagatgcagactgctgaaaaaaatcgccgtactcgagctcgtggtaaagctttagcagatattgagacgcatattgattaccttgatcaacgtttgaaacaacttaatcaagaaattgaagaattgaccgaaaacaatcaacaatggattgataaagtcaatttactcaaaactactcctggaattggtcaagttatttctacaactctagtttctgatttaccagaactaggaaagctcactgctaaacaaatctctcgcttagtaggagttgcaccaattaatcatgatagtgggcaacataaaggtaagcgaatgattaatggtggtcgtgcccatgttcgagcaactctttatatgggtgctgtggttgcaatgcgtcataatcccgtgattaaagctttttacgagcgccttgttgagcgtggtaaatccaaaaaacttgctctaactgcttgtgtgcgtaaaatgttagtcattttaaatgcaatggttcgagataatttgccttggcgtatttgtgacaactgtcacacaattgctcccgtttagccataacgactttttatactcttaattagtctcccccgtgagcgatcgctctgtccgggataaatttttcatgctcttttttgtccacacgagaaatccagcaactggggaagattcagcggcgaagcggagtggctggtgcgggctgcgaccatcttgactactagccacaagtccttttgcccgtaccagccaccgctgaatctagcgcagcgttccccagttgcgtcaatcttcctagttgcagttttttgtttgcgatcgcttgacattcaagacagtcg

SEQ ID NO: 4326 - DNA, 1377 bp, unidentified
  source 1..1377: mol_type = unassigned DNA; note = element_68e3f2a
  misc_feature 1..2: note = core
  misc_feature 3..83: note = LE
  misc_feature 84..1115: note = CDS
  misc_feature 1116..1377: note = RE
  misc_feature 1146..1365: note = bridgeRNA
tgatgctgtggacggctccctcatcggcacgtaagtgccattgaggggtcgccactggggcgaccatgattggggagccaggcatggaagcggtcacgaccatcggtctcgatatcgccaagtcggtttttcaagtccacggcgtcgactctatcggcaatgtggtcatccgccggcagttgaggcgccgctttgtcctagcgttctttcagaagctgccgctgtgcgtcgtgggcattgaggcctgcgcaacctcgcatcactggtcgcgcgagcttagggcgctgggacataccgtccggctgatgcctccagcttacgtgaagccctacgtcaaacggcagaagaacgatgccgctgacgccgaggcaatctgcgaagcggtcatcagacccaacatgcggttcgtggagaccaagacgcccgagcagcagagctgtctgatgctccatcgcacgcgccatctcttcattcgacaacagaccagcgtgatcaatgcgatccgtgcgcatcttgccgagttcggaatcgtcgcacgggtggggcggaacggtgtcgaggagcttctcgatgtggtcgctgatacagacgataagcgggtgccggaggtggcgcgtggctgtctcgtcgcgctcggtgtccagctgaggatgctgaaagctcagatcctggagttcgaccgccggatcatggcctggcaccgttccaacgagaccagcaaacggctcgatgagatccccggagttggtccggcgctggccacggccctggttgccagcgtcgctgatccgaaggcattccgatcggctcgacacttctcagcctgggtcgggcttgtaccaaagcagcactcgagcggaggcaaggacaggctgggcagtatcagcaaacagggtgatcgctatctgcgcagcctgttcactgctggcgcgctcgctgtcattcgttacgccaagatccacggtaccgaacatcggccctggctcacggcattgctggctcggcggccgaccaaggttgccgcgatcgcgctggcgaacaagatcgcccgaatggcctgggccatgatggccaagggcgagcgctataaggaacccgccgcgcttgcggcgtgaaggagatcacgcaggtaatacggcgtgaggtgaaggttgggagggcgaacagcacgtaatgcagtgccggtcgatccggcgatcaggacaccccacttgtgccagcgcatcgtcgaatgcgggcttttgaccgggacctgatccgcggagggcattatggccagcggtcatgtgaaccgcgcaaataggccgaacacatggctgcaccgaccaacgctgcaaacgtgaagaaagcccttgctaaccgggagccgtccacaca

SEQ ID NO: 4327 - DNA, 1578 bp, unidentified
  source 1..1578: mol_type = unassigned DNA; note = element_68e490e
  misc_feature 1..2: note = core
  misc_feature 3..246: note = LE
  misc_feature 247..1449: note = CDS
  misc_feature 1450..1578: note = RE
  misc_feature 7..223: note = bridgeRNA
ttcgtattataaggttaaccagtttttactggttgacctttttttaattggatttaatatatcagtagccagggtaggacgtaagggtgcgtggggcattgatcccgtcaagtaaactgtccaccccctacttgtagaaacatgtttgaggctggttgggacgtagatctcgtataacaagcgaagctatgacactacaagaaggattaggggtactggcaagtagaaattagaggaggaataaaaatgaatccagtagttggcctggatgtggcaaaaggagaaagccaagttcaggcattcttagataaatcaaaaccgtttggaaagagcttttctgtgaagcataccagagaggaattacatcgctttattggatttttaaaagagatagaaaagatgacaggacaaatgcctatggtcattctagaatccactggtcattatcatacccccgttgttcaattcatggaggaacatgatgttatatatatcttgcttaaccctataatttcttatcaggctaagaagtccagtttaagaaaggtgaaaacggacgcaatcgatgcgtatcagttgtgtgtgctttattacaaagaagattttgaacctcataaaaacagagggcttcagcttttagaccttcgaaatctttcaagacaacaggagatcgttacgaatatgtatgtagaagcaaaacttcagtttcatactattttagatcaagtatttcctgaatatcggaaggtttttggtgatctatattcaaaggtttctttattgatgttagaggaatttccgacttcagaagccgtcttatcagctggggaaagtaaaatagccgtgcgtgttgcagagtactgccctagtcgttctgtccaatgggcaagagaaaaggcaaaaaaaataatggatgccgcaatgcgaaatccatttcaaaaagtcgtgtatcaaagtcacttaatcaatcttcaaatgtatattgagatgctttttcagtaccaaggacacctttcaattttagagaatcgtattgtgaccttggcaaatgagctagaagactacaagattgtccaatcgattcctggaataggagaaaaaatcgctgcaacgattatctccgaaattggtgaaatcgatcggtttagtcatccgaaaaaactggttgcctttgcaggagtagatcccagagtttactcatcaggaaagttcacagcaacaaccaaccgtattactaaaagaggttcaagcagactgcgtcacgccttgtatctagcagtattatgtggaataagaagttcaaggaacaaaaagcttaaagaattctatgataagaaaaagtcagaaggaaagcctgccaaagaagcgattgtagcctgtattaataaattacttcattggatttatgcattattaaacagaaaagaatctttccttgatatagcttaattaacagttttaataatgagagagaaaatcttccaaaaggtttttggagggctgtttggcatgctcaaaatagtataacatagggttaataattattttagagaaaaatattgacatcctattagctgg

SEQ ID NO: 4328 - DNA, 1450 bp, unidentified
  source 1..1450: mol_type = unassigned DNA; note = element_68f73e0
  misc_feature 1: note = core
  misc_feature 2..220: note = LE
  misc_feature 221..1252: note = CDS
  misc_feature 1253..1450: note = RE
  misc_feature 18..232: note = bridgeRNA
ctgattgagactggtgggtgcggtgcgacggttgtcgtagcgtcgaaggtgccggttggtgggctcttgaagtgcctgctgcccttcggggttggctttgtatcgaactgcttgccgaccggttcctttgccgaggtgtggctcgaaagaggcgcgaacacaatcgacccgaatcaggagtgtccacctcggtttgaccaccgacagaaaggcatctgccatgaccatcatgatcgggatcgaccctcacaaggcatcccacaccgctgtcgctatcgacggcaacgaggttgtgctcgacgaagtccgagtgcgatcttgtgtcacccaaacagcccggttgcgcgactgggctgagcgtttcgaggagcgaacgtgggcggtcgagtccgcccacggcctcggctatctcctcgcacaacaactcgtcgcggccggcgagcaggtgatcgacgtgccgccggttcgcgcgtcgagagtccgcgtgctcggctcgggccggtcgcagaagaacgaccccaacgacgcgcgttcggtcgctatcgctgcgctgcgcgccgatgacctcgtggccgttcacgctgatgatcactcgcgtgtgttgcggttgttgtcgaaacgtcaccgcgacctcggccggttgaagaacaaggcgagctgtcgactgcacgccctactcctagagatgattcccggcggcgccgggttccggatcacagccgtgaccaggatcaacgcactcatcgacgacttcgaacccgtcgacgcgatgggccgccagcgacaagagatcgcacgcgaactcgctaccgacatcgaccgctacaaccaactcctcgccgcgtccaagcaacgcatcgaaacagcagtgaccgcgtcagcaacatcgttgacgacgatctgcggggtcgggccgatcaccgctgcgatgatcattggccagtccggcgacattgaccggttcagctcgaagcatcactacgccagctacaacgcgaccgcaccgatcgaagcctcatcgggctccaagatcagacatcgactcaacccgcgcgggaaccgtcaactgaactgggcaatccacgtgatcgcgatctcacagctccgacacgacagcttgggccgcgcgttctacgaccgcaagatggccgaaggcaagagctccaaagaagcaatccgagctttgaaacgtcgcctctccgacgtcatctaccggcacctcgtcgctgacgcccgcccacagcacagctgatcaagtgggcccgggaggacacccaggaacgactctgactccagcgtgaccggccctacatcctgaacagccggctcttcggataagtcacttcccggacccaaagccaacgctacgcccctccgcccagtcaggcaagagggccccttcgccgcgcccggaacgtcctcgaaaccgccccttgacacaaagaggctt

SEQ ID NO: 4329 - DNA, 1210 bp, unidentified
  source 1..1210: mol_type = unassigned DNA; note = element_68fcd0a
  misc_feature 1..2: note = core
  misc_feature 3..208: note = LE
  misc_feature 209..1195: note = CDS
  misc_feature 1196..1210: note = RE
  misc_feature 12..189: note = bridgeRNA
cttgtatctttctttccgtggtggttagctatcaccacacgaagcagaggcagcttgtttgacgcccttaaggctcgaccttgtcgcgtagattaagccctctgcttcacctttcgccagcaaagacactgaacggtagccaaggggcaaaccctgaatgtacaaggcaagtgggcgaagttggctaacattgtaacaggaggccatcatgttctatctcggtatggacgtggcaaaagccaaattggattgttgcctgttgctggacgaagccaatggcaagcgcaagaccaaggtggtgtgcaacaccaagtccggcatcgttgatttgctggcttgggttgccaagcagaatgtttccccagaagcattgcatgtcgtcatggaaggcacgggcgtgtatcacgagcaagccgccctggcgctggcggatgctggcgtcacggtttctatcgtcaatccggcacaggtcaaagacttcgggcgtgggctggcggtgcgcaccaagactgatggtgtggatagctttgtgctggcgcgctatggcgcattgctcaaaccaaaagcgtgggtgccacctgcgccagaagcgcggatactgcaagcactgctggcacgtcgcgtggccattgcccaggacctgcaacgcgagcgtaaccggcaggagaaggcagatgcgaccgatacgccggatcggatacagcaatcccttgccgacagcatcgaattcctggtcaagcagcttgaccagttgcaacaggtcattgatgaacacatcgacaaacatcccagtctcaagaacgatctggccttgctccaaagcatcccggcggttggcccgcaggtgggcggtaatatgctttcggtgatgcacagccacaacttcaattcagccgagcagttggcggcgtatctggggctggtgccagtggagcgacagtcaggcagttcggtgctggggcgcgccaggctttccaaggctggccctgccagaatacgcgccgtgctatacatggctgccatcgtggcaacacgctgtaacccgcatgtcaaagccgtttatgaacgcctgcttgcccgaggcaagtccaagatgtccgctctcggtgccgcaatgcgcaagctggtgcatttgtgctttggtgtacttaaaacccagcagccttatgagcacgatcgtgcaaaaacagcttgaccgtgaagacggtat

SEQ ID NO: 4330 - DNA, 1354 bp, unidentified
  source 1..1354: mol_type = unassigned DNA; note = element_68fde46
  misc_feature 1..2: note = core
  misc_feature 3..72: note = LE
  misc_feature 73..1077: note = CDS
  misc_feature 1078..1354: note = RE
  misc_feature 1119..1352: note = bridgeRNA
ttaataagatggtcacccccaccctgtgagcggtacgctgacagggtgtttttctttctgaaggggatcatcatgcaaaacgttacgctcatcggtattgacctcggcaagcattcgttccatgtccacgctcaggataaaaacggtaatgcattgctacgtaagaagttttcccgcaaccagttaaccgcctttctctctacttgtgccgcttctaccgttgttatggagtcctgtgcgggcgcccattttatggcccggcacatcagccagttcgggcatcaggtgaagctcatctctcctcagtttgtccgacccttcgttaaaagcaataagaacgatttcattgatgccgaggctatctgcgaagccgcatcacgaccttctatgcgcttcgtgactccgcgaaccgaagaccagcaggctatgtcggcgcttcatcgcgtccgtgacgcaatcgtcagagaccgcgttaaaaccaccaaccagatgcacgctttcctgctggagtttggcattagcatgccgcgcggcatcgcggttatcaggcgtcttgccgcggtgcttgaagagcacgaactgccgccttatttagcgcgattacttatgcgtctccatcagcattacgcctacctcactgaacagattgaagaactcgaacaagagttaaaaacccacatggcggatgacgataccgcacagcgcttgctgactatccccggcgttggacttatcacggcaagccttttagccacgaagcttggcgatggaaaaagttatgccagcagcagggactttgctgcatcgacggggttagtcccacgtcagtacagcactggcggaaaaagtacgctaatgggcatcagtaagcgcggggataaaaatctgcgacgtcttctggtgcaatgcgctcgcgcttttatgcaacgacttgaacacaatcaggggcggctggctgactgggtgaaggcccagctctcgcggcatcactcgaacgtagtggcctgcgggttagccaacaaactggcccgaatagcctggtcggtgacaacccatcgtacagcttttatccaataaaaagagccaacagggacgaactgttagctcttaggcgttacgtagtgactttctggttttgcgacgactgattattgatgacatgaacggcacagcgacctgcggatgaacctgacataaaaaatggctctttgaagccgtccgctttttaaggttctgcaggcgcggacttcatcgtggcgcgggcaacgtaaggttgcccatccgacgccgtatagatttaagcaagcccatcataaatcaaaatcaacgttgcaaaaaagggggtgaccataga

SEQ ID NO: 4331 - DNA, 1522 bp, unidentified
  source 1..1522: mol_type = unassigned DNA; note = element_68ff44d
  misc_feature 1..2: note = core
  misc_feature 3..270: note = LE
  misc_feature 271..1437: note = CDS
  misc_feature 1438..1522: note = RE
  misc_feature 3..254: note = bridgeRNA
cttgtatgataatttcgtcctgagaagacgagatatcatactctcctttctggccctttattataatgaagctgtcctgagtaagtgtttatatatcctacagctcagtttcaactgggactgtttacataggagactactctccacagtctgcttcatagttaattggttggatgttccgatacacatgtattgagttcttatgtctcgcaaggatactgaagcagattacccgtggtgactcaggtctagaaaggtaatctgttttttatgcacgtttacgtcggcgttgatatcgccaaagaacttcattacgctgccatcatggattccgatggtgtcgtaaccaaacctttttcttttgagaataacgataagggcttcaatctgttactctctcatcttgctccttacaacaaggagtctatcctgataggctatgaatcaaccgctcattatcaggagaatcttgcttactttcttaaatcgcttggttatcgaactgcagaaatcaatccacttcaaaccgccgctttaagaaaagccaatatacgcaacactaagactgatagtgtagacgctaggttgatatgcctcgctttaatgaatcatcatatccaaggtgaccagcgagactcggcacggttggatgatctttatcaactttgtaagatgaggatggataccatgaagaaacgaactacctgtaagattcaatttgtagctatcatggatcggatcttccctgaactggcttccttttttgataataacctccacaccaatacaatctatcgcttgattgagtcttttcctctaccttctcaaataaagaaaactcgaattgatattctcaccaagcttctccacaaagcttctagaggccatttcaagaaagaaaaggctcaaaaactgaaggatttggcagatatatctgtaggaatcccttctgacatatttgccttccaagctcaacagttggttcatcaaatcgagttctatacagatcagattcaaacaatcgaagaaagaatcaatacgaatccggatgttatgagctcacccctcatgacaatccctggaatcggtactttctgtgttgcttgtattctatctgctataaaaaatataaacgattttggtgcaccctgtaaaatacttgcctatgctggcttggatcctgtcattaggcagtcaggaaaatttaacgcaagtcataccagaatgtccaaaagaggaaatagtctactccgctatgcactagtctggtctgctggaaatgtggtgaagaataataatacgttcgctgaatactaccgccataagacggaagatcagggaaagtcacactatcaagcacttggacactgtgccaaaaagttggtcaaatctatctatcacatgctcaaatataacgaatcatttaatcttgactaaacttttttaaatttctcctccccaggagatgttttcgtcatgctctgtcaattcaatatatttttattgacagttcatagttggt

SEQ ID NO: 4332 - DNA, 1398 bp, unidentified
  source 1..1398: mol_type = unassigned DNA; note = element_68ff599
  misc_feature 1: note = core
  misc_feature 2..91: note = LE
  misc_feature 92..1120: note = CDS
  misc_feature 1121..1398: note = RE
  misc_feature 1171..1390: note = bridgeRNA
caatgggatggacgcccccactcgcaacggcatcgatgtgccaaagtggaaagcgttagtccaaccacttgaaccgaggggagcgtccgagatgaagattacgacgatcggcattgatctggcaaagagcgtgtttcaggtccacggcgtggatgagcgcggcaagacggtgctcaagaagcaactcaagcgcgctcagatggcggggttcttcgcgaatctgtcgccgtgtctgataggcatggaggcctgcggtggagcgcaccactgggcgcgcaagctgcaggggttcgggcacaccgtgcggttgatggcgccgcagttcgtcaaaccctacgtgaagaccaacaagaacgacgcggccgacgcgcaagcgatctgcgaggcggtggcacggccgagcatgcgctttgtggccatcaagagtgtcgagcagcaagcggtgctggccctgcaccgggcgcgccaggggttcgtcaaatcacgcaccgcccaggccaatcagatccggggcctgctcggtgagtacgggctgatcattcctcaaggcattgcccacatcgccaaacgggtgcctgagctgatcgaagatgcgagcaacgagttgccgggtgcgttccgggtgctggtggatcgactgatggataacctgaaggggctcgaccagcaggtcgccgagctcgaagcccagatcaaggcctggcaccgcgacagcgatgccagccgcaggcttgagcaggttcccggcattggcccgatcacggccagtgcgctggtagcgagcatcggcgaggcgaagaacttcgataacggccgccagctggccgcctggttggggctggtgcccaggcaacattccagcggaggaaaggcaaccctgctaggcatcagcaaacggggcgactcatacctgcgaacgctgctgattcacggagcgcgctcggtgatcctggccgcgcggcgcaagaccgctcaaggtggctggctgcaggagctgctcaagcggcgcaatccgaatgtggcggccgtggccctggccaacaagaacgcgaggatcgcctgggcgttgctcgcccacgatcgcaggtaccgagccgattacgccggcgcaggcgcctaagcaggtccgccggcagaacgcaccgcaacaatccgcaggagactcaagcccaagattgctcaggcgagcatgaaatgatggcaaaacaggtaagaccgtggttggcaaagcccgttcgggtcggagcacttacagtgcgcgctttcgattggggcgccaatcagcaaatcccaccagggacagcggccatgccgcaccaaagtccgaatgtacgggtgcaatctttaccttcttggcatcattaagtgaccgcttggcataccgggggcgtccatgta

SEQ ID NO: 4333 - DNA, 1578 bp, unidentified
  source 1..1578: mol_type = unassigned DNA; note = element_6908653
  misc_feature 1..2: note = core
  misc_feature 3..261: note = LE
  misc_feature 262..1464: note = CDS
  misc_feature 1465..1578: note = RE
  misc_feature 12..281: note = bridgeRNA
ctattacaataagttttggttggaagcccagcatccggctgggcttcttcccatctcttgcctaagctacaataaggggagcaactggctgaccagcacctccttgggcttctatgcccgcgatcaagactgccagccatccccttattgcagcgttcgatttgagcaggttgagccatagagttcgtgtcacccaatagattgaatcggcaatgagaaaaagatggattccggttgcaaattcgtattggaggaatgcaaatgaactctgtaggcatcgacatttccaaaggccgaagcacggttgccgtcatgcgtccctttggagaggtcatcatctcgccctttgaagtcagtcacaccgccagcgaactgagcgagctggcaaggcggcttaaaagcctggacggtgagacccgtgtggtcatggaggccacaggaaattaccatgcgccagtggccaaactgcttcacgacgcagggttatatgtttccgttgtcaacgcaaagctggtgcatggctacgggaacaacgagttaaggcgtgtcaaaacagataggaaagatgccgttaaactggcaaactacggccttgaccgctggctaaccttgccgagatatatcccagaggaagatacccggctgctgttgaagaactgctaccgtcagtaccgacagtattccaaggtgcagactcttctgaagaataatctgatctcactgctggatatggtgtttccaaacgtcaaccgcctgttttcaagtccaatccgtggggatggaagtgaaaagtgggtagattttgtggctgaattttggcattgctgctgtgtcagcgaaaaatccgaaaaggcattcataagcaaataccagcggtggtgcagaaagcaccgctacaacttcagtgaagcaaaagcgcatacgatttacaccgaagccagcggacatattggcgttatgccgaaatcagaaacgacgaagctgctcgtggaacaggctgtatcgcagctcagagcaacctctgccgcactcgctacactcaaacaggaaatgcagtcgttagcttctcaactaccggaatatcccgttgtcatggggatgtacggtgtcggtcagactcttggcccgcagctcatggccgagattggagatgtgcgccgcttttactccaagaaagcactggtggcttatgccggccttgatgccccaccaaacgattctggagatgtgacaggcaggcacaaatccatgagcaaaattggcgcctcatctctgcggcgaacactgttcctcgtcatgagcgtttatttgcagaaagcaccgccagatgaaccaatctaccagttcatggacaggaaacgtgccgagggcaagccctaccgtgtctacatgatggcttccgcaaataagttcttgcgaatctactacgctactgtgaaggcctacctggaatcatccagatagctccgatcttgccatactcattggctggccgccgtttcaaatttgagacgccaagcggctttgtttagcctgtaacattatcttgaaatttctacttgacttttcttagcaggt

SEQ ID NO: 4334 - DNA, 1942 bp, unidentified
  source 1..1942: mol_type = unassigned DNA; note = element_690e8e9
  misc_feature 1..3: note = core
  misc_feature 4..266: note = LE
  misc_feature 267..1463: note = CDS
  misc_feature 1464..1942: note = RE
tctcgtatataggataagtgcacccactgcttatattgggtgtttcaacatatttgttgaacgtaggctgagagcggtaggctataattcttacggcattgtccggcaaactaagactaccaccctcgctcctacgaccctccggcaatttaacatgttacagccctgattaaacaggtgtctggctattggccacgagattacggttcgtagagagtaatggaatatttggtcctcagcctattaaacaatttcgggctgaaaatatgaatttgaacattggaatagacatcgccaaaaatgtgcatgaagtatgctttgtagatgagaacggtaaacagatcgggaatttcatgaagcttaagaattccaggaaaagcttagagaaattcaggaataagatagaatccatctcgaaagagctaaacgcaaaaccaagaatcgggattgaagccacaggaatatactggtattcactatacagtgaactgtccaagtattacgaaatacaagtctacaatccatctcaaatcagtggatttagatctgtgaatatcagagtttcccacaacgacaagattgattcgaggacaattgcaaatatgctccgatttggagaagctcccaaaaccgattacagtgataagcaaatacttgagatgcgtgaatactgcaggttccagtttaaattgacaactataaaaacaaatttaaagaaacggtttagacggaatctgcatttgatatttccaggctatgatatggttttcaaaaatgtattcacaaaaacatcaagaggaatacttacagaatttcctacacctgatgacatacttgagatgggtacggaaaaacttcgtgagttgatgaaggagctaagcagaaaccacattaatccagacaaagccagtgaactgatagaaatagcaagagacacaatcccttccgagataattaaagaatctgcgcttttcgaacttcagatgctacttgatctaatagaaactctggaaaaacagattgaagaggtggaatttaaaatattaattatttggaattctgtgaaagaccggtattatacacaaacaattactgggattggagttatcagagtggccacaatttgtgctgagattggaaattttgaaaatttcactcatccagacaagattctcgcatttgcgggtctggatcctaaagtgacacaatctggaaacaaggagattgtcggtggaccaaataagaggggttcaaagatgttgagatgggcattgggctgggccgtagaggaagctaaaaggactaatcctgttattggttcatgttttcagaaaaagctggatgaaggaaagcactacaatactgcaagatgtgctacagctaagaaacttgttagaattatctggtcggttgagaataataaaaaaccattccagattccacccaactatctatcttcttaagtgaaaatacaagccaaaaatgacaccaccatagtggattgtcactcgcagatacgtaagtagactgagcattaaaggagggcgtgaaatgtcccgcggtataatagaagttgacctataataacggttgaaatatattatatatatagcggtggctatataaaaatggaatacgcgcaacatccttttcatcgtatatctcgcctatcgccgccctgccttaagctgtgtttgcagactggcaacaaaatgcttgcggcgtagcgtacccgaagggcgcaagctttttaattgcctgactgcatcaagtggggcagggcggtggcgagagatatcgaaaatggagtgacaatgcaacaattcccttttcatcggaattgagccaggagctgtcctgccttcatctgagatttagttgatctgtacaatattttgaagataatagttcaaatgtgctaaagataatcatatataacatg

SEQ ID NO: 4335 - DNA, 1153 bp, unidentified
  source 1..1153: mol_type = unassigned DNA; note = element_69157d6
  misc_feature 1..2: note = core
  misc_feature 3..205: note = LE
  misc_feature 206..1141: note = CDS
  misc_feature 1142..1153: note = RE
  misc_feature 11..211: note = bridgeRNA
cttgtcttatgttttccgtatcgatctgcaaagattgtgccagtgcccaggatcgtttttcgaactgggcagtggtggcggctggatcgctttgggcttggtcgtgatggaccgttagtgagtacgatcagccgccgtcttcgcatgaggcctgaacggatacgcaagccatgggcttgcatgacaagcataggacatgacgatgatgactgatgatagcataggcatcgatatttctaaagattctcttgatgtgcatcggcttagcgatggcggcacggcaacttttcccaacagtcctcgtggatttcgcacactctcgacgtggctgggttgcgatattcccacccgtgtcgtgtttgaggcgacgggtccatatcacaggggtttagaacgtgcactctctggaaaatttccattggtgaaggtcaaccctttgcaggcacgcaggtttgcgcaggcatgcgggacgagggtcaaaacagacgctgtggacgcgcgcatgcttgccagctttggaagcgccttatccttggagccagatcaaccagttgatggagaacagtttgatcttagagagttattcaccgcgagagcgggcttggtgaaggaccgcacccgtttgttgaaccgcttgcaaacacaaactcttgccctcgttaaacagcaaaccaaggctcggatcgaccaattgacgcgccaactcaaagcattacagcacgacatcaacaaaaggctgcacgaatgccccagccgcgcccgagccaatacgattttaagatcgatacctggcattggtgaagttgctgcatcaactattttgatagaaatgcccgagatcggcaagcttcgaaagaagaaatctgcaagccttactggattggcaccaatgacccagcagtcaggaaaatggcatggcaaagcccgcattcaaggcggacgaaaaccgctgcgcgacgcgctatatatgcccgctcttgtcgcgacaaaacacaatccggacatgcggaagaaatacaaagccatggttgagcaagggaaaccaaaaaaggtcgctctcacggccaacatgcgaaagctcattgaactcgcaaacgcgctggttaaagcagaccgggaatggctaccaaacggtgcttgaccaagacggata

SEQ ID NO: 4336 - DNA, 1592 bp, unidentified
  source 1..1592: mol_type = unassigned DNA; note = element_691b19e
  misc_feature 1..2: note = core
  misc_feature 3..253: note = LE
  misc_feature 254..1426: note = CDS
  misc_feature 1427..1592: note = RE
  misc_feature 2..230: note = bridgeRNA
tcgtattatatagtcatacccattctttaccttctctataggttagggtatgctgttaaagatgctgtggattggttctaatctcctaccgcatagacggtttttgagaggctccaaccacagtctctttgtttaattgttaatcagttagataccgcatgacggtttatgtagaacgaggttacatcacgcaaagagccctgtggatctttttaacagcagcatcaaatactttttaaggaggatcacgtttatgatctatgttggtatcgatgttgccaaggacaagcatgactgttgtattcttgacaacgaaggccggagtatatttccgatcttcactatctcaaatgacaaggctggttttgacgagctgttttccaagatcagatctgtgaccaggttcaggaagaaaacaaaagtaggtcttgaagctaccggtcattattccagcaatcttctggcaacgctcgttgataaagggttcccaacctatcttatcaatccgttacatactaatcttttcagaaaaggtcagagccttagaaagacgaaaacggataaagtcgatgcctcttcaattgcaatgatgttattaaccgataagtcactcaagccctactcggatacatcataccacaacgaggaattaaaatcactcacccgttatcgttttgacaaagttcatgaaagagctaaactgaaaacctctctttctcgacttgtaaccattctctttccggaactggaaaaactggtccctacgcttcatatagcttctgtatacgcccttttagaggaatttcccggagctgcattcattgccagcagtcatcttactcgtcttaaaaatgtcctttatactgcctcaaaaggacgctatcatcgcgataaagctatcgagatcagaaatgcggcaatcaattccatcggtacccctatgaacgctaaatcgttggagttaagacataccatacagttgatcagaatgctggatcaagagatcgatgaaatcgaagcctccatcaaaaagatcatggatgaatctaattccccaataatgactattcccggtatcagttaccgcatgggtgccatgatcattgctgagatcggcgacttttctcgctttgataacgctgacaagatacttgcttacgcaggtctttcgccttcaacgtaccagtccggacaggtcgaatcgtctcactcccgaatggagaaaagaggttcacgatatctgcgttacgccctgtttaacgccgccaggtttgtctgcaaatgggacgaaaccttcggctcataccttggaaaaaagatatccgaaggtaagcattacaatgtcgccgtatcccacgctgcgaaaaaactagtgcgaacaatctacaggatggagatgactcaagaaacctactctccgaaataacgcccatccgttgattcttttcttttagagcatcagtccggatgctctgtttgtcatgcgattttcaaggtactgattgttgagaataagtctcaaccgctatataaaatgcctctttgcatttatatcaaagaacatcattttttacttgacttttaatagttag

SEQ ID NO: 4337 - DNA, 1442 bp, unidentified
  source 1..1442: mol_type = unassigned DNA; note = element_691da6d
  misc_feature 1..2: note = core
  misc_feature 3..218: note = LE
  misc_feature 219..1427: note = CDS
  misc_feature 1428..1442: note = RE
  misc_feature 9..213: note = bridgeRNA
gccctacctttcagggatgtccgcggtccgcgaggatcggcggatgcaggtggagcgggtatggctttcatgcctgctgccggtgatggttcagagtgctgtgccgcccgctccaccacctggttctgaccgctgattaggcactgcgaaccatcgctatgtagggcgttgacggcggaatcgggacgcaccacaccgtgtgatcgaccggaggttcgatggcagtaaaagcaggcatcgatgtcgccaaggagttccactgggtcgcgatcgtcgccgccgagaccgggaaagtcctgctctcccggcgcgtcgacaacgacccggacagcatcgacgccctgatcgcccagctgcgccaggccgaagccgagcacggcgagctcaccgccgcgatcgacctgatgggcggagtggccagcttgctgaccgccatgctgctggaggcaggtgtccgcctggtccacgtcccgggcctggtggtcaaccgagcccgccgcgccagcaagggcggcgaagccaaatccgatccccgcgacgcggccaccatcgccgaccagctgcgcctgcgcgacgactggcgcatcgtcaccgccgaggacgacatcaccctcgacctgcggatgctggtctcccgacgccgtgaactcgtcatcgatcagacccgccgcctcaaccggctgcgcgaaaccctggccgggttcttccccggcctggaacgcgtcgtggacgtgaccaacctcagcgacctgcggcttctggtccgcttcgtcacaccggaagaggtccgcgaagccggacgcgacggcctgatcgatcacatgctggccgcgggcgtccgccgcagctatgccgaacccttggcaggcaaggcgattgcggccgctcaggcccagcatgtgatcgttcccgggcagaagcgcatggccgagttcgcccgcgagttcgccaccgacgcgatcgcggcccggcaccgcatcggcgaactggagaaccagatcgccgacgggctcgaccgccaccctgacgcggccctcgtccgaagcctgccggggatgggggccaccctgaccgcggaattcctcgcggaggcaggaaacctggaccgcttcaccagcgccgatcagctcgcttcggccgccggcctcgcgccggtcctgcagcagtccgggaagatgaactacctgcggcgagccaccgccggcagcaaacacctgaagttcatcttctaccagtccgcgttctgcgcgatccgcaccgacccactcagcaaagctttctaccagcgcaaacgcgccgaagggaagcgccatcaccaggcactgatcgcgctggcccgacgacgcatcaacgtcctctacgcgctcctgcgcacccgccagccttaccaggccgactaccgacacaccacggctaccgctgcttgacataaacattaggca

SEQ ID NO: 4338 - DNA, 1387 bp, unidentified
  source 1..1387: mol_type = unassigned DNA; note = element_691f9dc
  misc_feature 1..3: note = core
  misc_feature 4..87: note = LE
  misc_feature 88..1113: note = CDS
  misc_feature 1114..1387: note = RE
  misc_feature 1126..1374: note = bridgeRNA
tgatgaggtggacggcgcccgctcgcggcatcgaagtgtgccatagggtgatcgtcatcagacgaatcacatgagggggccgtccacatgcaggttaacacgatcggaattgatctggccaagaacgtgttccaggtccacggcgtcgacgctgccggcacggtagtgatcaccaagaagttgcgacgttcgcagctgctggcgttcctcgagaaggtgccgccctgcctggtcggcatggaagcgtgcgccacgtcgcaccattggggacgcgagctcaaggcgctcgggcacgatgtgcggctgatgccggcaagctatgtgaaggcgtacgtcaagcgcaacaagaacgatgcggccgatgcggccgccatctgcgaggcggtgacgcgaccgagcatgcggttcgtgcttgtcaagagcgccgagcagcaatctacgctgatgctgcaccggacgcgggatctgctggtgcgccagcgcacgcagctgatcaacgccatgcgggcgcatctggccgagctcggcctggtcgctgcgcgaggccgcgagggcgtgcagaccttgattgccctcgtaagagatgaggcgagccagcttcccgatctggcccgaaaggctttgcaggccatcctcggtcagctcgacgccttgggccagcagatcggcgagatcgagcgccacattcacgctcagcatcgttcgaacgaggcgagccagcgactggagacgatcccaggcatcggcgtgatcggtgcgaccgcgattgccgccacggtgactgatcccatggtgttcaaatctgggcgcgagttcgccgcctggatcggcctggtcccgcgtcagagctcgagcggcggcaaggagcggctgggctcgatctccaagcagggcgaccgctacctgcgccggctgctggtcatcggagcgacggcagtcatacgtcaggcccgcacgcatcccgacaagcatccatggctgatccagctgttggcacggcggccggccaaggtggtggcggtggcgctggccaacaagaccgcgcgcatcgcctgggcggtgctggccaggggcgaaacctatcgagcgccggtgcttgcggcgagggcctaaatgggctgccgatgaatagttagagatcgcgtcgaagggcgcattgcaattgcgagggtgatgatggcgtgatgcgaaacggtcgagccgtcgatcgggagaacccgcctggggtctatgggcgtcttcgagcccggaaatttgattgggacccgatccgcggagcacatcagggccagcggcatgcgccgcaccaacaggccggacacatgacttgcacccgaccgcaagccgcacgccagattcctcttgcaatgagggcgccgtccacaca

SEQ ID NO: 4339 - DNA, 1355 bp, unidentified
  source 1..1355: mol_type = unassigned DNA; note = element_69273e4
  misc_feature 1..2: note = core
  misc_feature 3..72: note = LE
  misc_feature 73..1095: note = CDS
  misc_feature 1096..1355: note = RE
  misc_feature 1074..1343: note = bridgeRNA
tgatggggtggacgccccccgacggcatctatgtgccaagaaggtcatcgaccatctgagagggaggcgtccgtgaaagaggttaccaccatcggcctggatatcgcaaagcagatttttcacgcgcacggcgcgggttcatcgggtgcaccggtgttcagccggcggatcacgcgtcagaagctgattcagttcttcgcttcgcagccgcgctgtgttgtcgcgatggaggcttgcgccggagcgcatcactggggtcgcgagctcatgaggctgggtcacgaggtgcggctcatcccgccggcctatgtgaagccgttcgtcaagcggcagaagaacgatgccgcggatgccgaggcgatctgcgaagcggcgcagcgtccggccatgcggttcgttccggtgaagagcgaggcgcagcaggcgagtgctgctgtattccgggcgcgggacctgctcgtgcgccagcgcacgcagctcctgaacgctcttcgggggcttctcgccgaacacggctgggtcgcgccgaaaggcctgttccatgcgagtgcgataatggcgaagatcgaaggtccgtcgtgcgagctgccagcaagtgcgcgcgacgtgttcctggtgatgatcgcgagcgtgagagcactcgatgagcgcatccatcttctcgatcgtgagatcacgaagcgcgcgcgtgaggatgagaccgcgcggcggttgatgactatccccggcatcggtccgatcacggccaccgcactgcttgcgctcgcaccggcaccggagagcttccgcaagggccgcgactttgccgcatgggttggcctcacaccattacagcggtccaccggcggcaaggcgaagctcggctcgatcaccaggatgggcgagctaacgctacggcgcctgctgatcctcggcagcgccgcggtggtgctccacgccagcaagcgcggcgcggccaaaggatcgtggctcgaacagatgatggcgagaaagccgcgcatgctggtgacggtcgcgtttgccaacaagacggcgcgcatcgtctgggcgctgcccgccaagggaggagtttatcgagctccggccgtcgcatgacgcggcgggcgtgaggatgtcagggcgtaagtgatgcaaaggagggtatggcaccacagtcggcgagacggggccggaagaaccagtgttttccaccgtgctactcaagcacgctaatgggtgatttggatccggtccgcgaactcccatacgggctcgcggcatacatcatcgccgcatcagaagccggacagatggcagcatccgaccaggtgtcagaccaaccaaaaatcacttgcgctccgggggacgtccacaga

SEQ ID NO: 4340 - DNA, 1256 bp, unidentified
  source 1..1256: mol_type = unassigned DNA; note = element_69346e0
  misc_feature 1..3: note = core
  misc_feature 4..220: note = LE
  misc_feature 221..1225: note = CDS
  misc_feature 1226..1256: note = RE
  misc_feature 27..200: note = bridgeRNA
catataaaagaagtagtcccaaataaaatacattatttgggactaagctagagtgagaagaagaggctaatccgtcaaaagctgcgagcttctcaggatgcataagtctcttctcgctctagcgattctgagcttctataacaggtaatcgcaaagatctttaaccgatatgaaaaagccatgaatcgctcttacttctcaatgtaaggatagtagatttatgaaaactctctctattcaacagctaaaaaactgcactggtattggcatagatgtctctaaagcgacgttggcattttccggaataacaccagaccaaaccattcactatcagttaagcaatacagtagaagcgataaaaaagctggctgaaaaactcgagaagtcagaatacaaaggcaaaataatctgtgaatctacgggtcattatcaccttaaattagtctccgtactttctaagtatgatctcaatctctacgtcattaaccctctgttggcgactaagcatagcaaagcgaatattcgtaagactaaatcggattcagttgatggtgatagcctcgcagcaatgtgtctcacagagaaaaatcttcctaaacccattaagatgagtgacagtaatctattgattacattgaaagttggtcaagtaaaagcaatcgaaaagctcatccaaaagatgggtggtagccttaggttgtatgaggaaacttaccaaggcttgggctttgaggtgagtgagattcaacaagagctagccacaaaactcaaggacgtaaagtcacttcataaacgtatgcttcgcgagcttgaggccatgatcattgaagcgaatgagagcaaagaagatgcggatatcttgattagtattccaggtatctcctcgaccacagcagctcttctgagccaacttgatagaggtgtgaaaaattgccattcgtgggtggcgtttgtcgggttagataccagtattcgagaaagcggtacgtggaaaggcagaggaaaattgacgaagagaggaaacacctacttgaggaaaagactcttctgttcggcttggggagccacgatgcatgatgagcattttaaggcttactatgacaaattgcgggcgcaaggaagaagctataaagctgcactgtgtattgtcgctaagaagcaaatcaggatcgcttaccacttgttaatgagtggagaaaaatacgatcctagtaaggctttttgagcttaaaaatttgacaaagtcgtttaacagg

SEQ ID NO: 4341 - DNA, 1331 bp, unidentified
  source 1..1331: mol_type = unassigned DNA; note = element_6938b3f
  misc_feature 1: note = core
  misc_feature 2..65: note = LE
  misc_feature 66..1073: note = CDS
  misc_feature 1074..1331: note = RE
  misc_feature 1104..1329: note = bridgeRNA
taatgagatggtcaccccgtcccgtgcgtagtacgatagcaatgtgtcttttgggaggaatcatcatgaaaaatgtctctcttatcggaattgatattggtaagcactcttttcatattcattgtcaggataatgctggaaggatggtgcttcgcaaaaagtttacacgagcgaaattgtttgagtttctggctggatgttcttcagcaaccgtagttatggaggcctgctctggctctcaatatatggctcgtcggattgctgatttaggccatgaagcgaaattgatatcaccacagtttgttcgtccttttgttaaaagtaataaaaatgatttcattgatgcggaagctatctgtgaagcggcatcccgtccttctatgcgatttgtattaccgaaaacggaaaatcagcaaatgatgtcagccctacatcggcttagagaatcaatggttgctgataaagtcaaaacggctaatcaaatgcacggcttcctccttgaatttggcgtcagtcttcccaaaggtgaagccgtaattaagcgactttctagtgtgttagcggataacttattgccagagcaactcgtcagattattgttaatgctgcatgaacattacaattacttactggctcagattcacgcgctggataaaaaactggaagattcccttttacaagatgagaatgcatcacatctgcaaagtattccttgtattggtttaataacagctagcctgttgagctgcgagctcggtgacgggaagcaatatgaaaatgggcgaaattttgcggcgtctctggggatcgtgccaagacagtatagtactggcggtaaaaatgtcctgatggggataagtaaaagaggaaataaaaacctccgaaggctccttgtacaatgtgccagaatatttatgataaggttgaataatcagcaaggtaggcttgctgattgggttagggaattattaactaggcggcattcaaatgtagtggcatgtgccctagcgaataaacttgcgaggattgcatgggctgtaagttatcataaacagccctatgcccagttctaactagtttattgaaattaattcataagattttaacgttactcctggtttgcgaagatatagattgatggcataaacggctcaacggcctgatgacaaaactgaccacgaagcaggctgatacaagccggatgtgttttaagtttcattaggcgcgactctcatcatggcgcgaaaatatatttttcaacagacgccggatagatttaagcaagcccaatcctgaaatttttatcttgcaaaatgcggggtgaccataga

SEQ ID NO: 4342 - DNA, 1331 bp, unidentified
  source 1..1331: mol_type = unassigned DNA; note = element_69487f0
  misc_feature 1: note = core
  misc_feature 2..62: note = LE
  misc_feature 63..1094: note = CDS
  misc_feature 1095..1331: note = RE
  misc_feature 1107..1323: note = bridgeRNA
taatgaaatggacgcccctcttaagctgataataatcggtgaatctagctaggaggtgcatcatggataatgtatctaccgtcggtcttgatctggccaaaaacgtttttcaagtccactgtgcagatgagaaaggtcgctgcattcagtccaaggtgataaggcgttcccaactactcagattttttgcaacgctcaagccttgtttggtgggtatggaagcatgcggtagctcccactattgggcgcgcgagttgaagctgttagggcatgatgtgcggctgatggcccctcaatatgtcaaagcctatgtaaaaacgaacaagaatgatgccgccgacgccgaggccatatgtgaggccgttacccggccgggtatgcgctttgttgacattaagactgaggagcagcaagcaatattgctgctacaccgggacagagagggcttaacacgcgatcggacggcgctgatcaacaggcttcgtgcgacgcttgcagaattcggtgtgacggcgccatcgggaccgcagcgattaaaccgctggttccgcgaggattacagcggctatggcgtgcgcttgcctggcttggttgagcgccaggtcgagaggatgcggaccaggttacgcggactggagagcgagatcgccgcactggatgttgagattgacctgacaagtcgaagtaacgaagcatgtcagcgtcttgaagctgtgcccggtatcggtcggctaacggcctcagcagtggtggccaccgtgggcaagggacaatcgtttaaatcgggtaggcagttcgcggcttggcttggccttgtcccacgtcaatactcaagtgggggaaaaccccgcttactagggatcagcaagcggggtgatggttacctgcgacggctgttaattcatggtgcccgagcggtgatcagacacatgaatccaaagcgtgcggttacggggtggctggcacaactttctactcgggctcaccataatgtggtgattgttgctttggctaataagttggctcgcattgcgtgggctattctttacaaagagcggacgtactctgaagcactcgttgctggacggagatagcagaacgaacttaatggttgtgcgtaggtaggtatgacattgatggcgatacggttcaaaccgcggcctggaaagtctggtcctaacatcgttcttatagaacgaccaaatgtttagacccaggtcggcgaatttcatcagggatcgaggcgaagcctcataaagaatccgaatagatggctgcataaccgtcctgcaatcaagtcgactacttgcacaaaacggggcgtccataga

SEQ ID NO: 4343 - DNA, 1434 bp, unidentified
  source 1..1434: mol_type = unassigned DNA; note = element_69511a8
  misc_feature 1..2: note = core
  misc_feature 3..228: note = LE
  misc_feature 229..1419: note = CDS
  misc_feature 1420..1434: note = RE
  misc_feature 10..221: note = bridgeRNA
tccctaccttgttgatcgggatgagcgagccattcgtagggttggctcgcccaggggtgtcgggtgtggctttcagtggtctgccgtccgtggcttcgtacgattcgccgcccaacaccccgcgacgactcggctgctgattaggaattgcgatgcgatcgctgagtagggactcgccagcgaggtcgtctgtggtgcaggcaagcaagcgatccgtggagagtgcgcgtgacagcgatctgggccggtatcgacgccggcaagacccaccaccactgcgtggtggtcgacgacaccggtaaacggctgttgccgcgacgggtgaccaacgccgagccggagctgctgcggctcctggtcgacgtcctcgccctaggtgatgaggtcacctggggcgtcgacctagccgacggcggggccgccctgctgatcgacctgttgctcaaccacggtcagcacacgctctacatccccggcatggccgtcaatcgggcatccgagggctaccggggcgaaggcaagaccgatgccaaagacgcagcgatcatcgccgaccaggcccggatccgacgggacctacaacccctgcggcccggggacgagctggtcaccgagctgaagatcctcaccgttcaccgacgcgacctcaccgacgaccgcacccgcgcgatcaaccggctgcgcggccgcctgaccggaatcttcccggcccttgaacgggccctggacctgaccaacgccgggcccctcgtcgtgctcaccggctaccagaccccggcggccatccgtcgcaccggtatccgtcggctggagacctggctgcgcaaccgaaaggtccgtggcgccgctcagctggcccaggccgccgtggaagccgccgagagccagcacacgagcgtgaccggggagaagccgaccgcccagctcgtccacaccctggagagggaggtgatgcgcctcaacgagcagatcgcggagaccgacaagctcatcgaggcccggtttcgcgagcacaaacacgccgaggtgatcgcgagcatgcccggcatcggccccttgatgggcgccgagttccttgccgccaccggcggggacatgacggccttcgccacaccggaccgtctcgccgggttcgccggcgtcgccccgactccccgcgactcagggaagatcagcggcaacttgcaccggccgaagagatacagccgcggtcttcaacgcgtcttctgcacgtcggcgttgatcagcatccgctgctgcgaagagtcccgccgcttctacgaccgcaagcgcgccgagggcaagcggcacacccgggccgtcctcgccctcgcccggcgccgcgtcaacgtcctgggggccctactgcgtgacggacggtgctacgagtccataccgcccgtcacgacagccgcttgacaaagagattaggaa

SEQ ID NO: 4344 - DNA, 1631 bp, unidentified
  source 1..1631: mol_type = unassigned DNA; note = element_6951a88
  misc_feature 1..4: note = core
  misc_feature 5..279: note = LE
  misc_feature 280..1503: note = CDS
  misc_feature 1504..1631: note = RE
  misc_feature 14..302: note = bridgeRNA
ctcctacaatataaattacgggacaggcacggcagccagccgtgtctgtttcgcttttgttgccaaggctgtacaatgagagagcttcggtatgactttttattccgaggattaaccacgtccgtattggagtccgtcagccgtctctctcgttgacagcagttcgatttgagcaggtagtcccgcccattttgggtgtgttcgcgtcaccaaggagattgaataggcaataagagaacggtaccgccgattgcgaatccaaatcatcaggaggtcttcatgaacatagccgttggtattgatgtttctaaggggaaaagcgtggtcgctgcgatgcgtccgtttggcgaggtcgccctgccgccgcgcgagttccttcatacaagtgcagatttgtcagctttgacggaatcactacgcttgattgatgggaatacccgtgttatccttgaggcaacaggacgctatcacgagcctattgtcgtggtgctgcgtgacgccggaatctttgtgagcattgtcaatccgaagcttatcaaggattttggcaacaattcgctccgaaaggtcaagaccgacaaggccgacgcggtgaagactgcgcggtacggtcttgagtattgggaagaaatgcgggagcacaccgaaaccgatacagtacggcagcagctcaagctgtttttgaggcagtacaacctgcacatgaaaaccgttgttgcgctgcaaaacaacctcatcttgcttcttgattccgtgtttccggaggtaaacgagctgttcaaaagcccggttcgcgatgacggacatcataaatgggtggatttcgtctgcacattttaccaccgtgactgcgtatccggtgtgagcgtttctgccttctcagagcgttaccataaatggtgtaagcgaaagggctacaatttcagcacagccaaggccgccgagcttcatgccgcgagccgcgagatggtcgtcacgatgccgaagaacgcactcacaaaggcgctcatcacatccgctgctgggcagttaatcgccgccacaacggcgcttgctactctcaaatccgagtttattcgccttgccgccactttgcccgaatatgaaattgtgaactccatgtacggcgtgggcgacatcaccggcgcacagctcatggccgagattggcgatgtccgtcgctttgcaaaccgtggtgccctcattgccttcgccggcgtggatcccggcgtgaatgaatccggcaagcatagcgctcagagtgttcgaaccacgaagcgaggttcgccgcatctacgaaagacactgtttcaaatcgtcagtacgcacctaaaaaattcaccagaggaagagccggtttaccaatttattgaccgcaaacgcgccgagggcaagccttatctcgtttacatgacggccgccgcaaacaagttcctacgcatttatcacgctaaagtcaaggagtatttgaacgggttggatagcgtggaacgtaatacataacaaatttcttcaaactgtctgcatatcggtgagcgcgtgtcgcggtcacctttttattctgctcatttccaattgtgcaaaaattttcgtgcttttttcgttttatctattgactttggttagcagga

SEQ ID NO: 4345 - DNA, 1611 bp, unidentified
  source 1..1611: mol_type = unassigned DNA; note = element_695a9dd
  misc_feature 1..2: note = core
  misc_feature 3..282: note = LE
  misc_feature 283..1488: note = CDS
  misc_feature 1489..1611: note = RE
  misc_feature 14..302: note = bridgeRNA
ctactataataaatttatgggttcggtacacgacaaccagccgtgtccgtatccatcttattgctaaaactgctataatgagagtgcaaaggtctgacgtcgcgctccttggattttcgtccgcatgaaagtctgtcagtcagcctctcatttgcagttgttcgatttatgcaggttgaaccgtcaattcgatgcgtccgtatcacaccacagtagatagaatcagcaatgagaaaaggttggggtgccattgcaaatatctatttatgaaaggatgattctatgaacgcagtcggtattgacatttcaaagggaaaaagtatggttgctgttgcccgaccactcggcgagattatcgccaaaccttttgaagttattcattctgccgcttccattaactcactaattacctatctgcacaccttagagggcaatacccgtattgttatggaacatacaggcagatattacgagcctatggctcagcagcttgccaatgcaggtttctttgtcagcacagtaaatccaaaactgattaaggattacggaaccaactctctccgcaaggttaaaaccgataaagccgacgctttaaagattgcacgctatactcttgacaactggcaggatttgtgccaatatacaagtatggacactttacgcaatcaattaaaaacactaaaccgtcagtttgctttttattcaaagcacaaaacggctatcaaaaacaaccttatcgctcttctggatatgacatatcccggtgtgaataacctttttgacagtcctgtccgcagtgatggttcacagaaatgggttgactttgcagcctcattttggcacgctgattgtgtgcgtggtatcggtttgaaagcctttaccgaacgctaccgcaaatggtgcaagcgacatggctacaattttcaagcacataagccgaaagaaatctttgaagcttctaaggaattgatttctgtttatcccaaagatgaatcatcaaagctgcttgtcaaacaggctattgaccagcttaatgctgtttctgctgcggtggagcatatcagaacagagatgaaccgtattgcttcgcaattacctgaatatcctgttgttatggcaatgtgcggtgtgggcacttctctcggacctcagcttatggctgagattggtgatattacccgttttacacgccgcgaaaaacttactgcttttgccggtgtagaccccggtgctaatcaatccggaacatatgaggctcagagtgtagccacttctaagaaaggctctccttatcttagaaaaacactgtttctgattatggattgtcttattcagacaaagccatttgatgaccctgtatatgcctttatggataagaaacgcgctgagggcaagccttattatgtttatatgactgccggagctaacaagtttctgcgtatttattacggcagagtaaaggaatatttatcttctttgcctgcgtaagattaaatatatcttagcttctaccagactggcgtgctgcggtggtctttttcttatacttttctttctgcataaatcttttttatatttttttcattttcctattgactttttatttgcagg

SEQ ID NO: 4346 - DNA, 1620 bp, unidentified
  source 1..1620: mol_type = unassigned DNA; note = element_6962339
  misc_feature 1..5: note = core
  misc_feature 6..281: note = LE
  misc_feature 282..1505: note = CDS
  misc_feature 1506..1620: note = RE
  misc_feature 13..304: note = bridgeRNA
ctcctacaatataaattacggtacaggcacggcggccagccgtgcttgtttcgtttttgttgccaaggctgtacaatgggagaacttcggtctgacctaattgtccaaggactaaccacgtccgcaaaggagtccgtcagccgtctctctcattgacagcagttcgatttgagcaggtcgtcccgcccggtatcgggtgtgttcgcgtaaccaaggagattgaatcggcaatgaaagaacggcggagccgagtgcgaagtcaaatcatcaggaggtttttcatgaacacagccgttggaattgatgtgtctaagggaagaagcgttgttgccgccatgcgcccatttggcgaggttgccttgccgccgcgcgagtttcttcacacaagcgagggcctgtcagcactatcggaagcgctgcgcttgattgatgggaatacccgtgttatccttgaagcaaccgggcgctatcacgagccggtcgttatggcgcttcaggaggctggattctttgtcagcgcggtcaaccccaagctcatcaaggacttcggtaataattcgctccgaaaggtcaagaccgacaaagctgatgcggtgaagatcgcacggtacggtcttgaatattgggaagagatgcgcgagtacacagagacagatactacacgtcagcagctcaagctattttcgcggcagtacaatctgcacatgaaaacggtggtgtcgctgcaaaacaacctcatttcactgctggactctgtgtttccgggaataaacgagttgtttacaagcccggtgcgcgaggatggccgccagaaatgggtagatttcgtctgtacgttttaccaccgcgactgcgtatccagtgtcagcattgccgctttctctgagcgttaccgcaagtggtgcaaacgaaagggctataacttcagtacggcgaaagcctctgaaatttataccacaagccggaatatggttgtgaccatgccgaaggatgcgctgaccaaggcgctcatcacctccgctgccgggcagctcgtcgccgccacagcgacacttgccaccctcaaggccgagtttgttcgccttgccgccacgctgcccgaatacgaggtggtacgctccatgtacggtgtgggcgaagtcaccggtgttcagctcatggctgagattggagatgtccgcagatttgccaaccgtggcgctctcatcgccttcgccggcgttgaccccggcgtgaatgaatccggtaagcacagctcgcagagtgtccggacgaccaagcgcggctcaccgcatttgcgaagaaccttgtttcagattgtcagcacccatctcaagcaatccccgctggacgagcctgtataccagttccttgaccgcaagcgggccgagggcaagcccttcctcgtctacatgaccgctgccgcgaacaagttcctgagaatctaccatgccaaggtcagagaccatttgaacgctttggaacaagtagattcgaatacatagccagcctctgaatttcacttaatcaggtgggcgcatattgcggccgcctttttattgtgctcatttttctacccagaattttcttggatttggggcttgacttttgttagcagga

SEQ ID NO: 4347 - DNA, 1566 bp, unidentified
  source 1..1566: mol_type = unassigned DNA; note = element_6962484
  misc_feature 1..4: note = core
  misc_feature 5..527: note = LE
  misc_feature 528..1556: note = CDS
  misc_feature 1557..1566: note = RE
ctcactggtctaccttccttgtgtcagcgttcttcgataggacgctgatgcaccccgggtgctgccgggccatcgcccagctcgctcgacactgttgatgtccagcatgagatctgcgaggtctggtggctgcccgggacgtgtggaccgtcgatagggctgagcgccaaacccggtgacgggggcgagcgccgatcagtgagcgaaccggcagacacgtcccggctcccacagcaccgtgagacgagggcgcctccccactggtacgagcagcaaggaggctgacatgaagtctgccaacacacccaccatgaacaaaccctgtgcctgcccgaggaacctcccggcgacgtgaccgccggtctggactgggcccgtgacgaccacgcggtcagcgtggtagatcatcgcggccgtgaaatcgaccgatgcatgatcgaacacaccgcggaggggctgcgcgccctgctcaccttcctggcccgcaacaacgccaccgaagtcgcgatcgaacgcccgacggacccgtgatcgacacgctgctggacgccggcatcaccgtggtcgtgatcagcccgaaccaagtcaagaacatccgacgccgatacggctcctccggcaacaaggacgaccggttcgacgcgttcgtcctcgccgacacgctccgcaccgaccgggcacgactgcgcccgctcgtcccggaccgagacgacacgatagctctgcgccgggcatgccgtgcacgcaaggacctcatcgcccaccgcatcgcgaccggaaaccagctgcgcgcgcacctgcgcaacgcactgcccgccacaatcggactgttcaaggacatcgactccgacatagctctgtcgttcctggaacgcttcgacacccaagacaagctggactggctcacccccaccagactcggcacctggctgcgcaaacagggatactccggacgcaccagctccaccgtgctgcacacgaagatcctcgccgcaccccgcggacccgaaggtgacttcgccacagccctggccacgatcaccgccagccacgtcgccgtcctgcgcaccctccaggcccagacccgcaccctggagaagcacatcgatcagcagctgaccacccaccccgacgcgcacatcttcaccagcctgccccgatccgggcgcgtccgcgccgcccgactgctcgccgagatcggcgactgccgctcccgattccccacccccgaagcactcatctgcctcgccggagcagcaccatcgacccgccaatccgggaggatccgcgtcgtcggattccgttggtcctgcgacaaacaactccgcgacgccgtcaccgacttcgccgccgacagcatcaaagccaacccatgggccgcgcacctctaccaacaagccagaaccagaggccacgaccacccccacgccgtccgaatcctcgcccgagcatggctcaccatcatctggcactgctggcaagaccacgtcccatacaaccccagcaaacaccgagcactccagccctacctcacccccgaaaacaaggcggcttgacatagggctt

SEQ ID NO: 4348 - DNA, 1388 bp, unidentified
  source 1..1388: mol_type = unassigned DNA; note = element_6965045
  misc_feature 1: note = core
  misc_feature 2..90: note = LE
  misc_feature 91..1122: note = CDS
  misc_feature 1123..1388: note = RE
  misc_feature 1163..1383: note = bridgeRNA
caatggaatggactcctcctcccctcaacggcatctaagtgccagactggagaagctaatcaaccagtcaacggaaaagaggagtccacgatgaagcttaatcgcattggaattgatttggcaaagaacgtatttcaattgcacggtgtagatcgacacgaaaaagcagtattcaaacgtcgcttgaagcgtgatcagtggctgagagtactatgggagaacacagctacagattgtgtgattggcatggaagcctgtggcggtgcacatcattgggcacgcgagctgcagtcacgaggttacacggtcagaatgatcccacctcagttcgtcaagccgtacgtgaaaagcaataagaacgacgccaacgatgccgaggcgatctgtgaagctatgagtcgacccaacatgcgctttgttgccgttaaaagtgtggaacaacaagatgtccaggccattcaccgcatccgagcggagttcatgacgcaccggactgcgaaggcgaatcagatccgggggctggtcaccgagtacggcatagtggcaccccagcaaatgacttcattgcgagcagctattccctgctggctcgaggacgcagagaatggattaacgatccggttccgatctctgctccatgggttgtgggaagacctgaggcgattcgatgagcgggttgcggagctggacgctgagatcgaggtgatcgcgaagaccgatccagtggctcaacggctacaacagttgcggggtgttggtcctctgatcgcaaccgcgctagtggcaagcgttggcaatggacaacagtatgccaaaggtcgccagatggcggcagcgttggggcttacgcctaaacaacacagttcagggaacaaggagcgattgggaggcatcagcaaacggggagacgtgtacctgcgcagcatcttgatacaaggtgctcgctccgttattgggcatgccaagcacaaagaggatcggttgagtcggtgggtgacgcagctggcccagcgccgtcataccaatgttgctgccgtcgccctggcgaacaagacggtgcgtatggcctgggcgatgatgagaaatgaatcggactatgatccggattttgttgttggctaacgcaaacacagatcactaattgacagacaaggaaccaacatacgattgcaaagtaagctgaatgatgacgaacaggtcgaaccggcgtcggtcaaacccgtaaggggccgcgtactcagagtacgaaaaagcaattgggagctggcgcgcgaataaaccattatggcccggcatcagcgtgtgccacctctaaaggccggatatacgtatgcagtcgtgcctaccgtcatcaaacagagtacttgcaatgaggaggagtccatata

SEQ ID NO: 4349 - DNA, 1306 bp, unidentified
  source 1..1306: mol_type = unassigned DNA; note = element_6972775
  misc_feature 1..3: note = core
  misc_feature 4..213: note = LE
  misc_feature 214..966: note = CDS
  misc_feature 967..1306: note = RE
  misc_feature 36..197: note = bridgeRNA
cattgtatattatttaatcgttatatatttgcataaatttacaatatcaaagtgtggaataaggcagatacttccatggacataaagtccgagagttatgtttagcccccacactttcacatcagaaaccggatagttcaatgggctttgaccccgtattcgcaatgatggctcacgatgtatagatgttgtttaatagaaaatttatagactatgacctacgttggaattgatgtcagcaaggcgactttcgtcgttgcttattcttctgccaaaaacagtaagactaaaactttcaagaataccactaaaggcgttcacgagttcattcaaaccttgtctgccaatgagcatcattgtgtgctggaagcaaccggcaattacagttccctgcttgtttatcttctttcgcgagcaaatatcacagtgagtctggagaacccactcaagataaagaacttcgcccgtgtgatgctttcggttaccaagacagatgagacggatgcacgcctgatagccttgtatggggagaggatgcagcctgctccttacaaacttcgtagcgatgccatccttaccttgaaacagaagcgaacagtcatacgccaactcaagaagcaacttatagccacccagaacttgaaaggttccatggaagccctccctttcttcgaccctaaatgcaagaaagccattgagaagacaatcgtctttcttgaaaagcaaaccaaaggattggaagaagagttagcagccttggcacaaagcgagtacaagaagcagatcgacttgcttacctcaattaaaggtatcggcgtcacgctggcggcagccttgataatggctacgggaggcttcacgtactttgataatgccaagcaactcacccgatacttgggcttatcacccttaccaacaatccggtacgtcagtcaatgtcaaaggtcacatcaatcgcaacggtgattcttccttacgtggtcagctttatatagctgccatggcatctctgcgatgcaatgccgaatgcaaggcgtgttttgaccgattacgttctaacggcaagccgggaaaagtggcggttgttgcagtcgccaacaaactcgtaaggcaagcctttgcggtagtcactcaagaaaagccatatgtcgatggattcaagtctgaaaagccataatagctcctgcgggagggaacgccatgcagcaaggggctgcgcagtcagccccgacgagcttccgtgaatgagataattgcatatctatgctaattatcgttaaccgtattcgattttcttattatagtt

SEQ ID NO: 4350 - DNA, 1412 bp, unidentified
  source 1..1412: mol_type = unassigned DNA; note = element_6978629
  misc_feature 1: note = core
  misc_feature 2..132: note = LE
  misc_feature 133..1146: note = CDS
  misc_feature 1147..1412: note = RE
  misc_feature 1174..1408: note = bridgeRNA
atggtatgggcgcctccacccagcaacctgccgtttggcagcatgaggagtaaaggtggatcctcgctgcagcggcatcgatgtgccaaagtggcgttgcgttgtacaaccacttgagcaggaggatccgaaatgaagcataccgtgatgggaatggatattgccaaacgtgtttttcaactgcatgcagtcgatcccgagacgggcgagattgagcgcatcaaactcgctcgcaatgaagtcctcgcgttctttgctcagcgctgcccggcgttggtggcgattgaagcctgcggcagtgcccactggtggggccggcaattgatggctcttggtcacgacgtgcggctgatcgcccccaagtcggtgcgtccattcgtggtcggcaacaagaccgatgccgccgatgcacgggcgatctggaccgccgtacagcaaccgggtgcacactttgtggcaatcaagaccgagcagcaacaagccattctttcgttgcaccggatgcgcgcgcaattgatgaagttccgcatcatgcaaacgaatgcgttgcgcggattgctctatgaatttggcgttgtcttgcccgaaggggttcgcgccctgacgaaagcttggccagcggcgatggccaccgttgccgatcaactgccggggatgctgatcgacagcctgcgcgaacaatgggcgcgagtgcaaaccaccgaggccgagatcgccgcgattgagcgacgtctggccagcgcattgcgagagaatccatcctgtcagcaaattgcggccattcctggtgtcggtttgctcaccgccacggcggcggtagcggtcatgggcaatgcgaacaccttcaagtcgggtcgggaattcgccgcctggctcggtctggtgccacgacagacaggaaccgggggacggatacgccaactgggcttgagtaaacgtggcgacacttacctacggaccctcttgatccacggggcacgggcagtgattgccaaagcccaccattcgccctggatcgaggcactgctcaaacgtcgtccttacagcgtggtaatagctgcactcgccaataagttggctcgcaccatctgggcagtgctggcgaaaaaccgaccttatgacccggcagcgttgagtgcagtttgaattacgtaccatgagcaattgaacaagaaacgtcttcaaggagcgcttgtgatcaacacatgatggcaaacaggtaggaccgggacgaggacaccctgatagggaatgtgaacttcaagttcgatattcagatgaggacctcgtcagcgaattccatcagggccagcaggcttactgcctgcaccaacaggccggatataagactgcgaccctttcctgcaaaccaccatgtaaaaatcacttgatctcccggaggcgtccatata

SEQ ID NO: 4351 - DNA, 1512 bp, unidentified
  source 1..1512: mol_type = unassigned DNA; note = element_6986fd3
  misc_feature 1..2: note = core
  misc_feature 3..78: note = LE
  misc_feature 79..1188: note = CDS
  misc_feature 1189..1512: note = RE
  misc_feature 1250..1499: note = bridgeRNA
tgatggggtggatggccccctcacggcatcgatgtgccaaagttgggtgtcagtaacaccaacggacgggagccatccatgaaacaggttacaacgatcgggctggatttggccaagaaggtattccaggtgcatggggtcgatgcagccggagtggtggtgttgcgccggtcgctgcgccggcggcaggtcttggcattctttgccaagctgccgtcctgtctggtcgggatcgaggcgtgtgcgacggcgcattattgggcgcgcgagatcaccaagctggagcatcaggtgcggctgatcgcaccggcttatgccaaggcctatgtccgacgcaacaagaacgacccggcggatgccgcggcaatctgcgaggccgtgagccggccttcgatgcgctttgtcacgatcaagaccgaggcgcagcaggccgccgccggggttcacaaagtgcgcgagatgctggtcaagcagcgcaccatgctgatcaatacattgcgcgggctgatggcggagttcggcgttgtggttgccgagcgccctcgtcacgtcagcgagctgatggcgatcctggcggatccgacggaccggcgtatcccgacaccgctgcacgagggtttgtcggccctcgtcaagacgttgggcgggcttgagcgacgcatcgagatcgtcgacaagcagattgtcggctggggccgcgacaacgcgacctgccggcacctgatcaccatccccggctacggaccggtcctgtccagcgccatggcggcaatggtcgtcgccccggcggtttttgcgggcgctcggcatttctcggcttcactcggtctggtgccgcggcaggatggcaccggagggaagatcaaactcgggccgatcagcaaacgcggcaacggctatttgcgccggttgttggtcaacggtgcgatggcggtcttgtgcagcaagcgcgccaaggaggatccctggctggcccaactgctggagagcaagccgcgcaaggtcgctgcctgcgcgctcgccaataagatggcgcgcatcggctgggcggtgatgatgcgccaggaggacttcagccgtcggcagcacgatcagccgcgccctaccccgagccagcctggcaccgtgctccccgccgtcaagaccgctgcgcgcgcgcctgcggcggtggccttcggccagtcttgaccgcggctgcgcccggcgccaccggcaaaccaggtcgggacggagaaacggccctctgatcgaaccaagaaacaggacttgagagacacacaggacttgcgagggtgaagacgcgtgatggcatcgtcggtcgaccgacggatcgagagatacctccccgaggacatggggcattgcgaccccgggagcctgatcagacctcgatccacggatcccatcagggcctgcggccaatgccgcgctattcaggccggacacatgaccgcaagcgacgttcgatgcagatacgcgaaaaatccttgcaagccgggggccatccacaca

SEQ ID NO: 4352 - DNA, 1625 bp, unidentified
  source 1..1625: mol_type = unassigned DNA; note = element_69a18b6
  misc_feature 1..3: note = core
  misc_feature 4..275: note = LE
  misc_feature 276..1445: note = CDS
  misc_feature 1446..1625: note = RE
  misc_feature 13..256: note = bridgeRNA
cttatataatgtatttaggttgttaaaggtaacctataatcctttttcaactaagtattattcagttttactgtataatattgttattagatagagtatactcgttgtctccttgagatttaatctcgtacttgaaagagtgagtcctctaatcttttaactgtttacgtataagttagatgttgactgattctcagtacttcgtatctcccataaggcagtaacgttattagatttagaaggttctatctaaaatttttattttgaggtatcaaatgttttatttaggtattgatattggtaaaaatactcatgtagcttcattaattgatgataagaaaaaagtggtttttaaggctttttccttctctaactctgttaaaggtgccgaaagcttaatttctaagctgagcaatttcaaaaatgaactcgaagttggcatggaggctactggtcattattggctttctatttactcatatcttgtcaaaaacaactttactgttcgtgttattaatcctattcaaactgatggttggcgacaaggtatagaaattagaaaaagaaaaactgatattatcgattctcttttaattgcagatcttctacgctatggtgactttgttgaatcttctcttttgagcgaagattttatgtctttaagaaatctttctaggtttagatcttacttgatttcttctattggagatcttaaaagaaaaactattgctcttttagatcaagtttttcctgaatatgcttcttcttttagcgatattttcggtaaaacttctaaacaaattcttgaaactttttcgtctccatctgattttgaaaatatttcttctgatgatttgagtgcttttcttgagtctgtttctaggaaaaattatgcttctaggaagattgatgagctttctagaaaagcttctacttcttttggcattaatttttctcttgactctttttctcttcagattaagatgcttattcaacaaatttcttttattcaaaatcaggtttctgatattgataaagagattgaggagttatttaaaaaaattaattcacctattactacaattcctggaattggtccagttaatggtgctactattcttggtgagattggtgatattagtagattttccaatccttctaagctagttgcttattctggtattgatgctagtgtatcgcaatctggtgattatgagtctattcataatcatatgagtaaaagaggttctccttaccttagacgtgctttatttcaagctgctttaattgcagaatttaatgactctgttttttctgcttattatcagaagaaaattagtgaaggtaaacatcatctagttgctactaatgctgttgctagaaagctttgtcatactatttttgctgttttaactaaaaatgaaccttatcaaatacaaagttagtttttgtcttattgcaaattaatttttgaaaaatcacaattttaaagttaaaaaccatgctaaccctatttttaaattcataaattttaggatcttttttcatgcttatttttattcagtttttatcaatattaatttttatatttttatcatttcacctattgacttttaatagttagt

SEQ ID NO: 4353 - DNA, 1210 bp, unidentified
  source 1..1210: mol_type = unassigned DNA; note = element_69a2d9e
  misc_feature 1..3: note = core
  misc_feature 4..289: note = LE
  misc_feature 290..1195: note = CDS
  misc_feature 1196..1210: note = RE
  misc_feature 12..210: note = bridgeRNA
cttgtatcttgtctacggtcgtaaaatgcgaccgcgcggcgggcgcgccagaccgtccccggctccggtccgcaaagagagaccgcaagaagcgttagggtcgtcgcgcccgccttcctaatggagagagcccgaacagttgcctgggccttcgagacaaccagaagagcccgcatccgcaagaatgggcccacgacgacaggagaaggaaggaggccgagcagtgagtgctactactactgcgacgaagctttatgtaggagtggacgtctccaaggggcacctggaggtgttcgtgcatcccaccgccgagcgattcggcgttcccaacgacgattcgggggtcgaggagcttctcgctcggctcaaggcatcgagtagtcccgcggcgttggtggttttggaggctaccggcggcttcgagcgtccggtagccgctgccatagcggcctcggggttggcagtcgcggtggtcaaccccaggcaagtgcgggacttcgcccgcgcgatgggcaggctcgccaagaccgaccggatcgatgccgagagcctagcccgcttcgccgaggccgtttcccctgctccccgagccattcccgacgaggaagccctcgtgctgggagagatactagcccgccggcgccagctcgtcgggatgctcaccgccgagaggaaccggctcgttacggcgaccactaaacgggtgaacaagcgcatcgaagctcacctccgatggctcgaaaaagagctcgcgcgcaccgagcgcgacctcgaggaggcgatcgaagagagccccgtctggcgggagaacgaaaccctgcttcgcggcgtgccaggcgtggggcccatcttagccaagacgctattggccgagctgcccgagcttggcgagcttaagaacaagcagctagctgcgctcgtgggggtcgctcccttgaaccgtgactctggcatcctacgaggcaagcgcgccatttggggcggtaggggtggggtgcgagcggcattgtacatgggggccttggtggccacgcgctgcaacccaagcataaaggtgttctacgagaggctgttagccgccggtaagccgaagaaggtggcgttagtggcctgtatgcgcaagctgctagttatcctcaacgctatcctcaggaaccgcactccctggaggccatctcacgctctgaccccttgactttaaagacagttg

SEQ ID NO: 4354 - DNA, 1555 bp, unidentified
  source 1..1555: mol_type = unassigned DNA; note = element_69a69d6
  misc_feature 1: note = core
  misc_feature 2..89: note = LE
  misc_feature 90..1148: note = CDS
  misc_feature 1149..1555: note = RE
  misc_feature 1320..1546: note = bridgeRNA
taatgggatggcccggccgtgctcagcggcctaatttgctggactctggctgggagggcgtcaagcaagggctcaaggaggagcatgcgatgcgcacatctcagaagacagccggaatcatcgcgaccatcgggatcgacatcggcaagaacacgttccacctcgttggcctcgaccagcggggtgttatcgttctgcagcagaaggtgtcccgcggtcagctcgaacgccatctcgccaacattccgcgctgcctgatcggcatggaggcgtgctcgggctcccatcacatcgggcgccagttggcggcgctcggccacgatgcgcgtctgatcccggcgcagtacgtcaagccgttcctcaaaggtcacaagaacgactaccgcgatgccgaggcggtcgccgaagcggtgcagcggccgaccatgcgcttcgtgacgatcaagacgccggaacagatggatttgctggcgctgcatcgcgtgcgttcgcgcctcgtcggccagcgcaccggggtgatcaatcaaatccgcggcttcctgatcgagcgcggcatcaccgtgcggcaaggagcggcgcccttgcgcagggtgctgccggatatcctgagctcgaacactggcgtgctctcgccaaggatggttggcctcatcgccgacctagcgcaggactggcgccggctggacgagcgcattgcggcggtgtcggccgagatcgaagcgctggcgcggcaggatgaaaattgcgagcgcctgatcaccgtgccggggatcggcccgatcatctcaagcgcggtggtggcagcgatcggcaatggcgccggcttcaagcagggacgcgatttcggcgcttggctggggctagtacccaagcaggagtcgacgggtgaccgcacgatcctgggcaagatctccaagcgcggcaacatttacctgaggacgctgttcgtgcaggccgcgcacgtcgtcctggggcggcggtcgagcgcggccatgcggggtctgtggccctggatcgagcaagcatcgaaacggctgcaccgcaacctgctggcgatcgcgctcgccaacaagctcgcccgcatcgcctgggccgttctcgcgcgcgggcacgcctatcagacgaggattgtcgccaatgccgcgtgacaacaggctcgctcaggttcaccaaggggatgcccgccacccctctccgccaccgtcgctcgccatattgggtgagcgagcgacggtggctccgaggggatggcttcacatgatcccaccgacatcaaccatcagaatggagaagatcaactggtgcagtattgaaagcttccccgccgaggtctgcgagagggaatgaaaagatggacgaacggtctgcccggcgcggccaagagactggatagcgccccggccctttgaggccttcgccgtaaatcagtctggctgcgcggatacccatgatggcccggagcgactgctccacgtcagaggcctgataccattgatgcagctctcacgttcgtcgctcttgaaattcctcttgcaaggcacggccgggccataca

SEQ ID NO: 4355 - DNA, 1400 bp, unidentified
  source 1..1400: mol_type = unassigned DNA; note = element_69b652e
  misc_feature 1..2: note = core
  misc_feature 3..84: note = LE
  misc_feature 85..1173: note = CDS
  misc_feature 1174..1400: note = RE
  misc_feature 1117..1388: note = bridgeRNA
tgatggggtggatgcccccgcccgacggcattgcgatgtgcccggatggtgattctgaagtcgccatagaaaggggaggcatccatgaatgaggttggcatcgtcggcgttgccctggcaaagcaggtctttcgggttcacggcgctgcggcggacgggcgggtgctgttccgcaagaaattgtcacgcccgcagttcccgaggttccaggcggccctgcctcggtgcgtcgtggcgatggaggcctgcggcaccgcgcattactggggccgggagttggccgggcacgggcatgacgtccggctcatcccgccggtccatttgaagccgttcgtgaagcggcagaagaacgatgcggccgatgcggaagccgtcgccgaggcggccctgcgcccgacgatgcgcagcgtggctgtgaagacagccggacaacaggcgcgggcgatgcttttccgcacccgcgatctgcccgtcggacagcgcacccagttgatcaatgcactccgcggccatcttgccgggcatggcatcgtcctggccaggggcatcggcaatatcgaccgtctcgccacgcgcctcgaagaagaaggccttcccgatctggtccgggacctggggcggctctacctccaccggatcgccggactcagcgacgaaatcgacaagctggacgggcgcatcgcggccgccgcgaaggaaagcgatgtcgcgcgcagacttcagacgatgccggggatcggtccggtctgtgccatggcgatcgccaccttcgcgtccgacattcgggaattccgccgggcgcgcgatttctcggcctggctcgggctcgttccccggcaacattccagcggcggcaagcagaagctcggccgcacatccaggatgggccaacgcgtcgccaatggtcgctcggaccagtggcgcaaccattggcaactccggcgcctgctgatcgtgggggcgatgtccgtggtgcattggaggggccgcgatgggggcgcccgggtcgtggctctcccgcatgctggtccggaaaccgcgcatgctggtcgcgatcgccctggccaacaagatggcccggatggtccgagccatgctctcgcgcaacgaggactaccgggatccggtcggcgcggtctgctgaccgcggccgccggagtgtcggcgatgtgaggaggacgacgaccagcatgggcaaatgatcgacaagatccggaacgggaaaaccagtggcgtccaacgcgcccgggctcgcaattttgatctggaccccggtccgcgcatcaccataccggcccgcggcatgtcacggccgcacctgagaggcctgaaacatgaccgcgcccgatcacatgctcagaaggtcagaaaatccttgcagcgcagggcgcatccaaaca

SEQ ID NO: 4356 - DNA, 1361 bp, unidentified
  source 1..1361: mol_type = unassigned DNA; note = element_69b9b3e
  misc_feature 1: note = core
  misc_feature 2..71: note = LE
  misc_feature 72..1103: note = CDS
  misc_feature 1104..1361: note = RE
  misc_feature 1106..1351: note = bridgeRNA
tatgggatggcccgcccctctcttccgacagcgtaggctggcggtggctattggagggaaaggattagccaatgaagatcgcgattctcgggatcgacctgggtaaaaacagctgcagcctggtggggttggaccacgccgggacggtggtgaagcggcgccgcatgcgaccggagagcatccccgccttcacccggacgatgccggcatgcaccgtcgcgatggaggcttgctgcggtgcgcatcatttcggccgactgctgagatcgcagggacacacggtgcggctgatgtctccggagtacgttcgcccctacgtcaaggcgcagaagaacgacgaccgggatgcggaagcgatcgccgaggcggcgacccgtccgaccatgcggtttgtcgagctgaagagtgaggagcaactcgacatgcagaccctgcacagggttcgcgatcggctggtgggtgagcggacggcgctaatcaaccagctgcgcgccatcctgctcgatcgcggctgcgccgtcccgcagggacgccgcaagctggagcaacaccttgcggcgatgccggacccggacaacgacacctctctcagcccacgggtatgccggttgatcgacgacatgcgcgcggaatggctcgagctggatcgacggattgccacgttcgacaacgagttcgccgcgcgcgcccgcaacgacgcggacgcacggcggctgacgaccattcccggcatcggcgtgctaaatgccacggcgttggtagccgcgatcggcaacggcgagacctttgctcgtgggcgcgatctcgccgcctggcttggcctggtaccacgccaagtcacgaccggcggcaagccgcgactggtcggcattaccaaacgaggcaacaagtatttgcgcaagctgatcatccacggtgcccggtccgctttgccggtgctggcaagcggtcccacacctctcggagagtggctgcgggcgctgatgaagcgcgtgcacaagaatgttgctgtggtcgccctggctaacaaactggctcggatcacgtgggccgttttgcggcggggagaagagttcgccgcgaccgcccgggcagcaacgtaacggagatcggccgaaaccgcggcaaggggtgctgcgcggccactgatgtctgctggtggtgaatgcgagatggcctgacagtcgaccggcgttctggacacctgatttaaaaaatggcgctcgacgccgcgaagtttatgaggaccggaacgcgcggatctccatcttggccggggcgttgcccacaggccggatacgttgacgcagactgcttagatcggattgcagaaagcgcttgcggacggggcgggccatacg

SEQ ID NO: 4357 - DNA, 1428 bp, unidentified
  source 1..1428: mol_type = unassigned DNA; note = element_69bc491
  misc_feature 1: note = core
  misc_feature 2..63: note = LE
  misc_feature 64..969: note = CDS
  misc_feature 970..1428: note = RE
  misc_feature 1207..1422: note = bridgeRNA
taatgggatggtccgtcgcctttaacctcagcggaggtataaggggtgaacaggaggcgtcccatggagattcacacgattggcatcgatctggcgaaaacagtctttcacctggttgggctaaatgcgcacggtgatgtggtggtacagaggaagtgttcgcgaagccagctgcttcggttcacctcgaaccttcgtgtttgtttgatcggcatggaggcttgcggaggtgcccattttctaggtcgggctcttcgcgatcaagggcatgatgtacgcctgatgcctgcgcagtacgtgaagccgtacgtgaagaccaacaagaacgactacatcgatgcggaagccatcgccgaggcagttggtcgtcccaggatgcgctttgtgcccatcaaaacggatgatcagttggatctacagtcattgcacaggattcgcgagcggtgggtggtgcggcgcaccgcagtgatcaaccagatccgcggattgctgctggagcgcggcatcaccatccgcaagggacgactgtatatcgaagcttcgctgcctgcgattctggaagacgccgacaacaggctctcgggcatattgcgagcgctactcgcacaactgcagttggagatgcagtatctgggaagacagatcgaggagtccgataagctgatcctcgaaatcgccaagggaatggactcttgccggcggctgatcgcgatccccggaatcgggccgctcactgcaactgccacgatcgccgcgatcggtaacggagtggctttcaaaaagggccgcgggttcgctgcctggctgggagtcgttcctggcgagcattccaccggcggcaagcagaagctgaccgggcaccagcaagcgtgggaacaagtatctgcgcaaactgttcgtgcagggagcgcacacggtcttgctgcagaagaacaagcaatcggctggcctgagtacgtggttggctgatctcacagcacgcaaacgcaagcaggtagcgacggtcgcgatggccaacaagatggctcgcatggtttgggcggtgttgacaaaaggagaagcctatcgcccgccactgttgctccaacccgccgaaatggtttgcagatgacgcctgtcgaacgacaggcttggaaatcgcaacgcgattcccacatccgcaaaccatctactgcggctgactgatctgacttttccaagtttctgccaggtttgctgacgaaccacgagatggcacaacggtcgatcccggcgctctcgaaacctgtgcccgtcaaaagccttcaaaggccgtgtaactaaataggacgagggcgcagcgcattccatccaggccaggagttcacctccaatcaaaggccgtatacatgtgcgcagaccattccgccaacctcattcttcgcttgcaaaacggcggcggaccataca

SEQ ID NO: 4358 - DNA, 1350 bp, unidentified
  source 1..1350: mol_type = unassigned DNA; note = element_69e09a9
  misc_feature 1..2: note = core
  misc_feature 3..78: note = LE
  misc_feature 79..1104: note = CDS
  misc_feature 1105..1350: note = RE
  misc_feature 1108..1346: note = bridgeRNA
ttaatgagatggtcagcctgaccgaaatggcccgatcggcttacgctgatcgggccatttcctttttgggaggccaccatggcgaacgctacgctgctcggcatcgatctcggcaagcactgctttttccttcacgcgcaagacgcacgtggcgcgcaggtatggcgcaagaagatgacgcgcaaacagctctatgcgtgcttagctaactgtcctgtggccgtgatagcgatggaatcttgcgcgggcgcgcactggctggcacgcaaatgtcagtcatacgggcatcaggttcggttgatcgcgccgcagttcatcaagccattcgtcaaaggcaacaagacggattttgccgatgctgaggcaatctgcgaggccgcctctcgccccgccatgcgctttgtcgcagtcaagacagccgagcagcagacgctgctcgcatttcatcgagtgcgtgaggcgcttgtcggtgaacgcaccgcgaccagcaatcagattcacgctttcttgctcgagttcggcatcagtctgccagtaggcacgctggccattacgcgtttgcctgtcttgcttgacgatcccgcaaatgcactgcctcccgcgatagtcaccttgttgctgcgcttgcatcggcgttacgcacagttaagccaggagatcctcgagcttgagactcacatcaagcaacagacgatcgaagacgaagcgggccagcgcctgctcacgattccgggcatcggcccgatcactgccagcagcttgctggcaatggccggcgacgcgcgcgcgttcaaatgtggccgtgacttcgccgcttccctggggctggtcccgcgccagcattcgaccggaggtcgagcgaccctcctgggtatttccaagcgcggcaacaagcaactgcgttgtttgctcgtgcaaggcgcgcgagccgtgatgcgctatgccgagcggcgaaccgatgcgctcggttgctggctgcaggcgttgctgcgacgtcgtcacagcaacgtcgttgcctgcgcgcttgccaacaaaatggccagaatcgtttgggcgattctggccaagggaggcacataccgggcgcaacgggctatcgcttgaagtgcctttccgcctgcttttgcgaccgctgacctgcgatgaagataaacggctcacggcccgactgacaacctgacaaacaatccagtcccgcagactgaggcttttttgaggacagtcgggcgcggcttctcatcgagggccgggcgctctgatccgcgcccatttcgagcccggatacatttgcgcaagcccttttatcttaggtcacagttcgaggttgcaaagtgacggctgaccatacat

SEQ ID NO: 4359 - DNA, 1394 bp, unidentified
  source 1..1394: mol_type = unassigned DNA; note = element_69eb34d
  misc_feature 1..2: note = core
  misc_feature 3..121: note = LE
  misc_feature 122..1156: note = CDS
  misc_feature 1157..1394: note = RE
  misc_feature 1172..1389: note = bridgeRNA
agatacggtaatgggccgcacctccggtgtctggaggagtggctgtcccccgatcatgatggagtgccggggttttcaggtgtggtgcctcttagccccgccagtctgatggaggacagccgtggagcattatgccggattggacgtgtcactggaactgacgagcgtgtgtgtggtcgatgggcaaggccaggtggtgcgcgaagcgaaggtcgcgagcgagcctgaggctctgatccgctttttgcaggcgcaaggtctggagattgcgcgggttggcctggaggcagggccgctgtcgcagtggctgcatgctgggctggttgctgccggctttgaggcggtgctgctcgagacccggcacgtcaaggcggccttgtcggcgatgaccgtgaagaccgaccggcgcgatgcgcgtgggattgcccagcttctgcggctcggctggtatcggccggtgcatgccaagtcggccagtgcgcaggaagtgcgctcgctgctcacggctcgcaagctcatccagggtaagctgctcgacatcgagagcggcatccgcggggtactgcgcggctttggcctgaaggtcggtccgatcagtcgcggccgcttcgatgcacggatccgtgagctcgtcgaaggccaggccatgctcgacatggtggtcggctcgatgctggcagcccgcaccgcactgcaggccgagtttgcacgtctccaccgagcgctgctcgcgctcgttcgtgcagatcctgtctgtcgtcagctgatgagtgtccccggcgtcggcgcggtcgtcgccattaccttcaagagcggcatcgacgatcccagtcgctttaggcgctcgcgcgacgtcggtccgcacttcggcctgacaccgaggaagtaccagtccggcgagctcgacgtcaccggctcgatcagcaaggtgggcgaccggatggtgcggaccgcgctctatgaggcggccagtgtgatgctcacccgtaccgtgcgcatgtcgcccctcaagagttgggcaatgggagtggcgaagcggcgcggcgggaagaaggcgcgagtggcgctcgcgcgcaagctgggcgtcatcctccaccgcatgtgggtcgatggcgccagcttccgctggaccagcgagacggacgccatggcatgagaaggagagcttgagagatcgggtcagctagtcagccggcccgtagtcccaccgctgggacggtgaagatggtgaagccgcaatgtccgcagtcgctgccttgtagacgacgctggaaagataggctcaccgcttcctctgatcgtatgatgtggcagctcaaggctgaccacggacagaagcaagtaaccagcggcaggacctaaccggggcagcttgactcatggcccattacaga

SEQ ID NO: 4360 - DNA, 1413 bp, unidentified
  source 1..1413: mol_type = unassigned DNA; note = element_69eb91f
  misc_feature 1..2: note = core
  misc_feature 3..62: note = LE
  misc_feature 63..1097: note = CDS
  misc_feature 1098..1413: note = RE
  misc_feature 1179..1404: note = bridgeRNA
taatgagatggtccgccgccgagtaggataactcggcagtttacatctggaggatcatcgaaatgcacatcgcatctatcggcatcgatttgggcaagaccaactttcacctggttgcactgggagaacgcaacaaagttctggctcgcaagaagttctcacgcgcacaactgctggcctatacgacgaatctgccgcccacgctgatcggccttgaggcgtgttccggagcacactttctgggagccgccttacgaaaacaaggccacgaagtgcgactcatccccgcccagttcgtaaagccttaccggaagtcgaacaagaacgacttcatcgatgcggaagcgatcgcggaagctgtgaccaaactgaacatgcgctttgtgccgatcaagacgcaggagcagctcgatgtacaagccctgcaccgagttcgggatagactgatacaaggtcgcacggcactgataaacgagatccgcggctttctgttggagcgcggcatcaccttcccggcacagcccattcacctgcgcaagaatcttcccatcgttgtggaagatgcccagcaaaacctgacccctcgtttgcgctggctgctagatcggctgtggcaggagtggaaacagatggagatcgatgtccagaccgttaccgaccagattgagcgcattagcaaagaggatgcgcgttgtcagcgtctatgccagattcccggcttcggtcccctggtctcgaccgcaactgtggcggccattggcaacggagcagcctttcgccgagggcgcgatttcgcggcctgggttggggttgtaccccgacagtactccaccgggggtaaacagaagctgctgggcatcagcaagcgtggcaaccgctatctgcgccgcatgctgatccacggggctcgtgcggtactgtttcgtgccaaatacgacacaagaggatttgggcaatggttccaacgcctggctcagcgtgcaccgcgcaacaaagtcatcgtagccatcgccaacaaactggctcgcatggcctgggccgtgttatccagcggcaaagatttccagtatcagccgctgcagacgaccgctgcgtgataggaccgtggaaaagacgctgcgcttggaaagcacaaaacgctttccacttttccaccgtcccgacgacaaactttcaagttccaccaaggtctgctgaggagagaaggagacgaaataatagtccaacggcgtgccggaatacctgaacactcaaacgcgtccttagtgaccgagggatttagaaggaccgacacgcgcggatcatcatcgagtgcccggagagcattctccactaagaggccggatacatttacgcagactattattttggcaaaccttcaaaacctcttgcagtccggcggcggaccataca

SEQ ID NO: 4361 - DNA, 1565 bp, unidentified
  source 1..1565: mol_type = unassigned DNA; note = element_69edc10
  misc_feature 1..2: note = core
  misc_feature 3..271: note = LE
  misc_feature 272..1459: note = CDS
  misc_feature 1460..1565: note = RE
  misc_feature 10..252: note = bridgeRNA
gtataataaatttaggttagtaaaggcaacctataatcctttattggctgcaagattatacgcaaccgtgtataatctagttattagatagagtgatgtcgttttttccttgaagcattgacttcgcacttgaaagactgacacctctgtccgataaactgattacggataagttggatgttgactcacgggagtacttcgaatatcagacaaggcagtaacgtttattagtcaggggatcctatctaaaatacttttttaaggtggtcctatgcattacctcggaattgatattggaaaaaatactcatgtggcttctttgattgataaaaatggcaagactttgtttaaagccttttctttttcaaactcaaccagcggaggtgagagtcttctcaaaaccgttggtaatttcattgcttccccttctgatctggcaatcggcatggaagcaactggtcattattggctgtctctttattcgtttctcgttgaacaagactttcttattcacgttatcaatcccatccaaactgatggttggcgaaaaggagtcgaaatccgtaaacgtaaaacggatattattgattcacttctgattgctgatctgattcgatatggcgatttctttgaaacttctctggctgacgaaaatacccttgcactgcgtaacctttgccgattcagaaattatctcgttggttcaatcagcgatcttaaacgaaagaccatttgtattcttgatcagatctttccagagtatgctggggtgttttcggatatcttcggtcagacatcaaaagaaattctaaaaaacttcagcttattaagtgactttgaagctgtcagttgtgaacaattggcgtccattctgtctgaaattaagctcaaaaaatttgctgcttcaaaaataaatcagatcgccgacctttccagagattcctttggcatcaagtttgctcttgacagttttcaccttcaattaaagattcttgttgaacagattgacttcattcaactccaaattaccgagctggacaatcaaatatcaactatcgttgaaaaattcaattcgcctattttcactatccctggtattggcccggttaccggagcaactattctttcagaaattggtgatattgagcggttttctactccggcaaaacttgtcgcctatgccgggattgatgcctccgtcaatcaatccggtgaatacagcagcaacaataatcatatgagtaaacgcggttcgccgtatcttcgtaaagccattttccaggcttcccttgtcgcatctcatcatgatccagtttttaaagcttattaccagaaaaaacgggctgaaggcaaacatcatttaactgctcttggcgctgtttcaagaaaaatgtgttataccatccatgccatcctgaaaaacaatatcgcatacaaagttcaacttcgaaaagaatgattaactccttcttttctcacctgtttttcaggtctttttgtcatgcatttttattcatatgcttttcctcgtttttttctctcaacctgttgactttttatagttg

SEQ ID NO: 4362 - DNA, 1425 bp, unidentified
  source 1..1425: mol_type = unassigned DNA; note = element_69eec8e
  misc_feature 1: note = core
  misc_feature 2..132: note = LE
  misc_feature 133..1161: note = CDS
  misc_feature 1162..1425: note = RE
  misc_feature 1185..1423: note = bridgeRNA
atgtaatggatgcctccctctacaggaccggcagcggggagctccaagagaagggagtcctcgcttgaaccggacggcatcgaagtgccaaggtggatagctcatccacgaataggtcaaggaggactcaccatggattctacgatttacggtttggatttggcaaagcgggtgatgcaactacactgggtggacatgggcaccggagaaatccaccgcaagcaattacggcggcggtcgctcctggagttttttgccaaccgggggcccggcatcgttgctatggaggcctgtggcagtgctcactactgggcacgggagctgcgtaagctggggcacgaggtccgcttgatcgccgcccagttcgtgcggcccttcgtcaaaaccaacaagaccgacgcggcggacgcggcggcgatctgggaggcggtccagcgtcccgatatgcgttttgtggccgtcaagagcgtagaccagcaatctgtcctggccctgcaccggatgcgggaacagctggtcaagattcggaccatgcagattaacgcaattcgtggactcctctatgagttcggcgccgatattccgcaaggacgccagaaaggggaaaagaccattccccaggtcttggagcaactggaagaccaaatttccaagatgaccttggacgctatgcgcgggcagctggagcgactgaaggcgctggatcgcgacattgccgatattgaaaagtctctggcgctctgggaaaaggatcaggaggccgtatcccggctgatggccatccccggtgtggggctgctcacggcgacggctattgtggctaccgtgggcgatatgaaagcctttcggtccgggcgggagtttgcgtccttcctgggcctggtccctcgccagagtggcacgggtggccgggtccggttactgggaatcagcaaacggggagatacctatctccggtccctgctaacccacggtgcgcgggcggtcgtgaactgccagatcaggaaccgaagtccctggatcgaccggttactcagccgccggccacacaacgtggccgttgtggccctggccaacaagatggcccgcacgatctgggcattgctggccaaagagcggacttatgacccgcggtatcagggaattatgatggccgcctaatattcagaaaatctttaccaaaaatcagtagcaacgagttgcgcaggcagatagacgattgatggcacaacaggtcagaccggggaagggagagcctgaagaagcattgtccttttgaggacgcagtcgagatgaggacccttccagcggatttcatcaaggccagcagagataatctgcgctacaggccggatataaggctgtaactcgatctcaaatgccaaagatcaaaagtccgcttgcacacacggaggcatccatata

SEQ ID NO: 4363 - DNA, 1556 bp, unidentified
  source 1..1556: mol_type = unassigned DNA; note = element_69fa375
  misc_feature 1..2: note = core
  misc_feature 3..258: note = LE
  misc_feature 259..1434: note = CDS
  misc_feature 1435..1556: note = RE
  misc_feature 17..237: note = bridgeRNA
ctcgtataataatgttgtagttaattactaactacatatatatttttaaatctcattttttatgagataattaacctaacagatagaggttgtagtttccctccttgaagttttatcttccttacttagactgacacctcttctttacatcacatatacgtatgagctggatagtacatgttactgcatatctaacgaggttgtatgatttaaagtttgaggtcttctctatctgatttctttttagtaggtgattttatgttttacattggtattgatatcgcaaaacacaatcacgaagtttccattattgatgataatggaaaagctttaggtaaaagtttttctattagtaattctcaaaaaggtgttgataagtttaatacttatcttgattcttttaatattacttctgaaaattgtgtaattggtatggaatctactggtcattactggattaatcttttctcatttttagttaatttaaaatttaatgtcttcgttatcaaccccattcaatcagatgctttcagaaaaatgtatattagaaagactaaaaatgattctaaagactcatatattattgctcagattatgcgatttggagagtactcctcatctaacatttctgatgaaaatatatttgctttaagacaactatcaagatatcgcacatctcttgttgatgaatgttctagttggaaaagaaaaattattagtattttagatcaagtatttccagaatattcaaatttattttcagatacatttggagttacttctaaggaacttttatctaaataccctttacctgaaaatatgttagaattatcaactgaagagctaacaaatcttttaaataaagcaagtaaaggtagacttggaaatgaaaaagctcaagaaataaaagaatctgctaaaaattcctttggtgtatcttttgcaaaacaaactttttcatttcagataaaacaaattattaatcaaatttctttcatagaatctcaattgaaagaacttgataatgaaatatcaaatatgttaaaagaactaaactctgaaataactactataacaggtataggagatgttttaggtgcttgtattctttcagaaattggagatatctcaagatttgaaaaagcttcacagctagttgcttttgcaggactagatgtagcagttaaacaatctggagaatttacaggaacagaaatgaaaataactaagcgaggttctccatatttacggagagctatatggttagctgcaacagttgctagttttaaagatcctgcattatccatttattacaagagtttaatagctaggggtaaaaaacatttaacagcaataggcgcagtatcaagaaaaatgtgcaatattattttttctgtacttaagaataaaaaggcatatactccaaatatttgataaaatctagtatagaagctatttagacctaaatgaacctaggtctttttatgctacaaattaaaataaatttagaaaaaaattaactttttaaaaaatttacttgacatttgatagctggt

SEQ ID NO: 4364 - DNA, 1269 bp, unidentified
  source 1..1269: mol_type = unassigned DNA; note = element_6a03713
  misc_feature 1..2: note = core
  misc_feature 3..230: note = LE
  misc_feature 231..1259: note = CDS
  misc_feature 1260..1269: note = RE
  misc_feature 25..242: note = bridgeRNA
ctgacttgcttcaatcgagccagcaccaccgctccgacgggggcgtagggtgcgaggtcggtgaccggctgggctctcacgctccttgcccacctcggtgtggctctctcatagcgtgccggccggtcaccgcccgctgcggcgtggctcgatagaggcgtgcatcgcttcctggaactcaggttgcccgccgtggaacccaccacccggcaacccgaaggaagtgattcatgaccgtgatcgtcggcatcgacccgcacaagagctcccacactgcgacagcgatcacccccgatctggccgagctcggcacgatccgtgtccgcgccacccgcaccacgattgaccagctgctcgcctgggcagaaccgtggccggagcggcggtgggcgatcgaaggagctcgcggtctcggccagttgctcgctcaacgcctcgtcgctgccggtgagaccgtcgtcgacgtccccgccacgctcgccgcgcgggcccggctgctcgagaccggccacggccgaaagaccgatcacatcgacgccctcgtcgctgtccaacggccggaccttgcgcgtgtcactgctgatgatcacacgcgcgtgttgcgcctgctcgcggaccgtcgcgacgagctgaccagggaacgacgccgcaccatgaatcggctgcaccggcatctgcgcgacctgattcccggcggagcaccgctgcacctgaccgccgtcaaggccgccgccctgctcaacaaggtccggcccggcgacgccgtcgagaccgaacgcaagcagatggctcgcgacctggtcgcggacgtgcgacggctcgacaaggcgatcgccgacaaccgccgccgctgcgccaccgcagtcgccgcgtcggggaccagcctcaccgagatcaccggaatcagcgacgtgctcgctgccaagatcctcggtcacatcggcgacatcaaccggttcccgagcgccgatcacctcgccagctatgccggcaccgcaccgatcgaagcctccagcggcgacgtcgtccggcaccggctctcgcgacgcggcaaccgcaagctgaacaacgcgatccacctcgccgcacacgtccagacgatcttcgccggtcccggccgcgactactaccagcgccgcctcgccggaggaaacagccgcaccgaagccaagcgactcctcaagcgtcaactcaccaaagccatctaccgcactctcgtcgccgacctcgaccgcgccgtcctccacgtgaccgcttgacatagaggcg

SEQ ID NO: 4365 - DNA, 1647 bp, unidentified
  source 1..1647: mol_type = unassigned DNA; note = element_6a03c46
  misc_feature 1..2: note = core
  misc_feature 3..286: note = LE
  misc_feature 287..1516: note = CDS
  misc_feature 1517..1647: note = RE
  misc_feature 12..306: note = bridgeRNA
ctattacaatagatttacggttcaaggcgcggcagccagccgggcctttttccgcatcgttgccaaagctgttagaatgggagagcattggcctgacataatcctccaaggactaacacgtccgataagaagtccgtcagccagcctctcattcgcagcgttcgatttatgcaggtagagctgccgcgccgtctcggcccggtgcgtccgtgtcagcaaatagattgaatcggcaatgatggaagggctggtcgccaatcaaatctacgataggagtgttgaacgaatgaacgcagcaggaattgacgtttccaaaggaaagagcatggtatctgttctccgccctttgggagaggtggtggcaaaaccgtttgctgtacgtcacaccggcagtgaactcaaggagttggcagactacttgaaaagcctggacggtgagacgcgggtgatcatggaacacaccgggcggtactatgagccggtagcccagtttctccatgacgctgggttatacgtcagtgcagtgaacccgaaactcatcaaggattatggaaataactcgctgcgtaaggtcaagaccgacaaggctgattccaagaaaattgcgaaatatggccttgacaactgggtcgaactgcggcaatatgcttccatggatgtcattcgttaccaactgaaaacgctgaaccggcagcacgctctgtactctaagatgaaaactgcgatgaagaacaacctcatcgctcttctggaccagacctatcccggtgtcaacaccctgttcgacagccctgtccgtgaggatgggacacagaaatgggtggattttgttgtacccttttggcacgtggactgcgtgcggggcatgagccaggcatctttcacagagcgttaccacaaatggtgcaggcggaacggttacaatttcagcagcgataaagctgctgaggtctatgccggtgcaaaagaccaaatcgccgtgatgcccaaggatgacctgaccaagcggctgatccggcaggcaatcgactcgctcaatgccgtctccaagaccgtagagcagcttaaagctgagatgctccagctggccgcacagcttcctgagtaccctgttgtcatggaaatgcacggcgttggggattcccttggtcctcagctcatggcggaaattggggatgtgacccggttcgcacgcagagggtctatcacttccttcgccggcgttgatccaggcgccaatcaatccggcacccacgaagcccaaagcgttcgtacttccaagagtggtccgccggaactgcgcaaggcattgttcctggtaatggacagtttgttgaaaaccatgccccaggacgacccggtctaccggttcatggacaagaaacgtgctgagggcaagccctacttagtttacatgaccgctggagcgaacaagtttctgcgcatctattatggcaaggtaaaggaatatttagctaaaccggaagacccctctgagcctacagccgacaagtaacacatctgagtttccctgcaatttactcccagatcagcgctccggcggtggtcttgttgttgtgcctttttcgcacctccttatttcccttcatttttctgcaaatcccctattgactttttctttgcaga

SEQ ID NO: 4366 - DNA, 1431 bp, unidentified
  source 1..1431: mol_type = unassigned DNA; note = element_6a05d42
  misc_feature 1: note = core
  misc_feature 2..333: note = LE
  misc_feature 334..1128: note = CDS
  misc_feature 1129..1431: note = RE
  misc_feature 1142..1370: note = bridgeRNA
gaatgaaagggacttccccgccccgaactagccgcggtattgcggcgaccggcaacgaagtgccacgatgggaagtgcgaaatctcatcaactcgttcgaaaggggaagtccatggccattgtcactctgggaatcgatctcgccaagaacgtgttcgccgtgcatggcgtcgacgcgacaggcaagccggcgctggtgcgcccgagcgttccgcgcggcaaactgctggagctgatcgcctcgatgccacgctgcttggtgggcatggaagcgtgctctggcgcgcatcactgggcgcggctgttcgggcgcacggccacacggtcaagctgatggcgccaaagttcgtctcaccgtatcgcctgtctggcaagaaggggaagaacgacgctgccgacgcagcagcgatctgcgaggccgtcacgcggccctccatgcgcttcgtgccacccaagagcctgcagcagcagtccgagctgctcgtgcaccgcgcccgtcaaggctttgtgcagcagcgcaccgccaccatcaatcgcatccgcggcctgctgtcggagttcgggatcgtcctgccgctcaaggcgtctactgtgcggcaggaggcgatgcgccagctggaggatctgccgggctgggccaacacagtcgtgggcgacttgctcagcgaggtgagccgcctcgacgagcgcattgcgcagtacgaccgccacatcgaacagatcgccaaagacagcacgccggccaggcagctgatgcagcttcctggcgtggggcctacgacggccaccgcgctggtggccatgatcggacgcgggcaggagttcaagtgcggccgccagctgtcggcctggctgggactggtgcccggccagtacagctcgggcggcaagcagcgcacgggacgcatcaccaaggccggcgatccgtacctgcgaatgctgttgatcctgggcgcccgatcggtgctgcaatcggccaagcaccgcgacgatccgctcagtcgatgggccgtgcagttggaggcacgtgcgggctactggaaggccatcgtggccatcgccgccaagaacgcgcgcatgtgctgggccgtgctggcgaggggagagagtttcaagctgccggcgtgaccgtcgacagctgttgtttcaccgcgtgatgtgcaagcgttgatggtgtgaaggttggacctgcgcggggtgtacctgttcaactccgggaggcggccctggtcgtcctcggctaacgattgaggtccccgcgtgcgtctttcatcagggtccgcagcaactgaactgctgcattaatgaccgtttgtagtttcgctgtccgcatccttcgctccgtcgctgcaccgatcgcacatgctcgctcgctacatgccgttgacggcagggagagctattcgcttgacaggtggggaagcccttgta

SEQ ID NO: 4367 - DNA, 1196 bp, unidentified
  source 1..1196: mol_type = unassigned DNA; note = element_6a08057
  misc_feature 1..4: note = core
  misc_feature 5..214: note = LE
  misc_feature 215..1174: note = CDS
  misc_feature 1175..1196: note = RE
  misc_feature 34..199: note = bridgeRNA
tcatcctatgtttgtaaaatattaattttattaaacaaaaggaaaagagagtgaagaataaggttataaattgtcattagtcttcaagaccttccggaatgttaatccctttactctttttactaccgagtctgaacagatcattaggcaaaaagcctgtatttaggatagatagacaagtgtagtatttctcttttcctgtaaaagtatagttatgagtaaaattataggaattgacattagtaaacaagtttttgatgtaagttttttggaagagaacctttggaagcatcaggttttaaaaaacaatttatcaggttttgaaaaattgatatccttcgttgaaaaagaagattttgtagtgatggaagcttccggtacttattatcttccactagcagagtatctctattcacaagagattaatgtagtggtagcaaatccactctcgataaaacgttatgctcaatcaagactaaaacgtgccaaaacggataaagcagattctaaggttatcgctgaatatggaaaaaagaatctagatgatttgagtttgtggagccctgaaagtaaagtatgtatcagaattcgtcaaatgcatacaagaatcgaaatgattcagaagcagataagtcaaacttataatcagctagaggcatttttaagcagcggttttctggatgaaaagctagaaaaagaaatacaagagtcactagaacagcttcaaataggaaagaaaatgctggaatctgagatagaaaagctggctttggaggaatttggagtaacaataaaatgtcttaccagtattcctggaattggtatgaaaacggccattatgctggttgtaattacggataactttaagaagttcgaacattacaaacaactcattgcttttgtaggattcagtcctcggatttatgaaagtggaagcagtgtgcgaggaagatcaagtatttgtaagatgggtaaatctcagatcagaaagctattgtatctatgcagctggtcagccaaacgttggaataaaaaatgtaaagaaatgtatgaaagacttatcacaaatggaaaagctgaaagagtggcaaagatagctcttgccaataaactcttaaaacaagcatttgcaattggaaagaaaaaagaaatatatagagaagatttttgttaaataagttgctttttaacacaga

SEQ ID NO: 4368 - DNA, 1458 bp, unidentified
  source 1..1458: mol_type = unassigned DNA; note = element_6a1090d
  misc_feature 1..2: note = core
  misc_feature 3..216: note = LE
  misc_feature 217..1437: note = CDS
  misc_feature 1438..1458: note = RE
  misc_feature 7..215: note = bridgeRNA
ctaatgggactcgaccggcagcgtcaggcatgctggtcccgagccgccggcgggtgagcaccggaaggcgctgagcctcgagctctagatctagaacgtgcgcccgccggtcggtgaggggagcaacggccggtgggatgtcgtgcctcgagcaccgatccattagcgcgccgcgcgcccctccgggctcgagatgaacgaacgaagggagggggcgtgatcttcgttgggatcgactggtccgaagcccatcacgatgcctgtgtcttagacgagcatgggacggtgctcgcaaagggcagggtgagcgacgacgtctccggggtcggtcggctgcacgcgatgctcgccgaccacgccggggacccagccgaggtcgtggtggggatcgagacggaccgagggctgctcgtggcttcgctcgtcgaggccggctaccacgtctacgcgatcaacccgctggcggcctcccgataccgggaccgtcacgcggtctcccgggcgaagtccgatccgggcgacgccaaggtgttggccgacctggtgcggaccgatcggcggaaccaccgggaggtggccggtgactccgagctcgccgcggccgtgaaggtcctcgcccgggcgcatcagaacctgatctggtcccgccagcggcaggtgaacgcgcttcgaaatacgctgcgcgagttctaccccggtgcgctccgggccttcaccaccgctcagctggctacgaccgaggcgtgcagcgtgctcgcgatggcccccaccccgacgtgggcccgcgaaaagctcacgctcgcgcgcgtccgtcgctccctcgccgcctcggggcggaagcggaacctggaccggcgagcggagcagatcctgaatgccctccaggccccggagctgtccgcgccgcggctggtggagcaggcctacggcgacgtggtcggatcgctggtcgtcgtcatcgatgggctcacccaccaaatcgcgaagctcgaggccgacctcgcggagcgttttgagggtcacccggacgccgagatcatcaccagtcttcccggactcagctctgtcctcggcgcccgggtcctcgcggagttcggggatgacccgacccgctacgacgatgctagagccagacgccgctacgcgggaaccgccccgatcacccgggcttcggggacgcgtcgggtggtcctggccagggtggccaggaaccggcggctgtccgatgcctgctacctctgggcgttcagctcgatcagcgcctcggccggggcccgccgctactacgacgctcaccgtgcacgcggcaagacccatcaccaagcgctccgtgtcctggccaaccgatgggtcgggatcctgcatgggtgcgtggccggccgtgagctctatcgcgaagaggtcgcctgggtcgctcccgtcctcgaagctgcttgacagcttcgacccgtgggatgt

SEQ ID NO: 4369 - DNA, 1629 bp, unidentified
  source 1..1629: mol_type = unassigned DNA; note = element_6a13c54
  misc_feature 1..2: note = core
  misc_feature 3..43: note = LE
  misc_feature 44..1174: note = CDS
  misc_feature 1175..1629: note = RE
  misc_feature 1379..1580: note = bridgeRNA
agatggggtattcggcttgagccccatcttcgggtgagcgtgcatggtggatatgttgaaggtgctgcgcttcgagctgatgataaacgtggtctgcttggagcagccacaagcatcagagggagaagcgcagcatgaaatattatgccggattggacgtctcggtgaagagaccgcagtgtgcatcatccacgaaacaggccagatttgccgcgagataaaggtggcgagccatccagaggatctggcacgggtgctcaaggatcccaactggcggcttgagcgcgttgggcttgaagccgggcccttgtcgcagtggttgttcgaaggcctggccagggccggcctgccggtgatctgcatcgagacccgccacaccaaggcattccttaaggcgcaggtgaacaagaccgaccgcaatgacgcccgcggcattgcgcagatgatgcgggtcaacctgtttcgcccggtgcatgtgaagaccctgacgagccagaagcgccgggcgctgctgaccgcccgcaagctcttgcaggaaaaggccattgccgttgagaacgacctccgcggcttgctgcgcaatttcgggctcaaggtcggccctgttggtgccgtcaaattcgaggtgcgcatccgcgaactcaccgaaggcatgcctgacctagctgagatcgttgaaccgctgctcgaggcacgcagcaagctgcggcagaactttgccacgctccaccgcaagcttctgacccttgtccgcgacgatgcggtctgtcggcggctgatgacgatacctagcgtcggtccggtggtggcgctggcctataccgcgacgatcgacatcccgcagcggttcaagagcgcgaaggcggtcgggccggctcttggcctgacgccggtgctcgacgagtcgggcgaaagccggcgcatcggccggatatcctgctgtggcgaccgcatgctgcgaacgctgctctacgaggccgcgcaggtgctgctgacgcacgtgacgaaatggtcgtggctgaaggcctgggggatgaacgtcgccaagcggcgtggccgacaaaaggccattgtcgcgctggcacgccggctggcggtgatcatgcatcgcatctggagcgacggcacgcggttccgctggacgcgacaagatatcatgccggcggccgcctgatcgcaggccccgactacttgcagcctgccgccgtgcgcgtggcccgtcaagggcaagtcgctgggcgatggcctgtcggccacccctgaccggccacggcgcgcgggcggcagagcggaaccccgggtcgggacgagaagatgctcaccagacctcgaacaaggggagacgggtatgaaacgagcgtgacaaggatcacgccataaggttccacttgccggtgtaaaagtgtccttcgcgggacgatggatgaggtgagttcgcaatgtccgcagtaccgatcgcatcaccgatcaggacgcccaagagatttgttccgcctcattcttctgatccccatccaggcgagggcccgagcgccgatcccgtagagaagcacgaccccgcgaaagacatcagacgccggcgaagcgaaaagctcgacaagcgcttgacttcaacgcgccgaatagaga

SEQ ID NO: 4370 - DNA, 1654 bp, unidentified
  source 1..1654: mol_type = unassigned DNA; note = element_6a1716c
  misc_feature 1: note = core
  misc_feature 2..308: note = LE
  misc_feature 309..1487: note = CDS
  misc_feature 1488..1654: note = RE
tggtatatacaaattagctcatcttactgatgaacataacctgtatacatctcctttcttttcctggatgttgtatcggccaggaatccgatagaattgagattgtgaatgcgtacctgtgccacatatgttgtagctttgactacatggaggattatctggccgcttcgttgtataggaaattgccattagttcgatgagcctttctatttcagaaatgagttcacattttgcaccatgatctttgatacttctggaacggctgctatgcgcattgcacgccaatgttcagagaggagtgatcatttatgattaacattggaatcgatgtcggtaagtccaggcactgtgcttctgtgctcgatgaccgtaccggtgaatggatctatgtcccattctttttcaccaatgataaggcaggcttcgaaagtctctatgagaggataaagccttatctcaatcggaagcacgctgtcggtatggaatgcaccggccattacatgtacaacctttctaattttctattagagaagaaatgtactgtgatgtacatcaatccgcgcgccactcacatgcgccgcattgaacttggcagggcagccaagaacgacaagctggattcaaagatgatctctgagatgctgtcagagaaacatttctggcagcacgtcacggaacattcattgcagctctatgaactgcgtgaactgactcgtgtctatcatcagctgaaagaacagcagaaccaggatcagaaccgtctccagagggcactcgatatcgtgttccctgaatacaccggtctttcctggaagtcctatggcactgcatacatgaatgtactgaggagatatccaagtgctgccatcattgcttctacggatatccgcagtctgcgcagtgtgcttgccacgaagggacgtggcaggaagtcatctgttaccgcagagatcctaaagtcagctgctaaggattccattggcgatgcccacaacgttgctgtggaactggagatacaatccgtcatcgctgtcattgaagctcgtgcagaacagatcgatatcctggaaaagaaaatagaagaattcagccagcagctaaactctcctatcacttccatcccgggcatcggttcgataaccggaatgtccatccttgcggagatcggagatatcacacgattcagtgatgcctcgaagctgatatccttcgccggcatggcccctggtgtataccaatcaggcagctatgacgctgcccgtctgcccatctctaagcacggttcaaggtatcttcgcaaagccttgtaccaggcggtcttcactgtctgtaactattcccctatcttcaataaatattttagcgggaaacagtctcaaggtaaacagtatcgctgtgctcagggacatgcagtaaggaaacttctccgtgtgatatacaagctgttatcgactggtactcagtatgatccagctctgtgcttataatctttcactttaactattagataatctgttacatagtcaaagctacaaagtgtagttattttgactgtacgttattcacaatttcaaagaactgatttggattaaatgacatttataaatctttttccttctttttcataaatttacttgattttcttatagttcaa

SEQ ID NO: 4371 - DNA, 1372 bp, unidentified
  source 1..1372: mol_type = unassigned DNA; note = element_6a3d590
  misc_feature 1..2: note = core
  misc_feature 3..242: note = LE
  misc_feature 243..1112: note = CDS
  misc_feature 1113..1372: note = RE
  misc_feature 1085..1360: note = bridgeRNA
tgatcgggtggacgccccccgacggcatcgatgtgccaaggtggaggtgttgaagcaccacttgagggaggcgtccgtgtcagaggttatcacgatcggtctggatattgctaagaatgcttttcacgcccatggcgctgatgcgcgcggcgcgatggtgttcagccgcaagctgacacgcggcaagctgttggatttctttacgcgacaccctcgatgcacagtggcactcgaggcatgcggtggagcacacccactgggcgcgcgaactgcaggcgatggggtacaaggtccgcctaattccgccagcctacgtgaagccgtttgtgaagcggcacaagaatgatgcgatcgatgccgaggcaatatgcgaggcggcgcagcgtcctggcatgcgcttcgtggcggtgaagagtgaagagcagcaggcggcgggtctcgtattccgcacccgcgatctggcggtgcgccagcgaactcaacttatcaatgcaatccgtgggcatctggcagaatatggttgggtagcaccgcgcggaacggcgcatatggcgatgcttgcagacctgctcgatgaggaggagatggcatcaagcctgcccgaggcagctcgaccgatgttcgcgctcatggtcgatatgctcggggaactggaaaagcgcatcagcgtactcgaccgcgagattgcacgccgcgcgaaagaagatgaagccccacggcggctgatgaccatgccgggcattggcccgatcgctgccaccgccatcatcgctctggctccacccatcgagacgttcaccaaaggccgtgactttgccgcctggctcggacttgcaccgcgacagcattccaccggcggtaaacagaagctcggcagcatctcgaagatgggtgagcgcaccatcaggcggctgctcatcatcggcgggagctcgatggttcgtagtgcgtgccgccacggtgcaccggctggttcatggttggaacgaatgttggcgcgcaagccccgcatgctcgtctcagtggcgctcgctaacaagatggcacacatggtgtgggcgttgctgacaaagaacgaagattacagagctccggctgcggtcacggcataagctgaggtcgcggtcagaggcgtcggggacgtaggcggtcgaaggagggtatggcacaacagtcggcgagacgggaccggaagaaccagtgaaatggcagagcgctatccaagcgcgcaaacctgtaatggatccgtccgtgaactcccatactggcccgcagctatggcgctgctcatcgaggccggacagatgacagcatccgactacgtgcgagcataccccgatttaccgcttgcatccgaagaggcgtccacaga

SEQ ID NO: 4372 - DNA, 1356 bp, unidentified
  source 1..1356: mol_type = unassigned DNA; note = element_6a43fab
  misc_feature 1: note = core
  misc_feature 2..284: note = LE
  misc_feature 285..1322: note = CDS
  misc_feature 1323..1356: note = RE
ctctaactttgcagagtcaaggagattggtgagtactcgttagaggaatctcaacaaaaagctttgacaattcgaggaaagtcattacctttgtccgtataaaaggatgactgacctcccggagagggaaactattgttgctcacatgtcataagacaatactttgcgacagtcctctccgggcaagctgcaaaggcaaaataagttgccaggcataggagcctaattagagtgtgagccatcacagcttggggccagccattatttaaaattggtacaaaggtatgaaaaaaatcgcaatcggcattgattttgccaaagaaaagtttgatgtgacagcaaaaaatgtgatgacaggtgcatccgagtatggtcagtaccccaacacgccgtcaggagggcgcagcatgatccgaatggtgaagaagttctctggcggtatcgacagcagcgagtggctgttttgcggggaagacactggctactacagccaggtgatttcacgctacctgacggagaaagggtacttcatgtggctacagaatccgtacagcatcaagcattctgaaggcggtatccgacgaggcaaagatgacaaggccgactctgcagccattgccgactatgcccaccgctatgaggacaaggcacacaagtacgagattccctcaaagcaggcagaagagctgcatctgctgattaccagacgtgatgcctacgtccgtgcgagacaggtcattcagagcggtgctaacgaaatccccaagcgcagcaaacagggtgacagcatcaacctaatcaaagcatctgccaagcacctgataatggaaatcaacaatgagatagaccgcctggaggctcagatggaagagctcgtcaaggaggaggaagacatgcagaccaattatgagatactacgctctttcactggaattggaatcgttaacgcaatgtgcttcatcgcctacacggacaacttcaggaagttcgacttgaatgcccgcaaaattgccacatactggggggtggcaccttttgggaaggactcagggaaaagtatccatgtggatccgcatgtaagtcacttctgcaatcacaagttgaaggctatactaagcaatgctgccaactctgccatcgtctggaatcctgtcatcgtaccatattacgaaagactgggaaaggcaggaaaatgtgatggcatacgaaagaataatgtcaagaacaaagtcatccaaattatcacagcaatgatacgagacaagaaaaaattcgaccctgattacatatttacaaacaaaaacgcccagcaagagtgttaaaagtgttaattcgcttggtttttactataagttg

SEQ ID NO: 4373 - DNA, 1663 bp, unidentified
  source 1..1663: mol_type = unassigned DNA; note = element_6a542d1
  misc_feature 1..3: note = core
  misc_feature 4..337: note = LE
  misc_feature 338..1579: note = CDS
  misc_feature 1580..1663: note = RE
  misc_feature 155..337: note = bridgeRNA
aaattcccatgcgcgcctcgcgtgctacaccatgaataaaaccggagtggcatccggaagtttttcataaaaagatattgtttcctatgtaagttatggtacatcggaaatgatatcttttttgtttagaaaagattgtagaacagatgtgtcatccgttatactaaaagtaacggtaaagatcgttagcggtttgggcctgtagcccgtgagctaaattgatttccggtactctcatttgcaccaccatctgtccagccatttctggcgaaaggacgtacagtaaactgacaaaagacagagtaccgtgccgtaaataagatccggaggtattgatatggataaaatttacgacatttgttgtggtattgatgtacacaaaaaactgattgttgcctgtctgaaccataaacgcaagaaagaactccgggaattcggtgcgaccacccgggaactgatggaactggcagaatggctgcaaaaaaatgaatgtgagatcgttgcgatggaaagcaccggttcttactggaaaccattgtataacatcatggaatcctatgatcttcatgcgattgtagtgaatccggcacatatgaaagccgtaccaggacgaaagacagatgtaaaggatgcagaatggattgcagaactgctccagcacggattacttcagccgagttatatcccgagtaaagaccagagagagctgcgtgaactggtacagtatcggaaaagtctcgttggagaacgtacgcgggaactgaaccgactgcaaaagatgctcgaaggagccaatatcaaactgtcaggaaccgtgacaaatatcaatgggaaaagtgccagaaagatcctggaatacatcctgtcaggaaatgagattgatgagaaaaaatatgatgagatgtatgaagaaaaactgatcgcccataacctgaaagcatcgaaagagcagatccttgatgatctgaagggattcatgagtcctttgcagagaagaatgttaaaggagctgcttcagcatctggatgaattaaacgttcatatcgaaaacctgaacgatgagattgacaactttatgaaaccagaggaaaaacaggcatcccaggtgatccaggatgttacaggaattggtaacaccagtgcacagacaatcatagctgtcatcggaacagatatggaaagatttcccagcgaccgtcatatctcatcgtgggcagggttatgtccgggggacaatgtgagtgcaaagaaacggaaaagtggaaagatccggaaaggaaatgcattgctgaaatccacgctggtattatgtgcacatgcagcggtaagacataaaagttcctatttccatgcccagtttaaacggatcagtacccaccgtggcaagaaacgtgcatatgtagcagtggcacattcgatcttaatagcgatttatcatatcctgaaagacggtgtgaaatatcaggatcttggggcagaatactacaatcagtttaatgcagagcggaagatccatgcatacttaaagaagttgaaagcattaggatgggaaccaccaaaagaggcagttcccgcataagtgtaaaatgaataaatcattcttaaaagatgatagggatagtttgcgcttttttccatacggaaggtaagggggttttacagt

SEQ ID NO: 4374 - DNA, 1412 bp, unidentified
  source 1..1412: mol_type = unassigned DNA; note = element_6a5c327
  misc_feature 1: note = core
  misc_feature 2..79: note = LE
  misc_feature 80..1105: note = CDS
  misc_feature 1106..1412: note = RE
  misc_feature 1182..1403: note = bridgeRNA
taatgagatggtccgccgcttgcttttccttcccagcaggtgattgctgggagcaagctgtgacaggaggatcatcgctatgcagatacattcgattggcatcgacctgggcaagacgacgtttcaccttgtggcgttgggagcttcgggcaaggtgctggtgaagaagaagtttactcagaagcagttgctcgcttacaccgccaacctgcagacttcactgatcggcctcgaagcttgctccggcgctcacttcctcggccgggcactgcgcaagcagggccatgaggtgcggcttatcgcagcccagttcgtgaagccttttgtgaagtcgaacaagaacgacttcatcgatgccgaggcgattgctgaagctgttgagcgcaagaacatgcgtttcgtaccaatcaagaccgatgaccagttggatctgcaagcgatccatcgcgttcgtgaccggctggtgtcccggcgtacagccgtgatcaaccagatccgtgcatttctgttggaacgcggcctggtattcgcgaagagaccagcccaactcaaggccgcgatggcagacgtcctggagaacgcagaagctgacctcacccccatgatgcgcaacctcatcaacgttctgtgggacgagtggaagatcgtcgataggcagattgaggagcttggcgatgagttggaacggatctccgctgcggatgccggctgcacgcgcatccggaagatcccaggcatcggaccggttgtagctactgcgatcgttgcggcgatcggcaacggggccgcttttcgtaaaggccgggagttcgctgcatggctcggcatcgtgccacggcagtactcaaccggaggcaacgccaggctgctgggtatcagcaagcgaggtaacgtgtacctccgcaagatactcattcacggcacccgagcagccgtactccggatcaagcgcgatagagcacccatcggtgcatggctcgatgggctcgatgccagggctcacaagaacatcgtcatcgtggccatggcgaacaagattgctcggatcgcctgggcggtgctgtcgagcggtaacgaatacaggccagcaactgtgccagcataacgggcgcggaaaagacgccttcggactggaagcgctatgcgctcctactttcccgcaccatgacgacgaacaagctctcccccgaagtctgcacagggtcagcaaggacgaaagaacagtcacaacggtgtatccacagcctggttccgacaatgggcttcaacgtccgatcggcttataaggatggatacgcgcgcaactcatcatggccaggagaaacgatctccacaaaaaggccgaatacatttgcgcagacttgtcttctcgaccaaacttccccccttgcagtcccgcggcggaccataca

SEQ ID NO: 4375 - DNA, 1204 bp, unidentified
  source 1..1204: mol_type = unassigned DNA; note = element_6a60d04
  misc_feature 1..2: note = core
  misc_feature 3..238: note = LE
  misc_feature 239..1189: note = CDS
  misc_feature 1190..1204: note = RE
  misc_feature 6..225: note = bridgeRNA
cttgtatgttcagcccagaccggcgcggtaaagttcgattgccgttgaggcaaccggaccggaccgtgcagcctggtagcgccttgggccggcgagcgcacttgcaagcccgtcactgagttgattgcgcacggaccccgcgctggtcttcctgaagcccgaacggttagtcgagcggtctcgcgccggctcgcatgcacaagaaagggatacgaagaccatgtctggatcatccgtgatggtagggatcgacgttgcgagtacgcacgtcgatgtggcggcggtcggcgcggaattgccagctgcgctgcggcacattggcaacgatgctgacggacacggcacgctggccgacgggttggcgcgcttgaagccggaattggtgctgatggaagccaccggcggctacgaggcggcgctgacgtgcgcgctgcaagcggcagggctgcgggtggccgtggtcaatccgcgcatggcgcgcgacttcgctcgcgcgatgcagcggctggccaagaccgaccgcatcgatgctgcgaccttggccgaattcgccggcgtcctggcgcgcaggcccgactgcgagcgtttcatccgccccctgagcgaacccgaacagcaggacctggccgccctcgtgacgcggcgccgtcaattggtctccatgcagttgtccgaacgccagcggctgcgccttgcgcgccccgtggcgcgacccagcatcgaagccctgctcagggcgatcgcgcgccagctcgatgacgttgaggcgcagatggcgcaccacgtcgagcagcaccacgcccagatggccaagctgttgcagagcgtggctggcatcggcaaggtggcagcggccactctgatcgccgaactgcccgaactgggtcggctcaaccgccgccaaatctgcgccctggtgggcgtggcgccctacgctaacgactccggcgccacccgcggccgacgacgcatcggcggcgggcgcttcgaggttcgccgagcgctgtacatggctactctgaccgcgacccgtcacaacgccgccatccgtgatttctacgagcgcttggtggccgcgggcaagctcaagaaagtcgccctgatcgcctgcatgcgcaagctgctcactcatctcaacgcgatcgcccgtgaccacatgaacgctcaagaccactcctctatcgcttgacaaacaacacggtta

SEQ ID NO: 4376 - DNA, 1446 bp, unidentified
  source 1..1446: mol_type = unassigned DNA; note = element_6a733bb
  misc_feature 1: note = core
  misc_feature 2..233: note = LE
  misc_feature 234..1433: note = CDS
  misc_feature 1434..1446: note = RE
  misc_feature 14..243: note = bridgeRNA
ctacttgttcactgggtcgtaggacgttgcccggcggggtagcgtccaggcgcccggtctgtcgctctcacatcggctgcccacgctggtcgtgtggctctcttttggcctgcgcgggccgggcgtcgttttacgggtcggtgtggctcgagaggggattgtccggctcgaagtagcggtgccctccgacccggttcccagccgtctcgggggcgcatcgaggtcggtgaacgttgagcaatgtcccccgcggtgtcgaacaccgcgttgtgatcgggatggatccgcataagcgcacggtgacgatcgaggtcatggccagcgacgagacggtcctgggtggcggtcggttcgagaccaccatcgagggctacgcggcgatgcgggagtatgtcgatcggtggcccgatcgggtctgggcgatcgagggctgcgccggcatcggcaaacacatcgcggcccggctgcttggcgacgaggaacagatcgttgacgttccgccgaagctttccgcgcgggcacgagtgttctccaccggtcagggccgcaagaccgatgccaccgacgcgcactcggtcgcgctggtcggcacccgcatggccgggctgcacccggtcgtcgacgaccagcaactggcggtgctacgcacactggtcgaccgccgccggtcgctcggcgaagaccactcccgcatgatctcccagctgcatcaactgttgctgctcctgattccgggtggggcgaagaagttcttgtccgccgcgcaggcgaaggttctgctggccggagtccgcccgcgggacgcggccggcaaggcccgccgccgcgtggccgccgagctcatcgctgatctcgagcgggtctatcggcgcagcaaagccgccgacaaggaacttgaggcgttggtgcgcgccactgggaccagcctcatggatctacgcggcatcggcccgtccggggcagcccgtctgctggtcgaggtcggtgacatcacccgcttcccgaacaaggcgcacttcggatcctggaccggaaccgcgcccatcgacgcctcctccggcgaccaggtccgacaccggctctcccgcggcggaaaccgccagatcaaccgcgtgctccacatcatggccaccgtccaactacgcaacgccaccatcgggcgggcctactacgaccgccgcaaaaacgacggcaagacctcgatggaagccatgcgagccctcaaacgacgactctccgacgtcgtctatcgcacgatgctcaacgacgcgatcaagggcgtcggcgcggcagggacgggcccgggaggacaaccagggacgactactgactccagcgcggccgactccaaccccgacatcgacgcttcggaaaagtcactccccggacccgccgacacccagcctagaacgaccaacgctgccgcgggttgacacagaggggagc

SEQ ID NO: 4377 - DNA, 1374 bp, unidentified
  source 1..1374: mol_type = unassigned DNA; note = element_6a774d5
  misc_feature 1..3: note = core
  misc_feature 4..81: note = LE
  misc_feature 82..1116: note = CDS
  misc_feature 1117..1374: note = RE
  misc_feature 1140..1362: note = bridgeRNA
tgatgcggtggacggctcctccgccggcatcgcgatgtgccacattgcggtgttttaggaaccgccaaggaggggccatccatgaaggaagttaccacgatcggtgttgatctcgcgaagaacgtgtttcaggtgcatggcatcgatgggtcgggggataccgtgatccgccggcagttcagacgccgccagcttttgcccttcttcgcgaagcagccaccctgccttgtgggcatggaggcctgcgccacgtcccatcattgggcccgggagattgcggcactgggtcatgaggtgcggctgatgcccgcgcgctacgtgaagccttatgtgaagcgcaacaagaacgatgccgccgacgcggcagcgatttgcgaggcggtgacgcggtcgaccatgcgcttcgtggcagtgaagagcacggagcagcagagcgtgctgatggagcaccggacgcgcgagcttctggtccgccagcgcaccatgttggtcaatgcgatccgcgcgcatatggcggagttcggcatcgtcgcgccggtcggcattcccagggtgaaagagctccttgcggtgatcgccgatggggatgatgaccggctgccgccaatcgcgcgagcctgcctcgaagctctggcgcgacagttcatgtcattgcaccaggagatcgctattgccgagaggcgcatccacgcttggcatcgctcgaaccaggcaagtcggcgcctggagaccatccccggcatcggaccgatcacggccacggctctggcggcaaccatcaccgacccagccgtgttcaagtcgggccgcgagctggccgcctggattggactggtgccgcggcagaactctaccgggggaaaggaacggttaggccggatatcgaagcagggcgatcagtatctgcgctggttgctggttgccggcgcgatgtcggtgatccgccatgccaagcggcgtggtgcgacgaacctgccatggctggcgaacctgatgaccagcaaacccaccaaggtcgcggcggtggcgctggccaacaaaatagcgcgcattgcctgggccgtgctcagacagggcggaacgtatcaaaagcttgcagccgctccggcagcttgaggcaggcacagacaagggagttaaagagtttggcggggtgaacgtgaggtaatgcaaaatcggtcaaacagagggtcgggaaaacccgtttgggtcagggcgcattaagcgcgcactaatgattgggacccgatccccgcggatcgcattagggccagcggtcatggataccgcatcaacaggtcggacacatgactgcacccgaccagtttgcaccgacctcaaaataacccttgccaacacggagccgtccacaca

SEQ ID NO: 4378 - DNA, 1358 bp, unidentified
  source 1..1358: mol_type = unassigned DNA; note = element_6a882e5
  misc_feature 1: note = core
  misc_feature 2..71: note = LE
  misc_feature 72..1097: note = CDS
  misc_feature 1098..1358: note = RE
  misc_feature 1124..1355: note = bridgeRNA
taatgagatggtcacccccacaccctacgagcgggtaacgctggtagggtgttttctttacggaggtcatcatgcagaacgtcacgctggtcgggattgatctgggcaaacacacgtttcaccttcacggccaggatcggagcggcaaggccgtgtttcgcaagaaggtgaatcgcaagcaagtgattgagttcttcgccacgtttgaaacgtgcacgatagtcatggaagcctgcgcgggcgctcaccacatggctcgcaagctggccacctttggacacacggtcaagctcatttcaccgcagttcgtgcggcccttcgtcaagggcaacaagaacgacttcgtcgatgcagaagcgatctgcgaagccgcatcccgcccctcgatgcgattcgtgagccccaagaccgaatcacagcaaacgctgtcagccctgcaccgtgtgcgtgaatcgctgatccgtgagcgcaccaagacggtcaaccagatccatgccttcctgctcgaattcggcatcagcctgcagacaggccaggccgtcatcaagcgcctgcctgccgtcctggccgagcatcccttaccgccccgcctggtcagcatccttgaacggctgcacgcccacaacaagtacctcagcgagcaaattgccgagatcgacaaggaagtcggacggcaactcgccgacgacgatttggggcaacgcctgctatcgattccgggcgtagggccggtcacggccagcgtgctcgctgccgagatgggcgacggcaagcagtatggcagcggccgagactttgccgcctcgctcgggctggtgccgcgccagtacagcacgggcgggcgtgccaacctgctgggcctcagcaagagaggcgacaagaacatccgacggctgttggttcaatgcgcccgcgcctatatgcagaggatcgagcgccagaccggccggctggctgactgggtgcgcggtatgttggcgcgacgacattcaaacgtggtggcctgcgccctagcgaacaagttggcgcgcaccgcatgggcgctggccgcgcaccacaccacattcaaggtggatggcagcgccaggcaagcctgacactgccatccaccttggtgttgttaaggatcacctacctggttttgcgaccgctgacatttgatgacgtgaacggcacaccggtctgacggacaccctggtaaaaaaatcggctctcgaagccgagcggcttttaaggaccgtcgggcgcgactctcatcgtggcgcgggcagcttctgcccacttcgacgccggatagatttacgcaagccaaccacttcatcaaaacccagggttgcaaaagtgggggtgaccataga

SEQ ID NO: 4379 - DNA, 1578 bp, unidentified
  source 1..1578: mol_type = unassigned DNA; note = element_6a89668
  misc_feature 1..2: note = core
  misc_feature 3..190: note = LE
  misc_feature 191..1450: note = CDS
  misc_feature 1451..1578: note = RE
  misc_feature 7..226: note = bridgeRNA
ttcgtattatagagttaaccagtttttactggttggctcttttttttataggacctattatttcagtagccagggtagaacgtacgggtgcgtgggaatagatcccgaggattaaactgttcaccccctacttgtagaaagatgtttgaggctggttgggacaatgtgatctcgtataacaagcgaagctatgaaactacaggaaggtataggggttactggtgagtacaacgagggagagatgaaattgaatccagtagttggcctggatgtggccaagggagaaagtgaggcccaagccttcttagataaggataggccatatggaaaaagcttcagtgtaaagcatatcaaggaggatttggattcatttgcttcctttttaaaaggaatagagaggaaaactggggttagaccagcggtgattcttgaatctacaggacattaccacacaccaattattcaatgtctagaggaaaatcaatatctatatatcttggtaaatccgattatttctcatcaagccaagaaaacaagccttagaaaagtaaagacggatgccgttgatgcatatcatctttgtgttctttattacaaggaagattttgagccttataaaaaaagaggattaagacttctaaatctaagaacgttatcaaggcaatacgaaaccgttacgaacctttacgttcaggcaaaacttcaatttcatactattcttgatcaggtatttccggaatacaggggagtgtttggagatttgttttcaaaagtctctcttcaggtattgaaggattttcccacatctcaagatgttttgagtgcaggtgaaggaaagataatggagcgaattgaggaaatgcgtgtaaaacgttctgcgaattgggccagggagagagtagctaaattaatggcttcagccaagcgaaatccgttccaacaatgtatatatcaaagccacttgtacagtttagatatgtatatctctatgcttcttcagtaccaggagcacctatccaacttggagaggcagatagatgtcctggcagaagagattgaagaatataagataatccaatcaattcccggcataggaggaaaaatcgctgcaacgattatttccgaaatcggggaagttgaccggtttaaccaccctaaaaaacttgtagcttatgcaggaatagatcctagtgtccattcatcaggaaagttcacagctacgataaatcacattactaaacgaggttcaagccgtttacggcacgctttgtatatggccgtattatgcggtataagaagctccaggaataaaaagctaaaagagtactatgataggaaacgaaatgaaggaaagccttcaaaagtagcaatgatagcgtgtgtaaataagcttctacactggatttatgcaattctaaaaaggaatgagcccttcctagatatggcttaaacaacaagaaaaagcaactaatgaaaaaccttccaaacagtatttggagggttatttggcgtgcctttaaaagtataacacgagagaataaatatttttataagaaattcttgactcctattagctgg

SEQ ID NO: 4380 - DNA, 1569 bp, unidentified
  source 1..1569: mol_type = unassigned DNA; note = element_6a8bcd6
  misc_feature 1..2: note = core
  misc_feature 3..247: note = LE
  misc_feature 248..1420: note = CDS
  misc_feature 1421..1569: note = RE
  misc_feature 3..225: note = bridgeRNA
ctcgtattatatagtagtattgtttaaagtccctctccaaggactgtatgctatacttttcgcagacgctgcggattagtattttctcctaacgcatgacgtttttcgaaaggcaataaccgcagccgtttgcttcaacggtaattagttagataacgcatgacgtttcatttagcacgaggttacgatgagcagactggtctgtggaataaagcagtgtcaaatctaaccataaggaggaactatcatgttctatttagggattgacgttgcaaaggacaagcacgattgcattatcatcggttcagatggggaagtactggtaaagccgttcactatcccgaataacaggaacgggttcgatgggctgctcgccagaatcaagatgtgcgggaaggatttctcgaaaatgcgaatagggctggaagctaccggccattattgcaataatcttctggaattcctcatcgccaaccagctgccaacaacagtgatcaatccgttacatactaatctttacagaaaaggtcagagccttagaaagacgaaaacggatacggtcgatgcccaatccattgcgactatgctcaggacggaatgccttgagccctactcacagtcatcttaccatgtgcgtgagctaaagtcattaacaagataccggttttctatggttcaggactgcgggaagctcaaatcatcatattcgagactatgctgcatcctcttccctgaactcgagaagcttgtcccctcacttcatatggcttccgtatatgcgctattgtccgaattccctggttcaaaggcgatatcatcatgccatctctcaaggctgtccaatcttctctgcagcgcatctaaagggcattacggcaaagagaaggccattgagatacgcgacgctgcacgggaatcaataggttccggcagtgagatgaagtcatttgagcttcagcagactatacagaggatccggatactgaacgagcagattgaagagattgaggtgaaaatcaatctgatggttgatgagtttgacagccctatcctgactgtgccgggaatatcgtaccgtatggctgccgtcatcatcgcggaaacggaaaacttcagaaatttcgattcggcggaaaaggtgctcgctttcgcagggctggaaccctcagtatatcagtcagggcaactgaactccactcatgcaaagatggtaaagcgcggctcgaaatatctgcgtttcgcgctgttcaatgccgctaaatatgtctgccactgggatactggatttcataagtatcttgataagaagcgttcagagggcaaggcttacaatgtggctgtttcccatgcggcgaagaaacttaccagggtgctttttcatcttgtgaaagcagataaggaatttgtctgccaggcataattttcagaatatcctattcaaatatgaaatccgactgtaaggtggtgctattttgtcatgcagttatcaaggttcaattttatccgaaatgctttgtagcaaatcatacagtatttttctttcaatagacttgacatttaatagttagt

SEQ ID NO: 4381 - DNA, 1410 bp, unidentified
  source 1..1410: mol_type = unassigned DNA; note = element_6a9990b
  misc_feature 1..2: note = core
  misc_feature 3..119: note = LE
  misc_feature 120..1157: note = CDS
  misc_feature 1158..1410: note = RE
  misc_feature 1179..1405: note = bridgeRNA
agatggtgtaacgggcggaacccggcccgccaggtttgaagggctggtggtcgtccctcacaatgatggtgtcgcggagtcaggagttgcctgctccatagcagcacggagagacgaccatgaagcagtatgccggcatcgacgtatcactggaatactcaagtgtgtgcgtggtggatgcggatggccgcattgtgcgggaagcaaagatcctcagcgaacccgatgcgctgatcgcctggttcggcgagcacggcgtggcgatggagcgaattggtctggaggccggccctttgtcgcagtggctccatgccgggatggtgaaagcaggtctttccgtcgagctgatcgagacgcgtcacgtgcgttcagcgtttaagacgatgccggtaaagaccgacaagaaggacgcacggggcattgcgcagttgatgcggcttggctggttcagaccggtccactgcaaatctcttccggcccaggaggtgcgtgctctgctgactgcccgcaagctcattcagggtaagcttcacgacatcgagatgagcatccggggcatcctgcgcggcttcggcctcaaggtagggccgacgacgcggcgcacttacgcggggcgcatccgcgagctgactgcaggccattcgaccttggaagcgattgccgcttcgctgctgaaggtgcgcgacgcgctggtgcatgaatttgcagattttgagcgcaagctgcgcgccatggcccgccaggatgataacgcacttcggctgatgacgacgccaggcgttggcgtcctggtggcgctgacgtttgtcgcggccgtcgatgcgccggagcgattccgctcatcacgcgcggtggggccgcacttcggattgacgccgaggaaatatcaatcgggcgagaccgatcatagcggtcgcatctcgaagatcggcgatgggagcgtgcgaaccgcgctctacgaggcggccaacgtcatcctgacgcgaccggtcaaaggttccgatctgaagggctgggcgttggcggtcgccagacgtgccggtcccagaaaggcgcgcgtggcgctggcccgcaagctggcggtggtgttgcattgcatgctcagggacagaaccaacttcattcctcataaggtagcgccagccctggcggcttgattggaggagacgacaagacaggctttcggacgggcacagccatcagccctccgcagcaaggtcccttcgccgggacgatggatgggttaggccgctatgcgatcagcagcacgaggtgactgcgcctctaaagattggccaaccggtcctcagcagaccccatagagcagcggcccagctccgactgcggacagaagcaagcactcggcgagggattaagctcacaagggattgacgcaaagcccgttacaga

SEQ ID NO: 4382 - DNA, 1461 bp, unidentified
  source 1..1461: mol_type = unassigned DNA; note = element_6aa16f6
  misc_feature 1..3: note = core
  misc_feature 4..223: note = LE
  misc_feature 224..1441: note = CDS
  misc_feature 1442..1461: note = RE
  misc_feature 7..221: note = bridgeRNA
ctaatagggttggaagaaggtccgtcgaatcggatagtgttccaccgagccaccgatgggtgagcactaggcggccagggccgggaagccctacagctagagagtgcccccgtcggccggcgaggggatgagacggctagtgggatgacgtgcctcgagcactgaactattaggtcggcgcgagtctcctccggctcgattcattctcgactggaggtgcagtttggggatctacgtcggcatcgattgggcggaagcgcaccacgacatctgcgtgttggacgagacgggcacggtcttgatcaagcgacggatcgcggaagggctcgaaggcgtggctcagctccacgcgctggtggccgatcacgcctcggaacccaaccaggtcgtggtcgggatcgagaccgaccgggggctgctggttgggaccctactggccgccggctaccaggtctatgccatcaacccgctggcggccagccggtaccgcgaacgccacgtgacgtccggcgccaaatcggaccccggcgacgccaaggtgctcgcggatctggtgcggaccgatcggcacaaccaccggccggtggccggcgactcggagctcgccgcctcgctgcaagtgctggcccgcgcccaccagaacttgatctggagccggcaacggctcgtcaaccagctgcgcaacaatctgcgcgagtactacccggcggcgctcgccgcgttcggcacggagttggcgcacccggtcgcgctcggcgtgctcgacgccgccccgacgccggcgctgggccgcacgctctcgcgggccaagctcgccgccattttgcgccgcgctggacgcgaacgtggggtcgaggaaaaggccgccgcgatccaggcccagctccgggcgccgcagttggccgcgcccgccctggtcggcgaggcttacggcaagagtgtcgcctcgaccgtccgcattctgcgcggagtcaatacggaactggccagtctggaggcggagttggcccccagttttgagaagcacccggacgccgagatctaccgcagtcttcccggacttggcatcgtcctcggcgcccgggttttgtcagagttcggcgacgaccgaacccgctttgcccatcctaaagcgcgaaagaactacgcgggcagctcgcccatcaccaagacgtccggcaaaagtcgcgtggtcctggctcgcctggcccgcaaccggcgtctcgccgatgcctgccaccagtgggccttttgcgccctgaccccctccgctggcgcgcgtgactactaccaccggctccggcagcgcggcaagacccatcatcaagcgctgcgagcgctcgccaatcgactcgtggggatccttcatggttgcctggatcaccggcagacctaccgcgaagacatcgcctggccgagctcgctgaccgttgccgcttgacttttacagccgtgggatgt

SEQ ID NO: 4383 - DNA, 1395 bp, unidentified
  source 1..1395: mol_type = unassigned DNA; note = element_6aa5cc0
  misc_feature 1..2: note = core
  misc_feature 3..296: note = LE
  misc_feature 297..1121: note = CDS
  misc_feature 1122..1395: note = RE
  misc_feature 1143..1381: note = bridgeRNA
tgatgctgtggaacggccccctacgacagcatccaagtgctaacgtggtcgttgctggcaacgccacaggtaaggagccgttccatgaaagagattaccacgatcgggctggatctcgccaagcagattttccaggtccatgccgccgatgtcgagggagcgccggtaataagccgaaagctgcggcgcgctgacgtgctgagctttttcaggaagacgcagcgtgtctggtcgggctcgaggcgtgcggtggcgcacactattgggcgcgcgagatcgcggccctcgggcatgaggtgcggctgatcccgccggcctatgtcaaaccatacgtgaaacgcggcaagacggacgccgccgacgccgaggcgatctgcgaagcggtgacgcgcaagacgatgcgcttcgtcccggtcaaatcggccgatcagcaagcggccgccatggtgttgaaaacccgcgagcttctcgtgcgccaacagacccaggccatcaatgcgctgcgcgcccaccttgcggaactcggcattatcgccgcggccgggacgacgaaggtggcctccttgatcgatatcgtgcgtgacgagaccgacgctcgtctcccgcaggcggcccgtttcgccttgagcgaaatcgccgatcagatcgaggggctgagccggaagatcggcaaattggaacacgccatcgtgatggaggccaagcgtgacgacgacatgcggcgtctatgcacgatccccggggtcggcgccatcatcgctgcctcgatcaagaccacggttcccgatccggggggattcacgtccggccgccacttcgcggcctggctcggcctaacgccgaagccccattcgagtggcggcaaggagcggctcggcgggatctcgaagatgggcaatccgatgttgcgctcccttctcgtacttggcgccacttcggtcctgcgacatgtcaagggtaacgccagcgcgccgccgtggctgagcgcgcttctggcaaggcgtcccttcaaggtcgtcgctgtcgcgctggccaacaagatggcacggatcatctgggcgctcctcaccaagggcggaaaatatcgaacatctgggaagacaagcgaggctcacgcttgagccggcggtcgaccaggacgaactgaccggcggtctcgccggccagaggcaaggtgtagtaccgatgatgaaccattgggacgaaatcccgacgcaggagaggccatgcgcgacgatgcgctcacagcgcgtttgattgattaggccacttgtatcggggacttcatcaagcccggcggtgtgatgccgcgctcaaaggccggacatatgaccgcatcgtcctcgatcggggcgtcgtctgaaaaagcgcttgcctgcggggccgttccacata

SEQ ID NO: 4384 - DNA, 1595 bp, unidentified
  source 1..1595: mol_type = unassigned DNA; note = element_6aa91b8
  misc_feature 1..4: note = core
  misc_feature 5..314: note = LE
  misc_feature 315..1478: note = CDS
  misc_feature 1479..1595: note = RE
tcacgtataatcaatcttatagaaatattaattaatttcttattgattgatccctttctatttatattttcttattatacatctagatgtataataagaattgcactgtggatttgttcctatacatttacagccattttatggactggtttgaggtgactcaaaccacagatttttaatttaattgttaattagttagttaacacgttagtttttaactaatcgatgttttattagattacgtgattacatgattagaaaccttgtggcaaacttatcagtgcagataaactaatttttggaggtgcttataaatgatatattatattggtattgatatatcaaagtacaaacacgatttctgtattatctcaaatacaggcgaagtaattgttgaaaactcatcttttgaaaacaacaaaaaaggatttcaatatttcttggaccaattgaaaccctataataaatctagtatccagattgcttttgaagcaactggacattactctttgaatttggaacttcttttaattgatcaagactattcttttatgaaaatgaatcctcttgtcattcatcagtttttaaaagctcgtagcttacgtagaactaaaaccgataaagctgatagtttaactatcgctaattatcttatgtctgttccttacaaaccaaattcacatttattatacaacatttatacattaaagtcactatgtagaagtagagaacaattaattaaagaaagaagtaagtttcaagttttattaaccaatgaattagataaatcatttccagaactaaaaattttttttaataatataatttctagtacactactttatatcttagaaaaatataaaaacactaatcatatatcattaatgaaagattacgaatctttaagaaaaatatctcatggtaaattttcttatgctaaatttgctaggcttaaacaactagctaaagattcaattggtcatcatgatgataactcagacttacttatttctacatatgtctcaactataaatcactttgatgaaaaaattgatccaatagataaacaaatttcaacaattatcaaagaacttaatcctaaaatgttaaccattccaggattaggcgaaatatctgctgctaccattctatctgaatatggagatattaaaaatttctcttctccaaataaaatgttagcttttgctggacttgagcctagtataatccaatctggtacattacaaaataatggcaagatggttaaacatggctctggacacttaagatattctattatgaatattgcaatgtctattcttagatactcaccaactttttatgattattaccttaagaaacgttctgaaggtaaatgtcatagagttgcattgtctcatgtatgtaagaaactcattagagttatttacacattagagaaaaacaatattaattttgatccgtctttattgaaataatttattatacaatttttcaaaaatttcactatgtgaaatctttttggcatgggattctttccaatttataacaaactattaaaaatttttaaaatgctattgacttctaatagttag

SEQ ID NO: 4385 - DNA, 1183 bp, unidentified
  source 1..1183: mol_type = unassigned DNA; note = element_6acc002
  misc_feature 1..2: note = core
  misc_feature 3..205: note = LE
  misc_feature 206..1168: note = CDS
  misc_feature 1169..1183: note = RE
  misc_feature 6..210: note = bridgeRNA
cttgtatcttccatccagaccgtcgcggtaaagtttgactgccgtaaaggtagccagaccggcccgtgcagtttggtagcgcctggggtgttcgagcccgtccctgagtacagaacgcacggccaccgcgctggtcttcattgagcccgaacggttacgcgcgccaccattgagcgcgcatgtacaagcatgggagttgaagatcatgtctgctttatcagtgacggtaggtatcgacgtggccaaggcacacgtcgatgtctgtgtactgggcacccacagcgatttccagcggtttgccaacgatgttgatggccactgtgcgctggctgctgccttgcagtccatggatgtgggcctggtggtgatggaggccaccggaggttacgaggcggctctggcgtgcgcactgcaggccgtgggcttgcacgtggcggtggtcaatccgcgccatgcacgcgactttgccaggagcatgggccgtctggccaagaccgatgcggtggatgcccgcatgctggccgagttggctgcggtgctgatgcgccgcgatgacctggcacgctttcttcgccctgtagccgatgagcgccagcagtggctcgccgccctggtcacgcgcaggcgccagttgctgaccatgctcaattccgagcgccagcggctgcaaattacgccccgtaagttgcaccccagcatcgaggccatcgtggcagcgatcaaggcacagctcgatgatctggagaggcagatggtgggccatgtgcgcgagcacttcggtgagctcgatgggctgctgcaatcgaccaacggcatcggcccggtggccagcgcaacgctgattgctcagttgcccgagttgggcaggctcaaccgccgcgagatcgccgccctggcgggcgtggcgcccgtggccaatgactcgggtaacaggaaggggcgacgcagggtgcagggtgggcgctttgagatacggcgtgtgctgtacatggccacgctgactgcagcgcgctacaacccggtcatccgggcgttctacgagcgtttgagggctgcgggcaaactgcccaaggtcgccttggtggcatgcatgcgcaagctgctgaccacgctcaacgcaatggtcagaaccggcaaaccttgggacccgtcgcttcatcgtgcttgactttgaagacggtta

SEQ ID NO: 4386 - DNA, 1404 bp, unidentified
  source 1..1404: mol_type = unassigned DNA; note = element_6ad47e9
  misc_feature 1: note = core
  misc_feature 2..61: note = LE
  misc_feature 62..1090: note = CDS
  misc_feature 1091..1404: note = RE
  misc_feature 1178..1398: note = bridgeRNA
taatgagatggtccgccgctgagtaacattattgctcggcagcatataggaggatcatcgcatgcacatcacatccatcggcatcgatctcggcaagaccacatttcatctggttacactcggcgagcagagcaaggtactagctcgcaagaagttttcacgcaagcagttgctaacctacacggcgaacctgcctgcctccctgatcggcatggaggcgtgttctggagcgcactttatcgcagccgccattcgcggtcagggacacgatgtgcggttaatcccggggcagttcgtaaagccatttctcaagtcgaacaagaacgacttcctcgacgctgaagccatcgcggaagctgtcgcccggcagaacatgcggttcgttcccatcaagaccgacgaacagctcgacctgcaagctctccaccgcgtacgtgaccgactggtacagcgccgcaccgcggtcatcaatcagatccgaggcttcctcatcgaacgcggcattacgttcgccaagcgaccggcgaatctgcgcaacaacatggcggcgttgctggaagatagcgaggccaacctctcgccacgcatgcgcagattactcgaagctgtgtggcaagaatggaaacagctagaggcccacattgcagaggccgacgacgagatcgagcgcatcgcaagtgcagatgcagcctgccagcgcctgcgacagatccccggcgtagggccgctgacttctaccgcaacggttgcggccatcggcaacggcgctgccttccgcaaagggcgcgactttgccgcctggctcggtttggtccccaagcaacgctcaaccgacggaaaagccagactgttcgggatcagcaagcgtggcaacgaatatctgcgccgcatgttcatccacggcgcacgcgcggtgttgtatcgagtgaagtacgacaccggcggtttcggacgatgggtgcatcaactcgaaacacgagccccacgcaacaaggtcatcgtcgccatcgccaacaagctcgcacgcatcgcctgggcggtgctgtccagcggcgaagtctatcaacatcagcctgtagtcacggcgtaaccggccgtggaaaagacgcttcgcttggaaagccaacaacgctttccacttttccaccgcctcgacggcggtggagactaacctcaccagagtctgctgaggagagaacggacgatagaacagtcaaacgacgtgccggagaacctggctgttgagttggttcccagtaaccgagggatttatcaggaccggcacgtgcgcatcatcatcgtggcccggagataaattatctccaatcagaggccggatacatttacgcagactgatccttcgcccgcctacttaactcttgcagtccggcggcggaccataca

SEQ ID NO: 4387 - DNA, 1593 bp, unidentified
  source 1..1593: mol_type = unassigned DNA; note = element_6ad6ba0
  misc_feature 1..2: note = core
  misc_feature 3..219: note = LE
  misc_feature 220..1455: note = CDS
  misc_feature 1456..1593: note = RE
  misc_feature 9..234: note = bridgeRNA
ttagtaccatataagtgtagttgttagagagtaattaactctgacatctacacttattttattataataaggggagtaattggtctggcgaggtgctttttggattagccacatccgacatcaaaaaccgtcacccaaccccttgttataagtattcgcttaagcaggtagagacatagctctcgtgtaaccaactaaaatgaattgtaataagtgtggatggatatcaattacaagaaaattttggaggtacgtatgataagtgtaggaatcgatatttcaaaaggaaagagcacagtttgcattttgaaaccatatggagaaatagttagtagtccatttgaagtacggcatgtggaacgagaactggatgctttagcacagatgatattaagattagatgaagaatcaagagtagttcttgaagctacgggaatatatcatcttccggttttgacatatcttcaagaaaagggaatttatgttgcagtcaataatccttatgaaatgaaggagtatgcaagtcgcggacttagaagagtaaaaacagataagcaggattctataacgattgctaattatggcatcgacaactggtataggttagaaaatcattctgcagcggacgatgtctattcagaactcaaactgttaggacgacaatactgccattacatggagcttcatgtgaaaggattattagaattaacccatatgcttgattatacaatgcctgggatcaagaaggaatttaacagctggaacgaagcaagtggaaaagataaactaagtgattttgttgagtgctattggcattatgacacaattacagccatgtctgaagaagagtttgttgcagactacgtgaagtgggcaaaagaaaacaaataccaccagaatcaatcaaaggcagcaactgtctatgaattagcttctgatggtattccaactttgtcctccaacactccatcgaccaaaatgttagtattggaagctgtaagagtactgcgagaaatcgacagtaccttaaaacttataataacacgaatgagagaattagcacaatcattacctgagtataaggttgtacgttctatgggaggtgtaggtgatgtacttgcgccaaagttgattgctgagataggtgatatcagacgttttcataatggtaaagcattgattgcatatgctggaatagatgcgccgccatatcagtctgggcaatttacaggtacgaatcgaaaaataagcaagcgtgggtctaaaacacttagaaaaataggctatgaaaccatgcgtgtattaaaaacgcacaaggaacctgatgattatgctgtgtatcgatttatactgaaaaaagaagcggaagggaaatctaagagacaggctaaaatagcaggattgaataaattccttaggatctattacgcaagagtaagcgaagtatataaataattcaagaaatataacaacataacatggcgatttggctgacgaaagttagtcttattgttgtacacaaaaatatgttgaatgaaacttttagaaaacctgcaagaaaagtgtgattcatacttgacttttcttagcagg

SEQ ID NO: 4388 - DNA, 1356 bp, unidentified
  source 1..1356: mol_type = unassigned DNA; note = element_6ada746
  misc_feature 1..2: note = core
  misc_feature 3..67: note = LE
  misc_feature 68..1090: note = CDS
  misc_feature 1091..1356: note = RE
  misc_feature 1121..1344: note = bridgeRNA
tgatgctgtggacggctctccaccccaccggcagcatctgcttccggtttgagctggaggaaaggccatgggtcaggttgtcacgatcggtttggacatcgccaagtcggtgttccaggtacacggcgtcgatgcggaaggcatcgtcgtcgttcggcagaagcttccgcgagcgcggttgctgcccttcttcgccaagctggagccctgcctcgtcggcatcgaggcgtgcggcgcatcccatcactgggcgcgcgagctgatccagttgggacatgaggctcggctgatgccgcccagctacgtgaagccctatctgaaacgccagaagaacgacatggccgacgccgaggccatctgcgaagcggtgacccggccgacgatgcggttcgtgccggtgaagtcgcccgagcagcagggcgtcatggtgttgcaccggacacgtctggtcctgacgcgccagcgcacccagctctccaacgcgatccggggtcacatggccgagttcggtctggcggcggccatcgggcgagaagggctcggcaagttgatcgcggtgatcctcgatggcgcggacgagcgggtaacgcgggaagcgcgcgtgtgcctgaccatgctggttgatcagcttcggttggtgaacgtgcagatcctggagaacgatcggctgatccggaccaatgcccgtgcgaccgaagttggccgccggttgatggaaatccccggggtcgggccgctgctcgctagcgctatggtcgctgcggtggccgatcccgcagccttcaagaccggccgcaacctggcggcctggatcgggctggtccctcgccagaactccagcggcggcaaggagcggctcggcggcatcaccaagcagggcgatcgctacctgcgtcagatgctggtggtcggcgcactcgccgtcgttcgctacgcgcaacgcaacggcacgcgtcgaccctggctgctgcagttgctgtcgcggcgaacgccgaaggtggcggcggtcgctctcgccaacaagaacgcccgaatgatctgggcgatcatgaccagcggcgagcgctacagggagccgctggcggcttaggagacaggtccggcgccacgccgcggccgacgaacttgggaagggcggacgagatgtaatgcgacagccggtcgataccggaagacgggaaaacccatctgcgccagcgcgcctcgagcgcgtgcttatggtcgggacccgtcttcgcggaaggcattatggccagcggtcatgcgtaccgcaccaacaggtcgaacacatggccgcaccgaccaagcttagcagaacgtcagatcaacccttgccaacggggagccgtccacaca

SEQ ID NO: 4389 - DNA, 1434 bp, unidentified
  source 1..1434: mol_type = unassigned DNA; note = element_6adda01
  misc_feature 1..2: note = core
  misc_feature 3..231: note = LE
  misc_feature 232..1419: note = CDS
  misc_feature 1420..1434: note = RE
  misc_feature 13..207: note = bridgeRNA
gtcctacctttcaagggggtctgatctggtcgttcgtaagatcggagggcccaggggccccgggtatggctgtcatgagggagaccgctcgatggcttaaggaacttggccacccggagccccgcgacgactcgaccgccaattgggaaatgcgactgcgatcgctgctgtaggacaacgtcggcgaggtcgtctgcgggatcgatgtgagacgagctggcggaggtgaccgtgcccgagatctgggccggagtggacatcggcaagacgcaccaccactgcgtcgtgatcaacgcggaaggcaagcggctgctgtcccgccgggttcagaacgacgagactgaactcctcgcgctgatcggcgacgtgctggagatgtccggcgatgtgctgtgggccgtcgacctcaaccatggcggcgctgccctgctgatcggcctgctggtcagccacggtcagcccgtcgcctacctcacaggtctggcggtccaccgggcctcggccacctaccggggtgagggcaagacggatgcgaaggatgccttcgtcatcgccgaccaggcccgggtccgccgggacatcggcctgttgcggcccggcgacgagatcgccgtcgacctgcgcactctgaccacccgccgcctggacctggtgttcgaccgcacccggcagatcaaccggcttcgtgctcaactgctggagatcttccccgcgttggagcggtcgctcgacctgacccgcaagggccatgtcctgctgctgaccgctcaccagactccggccgcgatccgccgcgcgggcgccagacggatcgagacctggctgaagaaccgaagcgtcaggggtgctgcctcgatcgcgaagacggttgtggaggcggcgcaggcccagcacaccgcgctgcccggcgagaaactggccgccgccatggtggcccgtctcgcgaagggggtgatggccctcgatgaggagatcgcggaactcgacgccctgatcgaggccaggtttcgcgagcatccgcacgccgaggtgatcttgagcctgcccggcatgggcgccaaactcggcgccgagttcatcgccgcaactggcggcgacatggacgccttcggcagctccgaccgcttggccggcttcgccggcctggcccccagaccccgtgactccggccgcgtcagcggcaacctccgcaggcccaggcgctaccaccgcggtctgctcaggaccatgtacctgtcggccatggtcagcttgcagtgctgcccggcctcgaaggcgtactacgaccggaagcgaagcgagggcaagggacacaagcaagccctgctggccctcgcgcgacgcctcaacgttctgtgggcgatgatccgtgacggagagtgtttccacacttcacctcccgtcacactcgcggcttgacatcacggttgggaa

SEQ ID NO: 4390 - DNA, 1155 bp, unidentified
  source 1..1155: mol_type = unassigned DNA; note = element_6addbf0
  misc_feature 1..2: note = core
  misc_feature 3..207: note = LE
  misc_feature 208..1143: note = CDS
  misc_feature 1144..1155: note = RE
  misc_feature 37..213: note = bridgeRNA
cttgtcttatgacttttctcgctgattgggcgagaatggaaccgccgggagggggttgcacctccctaccggcggcgagggtcggatcggagaattgctgaccgtcttacgggtcgagctagagtgtgatcgccctcgtctttcccttgaggcctgaacggatacctgcagcccggctgcgcacgacaagcacaggacaagcgaaagatgaccaacgataccatcggcgtcgacatctcgaaagaccatctcgactcctacagaatgagcgacggcgccagccgccgcttcaccaacgacaggaccggccacaaggccttcatcgcctgggcggcgcggctcgatatccgcgtcgtctacgagccgaccggagcctatcaccgggccttcgagcgcaggttggcggacgagggactcccgctggtcaaggtcaatccgtgtcgggccaggcgctttgccgaagccacaggcaaactggccaagaccgaccggcttgatgccgccatgctggcgcgcatgggcgcacttctagagcttgaggcgcgaccggtgcgcagcccgatcctcaacgacctcaaggacctgcacatggcccgcgaggcgctggtgaagaaccgtacggccgcaaagaacagggcaaaaaacctgaccctgcccatcctgaagcgacacaatgccgagcaactcaggcagatcgaacgccagatcgccgcgatcgaggtcgagatcatggcgctcatcaagaacgagccggacttggcgcaacgcttcgccatcctcgtctcgatcccgggcatcgcggccatcaccgccttcgcgctcctcatcgagatgcccgaactcggcacccttggaaacggccaggcagcctctctcgcaggcctggcgcccgtcgcgcggcagtccggacaatggaccggccgcgccttcattcgcggcggacgggccggtgtccgtcgggccctctacatgccaacgctcgtcgccatgcgcttcaacccggacctcaaggcaaaatacgagcacctcgtcgcagtcggcaagccacccaaaaaggccatcgcagctctcatgcgaaagatgatcctgctggccaacgctctcctgagggacggccgaaaatggaccccatcccttccttgaccaacacggata

SEQ ID NO: 4391 - DNA, 1581 bp, unidentified
  source 1..1581: mol_type = unassigned DNA; note = element_6adee18
  misc_feature 1: note = core
  misc_feature 2..76: note = LE
  misc_feature 77..1330: note = CDS
  misc_feature 1331..1581: note = RE
  misc_feature 1342..1571: note = bridgeRNA
taatggaatggtccggccgtgctcctgccccaccagcgataagctggtcaggggacgcccagacaaggagcacgccatgtcccagaagctcaactcagcggtcgccgtgaccggcatcgatatcggcaagaactcgttccacatcgtgggccacgatcaacgcggagccatcgtgttgcggcagaagtggtcacgccggcaggtggaagcacggctcgccaacttgccgccgtgcctgattggcatggaggcctgcgtcggcgcgcatcatctcagtcgcaagctgcagatgcttggtcacgatgcccgtctaatgccggcgaagtacgtacgcccgtattcgaagggacagaagaacgacttccgcgatgcggaagcaatcgccgaggcggtgcagcgcccgaccatgaagttcgtcgcgaccaagaccgccgagcagctcgacctgcaggcgctgcaccgtgtgcgcgagcgactggtcggtcaacggaccggcatcatcaatcagatccgcgccttcctgttggagcgaggcgttgcggtgcggcaaggactgcgttacctgcgcgccgagttgccgggcatcctggcgacgcgcaccgatgtcctctcgccccgcatgttgcgcatcatcgaggacttggcaggagactggcaccggctggatgagcggatcgcgggcctctccggcgagattgaagcgctggcccgtcaggatcaggcctgcacccggctgatgacggtgcccggcattggaccgatcatctcgagcgcgatggtggccgcgatcggcagcggagacgtgttctcgaaaggccgcgacttcggcgcctggctcggactggtgccgaagcagatatcgacaggcgaccgcacgatcctcggcagcatatcgaggcgcggcaatcgctacctgcgtgttctgttcgtgcaggccgcgtgggtcgtgttggtgagatcaaagcagtgggagcgctatggcctcaaatcttggattgaggccgccaagaaacgattgcaccacaaccgctggcgattgcgcttgccaacaagctcgcccgcatcgcctgggcggttctcaacaaggggcgcgccttcgagtgcgtcaagagagatgcgatggcgtcccgacccgcttgatcctcgcgccgtgctcgggcccgtcaaggcgtggcctggcaacgctggagcgagaggcaaggcaagcgcgacggccagccttgacgaccccttgcgcgcggcgcgcctgcacgcgcaggccgggacgaaggaacagccgtcaggcacgaacaaaggaacagtgcgaaatgaggagctatcgatgacgtagcaacaccccttacccgccgaggtctgcgagaggatgagacgagatggaggatcggtcttcccggcgcgtgcgaacactggtgacccgaatggccccgttggaggcctatccgctaatgagatcgcacgcgcgctgatatccatgatggcccggagcaccacatgctccaatcagaggccggatacattaatgcgagaccgcatctgccggatcgaggaaaacctcttgcaacgcacggccggaccatacat

SEQ ID NO: 4392 - DNA, 1257 bp, unidentified
  source 1..1257: mol_type = unassigned DNA; note = element_6ae047e
  misc_feature 1..2: note = core
  misc_feature 3..243: note = LE
  misc_feature 244..1209: note = CDS
  misc_feature 1210..1257: note = RE
  misc_feature 60..229: note = bridgeRNA
gtgataagtttgcatagtttaataaaaaggatgtaaaagttaaaatacctttgggaaaataatcattggaaaaagcaataggaaaaagatcgcagccttgctggtagttagataccgtccttgacacaaagtccctattgcttgttttctaaaaaccgaatagaatgttgtttagtcataagaaaactcttatcacactggttataagaaaacttttttccaataaaataaagaacttttataatgtcaaatttagaaaaaaaagtaatcggagtagatgtgagctctacgattttagtgatgagttttttagatgatgagaatcattcgactatcatcacaattaataacagtacaacatgtattgagaagagtctgaaaagatgggataaacatcaatttaaaattgtagtggaagccacaggatcttacagtagtaaaattttatattatgcctattctatgggatttgaggtttaccaagtgagtggattatctataaaaaagttttcagaagtaaaacatcacatcagtaaaacagatgagcaggatgctgtgttaataaggaactttggagaagttatgaaaatggatccttatgaaccgaagaaagaaaatattgagtttttggagcaggagctcaacctatggcaggatttagaacaggaaaaggcaagatatacattgaaactaaaatcactttgtcaaaagccgatccttaataaatcagttataaaacactacgaaacaattattaaaaggattaataaagatattgaaaaccttcagaaaaggcttccaagtctggaagacaaagaatttaaagaaaataaagatttattaaccagtataaatggaattgggaagaagacagctttattattacttgcttcaaccaataactttaagaatttcaaacattcaaaagcactttgcaaatattttggagttgtccctaaaatgtatcattccgggaataagaaaatatcaattggtaaatgtagaaccagtaaaggttttataaggagtattttatatgtctgttcctggagtgcaattcgttttaaaaaacaatgcaaagcgctttatgaaagaattctggaaaagaaaaaatgtaaaaaagtggcattaattgctgtttgtaataagttgttaagacaggcttttggaattataaatagtaaaatacaatatcaacacaattattaatgaaatatgaatattttaacttttaaaacttgctaattaacatagaat

SEQ ID NO: 4393 - DNA, 1164 bp, unidentified
  source 1..1164: mol_type = unassigned DNA; note = element_6afb6ea
  misc_feature 1..2: note = core
  misc_feature 3..210: note = LE
  misc_feature 211..1152: note = CDS
  misc_feature 1153..1164: note = RE
  misc_feature 36..216: note = bridgeRNA
cttgtcttatgacattgttgtccgtttgggtcaggatgagatgcccgttccggggtggccaccccggaacgggtggaaggggacggatcgcgcatcgatgccggtcgatcagggaccgggttagagttggatcgcccctttcttttccttcaggcccgaacggataccggggctttgtggcccggatgacaagcatgggacacggaaaagatgagcaatgatctaccacaaacccttggcatcgacatctccaaagcaacactcgattgccatgcccaccctgcctcagctgcccggcagttccccaataccaccaagggccacaaggcgctgatcgcatggctcgaacaatggacagtcgcgcaaatcgcctatgaagcaacgggaacttaccatcgtgcaatagaacaggcgctcgctcacataccctgcgtcaggctcaatcccgaacgagccaggcgctttgctcaggccaccggcaccctcgccaagaccgaccgcatcgatgccgccctgctggcccgcatggcagccaccgtgcaacctcccatcaggccagcgccatgtgcaaatcaggtgctgctggccgaactcatcaatgcccgcgacggactagttcgggatcgtactgcactcaagaaccgagatcagaaactcaccattcctttcctgaagcgccagtgcaggcagcgcctcgaccagatcgcacgccatatcgaagcactcgatgctgaaatcgcccagatcatcgctgctgatccggctctggtccgccgccataacatcctcaccagcatcgatggcctcggaacgctgaccgccaatcaactcatcgccatcatgcccgaactcggcagccttgataacaaacaggccgcatcactcgccggtctcgctcctgtcgccagacagtccggccagtggaaaggcaagagcttcattcgaggcggccgcgcaaacgtccgcaaagccctctatatgcctgccctcgtcgctgcccgcttcaaccccaatctcaaggcaaaatatcgacaactcatcgccggcggaaaaccaccaaaactcgccatcactgccgtcatgagaaagctcatcgtcaccgcaaatgccctgctcaaggcagatcgcatctggcgcaaatcactcgcttgaccatcacggata

SEQ ID NO: 4394 - DNA, 1372 bp, unidentified
  source 1..1372: mol_type = unassigned DNA; note = element_6b03382
  misc_feature 1: note = core
  misc_feature 2..88: note = LE
  misc_feature 89..1120: note = CDS
  misc_feature 1121..1372: note = RE
  misc_feature 1138..1364: note = bridgeRNA
caatggtatggactcctcctcccctaaacggcatctaagtgccagactggtaagcgataccaccagtgaacggaaaggaggagtcaccatgaagcttagtagagttggcatagatttggcaaagaacgtttatcaactgcacggtgtcgatcgtcacggcaagacggtatggaaacgccgcctgaatcgtcatcaatggttcagggcattgctggataagatagagccgggttgtgtcattggcatggaagcctgcgccagtgcgcatcactgggcccggcagctgcagtcaagaggctacacggttaggttgatgccaccgcagttcgtgaagccgtacgtgaagagcaataagaatgatgccagggatgccgaggcgatttgcgaagcgatgagtcgaccgaacatgcgctttgtgacggtcaagcgtgtcgagcaacaggacattcaggcgacgcatcgcattcgggctgagctgatcacacagcgtacggccaaggccaaccagatccgcggactggtggcggagtacggtctggtggcgccaaaacagatgagctcactgcgagcagccattccgtgctggctggaagatgcggagaacggactgacgggtgattttcggcgattactgcagggcgtgtggaacgatctgttgatcctggatgatcgtgtcggcgagatggataaagcgatcaagcagctggcggataagcacgaagcgtgtgtgcgcttgcaacaactgcgcggtgtggggccgatgatcgccaccgcgatgatcgccacggtgggtgatgcccggcagtaccgcacgagtcgacagatggcggccgcgatcggcatcacccccaaacagcacagctccggggaccgagatcgcttgctcggcatcagtaaacgcggcgatgtttatctgcgtacgctgatgatccacggggcgagatcggcggtggcggcagcaaaacacaaagacgaccggctcagtcgctgggtcaccggcatcgccaagaagcgacacccgaacgtggcggcggttgcattagccaacaagacggcacgtatggcctgggctatgctcaggaatgaaacggattacgatcctgacttcgcaataagctgaggcaggaaaaggagatcctctacaacgattgcttaagcaaactgcataatggcaaacaggttagaccggcgtcggccaaacccgggaatgtccacgtacgttgaagtacgagaaagcgattgggagctgacgcgcgaataaaccattatggcccggcatcaatgcatgccaacttcagaggccggatatacgtatgcagtcgtgccatgtctgccacagcagcttgcttgcaaatgaggaggagtccatata

SEQ ID NO: 4395 - DNA, 1449 bp, unidentified
  source 1..1449: mol_type = unassigned DNA; note = element_6b0a80e
  misc_feature 1: note = core
  misc_feature 2..230: note = LE
  misc_feature 231..1436: note = CDS
  misc_feature 1437..1449: note = RE
  misc_feature 13..240: note = bridgeRNA
ctactaggagacttcccgcaggatcggtgtctggccagactctgatctaggtgatcgtcgggacgctctcaatcgcggctgcccacccgatctcgggtgtggctctcatctggactgcgacccgtcgatcactgtgacgaggcgtggctcaagaggggtctgcccagctcgtagtagcactgcccacctcgccgtcctgctggatttccgagcgcagacgaggtgagcagatgagcagcagcaagcacgtcatcatcggggtcgatccccacaagatgtcggtgacgatcgaggtcgtcgacatccatgaacggttgcttggcagtggcaggttcgctaccgacaaggccggttacgccgcgatgcagcgttatgtgaagcagtggcccgaccgggtctgggccgttgaaggagccaacggtgccggccgtcctctggcccaacgactcgtcgccgctggtgagaatgtggtcgacgtcccggccaagttggcggctcgggtgcggctgttcgacaccggccacaaccgcaagaccgacgcgctggacgctcactccatcgcggtggtcgcggtccgcaccgacgggctgcgggtactggtcgaggacggtcatctagaagcgctgcggatgctcaccgaccgtcgtgacgagctcgctcaccagcgagtgcagacggtcaaccggctgcagcgcctgctcagcgagctgctgcctggcctgcgcaaacgcgacctgtcggccgctcaggccaaggccatgctcgccaccgtgcgcccccgtgacatcgccggcaagactcgccgccggatggctgctgaggagatcagggacctcgtcacggtcgacgccaagctcaagaagatcaaggccgagctgaaggccgcggtcctcgagcgcggctcgcacctgatggacatctacggcgttggccccgcaggtgctgcgcgggtgctggccgacgtcggcgacgtcgcccgcttcgctgaccgcaaccgcttcgcgtcatggaccggcaccgcacccttggacgcctcctcaggagagcagacccgccaccgtctgtcacgggccgggaaccggcggatgaaccacctgctgcacgtcgcggcgatcgtgcagatccgccacgacaccgaaggccgggcctactaccgacgcaagctcgccaccggcaagacacccatggaagcactgcgctgcctcaagcgacgcctgtccgacgtcgtctaccgccagctcgtcgccgacgcccaacgcgcgcagcagcgcgatggagcggatccgggagggcactgcggggcgactcttcattccagcgcggccgacttgcacccgctcatcgacacttcggatcagccacttcccggacccgcgcagccgacgctacgccgagcaccagccatcaggaagaccctcaccagagcggctccttgacacagaggggagc

SEQ ID NO: 4396 - DNA, 1432 bp, unidentified
  source 1..1432: mol_type = unassigned DNA; note = element_6b0b3da
  misc_feature 1..2: note = core
  misc_feature 3..231: note = LE
  misc_feature 232..1416: note = CDS
  misc_feature 1417..1432: note = RE
ctgatataggtccttgtcggagggttcatcctgcgatggaccctcgcggggagaccgaacgccagctatccggcttcgaccgatggggctagttttcggccctcgcgctccgtccaagaacggtgatcgggaccctgtggcggccgacaggccgaccagtgatcgggcatcagcgggcgtgggacggatgacgtgagctccccggggtcagaaatgatcggaggagctggcatggcgaccatcggcatcgacgtcggcaagcggcagcacatcgcggcgatccagtacgacggagagcgcgaggcccgcagagcggtcctgcacttcggcgcggaccgcgccggactggccaccctcagcgcctggatcgcacggcagggcgggatctcgcgcgcggtcctggagtccagcggtcattaccacctcaacctggccgcggcgctgcagcggcaaggcctgccggtcgcggtcgtgaacccgctcgaatccaagtacttcggcaagcgccgcctgcagcggaccaagagcgatccggccgacgcgcgcacactggcaacactcgccatggtggatgagccacaggttcgtgacgtgctcgccggcgccgagctgcgcgaggcggcgcgtttcgcgatgggcctcgtcgaccagctcgggcgggtcgaccagaagatctgccggctggtggagatcggcttccccgaactcgagcaggcctatgacgacccgacctgcgtgagcgcgcttgcggtgctgcgcaccgcgcccaccgcccaggcggccgcgcgcaagcacaccgcgaccttggcccaggtcgcgcgaccgggtggcggccggcgcatcggcccaaagaaggccgagcacatctccgcgctcgcccacgacaccatcgccgcacccgagctggcggcgcagatcggtttccagatgcgcctgctcatcgcccagcacgacatgctcgagagccagatcgccgaggccgaggcgcaccttgcgagcttgctggacggcgagctggtgcggcgtcttcgcaccatccccggcgtcggcccggcgatcgtggccacgctcatcgccgagatcggcgacatcgctcgcttcagtgagttcgacaagctcgtggccttcgtcggcgtgcacccggccgagcgaagctcaggcgagaaaggcaagaaccccgagaccagctggcggatgagcaaggccggcaacgcctacctgcgcacggcgctctatcgcatggccatcgtcggcatcacccacaacccactgatccgcgcccactacgcgcgcaagcgcgcccagggcaagagcaagatgaacgcggtcggccactgtatgaagaaggccctcgcgatcgtttggggcgtctggcggagcggcacggacttcgccgctccgccttcacacccttgacaaccccttatgggac

SEQ ID NO: 4397 - DNA, 1207 bp, unidentified
  source 1..1207: mol_type = unassigned DNA; note = element_6b0dfd3
  misc_feature 1..2: note = core
  misc_feature 3..217: note = LE
  misc_feature 218..1204: note = CDS
  misc_feature 1205..1207: note = RE
  misc_feature 39..194: note = bridgeRNA
tcctttagatttgtttggaagtaatttattaaatttagaatagagaaaagtgtttaagtaaactaaccctcactcagggcaaaacccatacttcgatttagacttaaacactttactcatcaaaatctcaaatagaaattagggatgcaagcccattataaaggagttgagttattgatgattttctctaatcttttaatcacttaaaaacaaaattatgaaaaacatttttattgggattgacattagttctgaaacattggatctctgtaccaaaaaggacggacaagtcgcatattcgaccattgggaacactataaaagattgcaacaaattctttaaaaaacttttggttcatcacgggcacaaaatttatgttgcaatggaaaacacaggtaggtacaattacaatctgtatgaagcactagagggtttttcattcctggtctatgtaataaaccctatccatatcaaaaaaagtttagggttggtcaggggaaaaaatgaccgtatagatgcagaaaggatcacattgttcattgagaaaaaccatatggacataccacaatgggaaccaagcacggaatccattaaacaattgaaggtattgcaggcagaaagaaagtatagggtcaaaataaaatcaggattgcttaggcaacgagctgattataaattaattaatgtcaatggaatagacaaagagctacttaaactaaatgaaagcttgatcaggaacgttgatgcgcaaataagcaagatagaagctaagatacaatttataattggtaatgatgaacagttaagggaacaggcaaataggatccgaaccattcctggggtgggcaaagtattggcttggatgatgctgtccagaacggaagggtttacaaaaatagataacccaagaaagatggcctgctttgccggcgttgttccttttgaccatcaatcgggaacatccttaagatatagacccagggtatccgtttttgcggataaagaattaaagaaagtactccatttggcagcaatgagtgccattaggctagaaaatgatcttagggtatactacctaagaaagattgaagagggcaaaaacaagatgagtattttaaatgccattaggaataaaattatccatcgcatttttgccttgattaaaaaccaaactttttataaaaatcgtttggtcgtgtcatagaaa

SEQ ID NO: 4398 - DNA, 1306 bp, unidentified
  source 1..1306: mol_type = unassigned DNA; note = element_6b17c83
  misc_feature 1: note = core
  misc_feature 2..215: note = LE
  misc_feature 216..1088: note = CDS
  misc_feature 1089..1306: note = RE
  misc_feature 1101..1292: note = bridgeRNA
taataggatggactacctcctccctctgaggttaactgaacaaaatatactcagcaggagcattatcatgaatgttatctatctcggtattgatttggctaaaaatgtttttcaactttgtggattaaatcagtcgggtaaaccggtttataaaaaacgccctgatcgtaaaacgttgctacagaccgtcgcgaatattccggcttgcctgattggtgtggggagcctccacgggcgcattttactggcagcgtgagttcgaaaaactgggacataaggtaaaagtgatcagtccccagtatgtaaaaccctttgcccgcgggcaaaaaaatgacggtaatgatgcacaggctatcgcaattgctctgatgcagccaacaatgcagttcgttcccccaaaaagtccggaacagcaggatattcaagcccagcaccgggcaagacagcgtattgttaatcaccgcactgcgacagtctgtcaaatcagaggattactgcttgaccctggaataacaatcggtacggcagtctcaagggttcgtcacgctgttccgcttattcttgaagatgctgaaaatggtcttagcgttagaatgcgcaggacgattgcagaactttatgatctctttaacgatcttggtcgtcgcataggcttttttgataaagaaattgatgctgtgttcaggcaatcagaagcctgccagcgcattgccaaagttaaaggcattggccctaaaacagcaacagctgttgttgccgcgataggcaaaggaactgaatttaaaaatggtcgtcactttgccgcatggcttggtctggttccacgacagcactcgagtggtgacaggcaggtactgatgaatatgacgaaaaaaggcgacaagcatttgcgaaccttatttattcatggagccagggcagtcgttagagtggctgcaaataataatgagggttatttaaatcaatgggttaatcagctaaaagagcgacgaggatttaacaaaacgaccgttgcagtcgccaataaaaatgccagaattatttggtcaattcttcacaatgaaacagagtacagaccggcagtgtaatagcatacctttaaaagttgcaaggtattgaaaaatggatacaggttaaacctgcacgatcggaacctgattattatattggccttcgtggccgtccagttgttgaggcgattgtgtgcggatcacccatttgggcacagatatttctgatgccggatagatgtaagcaacagcctaaaacttgattcagtacttgcaaaacggaggtagtccataga

SEQ ID NO: 4399 - DNA, 1170 bp, unidentified
  source 1..1170: mol_type = unassigned DNA; note = element_6b27458
  misc_feature 1..2: note = core
  misc_feature 3..204: note = LE
  misc_feature 205..1155: note = CDS
  misc_feature 1156..1170: note = RE
  misc_feature 3..180: note = bridgeRNA
cttgtatggttagacttgaaggggtggtgggacgaacagttcgcatctgactgctgcaacagtacagaccgtgggagacctcgccccaccccttccaccaaaagcgccgataaagaatgcttcgttcaagcgacgatagaaacaagcctgcgcctctgggtgaacccccaacaagtcgtcaaaccttagcgtggagaaatgctcatggcaatgcgtgtttcgaagtcaatcgtaggcgtggatgtcgccaaagttgagctcgttacctaccaggcagatccgaatctgctaacctcgatagccaacgaaaagcctgccataaaacgctggcttaaaacgttaccgaggaccaccgccattgctgttgaagcgacaaatgtttatcacgtcgatctggtcgagctggcttacgagtctggtttcgacgtttacatcatcgacggttttcaactcagtaattaccgtaaaggtgtcggtggccgtagtaaaacagacgcatctgatgcccgtcttcttgcccgatttctgaaaaacgaaggcgaaaatcttcgcccctggacgccgcccccagcagtctacggcaagctgcaaagccttctgcgacgcagggcttcactgattcaagccaaaaccagcctgacccagagctgggcaaatgacaccagcttgaaggcgtcatttgcagccttcctcaagtcaatcgaacggctagacctgctggtcaaggcaaagctcaaagatgccttgcgcgaagccgggctgctggagcaagtggcccgttgccaagctgttgaaggtatcggcttcctgaccgcgacagctctggtcatggcttacaaccgaggcgacttcaagagcggcgactcctacatcgcttttttaggcatggatctaagagtgactgattctggccaaaaaaatggccgtaggttcctaaccaaacgaggctgctcggagattcgccgattgctgcacaacgcagcaatgtcggccagccgatcgagtgcctggaaagagttctacgaccatcatcgcagccgcggaaaagcaaccacacaggtacttgtgatgctcgctcgcaaactcgctcgggtggcgttcgccctgatgaaaaatcagagcgaatatcaacccaaagggtgggttatggcttgatcacaaccatagaat

SEQ ID NO: 4400 - DNA, 1497 bp, unidentified
  source 1..1497: mol_type = unassigned DNA; note = element_6b2827f
  misc_feature 1..2: note = core
  misc_feature 3..240: note = LE
  misc_feature 241..1476: note = CDS
  misc_feature 1477..1497: note = RE
  misc_feature 6..237: note = bridgeRNA
ctaatgggttctgtcagcctgctgcggcaggatggctctggtagcggctggcgggtcagcactcttctcttcaggccttcaaggtcttgcggcagaccgtgcgcccgctggtcgtgaggaggctggacagctgatgggatgacgtgccccggatgttcgcggtgagcacttggccattagatcgctgaggtctcttccacgctgccatggacgacactgtccatcgaggaaggtggcgtgatgctgtatctgggagacgactgggccgaggaccaccacgacgttgagctcgtcgacgaccacggtgcgaggttggcccgtaaacggctacccgaaggtctcgagggcgtcacccggttgcacgcgctgatcgccgagcggatgccgcccgagtgggccgacctggacccgggcgaggccgcagcgcaggtgcggatcgggatcgagaccgaccgcggcccgtgggtgcaagcattgatcgcggccggctatcaggtgtatgcgatcaacccgatgtccgtggcccgctatcgcgaacggcattccacctcgggggcgaagtccgacgccggcgacgcgcacgtgctcgccgagatcgtgcgactggaccatgcccatcaccgacctgtcgccggggacagcgaccaagccgaggcaatgaaactcgtcgcccgcacccatcagaccctgatctgggaccgcacgcggcagctgctgcggctacgcagcgtcctacgggagttcttccccgccgccctggacgtcttcgacgacctgaccgcgtcggacgcgttggagctgctggcgcgtgcgccggatcctgctcgcgccgcccggctatcgcggtcgcagatcgccgcggcgttgcggcgggcgaaccgccgccacgttgacgccaaagccgccgacgtgcagcagcgactacgcggggcgcagctgcgccagccggacgccgtccaggccgcctacgcggccatcgtgaccgctcaggttcggctgatcgcggcgctcaacgtcgaggtcgagcagctcgggcaggtagtggccgaccattttggccggcaccgggacgctgagcactacctgagccaacccggcctcggcgtggtcctcggcgcccggatcctcggcgagttcggcgacgacccccaccgcttcaccgacgcgaaagcccgcaagaactacgccggcacctccccgatcacccgcgcatccggcacccgcaccatcgtgctggcccgttacgcccgcaaccgacgactcgccgacgccgtgcaccaatgggccttctgctcgctgaaaggctcacccggcgcccgcgcctactacgacgccctccgcgcccgcggcaccggccaccaagccgccctacgccaactcggcaaccgcctcgtcggcatcctgcacggctgcctcaaaaccgatacgacctacgacgaggcaaccgcctgggcacatctccagcccacttcttgacaacctcagaacatgggatgt

SEQ ID NO: 4401 - DNA, 1134 bp, unidentified
  source 1..1134: mol_type = unassigned DNA; note = element_6b2cd95
  misc_feature 1..2: note = core
  misc_feature 3..208: note = LE
  misc_feature 209..1123: note = CDS
  misc_feature 1124..1134: note = RE
  misc_feature 12..191: note = bridgeRNA
cttatctcttgccgatctggcaccttaggtgccgagagcccggcgtgggcgaccgttcggctctgggtcttgcgaccgctctgtagcttggtccccacgccggattctccctgaaccgcccgaacagttgatcgagttggctctcggactgataagactgggcaagcggggggagctctcggccctgtcagcctaccggagttgagccatgtttgggatcgggatcgatgtgagcaaggacacgttggacgtggccgtccacgaacagcagttccgtcagttcagcaacgacaagcgtggtgtccagcgtttgatccaatggctgaaacaatggccgacaaagcaggtcgtcctggaggccagtggcggctatgaggtggcggcgttggatgccctgcacgcggccggcctgcctatggttcgcatcaatccggcacgggcacgtcgattcgctcaaggcaccgggcgggccgccaagaccgatcggctcgatgccgaggtgttggcccagatggcacacctgctatcccttacccgctacaccccgccggctccctggcagcgtcgattggctgaatttgcccagtgccgacgccagctggtgcagatgcgggtcagcgagatccagcgcctgcgtcaacttggcgaacccacgctgatcgcaatgaagcagcgccatatagacgagctatccaaagacatcaaggaattggactcagctatcaatgagcagctcagtgcccagccggcctggaaaaacatcggcaccctgaagggtgtcggcccggtcctggccaccacgttggcctgcgagctgccggaactggggacgctgaatggcaaggccatcgccgcgctggtcggcatagcccccatgaaccgggaaagcggcacatggaagggacagcgccgtatcagcggaggccgtgcggtggtgcgcgaagcgctctacatggccgccttgacggccatccggtacgagccacggctgcgcgatttttacgccactctgaagagcaagggcaaggcgagcaaggtcgcgctggtggcagtcatgcgcaagatgctggtgatcctcaacgcccgtaaacgagatgcggaggccctcatggcctccgactgacaagacagttg

SEQ ID NO: 4402 - DNA, 1353 bp, unidentified
  source 1..1353: mol_type = unassigned DNA; note = element_6b2eef2
  misc_feature 1: note = core
  misc_feature 2..72: note = LE
  misc_feature 73..1080: note = CDS
  misc_feature 1081..1353: note = RE
  misc_feature 1119..1350: note = bridgeRNA
taatgtgatggtcccctccaccatgagcggatacgctgtaggcgttttctcacaactggagcgggagtcatcatggaaagcgtgacgctgatcggaatcgatctcggtaagcattcgttccatctgcacggccaggataggcatggtaaggccgtgttccgcaagaagatgagccgcaaacagttgcacgaattcttcgcgacactccatgcctgcatagtggtcatggaatcctgcgccggcgcgcaccacctcgcgcgcaagctggctgagatcggccatcaggttaagctggtctcgccgcagttcgtgaaaccgttcgtcaaaagcaacaaaaacgactttgcggacgccgaggcgatttgcgaagcagcttcgcgcccgtcgatgcgcttcgtgacgccgaagacggaatcacagcagacgctgtctgtgctgcatcgggtgcgagaatccctggtacgtgaccgtaccaagaccatcaaccagatgcatggctttctactcgagttcggcatcagtctaccgacgggccttgcagttattaggcgcttgccggccgtgcttgccgaacatgcgttgccgccatatctggtcagcacgctagaacgtctccacgcgcacttcaaatacctcgacgggcaggtcgacgagatcgagaaagagatccgccttcaactagccgacgacgacctcggccagcgtctgctgagcataccgggtgtagggccgattacggcaagtgtgcttgcagcggagatgggcgatggccagcaatacggctgcagtcgagattttgccgcgtccgttggactcgtgccgcgacaatacagcacgggcggccgagccaatctactaggcatcagcaagcgcggcgacaagaatctcaggcgcttgttggtccagtgtgcccgagcctacatgcagcgcctggaccggcagaccggacggctagccgactgggttcgatcaatgctcatgcgtcgacattccaacgtggtggcctgtgcgctagccaacaagctcgcgcgcaccgcctgggcactggcaatgcaccacacggcgttcaaggcggcatgagaagaaacgccgcctaaacgttcggactactgttgtactgatgtatccatctggttttgcgacgactggaatttgatgacgtgaacggcataacggcctgacagacaccctgtgatgtaaatcggccttcgaggccgagacagtttcaaggactgtcaggcgcgactctcatcgtggcgcggggagcatcttctccaaacgacgccggatagatttgggcaggccaaccacaccgtcaaaaatcagggttgcaaaaacggaggggaccataga

SEQ ID NO: 4403 - DNA, 1569 bp, unidentified
  source 1..1569: mol_type = unassigned DNA; note = element_6b39604
  misc_feature 1..4: note = core
  misc_feature 5..196: note = LE
  misc_feature 197..1462: note = CDS
  misc_feature 1463..1569: note = RE
  misc_feature 10..232: note = bridgeRNA
ttttgtaccataaaagtgtaagtaacaagtacttagctgcttggaaacttgcgcttgtttttttatgataaggagagtaattggtctggcgtggcgttttttgggtttcacatccgtaaataaaaccgtcaaccatctccttattgtgaaccatcgattaagcaggttggatcaggcatccgtgtaacgagcaaaaatgaatggcaataagtgtgggtggaacaattgcaaaaatactttaggaggagaacttatgcttagtgtaggaattgatgtttctaaagaaaaaagcatggtatgtattatgaaacccatgggcgaaatagttgcaggcccatatgaaatcgaacataccgaatctgatttatcagaattagcacgtatgataaagcggttagattctgatgtacgcattgtcatggaggctacgggaatctatcatcttcctgttgcaacaactttaaaagatgcagggctctttgtttccgttatcaatcctttagaaatgaagaattatcgatcacaagacatgcgtaaagttaaaactgataaaagagattctatttctattgctaattatggaattgagaaatggttcaccttacgtccttttgattgtcaggaaggtgtatatgcagaacttaaacttttgggaaggcaatatcgattctttatggaatcgagaattgagcttctactaaatttgactcatcttcttgattacacaatgcccggtgtcaaggcttgcttcggaggttggagtgagtactcaggaaaggataagttatgtgattttgcagaagaataccggcattatgataacatcacgaaacgtagtgaaacaaaatttatcgaacattaccagaaatgggcaaagaaaaaaggataccatcaaagcgaatcaaaagcctctcaaatctaccgactcgctaaggatggcatccctacaattccttctaacgcaccttcaactaagatgttagtgttagaagcagtcaaagcacttcgtgaagtaaacagtgctctatttgctattttaacacgcatgcaggaattggcaagaacattacctgaatatcctactgttagagcaatgggtggcgtaggagatatactctccgttaagctgattgcagaaatcggagatgtcagaagatttcatagtagtaaaggtttgattgcatatgcagggatagatcctcctccatatgaatcagggaaattgataggcacgaacagacacataaccaagcgcggctctgcaactctgcgtaagattggatatgaagtgatgagatgtgtgaaagcgggagggcgatcagaagaagatccggcagtatatgattttatgataaagaaagaagacgaaggtaaagcaaaaagagtagcaaagatagctgctttaaacaaattcttgaggatatattatgcaagagtaatggaggtttactcagcaaactagctaattgaagttttgatatgtacagtatgctgacatagtcagcagttttgttatacaaaaaaacagaaagcctgctaagaaaatttctcttgactttccttagcagg

SEQ ID NO: 4404 - DNA, 1457 bp, unidentified
  source 1..1457: mol_type = unassigned DNA; note = element_6b3d4ef
  misc_feature 1..2: note = core
  misc_feature 3..397: note = LE
  misc_feature 398..1210: note = CDS
  misc_feature 1211..1457: note = RE
  misc_feature 1206..1436: note = bridgeRNA
tgatggggtggacggccccgctcccggcatcgatgcgccacaacgtggtcgtctatgaacgccacaacgagaggagccgtccacgtgcagattaccacgatcggtttggacctcgccaagcactggttccaggttcacggtgtcgacgcaaacggacacgtcgtcgttccggcggctgcggcgcagcggagtaatctcctacttccggtcgctcgagccgtgcctggtcggcatggaagcctgcgcgacagcgcatcattgggcgcgtgagctgaccgcgctagtggataaaatcatacggatggtaccctcagcctgccaacgtttctgcggattttggctccgaaccaagggtactaaacgttagcttcgcaccactaggacatacgtcaagctgatgccgccggcttacatgaaggcctatatcaagcgcaacaagaacgatgccgccgatgcggaagcaatctgcgaggccatagcgcggccgtcgatgcggttcgtgccggtgaaggacgccgagcagcaatcagtgttgatgctgcatcgagcgcgcaactttctggtccggcaacgcacgatgctggtcaatgcattgcgcgctcacatggccgagttcggcatcatcgcgccgcagggtctgcggcatgtcgagatcctgacgcagacaattgcgcatcaacaacagcggctcccggcgctcgcgcgctcgatcctgcagacgattgtggaccagctgaatgacacgagggagagggtccgagagctcgagatccgcctgatcaggttgcaccagcaaaacccactcagccaattgctcgcgacggtccccggcgttggcattatgggcgcgagcgccatcgctgccacggtatccgacccgacgctgtttcgctcaggccgggagttcgctgcctggctcggcatgacaccgcggcagaattcgagcggcggcaaggaccgcttgggacataccagcaagcgcgacgacaaacacatccgcagcctgctcatcgtcggggcggttgcggtgctgcgccatgcacggaaccgaccgacacgcgacggcgagtgggttcgcgctctggtggcgcgcaaacccaccaaggtccctgcggtcgcactggccaataagaccgcccgcatcgtctgggcggtgatgatgcggggggatggttaccagaccaaggcagttctcgggcagccggcatagccgcgtccgctcatttcagcatgcgagggtgaagaggacgtgatggcgagcggtcgagccgcggatcgggaaggcccgggaaaatcaaagcgcaaagcagcgcgtagtcttgatagggacccgatcagcgaactccatcagggccggcggtcatatgcaccgcatcgaagggccggacatatgactgcacccgaccatttcgccaaaatctactcaggatccttcgcaggtgggggtcgtccacata

SEQ ID NO: 4405 - DNA, 1351 bp, unidentified
  source 1..1351: mol_type = unassigned DNA; note = element_6b453a5
  misc_feature 1: note = core
  misc_feature 2..81: note = LE
  misc_feature 82..1092: note = CDS
  misc_feature 1093..1351: note = RE
  misc_feature 1082..1339: note = bridgeRNA
atgttggggtggacggccccctacggcatcgactgtgccaggctgtgagtggtgaaaacgcagccaaggggagccgtccgaatgacgattaccaggattggtttggacacgtccaaacatgtctttcagattcatggggttgacaagaacgagcagccggttttgcggcgccagatccggcgcggcgaggtggcgaaattcttcgccaagctggcgccgacccgaatcggcatcgaggcatgcggcgcctcgcatcactgggcgcgggtattgcgcggcttggggcacgaggttttgctgatcccgccgcaatacatcaaggcctacgtcaagcgcggcaagaacgacgcgattgatgccgaggcgatctgcgaagcgatgagccggccgaccatgcggtttgtgccggtcaaaaccgccgagcaacaggcggcgctgacgatgctcggggtgcgcgacttgctgatcaagcagcgcacgatgctgatcaatgcgctgcgcggccatgcggcggaattcggcgttacggcagccaaaggaccaaataagatagtcgagctgctgcagcgtttggcggccggggaaggtgtgccgacactggcgcgcgagatgctcggcatgctggcaagccagctcgaggcggtgaatgacaaattgaaagcgatcgaggcgcggctgatggcatggcatcggcaggaccagaccagccagtgcctggctaccatccccggggtcgggccgatcgccggcgtcagcttcgcactcaaaataccggacgcaagggcctttcgctcggcccggcactttgcggcgtggattgggatcacgccgcgcgagaactccacggcaggcaaacaccggcccggcaagatcagccacgagggcgacgaaagcctacgccggctgctcgtgctcggcgccaccgcggtcatccagcgggccaaaaagggtcgcgtctcgccgtggctcttgggattgctggcgcgcaagccaaaaaagctcgcagcggtcgcgctggccaacaaaatggcccgcgtcatctgggccatgatgatcagcggcgaggtataccggcgtccacaggaggcttgagcccgcccgccaccgagacctgacaccactggagcgagcaaggacagcgacagcaagatggtaatcggtcgatccgaggatcgggacaatccgtgggaccggttggtgctcagacatcactgctctgtttggaacccgatccgcgtaacccatctgggccagcggtcaaaccgaccgcacagcaaaggccggacatatgaccgcaaccgaccagaccgtcgcagctgcacagcccttgcaagccgggggccgtccacat

SEQ ID NO: 4406 - DNA, 1242 bp, unidentified
  source 1..1242: mol_type = unassigned DNA; note = element_6b4651c
  misc_feature 1..2: note = core
  misc_feature 3..204: note = LE
  misc_feature 205..1227: note = CDS
  misc_feature 1228..1242: note = RE
  misc_feature 3..180: note = bridgeRNA
cttgtatggttagacttgaaggggtggtgggacgaacagttcgcatctgactgcagcaacagtacagaccgtgggagacctcgccccaccccttccaccaaaagcgccgataaagaatgcttcgttcaagcgacgatagaaacaagcctgcgcctctgggtgaaacccctacaagccgtaaaaccttaacgtggagaagtgctcatggcaatgcgcgtttcgaagtcagtgataggcgtggatgtcgccaaaattgaactcgttacctaccaggcagactcggacctactcgctttaatacccaatgaaaagcccgccataaaacgctggcttaaaacgttacccagacctgctgcccttgctgttgaagcgacaaacatctatcacgtcgatctggtcgagctggcctaccaggctggtttcgacgtctacatcatcgatggttttcaactgagcaattaccgtaaaggtgtcgggggccgcagtaaaacggatgcatccgatgcccgtcttcttgcccgttttctaaaaaacgaaggtgaatgtctacgcccctggacgccgcctccagccgtctacggcaagctgcaaagccttctgcgacgcagagcctcactgattcaggccaaaaccagcctgacccagagctgggcgaatgacgccagtttgaaagcctcatttgcagccttcctcaagtccatcgagcggctggacctgttggtcaagaaaaagctcaaagacgccctgcgtgaagcgggtctgctggaacaagttgcccgctgtcaggccgttgaaggtatcggttttcttaccgcgacggctctggtcatggcttacagccgaggcgacttcaacagcagcgactcatatatcgcctttttgggcatggatctgagggtgactgactcaggccaaaaaaacggccgcagatcgctgaccaagcgagggtttttgggcatggatctgagggtgactgactcaggccaaaaaaacggccgcagatcgctgaccaagcgagggtgctcggaaattcgtcgattgctgcacaacgcagctatgtcggctagccgaacgagtgcatggaaagagttctacaaccatcatcgcagccgcggaaaagctaccacagaggtgcttgtgatgctcgctcgtaaactcgctcgcgtggcgttcgccctgatgaaaaatcagagcgaatatcaacccagagggagcgttatggcttgatcaaaaccatagaat

SEQ ID NO: 4407 - DNA, 1298 bp, unidentified
  source 1..1298: mol_type = unassigned DNA; note = element_6b517e1
  misc_feature 1..2: note = core
  misc_feature 3..76: note = LE
  misc_feature 77..1033: note = CDS
  misc_feature 1034..1298: note = RE
  misc_feature 1038..1285: note = bridgeRNA
tgatgggttggacggcccctgcaccagcgtagctgtgcaatgatgtggtcgttgagccacgtctaggagtcgatccatgcagcaggatgtcgtgaccgtcggtgtcgatctggcgaagaacgtgtttcagatccacgcgattggtgctgatggaaaggtgttggtgcggcggcagctccggcgcggcgaggtactgaagttcttctcgtcgttgccgccgtgcctggtagggatggaggcatgcgcgtcggcgcaccattggggccgagagcttttagcgttgggccatgatgtccgactgatgccgccggcctatgtgaagccatacgtgaaacgcgggaagaccgacgccgcggatgccgaggctgtaacccggacgacgatgaggtccgtggcggtgaagagcgtcgatcagcaggcggtgctgatgctccacaagacccgttatctgctggtgcgacagcgaaccgcactaatcaatgcgctgcgggcgcacctgtcggagtacgggatcgtcaccagcaaggggcccggcggtgtcaccgcgctcatgaagctccttcacgaggggcaggagaagctgccagcacatgcccggtcagcgatgcataccatcggtgctcaactgcgatcgctggcaagcgaggtcaaccggcttgagacactgatcctcgcttggcaccgtgccgatgacaccagccgccggcttgcgaccatttccggcatcggtccgatcaccgcgtcggcgatcgccgcggctgtacccgatgcatcgctattccgctccggcggaaaggagcggcttgacggcatcagcaagcagggcgacgggtacctccgcaagctgctggtcgtcggcgcgaccgcggtgatgcgtatggcgcgcaaggatgccagccgaaagccgtggctagcgcgactgctcgagcgcaagccggtgaaaatcgcgaccgtcgggctcgccaacaagacagcgcgcatcgcttgggcggtgatggcgcgcaaggaggtctacgcggcggctgccgcgtgaccgctgtcctcgccgaccgcagagcagccgacaggatggtgtaagggcagctgagtggtgatgacaaaccggtcagaccggggatcgaacaaacccaggggagcagagcgcttcgagcgcgatgacgtgattagggatccgatccgcggacttcatcagggccagcagccatgaggtgctgcacgaacaggccgaacacatggatgcacccgaccggtgctcatcgccgcacgaaagctcttgcaccgcaggggtcgtccacaca

SEQ ID NO: 4408 - DNA, 1360 bp, unidentified
  source 1..1360: mol_type = unassigned DNA; note = element_6b592a7
  misc_feature 1: note = core
  misc_feature 2..66: note = LE
  misc_feature 67..1119: note = CDS
  misc_feature 1120..1360: note = RE
  misc_feature 1140..1354: note = bridgeRNA
taatgggatggttcgccccgccgccccgggcgacaatcgttggatatcaactcgggaggtaagaagatgcaacttaaccctaagacttgcgccgtcttcggcatcgacatcggcaagacgctctttcacgtcgtgggcctcgacgcctctggcgcacctatccaaaaagcaaagctacgacgcgacacagttcttcagttcttcgcggaggcagacccgaccctcgtcggcatggaagcctgtccgggttcgcagtggcttgccaggaagcttcgggagctcggccatgatgtccgcatcatcccggctcagttcgtcaagccctacgtgaagtcgcacaagaacgacattatcgatgccgaggcgatcgcggaagctgcgaccagaccgacgatgcggttcgtcgggataaaggaggcgcatcaggtcgatttgcagatgctgcatcgtgttcgcagccggctggtgaaaggacggaccaatctcatatgtcagatgcggtcgtattgcttggaacacggcgtcgcgcttcgccaaggcgccggggtgttcaagctcgatatcgtccgcgcgatcgataatcttgagaacgatttgactgatcgagcacgggttgtcttgcgcgagctgcaggaggaccttctccgtctcgaagaacggatcctcagcgtctcgaccgagattaagaacatcgcagacagggacgaaactgcgcgtcggcttatgaccattcctggtgtcggccctctcggggcgacggcaatcctagcatccattggtgtccccacgcgtttcaagaaagcacgtgacgttgctgcctggctaggacttgtgccgaggcaacattctactggcggcaaacagacgctgctcggcatagcgaagcgcgggagcagctacgtacgaacgcttctaatccacggcgcccggtcagtcttgatgcatctcgatcgcgccaaggaccggcttggcctgtgggtggacgaactccgaaccaggatgcacgtgaacaaggtgactgtcgcactggcggctaagttggcgagggtgatctgggtggtgctcagcaaacctggggccacatacgaacggcgcgctcccgaagggggctgcgtctaaacctatccggaaaacccggatcagaatgcgaggctcgaaatgatgacgaaaaggacgatcgacgcgctgtaaacccgttccgaaagcgggctccgtgcccgaacaagctaattgggaacggcgcgtgcggatctcatcatggcctggctggaaaaccagcccactcgcgagaggccggatacatttatgcaatcctgaacgtcatcaggaagaaccttgcacaggcggggcgaaccataca

SEQ ID NO: 4409 - DNA, 1394 bp, unidentified
  source 1..1394: mol_type = unassigned DNA; note = element_6b5d8cf
  misc_feature 1: note = core
  misc_feature 2..309: note = LE
  misc_feature 310..1125: note = CDS
  misc_feature 1126..1394: note = RE
  misc_feature 1172..1386: note = bridgeRNA
caatgggatggacgctcccccctttaaacggcatcatgatgtgccaaaatgggagttcaatctcacccattgatagacaggagcattcgccatggagatcacaacagtaggcatcgatttagcaaagacatggttccaattgcacgccgtaggcaaatctggcaaaacagtacttaagaagaagttaaaccgtggtcagatgattgaattcttcgccaacctacccacttgtctgattggcatggaggcctgtggtagcgcacaccactgggcacggaagctcagagtttgggccacacggtaaagctcatggcacctcagttcgtcaagccctatgtcaagaccaacaagaatgatatggctgacgccgaggcaatctgcgaagccgtgagtcgacccaacatgcgctttgtaccaataaaaaatctggagcagcaagcagtactttcgctgcatcgagtgcgccaaagctttgtgagggcacgtactgcccaagccaatcaaattcgcgggctgcttggtgaattcggaagggttatcccgcaaggcattggctacatcaagactcaggtacctgagctgattgaagatgcgagtcatgaattgccaggcccatttcgtctgcttgtgcaacggctgctggatcatcttaaggaacttgatcgccaggtcagtgaacttgaagggcagattcaaagttggcatcgcaacgataccgccagttgtaagcttgcacaaattccggggattgggccgattactgccagcgctttggctgcatcaataggggatgctaaaaactttaagagtgggcggcaagttgcggcatggctaggactcgtaaccaaacagcattccagcggcggtaagcagaacctgctggggatcagcaagcgaggcgactcgtacctcaggtcgctacttatacatggcgcgcgttctgtaatttactacgcgtcccaaaaacctcagttgcacccttggattaacggcgtcgttaatcgacgaaacaaaaatgtggctgccgtcgcactggccaacaaaaatgcgcgcattgtttgggcattgttagctcatgagcggcaatatgaagtaaatttctcctacttgaaagccgccgcataattcaagcaggttaaacagataaccctcatttaacgagaaacactcctccgattgctcaagcgatcatgaagtgatggcacaacaggtcagaccgtggttggcaaaacccgtggatttcgaagcacacaaagtgcatggactcgattgaggtgccgaccagcaattcccattaaggacagtgattctatttcacgctaacagtccggatgtacgggtgcaatcttttccttcatgaattgaaatcttgacaaactgggagcgtccatata

SEQ ID NO: 4410 - DNA, 1413 bp, unidentified
  source 1..1413: mol_type = unassigned DNA; note = element_6b5de75
  misc_feature 1..2: note = core
  misc_feature 3..95: note = LE
  misc_feature 96..1109: note = CDS
  misc_feature 1110..1413: note = RE
  misc_feature 1182..1410: note = bridgeRNA
taatgtaatggactccaccctcctggcgacggcatcataatgtgcccagcttggcagagggtctgacaagcgcccgccaagaggaggggtccgcgatgaatactacggtaaaggtgatcggtttggatatagcgaagaacgtgtttgcggtggccgggcaggatcggcacggcaaagtgatcttgaagcgcaccttgtcgcgcgcggcggtgctgcccgcgttcgccaatttgcccgccgcgaagatcggcatcgaagcctgcgcgggagcgcactactgggcgcgtcagctcggcgcgctcggccacgaggtcaaactgatcgccgcccagcacacgcgcgcttacgtcagcggcaacaagaatgaccacaacgatgcggcggcgatcgccgaagcgcgttcgcgcgcagccaccaagacggtgccgatcaacacggaagcgcaacaggatttgcaaatgctgcaccgcgccagacaagcgctgatgggggaacgcaccgcgatgatctgccgcatccgcgcctttgccggcgaatacgggcaagtgttcgcgccgggcgtggccaaatttgtgcaaggcttcaacgcctggctggccgctgcggagaacggcttgtccggctcggcgctgaccacgttcgcggagttgaaagcgcagctcgacgacaaagacgcgcgcattgacgcctacgaccggtggctggcgcaggcggcgaaagacgacgcgcgcgccgggaaattgatggcggtgccaggcgtgggcaaactcaccgccaccgcggtgctggcggcggtagacgacgcgcaccatttcgccagtggccgcgattttgccgccaacctcggcctggcgccgcgcgagcacagcagcggcggcaagcaacgcttgtacggcatcaccaaacgcggcgacacgtatttgcgcaccttgctgatacacggcgcgcgcagcgcgctgcgctgggcgctcaagcttgccgcccggcgcggcttcaaagtcgccgccgtggcgctcgccaacaagatggcgcgcgtcctctgggcgttgctggcgcatggccgcgactatgttcccgccgggtcggccagcgcgaccagaccggtctgatggggtctgtacacagcaacacccggcaaccgcaacatgtgtaaccgcaacatttttgggagtaaaacccgccaagtttgcgaaggtaaaaaaagattgatgccaacaggtcggaccaacgtcagccaaatccgtaaatccgtagcggccctgcgaggccgtcatcctatcaggatgctgacgtgcgtattgcatccgggccagagccataaaccgctcaactcacaggccgcatagatacgtgcaaacttaccccgcaggcaaagtcaatttttttccttgcaaaacgggtggagtccataga

SEQ ID NO: 4411 - DNA, 1412 bp, unidentified
  source 1..1412: mol_type = unassigned DNA; note = element_6b60848
  misc_feature 1: note = core
  misc_feature 2..108: note = LE
  misc_feature 109..1140: note = CDS
  misc_feature 1141..1412: note = RE
  misc_feature 1188..1407: note = bridgeRNA
caatgggatggactcctcctcaccttacggcatcgcaatgtgccagactggatttagtaattcgtcgatacgaagaatctcagtcacaggaagagaaggagtccacaaatgaagattactcgcgttggtgttgatttggcaaaaaacgtatttcaggtacacggagtgaaccgcgccgggcgttgcgtgtggaaacgccagctgaagcgctcgaactggctgcaggtgctgaccgagacgctggagccagggtgtgagatcggcatggaagcctgtggtggctcgcaccactgggcgcgtgagctgcgttcgcgcggctttgccgtcaagctggtatcgccgcagttcgtcaagccgttcgtcaagagtcagaagaacgatgccaacgatgccgaggcagtctgcgaagcaatcagccggcccagtatgcggtacgtgccgatcaagactgccgagcaacaagacctccaggccatgcaccggatccgcgacacgctgatgcgacaccgcaaagccaaggccaatcagatccggggcctagttgccgagtacggcatcgtggcaccgaagaccatcgtgccattaagacgggcaatccccgactggttggaggatgccgagaacggcttgtccgacaacttccgtgcgctgctgtacggcctgtgggaggactttcaacagtttgagcaacgggtgaaagatgtcgaccggcagatcaacgccgtctcgaacgccaaccccgatgcgaagcgtttgaagcagctgcgcggtgtgggccccttggtctcaacggcactggtcgcccagtttggtgacggccgccagttcacccgcggacgacaagcggctgcttcaatcggcgttacgcccaggcacgcgggtactggcggcaagaacctgatctacgggatcaccaaacgcggtgacccgtacctgaggagcatcctcatccacggcgcccgcgccgtggtctcgcaagccaagcgacgtgatgacgccttgagtcgctgggtcaccgacctggctgatcgaacgcacaccaatgttgctgctgtcgcgcttgcgaacaagacagccaggatggcttgggcaatgctgcgacacggcaccgattacgaccccgatctcgcgagagcttgaaatactacgagaaagatagaaccaaccgaacgacggagccccaccacgacgattgccaagtgagctaacgatgacgaaacggtcggcccggcgccagccgaacccgcgaatggccgagtgcataaaagcacgtacaagcgattgggagctggcgcgcgcatacccatcaaggcccggcgtcaacgcacgccaacttacgaggccggatatacgagcgcagtcgtcttattcttcgcctaacgctcgcttgtcaacgaggaggagtccatata

SEQ ID NO: 4412 - DNA, 1304 bp, unidentified
  source 1..1304: mol_type = unassigned DNA; note = element_6b61184
  misc_feature 1: note = core
  misc_feature 2..274: note = LE
  misc_feature 275..1267: note = CDS
  misc_feature 1268..1304: note = RE
  misc_feature 65..253: note = bridgeRNA
cctttggaccttaattaaaagatttatttaaataatcattgttgttgtaaagggggttctagggggtgttgataactcccaaaaatgtgaatatctttgaaattaaacagcagggtgaacttaccgcccttctagtattataggacttgtttgcgtattagtccctgctgttaatttcaatgctctaggtccaactagaattatctccttgcatcaccaaaggtttttgacaagagcatctttttttgtttaacattttaaacgtttcaaaggtatgaaaaaatggaattacacactaggaattgatgtatcgaaaaacacattagacattcattgttccgaaatcaatcaacacattcaaattcagaacggttctgaaggctttaaacactggcttaaatggtgtaaagaccacaaaatagctctagagcaaagctttattgtaatggaacatactggaggttatgagtacaaactcatccagttttgcgaatctaaaaatttacaatatgctcgaattcctggcctagctattaaacgctcaatgggcattaccagaggtaaaaacgacaaggtggatgctgctcgcatagcgcaatatggggaagaaaaacacaaaatacttgagcctgcaaaacccttaaacaaaacaactattgcccttaaagaactgcttgggtttagaaaaagaatagtgcgtgagctggcaggatacaagactactttaaaagaacgaaaacaaatgtatcctgatttgaagagcgatgttatttgcaaaatgctagaaaatagaataaaagaaaacacaaagttaattgccaaactcgatacggaactaatggcaataacagaagcaaatgaagcaataaaaatcaacttcgaattgctaacaagtataagaggtattggaatggtaaatgccttaatgacgattgcatatacagaaaattttgtatgctttaataatcctagaagctatgcagtatatgttggtgtggttcctttcgattatagttcaggaacaagcattagagggcgtaaaaaagtgagcccaattgcaaacaaagaattaaaacaggagcttacacaagcagcccgaagtgcagttcaatgggaccctgaattaagagaatatgcaactagaaaaatgaataataaatgttacaatattgtactaaacaatgtaaaatttaaacttattttacgtatgttcgctgtggtaaaacgtaaagaaaagtatgttgataattacacaaaagctgcctaattgaaaataaatttggtaatatcaatatcctagaata

SEQ ID NO: 4413 - DNA, 1407 bp, unidentified
  source 1..1407: mol_type = unassigned DNA; note = element_6b62b00
  misc_feature 1..2: note = core
  misc_feature 3..220: note = LE
  misc_feature 221..1321: note = CDS
  misc_feature 1322..1407: note = RE
  misc_feature 19..232: note = bridgeRNA
caacttgttgaatcaggagcagaagagcttggccaatggtcatgcttttcgaggcggtggccggttgtgctcgatgcttacctgtcgccagtcgaggttgactcagtagtgacctgcaaccggttaccgccgcaacggggagtggcttgagagaggcgtgcctagccgaaagttgatgtgccctcttcgttttcaccgaattcgaagtgaggagtgaaacgtggcaacaatctcaagtactgatcggccggtggtgatcgccatcgatccccataaggcgtcatggaccgctgtggcagtaggtgactcccggcagcctctagcgaccttgcgagtctcagtcagccgcgagggttaccggtcgctgcgtcgattcgcccgcacctggcatggcaatatctgggccgtcgagggagcccacggcgtgggcgccccgctgaccgcgcggctagccgatgacgggatccaggtcgtcgatgttcccgccaaactcgctgcgcgcgtgcgtctcctatctgtcgggcacggacgcaagaacgatgatgctgatgccctgtcggtcggcatcgctgcactcaatgcgacccacctaaacacagtcagtgtcgacgccgccatcacggcgctgcgagcgatcgtcgagcatcgcgaagacctcatcaccacacgcacccagaccatcaaccgcctacacgtactgctcaccaggctcacacccggtggattggccggcacactgaccgccaaccgtgccgcgcagcttctacgctcgatccggccccgcgacgcggccaccaaagttctacgagggcttgccgtcgacatggtcgtcgaattacgccacctcgaccgccgaatctgtaagacagacagcgatatcgaatccgcagtcaaagactcaggcacccaattgaccacactgcacggtatcggcatcacctcagcagccaagatcctcagccgcgtcgggcccattcaccggttccgctccgcagcggcatttgcgacctacaccggcaccgcacccatcgaagtctcctccggcgaggtcacccgccaccggctctcccgcgcgggtgatcgccaactcaacgcctgcctccacattatggcgctgacccaaatccgatccgacactccaggccgcgcctactaccagcgcaaacgatccgaaggcaaaagcaagcgtgaagccatgcgctgcctaaaacggcgtctctccgatgtcatctatcgccaactagtccgcgacgcacgcctgcacggggcggacccgggaggacactcgggggcgactctgttgtctcgcgcggccagctgaaccccgtacaccggcacttcagacaagtcacttcccgggcccgccccctcacgctacaaccgcagggtcttgacacagagaggcgt

SEQ ID NO: 4414 - DNA, 1355 bp, unidentified
  source 1..1355: mol_type = unassigned DNA; note = element_6b690d9
  misc_feature 1..4: note = core
  misc_feature 5..83: note = LE
  misc_feature 84..1103: note = CDS
  misc_feature 1104..1355: note = RE
  misc_feature 1128..1343: note = bridgeRNA
atgatggggtggacggcccccgacggcatcgaagtgccagactggtgagtatcagcaacaccagacaaagggagccgtccgcgatgaagcctagcatgatcggtttggatctggcgaagagcgtgttccaggtgcacggggtcgacgaaagcggccgggtggtggtgcgccggcagctgcgacgcagccaggtggaagggttctttgcccggctggagccggcggtggttgggatggaggcgtgcgggggggcgcatcactgggcgcggacactgcagggcctcggccacgaggtgcggctgatgccggcggcctacgtgaagccctacctcaagcgcaacaagaccgacggccgggacgcggaagcgatctgcgaagcgatgcagcgcccgaccatgcggttcgtgacggtgaagcgggtcgcacagcaggcggtgctggcgctgcaccggacccgggcgctgctggtgcgccagcggacgatggcggcgaatgccttgcgcgccgccttcgccgagttcggggtggtggcggcgccgggggtgaagggcctgcgcgcgctggtcgcgcggctgccggcgccggcggcggtgccggcggaagccggtccggccctggcggcgctggcgcggcactgggaggcgctgaccactgacatcgaggcgctggagacccgcatcgtgcaggcgacgcgggcggacgaggcggcgcgccggctgatagaggtccccggcatcggcccgatcagcgccagcgccatcctggcggcggtgcccgatgcccggcagttccgctccggccgcggcttcgccgcctggctcgggctgaccccgcgccagaacaacagcggcggcaagcggcgcgccggcggcatctccaagcagggcgagcgccacatccgcagcctgctgatcatcggcgccagcgcacacctgcgccaggagcgccgccgcggcgtcaaggacccctggctggctgggctgctggcccgccggccggtcaaggtcgccgccgtggcgcgcgcggccaagaccgcgcgcatcgtctgggccctgctcgccaggggtgaacgctaccgggcttcggccccgctcgccgcctgaacgcggcagcagccgagacccaaccaagtcggaaagggcaactgcgacgtgacggcaaacggtcaggaaccgggatcgggacactccgccttgtcatcgcgccccgagcgcgtgggcatgattggaacccggtccgcgaatcccctcagggccagcggtcatcgaaccgcgcacacaggccggatacatgaccgctcccgacccgaatgccagaacgtcaaaaagcccctgccggaagggggccgtccatac

SEQ ID NO: 4415 - DNA, 1636 bp, unidentified
  source 1..1636: mol_type = unassigned DNA; note = element_6b74b90
  misc_feature 1: note = core
  misc_feature 2..296: note = LE
  misc_feature 297..1481: note = CDS
  misc_feature 1482..1636: note = RE
  misc_feature 61..274: note = bridgeRNA
cctggtatattgtaattgactcatctaacggtcatttacaaatataccttttcctttctatcaacctactatccgtggttgattacggtgttatacatttgtattattaaaatatgtgatgtggatttgcatattatttccctgtggctttgactactttttggaggttcttaccacaccttatttctaaataatgattagttagatgagtcttgaattcgtatcttgtaccaggttttacgaagtaagtgctgtggataacacattgcatatttttacgaagggaatgtattatcatgattttagtcggaattgacattggtaaaaaccaacacaccttctccatcgttgacaagaatactggaaaaatactttctaacccttccctttttactaataatcaggaagggtttctgtgcctcatcaaaaagctaaacagatattccaaatcagaccttttaatcggtatggaagacaccgggcattatcactttgccttactcaaatatcttcttgatatccgttatactgttgcactgatcaatccaacaactactgaccttaccagaaaacttcaaggtggaatcaccaaaaatgaccctcttgattctcttactatttgtgatgtgatcggctctaatcagcgtaagaaaccatatcgtattacaaaagtgaatcgctttgacctttatgaacaaaagcaattgacacgtcatcatcacaacttgaaagaggaattaaatatttataaaaaccgtcttcaaaaatgtatcgacatcgtatttcctgaatttaatttcttattccagtcaaaatatggtattgtttatatgaatgttttgaaagcttttgcttctgctgaaaaaattgcaacttctgatattcgaaccatccggaaatactttgagtatgaaggacgtggaaaacggatcacgctttctgctgagcagcttaaagcagcggcaaaaacttctgtcggcataccttctgttgccgaagaaatacagatcagacatcttgtatgtcagattgaaatgattgaagaacagctttctgaaatagacaaaaagatagaagagttctccttacaaaacaactctcctatcctctccataccaggaatttctcacttctctggtacttctattttagcggagttaggagatatttgcaactatacaaaagcgtctcaaataatcaaattcgctggtgttgctccatatcactatgaatccagccagtttactgcccaacacactgcaataaccaagaaaggatccagatatctgaggaaaactctatatcagattattttgccggttatcaaccacaacaaggtctttactgcgtattacaacaaaaagctaatcgaaggcaaaggttacagatgtgcccagggtcactgtatcagaaaacttttaagaatcatctatcatcttttaagtaccggacagacatttgatcccgctttactgatataaccatacatacaacttaccttataaattcagccttctttgaaaggtctatttgtcgtgccataaaatccataattattcacatattttcaaggtacatacttttgctaactaaaattcaatttttctaaaaaactacttgatttttatatagttag

SEQ ID NO: 4416 - DNA, 1387 bp, unidentified
  source 1..1387: mol_type = unassigned DNA; note = element_6b7a2f7
  misc_feature 1..2: note = core
  misc_feature 3..70: note = LE
  misc_feature 71..1114: note = CDS
  misc_feature 1115..1387: note = RE
  misc_feature 1088..1374: note = bridgeRNA
tgatggagtggatgccccctcctgacggcatcacaatgtgccaaggtggtgatctgaggatcattcacaaatggagagggcatccgtgacagacgttaacatcattggtctcgaccttgcaaagcgtgtctttcaggcgcacggcgcccgcgccgatgggagcgtggcctttcgccggaaactgacccgccagcaggttctgacgttcttctccaagcagccacgttgcattgttgcgatggaggcctgcgccacagcgcatgactggggccgcgaacttcaggttctcgggcatgaagtgcggctcatcccgccggtctatgtaaaacctttcgttaagcgccagaagaacgacgcggcggacgcagaggccatcgccgaggcggcggcacgcccgaccatgcggttcgtcacagtcaaaaccgaggaacagcaggcgcgagcgatggtcttccgcacgcgggatcttctcgtgcgccaacgcacgcagctgatcaatgcgctgcgggggcatctcgccgagcacggcgtcgtcgcgccacagggaacagccaaagtgaagctgctcagcgatgtgatcgaggacgtcaacacgacccttcagccactggtcgtcgaactcggtcgcctctatctcgaccagatcgcagccctcgacggcaagatcgcggatctcgagagggtgttgaaacgcgaggccgcgcgtggggtgacgacgtcacgcctgcagaccatgcccgggatcgggccgatcaccgcaatggcgatcgaaaccttcgcaccgccgatggagagcttcagacgcggacgcgacttcgccgcctggctcgggcttgtcccggtccagcactccaccggcggcaagcaggtgctcgggcgcacctcgaagatgggccagcgtgatatccgacgtctgctcatcatcggcgcgatggctgtcgtcaagagcgcagggcgcaagagcgcgccggaaggctcctggcttgcccgcatgctggcgcgcaagccgaggatgctcgtggccattgcgctggcgaacaagatggcgcggtccgcctgggccatgctgacgaaaggcgaggacttcagagttccggcagcaacggcgtcgtgatcgggagatccggcatcgatcctgccggtgcgtcaggcgtgtgaggaggtcgaggaacagtaagggcaaaacgatcggtcagatcgggagcaggaaaagcattatcacccaaagagcttcgcgctcgggaatttgatctgcacctgctccgcgtatctccataccggccagcggcatgatcatggccgcaacagaaggcctgatacatgaccgcacccgatcacatgccgaagctgttcagaaatcccttgcgcgaacgggggcatccataca

SEQ ID NO: 4417 - DNA, 1425 bp, unidentified
  source 1..1425: mol_type = unassigned DNA; note = element_6b7b678
  misc_feature 1..4: note = core
  misc_feature 5..208: note = LE
  misc_feature 209..1411: note = CDS
  misc_feature 1412..1425: note = RE
  misc_feature 4..181: note = bridgeRNA
ctccgtaagttgttaggtggcccgggagggctgggtgtggctgatagctctctgccgtgttgtggctcgctgggagtggccgcccggctctccggggcgccctggctgctgattgagatgtgcgcgccttgtgcggtcgctgtttacggagacgacagcggggtgttcctcgggccgacgacatgctgtgcggaacgaggaggggcaagtgagcaagcggaaggcccaggtgtgggccggtgtcgatgccggtaaaggccaccactgggcggctgtggtcgacgagaccggcgcgacgctttggtcgaagcaggtcgacaacgacgagtcggccatcctgaccgcactcggtgaaatcctggagctggcggaccaggtccactgggctgtggacatctccggcacgtcctccgcgctgctgctggcgcttctcgcggcccacggccagcgggccgtctacgtccccggccgcaccgtcaaccgcatgtcgggcgcctaccggggcgaggcgaagaccgatgcccgtgacgcctacgtcatcgccgagacctcccgccagcgacgggacttcgccaccattgacgtgcccgcccagttggccgccgacctcgcgctgctgaccgctcaccggtcggatctggtggccgaccgagtacggatgatcaaccgcctccgcgacgtactgaccggcgtcttccccgccctggaaagggccttcgactacagctcgcacaagggcgcgctggtcctgctcaccggataccagacgccggccgccatccggcgacgcggtcgggcccggctcaccgcctggctggccaaccgcactgtccggggcgccgacacggtcgcggtcaccgctctcgaagcggcacaggctcagcagacctccctgcccggcgaggacgtcgccgcgcagatcgtggctgatctggcgacgcagatcctggccctggacgactggttgaagcgggtcgacaaacagatccgtgagaccttccgcggccatccgcaggccgagatcatcgagtccttgcccggcatgggaccgatactcggtgccgagttcgtcgtcgcggcaggcgacctgacgacctacgcggacgccggccaccttgcctcggcggccggcctggtgcccgtcccgcgcgactccggacggcgcaccggcaacctgcaccgtcccaagcgctacagccgccgtctgcgccgggtgttctacatgtccgcacagaccagcatcatccgcgacgggccgaaccgggacttctacctcaagaagcgcggcgagggctgcaagcacgtccaggccgtcatcgccctggctcgtcggcgagccagcgttttgtgggcactgctgcgcgacaaccgggtgttcacccccacccgacccgtcccgcaaacggcttgacaccgtcattgaga

SEQ ID NO: 4418 - DNA, 1541 bp, unidentified
  source 1..1541: mol_type = unassigned DNA; note = element_6b7dfc1
  misc_feature 1..2: note = core
  misc_feature 3..243: note = LE
  misc_feature 244..1422: note = CDS
  misc_feature 1423..1541: note = RE
cttgtattatagagtagtagttattaaagcccctctccaagggctatgctacactgtaagggatgctgttgattggtgatcatctcctaccacaagatggctcaagaaaggttccaaccacagccccttacacttttgttgatcagttaaataccgccagacggttgatgtggaacaaggatacaaaagtaaggcgcactgtggatgcagcatcacaattctaaccgccggaggttttttactatggtcgtttctgttggtgttgatgtctcaaaggataaatacgattgcttcattctcagctctgagggagaagtcttagcggatgtgtttaccatccccaacaatctggacgggttccgctttctactgcgacgaatccgggattgcacccatgcacaggacaaaataaaagtagggcttgaggctaccggacattacagctacaatctgctcgggttccttcttgacaacggtctacccacctatgtcttgaatcccttgcgcacaaacctttaccgaaaaagcctcagtctcagaaagaccaaaaccgaccgggtggatgcacgaacgattactgctatgctgttatccgatgcgggcctcaaaccctacacgaatacagcataccacaacgaggagctgaagtcactgaccagataccgttttaacagggtgaaggagcgtgccaagctgaaaagttctatcgctcgactggtctgcatcctgtttccagagttggaaaagctcgtcccttctctgcatattgcttctgtctacgccctgctggaggaattccccggcgccaaacagattgccgcagcttatttgacaagactgaaagcactgctcgaaaccgcctccaaaggccgctacaagcgggatatggctcttgagattcgggatgccgccagaaactctattggctcctggatgcccgccaagtcccttgaattacagcacaccatccggctcatccgtgaactggatgtcgagattgctgagattgaggaacaaatccagtccattatggatgagctgcattctcccattaccaccatcccaggggtggggttctgcatggctgctatgatcttagccgaagtgggtgacttcacccgctttgactcctcagacaagctgttggcttatgcagggatgtccccctcaacttaccagtccggacagctcaaaaattgttacccgcacatggaaaagcgtggttcccgatacttacgctacgcactttacaacgcagccaagtatgtctgtcactgggatccgacttttgccgcttatcttgccaagaaacgcgcagagggcaaacactacaatgtcgcactttctcatgccgccaaaaagctagtacgcctcatatttgctatggagaaatccaggcagccatattgctcagcagcttgagggcaactacttaaatagccagcagaggtctgacaagaccttagctttgctataccttttttgagctatcctttttcaccaccaccattcattttggggcttgaattttaatagttaat

SEQ ID NO: 4419 - DNA, 1460 bp, unidentified
  source 1..1460: mol_type = unassigned DNA; note = element_6b86663
  misc_feature 1: note = core
  misc_feature 2..79: note = LE
  misc_feature 80..1144: note = CDS
  misc_feature 1145..1460: note = RE
  misc_feature 1223..1451: note = bridgeRNA
taatgggatggtccggccgtgctcctgccccgccagcgatggaagctgggaagggggcagtaaagacaaggagcacgccatgtcccatacacgcaacgctgcaatcgccgtggttggtatcgatatcggcaagaactcattccacgtcgtcggcctggatcagcgcggtgcgatcgtgctgcgtcagaagtggtcgcgtagccaggtggaagcgcggttcgccaatatgccgccgtgcctgatcggcatggaggcttgcgttggtgcgcatcatctcagtcgcaagctgaaggcgcttggtcacgatgcccggctgatgccggcaaagtacgtgcggccctacttgaagggacagaagaacgacttccgtgatgcggaggcgattgccgaggcggtgcagcgcccgacgatgaagtttgtcgctacgaagactgccgatcagctcgacctgcaggcgctgcaccgggtgcgcgagcggttggtcagccagcgcaccggcatcatcaatcagatccgcgcctttctgttggagcgcggggttgccgtacgccaggggctgcgcttcctgcgggccgggcttgcgcaaatcctcgctacgcgcaccgacgtcgtgtcgccgcgcatggtgcacgtgatcgaggacctggctggcgactggcgccggctcgacgagcgcatcgaagggctgtctgccgacatcgaaacgctggtccagcacgatccggcctgccagcggctcatgacggtgcccggcgtcggcccaatcatctccagcgcagtggtggctgcgatcggccgcggcgaggtgttctcgaaggggcgcgacttcggcgcctggcttggtcttgttcccaagcagacatcgaccggtgaccgcaccatcctcggcaagatatccagacgcggcaatcgctacctgcgcgttctcttcgtgcaggcggcctgggttgtattgatccggccgaagagttgggaccgctacgggctcaagccttggctcgaagccgccaagaagcggctgcaccgcaacgtgctggcgatcgcgctcgccaacaagctcgcccgtatcgcctggagcgttctggtccatggtcggaacttcgaggcgaggaagatcgatgaggctgccgcccaatctgtatgatcgtcattctacgccgacaatctagggcgctgcgcaaaatgaggagcctgcgatgacgtagtcagagcaatacgacttacccgccgaggtctgcgagaggatgagacgaaatggaggatcggtcttcccggcgcatgcgaatactggtgacccaaatggcccggttgaggccttgtcgctaatgagatcgcacgcgcgctgatatccatgatggcccggagcatgacacgctccaatcagaggccggatacattgatgcaagaccgctcaccgccagttcgacaaaacctcttgctacgcacggccggaccataca

SEQ ID NO: 4420 - DNA, 1455 bp, unidentified
  source 1..1455: mol_type = unassigned DNA; note = element_6b890c0
  misc_feature 1: note = core
  misc_feature 2..235: note = LE
  misc_feature 236..1438: note = CDS
  misc_feature 1439..1455: note = RE
  misc_feature 9..234: note = bridgeRNA
cgttaccgttttcacggccctgcaatggggttcccggcctcctggcccggcatgacttgtgccccttgtcgatcatgatcgaaaaagcggtgtcaccgggttcggaggcgttggcagaccgctgatgaggggcttgagcgccgaccccgttcccgggtgaagcagactctccgtaacgtggatgccggcacgccgatgccgcagggtcgggaggacgagaccaggggaggcccagttgaccagcaccgacgccatagatctctatctcggattggacgtcggcaaaggcgagcaccacgcggccgcactcacccccagtggcaaaaaggtcttcgacaaggcactgcccaacaacgagcccaagctccgtgagctcttcacgaagctccaagccaggcatgggaccgtgcttgtggtggtcgatcaacccgccaccgtcggtgcgctgccgctggccgtcgcccgccacgtcggttgccgggtcgcctatctgcccggcctgacgatgcgccggatcgccgatctctatccgggcgaggccaagaccgatgcccgcgacgcacacgtcatcgcggacgcggcccgcaccatgccgcacaccctgcgagacctggagcaggccgacgagaccatcgccgaactggagatgatcgcaggcttcgacgacgacctcgccggcgaatcgacccggatcaagaaccggctccgcggcctgctcacacagattcacccctcgctggagagagtcctgggcccgcgcctggaccatcccgccgtcctgggcctgctcgaacgcttcggctctcccacccagctgcgcaaggccggccgccgccgactggtcacactgctacggcccaaggcaccccgcatggccgagcgcctggtcgaagacatcttcaccgcgctggacgagcagaccgtggtcgtgcccggcaccgaagccgccgcactcatcctccccagcctggccgcctcgctgagctcagtcctggaacagcgcaagctcctggccacaaggatcgagcagctcctggaggcccaccctctttcccaggtcctgacctccatgcccggcatcggggtcaggaccgcaacccgcatcctcatcgacgtcggcgacggcaccgccttccccaccgccggacacctggccgcctacgcaggcctggcaccggtgaccagaagctccgggtcctccatccgcggcgagcacccctccagacgcggcaacaagcaactcaaacgcgccttctacctcgccgcgttcgcctccctgtcccagccggagtcacgcgcctattacgacaagaagcgacgcgaggggaaacaccacctcgcagccttggtcgccctcgcccgacgccgcatcgacgtgctcttcgccatgctccgcgacggcaccttctaccaagcacccgctacaacggccgcttgacgaaaaccataggggca

SEQ ID NO: 4421 - DNA, 1223 bp, unidentified
  source 1..1223: mol_type = unassigned DNA; note = element_6b93302
  misc_feature 1..3: note = core
  misc_feature 4..221: note = LE
  misc_feature 222..1208: note = CDS
  misc_feature 1209..1223: note = RE
  misc_feature 12..196: note = bridgeRNA
cttgtatcttgacccctgggatggttagctcccattccatgagagacaggtgagtttctacggctgccttaggtgccaaccctgttctgaagactaaacccctgtctctcacctctgacgccatcgcggacactggacggtagcctagggctgtttgaccctgcatgcacaaggtaagtgggcgcagttggcatacttctgtctgtgaggaggtatgaacgatgttctatctgggtattgatgtctccaagctgaagctggactgcacgttgttgctggatcccgagaacgacaagcgcaagagcaaggtcctccccaatagtcgagacggtgcgcgtgatctggtccggtggtgcttcaagcatggtgttggggccgatcggatccacgcggtactggaagccacggggccctatcacgagcaggtcgccacaacactgcatgatggcggggtgacggtgtctattgccaaccctgccaacgtgcacgacttcggccgggcgctggcgatgcgttccaagaccgatgcgctcgatagcctggtgttggcccgctacggtgtggcgatgaggccagctgcgtggcagcctccccctgtgcatgtgcgagagttgcgcgcgttgataacgcaactggaagcgctctcgaaggatcgtttgcgcaccttgaaccgccaggagaagatcgaggccagcgcggcctccgagctggtggagcgctcgatcagcgacaccctgagcttctatgaccaggagatcgctctcctggaaaaggcaattgatgaccacattgatcgccacccggatctgaaggatgacgccaagttgctctcgaccataccgggggtaggtccgaaggtcgctcgaaccatgctcagggtgatgcgcacgcatcagttcaagtgtgccgaggacttggcggcgtatctgggcctggttcctgtgcagcgccagtcaggcacatcgctgcacggtcgcagccgcatgtccaaggcggggcctgctgacgtgcgggcactggtgtacatggccggggtcgtcgcctccaagcacaatccccatgtacgggcgttgtatcagcggctgctggccacgggaaagaccaagatgtcggccttgggcgcttgcatgcgcaaggtggttcatctgtgcttcggcgtgctcaagacacgacaggcctaccgaccggattacgcattttccgcttgacgaccaagacggtat

SEQ ID NO: 4422 - DNA, 1373 bp, unidentified
  source 1..1373: mol_type = unassigned DNA; note = element_6b94d47
  misc_feature 1..2: note = core
  misc_feature 3..76: note = LE
  misc_feature 77..1105: note = CDS
  misc_feature 1106..1373: note = RE
  misc_feature 1079..1360: note = bridgeRNA
cgatggggtagacgcccccgacggcatccaatgtgccaaggtagtggtgtcgaaaccgctacgaaggggggcgtccatggaagaggttagcatcatcgggttggacctggccaagaatgtgtttcaggcgcatggcgcggcgccggatggatcggtggttttccggcggaagctcacgcgcggacaagtcctgaaattcttcgcggctcagccgagccgcaccgtggcgatggaagcgtgcgcgggagcgcaccattgggcgcgtgcgatcggagcgctgggtcatcgggtcaggctggtcgcgccggggtatgtgaagccgttcgtgaagcggcagaagaacgatacggccgacgccgaggcaattgtggaggcggctttgcgaccgaccatgcgcttcgtcgcaccgaagaccgaagcacagcaggctgccgcgatggcgttccggacacgggatttgttggtaaggcagcgtactcagacaatcaatgccctgcgtggtcatctagccgaatatggtgtcgtggctccggcaggctctgtccacatcggtcgcttgatcgcggtgatcgagggagaaagcggtgtgcttccccgacccgtggtgaaactggcggccatgttggtgaagcagatcatgacattgagtgaagagatcggggtgctggagaaagaactccgggcgcgtgcctccagtgacgaaaccatagtgcggctgatgacgattcctggcattggtgccatcacggcagcggcaatgacgacattcgcgccacctgccgagaccttcaccaaaggtcgtgacttcgcggcctggatcggccttacaccgcgccagcattcgaccgggggcaaagagcggctcggcaggacctcgaagatggggcagcgcgatcttcgccgcttgctcatcattggcgcggtcgccgtagttcgctgggcggcgcgacgcggcgcaccgaaaggctcctggctggggcggatgatggcaaaaaagccgcgcatgctggttgccgtcgccttggccaaccgcatggcacgcgttgcctgggcgcttatggcgaaaggcggagtttatagggatccggcggtcgcggccgcatagggcaacgatcgacgggttgacgtcgaaggtgaaagcagggcgaaaggacacgtaagggcaaatggtcacgagaccggatcgggcaaaccagcattatgagcgaagcgcctgcgagcgcgcataaccgaaatggtcccagtacgcatatctccatacgggcccgcggcgtggatgaagccgcatcatgaggccggacacacgaccgcacctgaccacctgcctgagcgcgaccggaaaaactgcttgcatcttgcggggcgtccacaca

SEQ ID NO: 4423 - DNA, 1478 bp, unidentified
  source 1..1478: mol_type = unassigned DNA; note = element_6ba3525
  misc_feature 1..5: note = core
  misc_feature 6..244: note = LE
  misc_feature 245..1456: note = CDS
  misc_feature 1457..1478: note = RE
  misc_feature 38..215: note = bridgeRNA
ctcattgggcaacctcccaccttggagctagtgtgagagggtcctttccgtgcacctgccgtgaccgccccaggcgctcgccgcttgacggcctgcatgagacctgcggcatggcaggagccgggagaccccgacggactacaggaagttgcgccgtgggtagccgcccagagcgccgatcaatgagccatccgcaaggtctcccagcacggctagtcatactccaactacaggggacttggccatgagcatctacgtcggtcttgactggggaagccaggagcacgccgtgtgcgtgctggaccccagcgggacgcgccttgcgcagttcactatcacgcacaaccaagagggcctgcggcagctgcgccaccgcctcagcatcctggcaccgcccaatcagatccgcgtggctctcgagcgtccctccggactgctggtggatagcctggtcgagaccggttacaccgtcgtgccaatccatcccaacatcgtcaaagccacccgtccgcgttacagcagtgccgccgccaaatccgatcgcagcgatgcgttgctcctggccgatctgctgcgcaccgatgagcaccgcttccgccccctcacgcccgagtgcgatgctctcaaggcgcttcgggccctggtcagaactcgcgatgacctcatcgcaacgcgcatcgagctggccaaccagctgcgtgccttgctcgagagcttctggccgggggctgcggccatcttcgccgacatcgactccccgatcgctctggccttcctcctgcgctaccccaccccgggctcggccgctcacctgggcgagaagcgcctggcgagcttcctcgcccaacatcgatactgtgggcgccgcggcagcgctgagctcttgcagcgtctgcgctcggctcctctgggacggtgtggtgggcttgagtcccaggccaagggcgagctcgtgcgctgcctcagcagcgtactgacaaccctcgttgagcagctgcgccagatcagctcgcgcatcgagcacgaggtcgcagccctcgaggatggtcagcgcctgatgagcttcccgcgtatcgggcgcatcaatgccgcgcaactgctcgccgaactcggctgcgtacgtgctcgcttccccaccgacagtgcgctcgcctgcgaggctggcgtcagccccgtcacacgccagagcggcaagagccatgccgttgtgttccgctgggcctgcaacaagcgtctgcgcgtagccctcactaccttcgcccacaactccacgcgcgcctcgccttgggctgcagctatctacgccagagctcgcgcgcgcggcatcgatcacccccacgccatccgcatcctcgcccgtgcctgggtgcgggtgctctggcgaacctggaccgatcatcaaccctatgaccccaccaagcaccgaaatgcagccccactgctcgccgccgcttagccgtggggttgacacaggaagt

SEQ ID NO: 4424 - DNA, 1438 bp, unidentified
  source 1..1438: mol_type = unassigned DNA; note = element_6ba65b8
  misc_feature 1..2: note = core
  misc_feature 3..238: note = LE
  misc_feature 239..1423: note = CDS
  misc_feature 1424..1438: note = RE
  misc_feature 9..223: note = bridgeRNA
gctctaccttcctcctgggtctgccccagccattcgtagggttgtggcacccaggggagttgggtgtggctttcatgtggctgccgccgatggctccgggagcttggccgcccgcctccccacgacgactcggccgccgattgggaactgcgagcaggtcgctgtgtagagcaatgccggcgaggtcgtccgtggtacgaactgcacgcacgacgagctggagcacgatgagccggatatgggccgggaccgactgcggcaagacccaccaccacaccctggtcatgaactccgagggcgagacgctgctgtcgcggcgggtcgccaacgacgaaccgaactgctgaaactgatcggcgatgtcctcgacctcgccgacggccgcgccgtcacctgggcgatggacatgaccggcggcgaacccgcactgctgattgccctgctcgtcaaccacggccaaggactcgtctacatccccggcatcgcggtcaaccgggcctcggacagctaccgcggccagggcaagaccgacgctcgggacgcccgcgtcatcgccgaccaggcccgcatgcggcgtgatctccagccgatccgccccgatgacgacgccatcgtcgaactgcggctgctgaccgaacgccgcgtctacctggtcaccgaacgcacccgcaccatcaaccgcctgaagtccctgctgaccagcatgttcccggccctggaacgcaccctggacctcgggaccaacggggcgctgcagctcctgacgggctaccagacccctgccgcgatccgccgcaccggccagcgccggctgaccacctggctgcgtaaccgcaaggtccgaggagccgaaagccttgcggccaaggccctcgaggccgccgagcgacaacacaccgccgtcgcgggtgaggcggccatcgcgaggatggtgctcaccttcacgaaggaggtgatggccctcaacgagaaggtcgccgagaccgacaaactcatcgaggggcggtttcgcgagcacgaactcgccgaggtgatccagtccctgcctggcatcggcaccgtcctcggcgccgagtttctcgtcggcgtcggcggcagcctggacgcgttctccagccccgaccgcctcgccgccttcgcaggagtgacccccgcaccacgcgactcgggcaagatcagcggtaacctccatcgcccccagcgctaccaccggcgcctgcaacgggttttctacacctcggcgctcgtgagcatccagttcgaccccaactcgcgaaagttctatgaccgcaaacgagcggagggcaaacgtcatacccaggccgtactcgctctcgcccgccgacgtgtcaacgtcttgtgggccctgatccgtgaccgacggtgctacccagtgacaccacctgtcactgcggcggcttgacttcagcattgggaa

SEQ ID NO: 4425 - DNA, 1306 bp, unidentified
  source 1..1306: mol_type = unassigned DNA; note = element_6bb096f
  misc_feature 1: note = core
  misc_feature 2..263: note = LE
  misc_feature 264..1259: note = CDS
  misc_feature 1260..1306: note = RE
  misc_feature 99..256: note = bridgeRNA
ctttagatttgtcgtatagatataatctattatgatgatgttgaaaagagggggtccgggggagacttataacttgcaaaaatgttcataaatttaatgtgaaacaaaaaagaacggggtgaactttcccgccgcaaaggtttgtgacctattgcctgtatcagtccccgttcttctaaccggttgccaagaaccatataggatttcagccagatcttttaaaggtcttagtttaggcaaccatattaaaacattataaaactatgaaaataaaagatgtaatcggtatcgatgccagtaaattgacgctggattgttgccttcacaaaagtggggtgcaagaagtttttgacaatacgcctgaagctatcgcccatatggcggactggtcgatgaaaagtagtggtctggacaaggatgggcttttgttcgtttttgagcacacaggcctttatacccatcagcttgcccgttacttgagcgaacaaggctattgcttccatttggtccctggactggagatcaaacgttcgttggggattgcaagggggaaagatgataaagcggatgcaaaacgtatcgccctgtacggatatcgcctcagggaagagataaaaccatatcaaatgcccaaggaatctttggaaaccctaaaacggttgatgtccatgcgcagaaaactggttgcacaacgtgcaggacatattgctactttaagtgaacaaaaaagggtcttggacaaagaactaggacctttgttgttccaggtacagcaagagattatcggggtactggatgtgcagatagctaaaatagaaaaagaactcgataggatcatcgagcaagatcccgaactgcaggacctatatcggctattgatgactatcaagggtattggggcggtcacagcccggtttttgatggtttacactgttggcttcacagcttttaaaacgtggagaaaattcgcgtcctattgcggcattgcccctttccccaacagatcggggaccagtattaggggaaggaccaagataagccagctggccaataaggaaggtaagacattactcaatctttgcgccgtttctgccattcaatgcaatcccgagatgaaggcctattatgagcgcagaacagcaaagggaaaaaataaaatgagtacattgaatataataagaaacaaattgttggccagggcttttgcggtagtggtaagagggacaccgtatgtcaatacaatggggtatatatcctaaactatagacaaaaattatgaaaaatagtttgttttaaccataggata

SEQ ID NO: 4426 - DNA, 1432 bp, unidentified
  source 1..1432: mol_type = unassigned DNA; note = element_6bb4e2f
  misc_feature 1: note = core
  misc_feature 2..131: note = LE
  misc_feature 132..1151: note = CDS
  misc_feature 1152..1432: note = RE
  misc_feature 1193..1432: note = bridgeRNA
gaattgaaatgaacgcgtcccaccctacggtcgagtgagaggaagaggaagggtggatcctcacgggcctacggcatcgatgtgcccaagtggaaaatgcacgcatttcccaggcaaccggaggatccacgatgaacagtatggcagtgggcgtcgacatcgccaaacaggtgtttcaagtgcattacgtcgatccggcaaccggggagatcgtgaacaaggcgatcaagcgggcgacgtttctggagcactttgcgaaccgtgcgccgtgcctgatcggaatggaagcatgtggtggtgcgcaccactgggccagacagttcatccagatgggtcacgaggtcaggctcatgcccgcggagttcgtgaaggcgttcaacatccgcaacaagaacgacgcggcggacgcacgggcgatctggctggcggtgcagcaaccgggcaagccggtggcggtgaagaccgagatgcagcaggcgatgctggcgctgcaccggatgcgtgagcagctcgtgaagttccgcacgatgcagatcaacggactgcgcggactgctcacggaatacggcgaggtgatgagccgtggccgggggaagcttgatgccgagattccggcggcattgggcaggctcgccgagcgtttgccggcagtgctgatcgacacgctacgtgagcagtggaatgggctggcgaagctcgacgggcaggttgccggcatcgagaggcgcatgcgggagtggaagaaggaagatcgggcggtgaaggcgatcagcgagattcccggtgtgggaccgctgacggccaccgcggcggtggcgatgatgggcgacccgaaggcattccgctcggggcgagagtttgccgcatgggcgggactggtgccgaagcagacgggatcgggcggcaaagtgaacttgcacgggatcagcaagcggggcgacacctatctgcgcaccctgctgatccacggtgcacgcagcgtgctgtggcatgcgaaagaacctggcctctggatcgagcagatgaagaaacggcggccgacgaacgtggtcgtcgtcgcattggccaacaagatagcaagaacgatctgggctgtactggcacacgatcggccgtatcaaaaggactacgtaagcgcgaaacccgcttgatgggctgcgccgcgtagttgatcaaccgtttttaacacagggtgaacgtcgaaaggttgcgcagcaatcgagtgtgatgacaagccaggtaggaccgggactcgctaaacctgaatcagttgaagagcttcgagctcgccaggagaatgaggtgcgagtcagcgaatttcataggggcccgcagcggcaggaccggctgcatcaaggccgcatatagagctgcagcccatcctgtctatcaaaacacacgaaaactgttgcaaacgggacgcgttcatata

SEQ ID NO: 4427 - DNA, 1615 bp, unidentified
  source 1..1615: mol_type = unassigned DNA; note = element_6bb92b0
  misc_feature 1..2: note = core
  misc_feature 3..280: note = LE
  misc_feature 281..1492: note = CDS
  misc_feature 1493..1615: note = RE
  misc_feature 13..306: note = bridgeRNA
ctactacaatataaattggttaatatacttaacaaccagttaggttgttagccatcttgttgcttaagctgtataatgatggagcaataggtatatcgtctccctttcttggactttgcgtccgtattatagactgataaccagctcctcattcgcagcgttcgttttatgcaggttgaatcgccataggcgcattcgtgtcacaccacagtagattgaataggcaatgagtaaaactggtacttatccattgcaataattcttaaggagtgacaaatttatgaacatgaacgcagttggtattgatgtttctaaaggtaaaagtatggttgccatccttcatccttttggtgaaattgtttccacaccatttgaagtcaagcatacagtcagcggtattcgctctctgatcgagcatatcaaagccattgatggtgagtcacgcattgtaatggaacatacggggcgttattacgaaccccttgtccgtgaactctcacaggctgaccttttcgtatctgccgtaaatcccaaacttatcaaagactttggagataattccctccgcaaagtgaagtctgacaaagcagatgctgtaaaaattgctcgctatactcttgacagttggacagaactcagacagtatagtctcatggacgaaattcgtaatcagcttaaaaccatgaaccgtcagttcagcttttatatgaagcataagacggctatgaagaataatctcattggaatccttgaccaaacctatcctggcgtgaatgcttactttgacagtcctgctcgcagtgacggcagccagaaatgggttgattttgcatctacatactggcatgtggactgtgtccgtaagatgtctctaaatgcttttacctgccattatcaaaactggtgcaaacgcaagaagtacaacttcagccagtcaaaggctgaggaaatctatggaaaagcaaaggagcttgttcctgtacttccaaaggatgaccttacaaagcttattatcaggcaggctgttgaccagcttaatagtgcttctacaaccgttgaatcactacgtaccttgatgaatgaaaccgcctcaaaactacccgagtatcctattgttatggatatgaaaggtgtcggtaaatcacttggtccccagcttatggctgagattggtgatgtttcccgcttcactcacaaaggggctatcaccgccttcgctggtgttgaccccggcgtaaatgaatccggttcttacgaacagaaaagtgttcctacttccaaaagaggttctggcactcttcgtaaaaccttatttcaggtaatggatgctcttatcaaaaccaaaccgcaggatgaccccgtatatctgtttatggataagaaacgatcacaaggcaaaccttactatgtctacatgactgccggtgcgaataagtttcttcgcatctactatggacgtgtaaaagaatatctttcatcgcttccgaaataaccatttcatacttacctttattttagaccagcgaatatcggtggtcttatttcgatgttcaaaatcctacataaaactttttgcctgaaataatcaatttactattgactttttatttgcagg

SEQ ID NO: 4428 - DNA, 1805 bp, unidentified
  source 1..1805: mol_type = unassigned DNA; note = element_6bbd5d4
  misc_feature 1: note = core
  misc_feature 2..258: note = LE
  misc_feature 259..1248: note = CDS
  misc_feature 1249..1805: note = RE
  misc_feature 67..253: note = bridgeRNA
ctttagatttgttatatagatgaattctattctgttaatgatgttgaaaagagggggtctgggggagacttataactaagagaatttgtcaataactttcaggttaaagaaacggggtgaactttagcgacggccaggttaaagaccttggtagagtattagtccccgttttattaacccggttgctatggaccagataggataatagccttgctattaaaggttttagtcaatgcaaccttttaaacttttaatactatggaagtcaatgaaattatcggtatcgatgccagtaagttaacattggattgctgtatccacagtagtgggcagcaagatgtttttgacaataatccggaagggattgacagactattagactgggtatccaccagggtccttgtcaaaaaggaacagatccttttcgtttttgagaacacaggactttacaccattaaacttatagatggtttacaagagcgtagatttttaatgtacgttgcatccggacttgaaattcgacgttcacttgggatcgccagaggtaaggatgataaggcggacgcaaaacggattgctctgtatggctatcggctaaaggaagatattgaaccttattctccaccaagttcggcgataataaaattaaaacgattaatgtctatccgcagaaaactggtggtacaactcgcaggatatgtagcaaacctaaaagaacagaaaagggttttgaatgacgatgaaatactattcaacgtgcaggagaatgtcatgagtgtgctgcaggcacagataaaggtggttgaaaaggaaatgaataggattatcaaagaagaacccgagcttgcaaagcttcaacagctcataaccagtgtaaaggggataggccctgttacagcccggttcctgattatttatacagctgggtttacttcttttcagtcctggaggaaatttgcatcatatgtagggattgctccgttcccaaatagatcgggaacaagtatcaaaggaagaaataaagtaagtaatcttgccaacaaggaaggtaaaacccttctccatatgtgcgcggcttctgccatacaatgcagtcctgaaataaaggtatattacgaaagaagactagccaaaggcaagcacaaaatgagcactcttaacattataaggaacaaattattatcaagagcttttgctgtggtagccaggggtactccatatgttaatactatgaaatatgcctcataaagaagtgctgactaaatagtctgtcctaaaagggtaaaacaattgaattttctccactgattaagctctgggtacagtgctaaataagtgggtcaaaaaaatactgcataaaactgcctaaaatattattcatcgaaggaaaccattatccatttagtacccttgctttgaatcttgcttctcttccatgacaatctgacctacactctccatagccctcacaatcccttttttaaaatgcaaaaaaacaacattcttccttggacagcggcataaagccgctccggcttcgcctgcactttttatacgctttaccaatcctgaatgttgtaaaaacaataagcatcaaaaaagggtaatgtgagggcactataggaagtaagtcagaagcaacaaaaataaaatcgaatcaattacaaaaaatagcaagggcaaaaaaaattaaaaagggaaaatgctcaggatataaaaagtaaatcaatcctttattggtgagataaatcgtgcaaagcaatagaaaaaatttattcgaaaatatttgtttaagtcataggata

SEQ ID NO: 4429 - DNA, 1305 bp, unidentified
  source 1..1305: mol_type = unassigned DNA; note = element_6bc5423
  misc_feature 1: note = core
  misc_feature 2..266: note = LE
  misc_feature 267..1259: note = CDS
  misc_feature 1260..1305: note = RE
  misc_feature 57..251: note = bridgeRNA
cctttggtctaccaatagaaaataatagaagtttgttattgttagaaaagggggggggtgcaggggggtgttaagaactaaagtatttgtggataacgttaaataaaggcagggtgaacttttgtcattgctggttttggagaacctggcctcgtattagttccctgcctttaaagaatgcctaaggcccaactataataattccattgaatcatcaaaggtgctattggcaaaaggcatttattaacttatcaaaatacaaacgtatgaaaccatggaatgttattttaggtgtcgatgtgtcaaaaaagacgatagatatctgctgggcagagcaaaagctgtttcttaatgtggacaataacagtgacggcttcagtaaatttaagaaatggtgtaaggatcatgggatagatctttacagaacatttatcgtgttagagtataccgggggctatgaataccggttcattcagttttgtgaatcgcaccctattgattatcgtagggtgccgggcctggagatcaaaaagtctcaaggcataatcagagggaagtgtgataaggcagatgcttttcggataggtcggtatggagaagaaaagatcaaacgccttgaaccatccaagagactggataagcatattttggagctaaaaacgctactgtcattccgtaaaagactggttcgggaaggagccggttaccagagcactgttaaagaacggaagcatatgtatgaggttaatgatcaggatatgatcattgagatagctaaagataagatagcagcgaatgcacaatatatcaggcaggttgaggatcagattatggagctgattaaaaacgatgaacagatgtatttgaattaccggatcatcaccagtatcaaaggaattgggcaggtaaacggctggatgacgatagcgtatacggaaaactttaccagctttcccgatgcaaggcattatgctgtatacgtaggtgtaatcccgtttgaacacagttctggaacgagtataagaggccggagacgaacaagtaaccttgcacaaaaggaattaaaacaagagcttaaccaggcggcaaaaacggcaatgcagcatgatcccgaaattagggcctatgcagagcgaaaaatgaaaaataaggaatatggtttagtgttgaacaacgtaaaattcaagctgatcctgcggatgttctcattagtgaaaagaggcgtaaaatatgtggaaaactataaaagagtagcctgaaaaaacttttttgaatcaaatttggaattattataaacctataata

SEQ ID NO: 4430 - DNA, 1471 bp, unidentified
  source 1..1471: mol_type = unassigned DNA; note = element_6bcc68d
  misc_feature 1..2: note = core
  misc_feature 3..232: note = LE
  misc_feature 233..1450: note = CDS
  misc_feature 1451..1471: note = RE
  misc_feature 7..230: note = bridgeRNA
ctaatggggatcgactgttctgttcgcgttgagcgagaagaatggtcccgagccgccggtcggtcagcactgttcgacgctgggcgttgagccctagggctagatcgtgcgccggccggtcggtgaggttggccgtgatggctggtgggatgacgtgctgcgagcactgaaccatcagcgagctgctggtcgcctcgggctcgattccgacacgacgactgggaggtgcacattggggaaggtgttcgttggtcatgactgggccgaggatcatcacgacgtgttcgtcgaggacgacactggccgcaggctcggtggcggccggttggctgatggtgtcgaggggatcgcccgcttccacgaggtcgtcggcggacatgtcgatgatccgggtgatgtggtgatcgcgactgagaccgaccgcgggttgctcgtcaacgcgttggtcgcggctggtcatacggtgctggcagtcaatccgatgtcgacctcgcgttatcgggagcggttcacgacctcgggggcgaagtccgatcctggcgacgcccgcgtgttggctgagctcgcccgcagcgacgcccatctgcatcgcccagtcgctggcgacagcgacctcgcgacagcgatcaaggtgctcgcgcgggcgcatcagtcgatgatctggacccggcagcgacaggccgatcagctccgctcaacgctgcgcgagttctatccggcagcgctcaccgcgttcgatgagctggccggacgtgatgcggcggcgatcttggcgatcgcctcaacaccggtcgccgcccgccaactgtcgctgtccaagatcggtgccgccttgcgccgcgccgggcggcaacgtcgtgtcgaacaacgcgccgtcgagatccagaccgcgttgcgttccgaacaactccacgcaccagatccagtcgctgacgcgatgggcgccaccgtcaccgcgctcgtcgcggtgatcaccgagctgaacacccagatcgccaacctggaaacacaactggccgcaagttttgagcaacacccggacgccaagatcatccgccccctgccaggactagggatgacactcggcgcccgggtgctcgcagagttcggggacgacccgaaccgctatgtggacgccaagtctcgcaagaactactccggcatgtcacccatcaccaaagcatccggcaaaccccgcgccgtgctggcccgctacgcccgcaaccgccgcctcgccgacgcctgctacctgtgggccttcgccaccctcaccgccagcccaggcgctcgagcgttctacgaccaacatcgcgcccgcggcgacacccacaaccgtgccctgcgggccctcgcgaaccgcctcgtcggcatcctccacggatgcctcaatcacggcaccctctacgacgaacacaccgcctgggcacaccgacaacaacaagccgcttgacaccaaccatccgtgggatgt

SEQ ID NO: 4431 - DNA, 1468 bp, unidentified
  source 1..1468: mol_type = unassigned DNA; note = element_6bd06b2
  misc_feature 1..2: note = core
  misc_feature 3..229: note = LE
  misc_feature 230..1447: note = CDS
  misc_feature 1448..1468: note = RE
  misc_feature 6..228: note = bridgeRNA
ctaatggggtccaccgcctaccggacgagatccgagaggctgtggccgagccaccggcgtctcagcactctgctggccagggcctcgagccccagggctagatcgtgcgtctgccggtcggtgaggtggaccttcgacagctggtgggatgacgtgcctcgagcactgaaccattaggaagctgctggtcgcctcgggctcgacatccgacgacgaccaggaggtgacggtggccaaggtgtttgtgggccatgactgggccgaggcccatcacgacgtgcacgtggaggacggcgacggaaagcgcctggccaaggccaggctcccggagggcatcgagggcgtggcccgcttccacgagctggtggcggccttcgtcgacgaggcggacgacgtgaccatcgccaccgagaccgaccgggggctgttcgtgacagcgctggtggcggccggctaccgggtgctggcggtcaacccgatgtcgacgtcgcgctaccgggaacggcactcgacgtcgggggcgaagtccgatcccggcgacgccttcgtgctggccgagctggcccgcaccgactcccacaaccaccggccggtggccggcgacagtgaagaggctgaggcggtgaaggtgctggcccgggcccatcagtcgatgatctggacccgccagcgtcaggtcaaccaactccgctccacgctgcgggagttctaccccggcgccctgacctgcttcgatgacctggcctcgggcgacgccctggccgtggtggccatcgcccccacgccgaccctcggccgccagctgtcagtctccaagatcgcctcagccctgcggcggggtggacgccagcgccgcattgagcagcggtcggccgagatccaggccgcgctgcgggccgaggcgctcgaagcaccgggtcttgtctccgaggcgatgggggcatcggtgggcgccctggtggcggtgatcgccgagctggtcacccagaccgcccggctcgagaccaccctggacgcccgttttgagaagcacccggacgctgaggtcatccgatccctgccaggactggggatgatcctcggcgcccgggtgctgggtgagttcggggatgacccgaaccgctacgccgacgccaagtctcgcaagaattacgccggcacgtcgcccatcaccaaggcgtcgggcaaacaccgcgtcgtgctcgcccgctacgcccgcaacacgcgcctggccgacgccacctaccagtgggccttctgctcgctcggcgccagtcccggggcgcgggccttctacgaccaacaccgagcggccggtgccacccatcacaaagcgcttcgggctctggccaatcgcctcgtcggaatcctccacggctgcctccgccacgccactctctacgacgagcacacggcctgggggcatcggatcgccgtcgctgcttgacaactacggcccgtgggatgt

SEQ ID NO: 4432 - DNA, 1430 bp, unidentified
  source 1..1430: mol_type = unassigned DNA; note = element_6bd3a65
  misc_feature 1..2: note = core
  misc_feature 3..229: note = LE
  misc_feature 230..1414: note = CDS
  misc_feature 1415..1430: note = RE
ctgatataggtccctgttagagggtccacactgcagcggaccctcgcggggagaccgacacggcgctatccggcatgaccgttgcgactagtgtgcggccctcgcgctccgtcctggaacggtgatcgggaccctgtggcggccgagaggtcgaccagtgatcgggcatcagcgggcgtgggatggatgacgtgagctccccggggtcagacagaacggaggagctcgcatggcgaccatcggcatcgatgtcggcaagcatcagcacatcgcggccatccatcgcgacggtgagcgggaggcacgcaaggcggtgctgcgcttcagcgccgaccgctcgggtctggccgaactcagcgcctggctgacccgtcagggcgagatctcgcgtgcggtcctcgaatcgagcggccactaccatctgaacctcgccgcggcgctgcagcgagcgggcgtcccggtcgcggtggtcaacccgctggaatccaagtacttcggcaagcgccgcctgcagcgcaccaagagcgatccggccgacgcgcgtaccctcgcgacgctagccatggtcgacgagccacaggtccgcgacgtcctcgccggcgccgagctgcgcgaggccgcgcgcttcgcgatgagtctggtcgacgagctggggcggatcgaccagcggatctgccgcctggtcgagatcggcttccccgagcttgagcaggcgtacgacgacccgacctgcgtgagcgccctggcgctgctgcggctcgcccccacggcgcaggcggcgacccgcaaacgggcgagcagcctggccgacgccaaccgcggccgcggccgccgcgccgtcggcgcgacgaaggccacgcagatccaggccctcgccagggacaccatcgccgcccccgagctggcggagcagatcggcttccagatgcgtctgctcatcgcccagcacgacctgctcgaggcccaggtcaccgaagccgaagcgcaccttgggaccctgctcgacggcgagctggtgcggcggctgcgcaccatccccggcgccgggccggcgatcgtcgccacgctcatcgccgagatcggcgacatctggcgcttctcggagttcgacaagctcgtcgcgtacatcggcgtgcacccggcggaaaagagcagcggggagaagggacggaaccccgagacgagctggcgcatgtccaaggccggcaacgcctacctgcgcaccgcgctctatcgcatggcgatcgtcggcatccagcacaacccggtcatccgcgcgcactacgcgcgcaagcgcgcgcagggcaagtcgaagatgaacgccgtcgggcactgcatgaagaaggcgctcgcgatcgtctggggcgtctggcggagcggcacggacttcgccgctccgccatcaaccccttgacaacttcttatgggac

SEQ ID NO: 4433 - DNA, 1592 bp, unidentified
  source 1..1592: mol_type = unassigned DNA; note = element_6bdc36d
  misc_feature 1: note = core
  misc_feature 2..252: note = LE
  misc_feature 253..1473: note = CDS
  misc_feature 1474..1592: note = RE
tcacgtataatccaatcatgttaggaagtgattggattttcctttctcccaggttcttctgggtaattcaatctctatctgatatatttattttggcactgtggatctgtatctattttattacggctttgactgttccgagatgactcagaccacagcttttcgtctattactgttgatcagtttgttaacgcacagaaccttcggttctttagacgtttctatttacgtgattacacagccggattccctgtggaagacaacagtgccacaaattttattcaggaggtattacctatgtctctgtactttgttggaattgatatttccaagtacaaacatgattgctgcattctgtcagcagtcgaccaaaaagttgtttcaaagttcacattcaaaaatgatctgcaaggctttgaacagttcctttctgccctcagttccctctcctaccccgaggacataagaatagggtttgaatctacagcccattatgccctcaatctggaacttttccttgagaacgcccaccacagcttcatggaaatcaatccagtcctcatcaaggaatacaaaaagtccacttctctcagacgtaccaaaaccgactctgttgactgtgagtccatcgcacactggttaatgactgtcgaatacaaaccccattcaaaaggattttaccatgcttattccttaaagtcactaacacgcttgagggacaagctggtccggcagcgctccttctatcttgtgaagataacaaatgttctggatcataccttcccggaatttaaaccgttcttccatgaacgcctgtctaaaacagccctctatctccttgaaacctatggctcggctgaaaggatgtcccgcatggattctgcttcttacgacaaactccgctccctttccagaggaaagttttctccccggcagttcctgcggctcaaagaactggccgccaatacggtgggtgtgaataactccatctttgacacagaactcaacagcctgcttacgctatacaaatctcttgttaaagagatttgtatacttgaagaagaaatcaaccggctaatcagggaagtacatccccactatatgtccgttccgggcatcggcactatatccgccgccgttatttattccgaatacggcgatatatcaaacttttcatccccggcacagatgctcgcatttgccggcatagaacccggcataaatgattcaggaacagaatcacataaagggcggatggtaaagcatggctcttcacagcttcgatatgtcctcattaactgctgccttcccctgatccgtttcgacatgacattcgcagcctattatgccaagaagcgggcggaaggcaaaccacacagggttgctatcacccacgttgccaaaaagcttgtcagagtcatctacgcattggagaagcaggggatagactttaacgcacaaaagctcagatagcagcttacataaagaaacttcggcccatctgaaatacggtgtattcagatggtctgttaaagttacccatttttattaatccaatttttttcacaaatctcttgactatttatagtttg

SEQ ID NO: 4434 - DNA, 1430 bp, unidentified
  source 1..1430: mol_type = unassigned DNA; note = element_6bddbb4
  misc_feature 1..2: note = core
  misc_feature 3..125: note = LE
  misc_feature 126..1178: note = CDS
  misc_feature 1179..1430: note = RE
  misc_feature 1189..1383: note = bridgeRNA
agatggggtaatcggcttcgtgcccatcttcgctgaccggaaaggaaggtgctgcgcttcaggctgatgataagaaacgtggtctgaacgaaacagccacaagcatcagaaaggtgaagcgcagcatgaagtattatgcgggtcttgacgtctctgtcaaagaaacgagcgtgtgcattgtcgatgaaagcggaaaactctgccgggagaaaagggttgtgacgcacgcggacgacctggtcgccgtcctgagcgaccccgcattccactttgaacggatcgggctcgaagccgggccgctgtctcaatggttgttcgaggggctggcgaaggctggattcgcggtcgtgtgtatcgagacacggcacacaaaagcgttcttgaaggctcaacagccgaacaagagcgatcgcaacgatgcgcgcggcattgcgcacatgatgcgggtcggtctgttcaaggacgtgcacgtgaagacgctgacgagccagaagcgccgcgccttgctgacggcccgcaagctgttgcaggaaaaggctatcgccatggaaaacgatatgcgtgggcttttgcgcaacttcgggctgaaggtcggcccgattggagcattcaagtttgatgagcggatacgcgagctcgttgaagcaactcccgatctggcggaaatcatcgagccattgctcgctgccagagaaaagctgcgcaaggagttcgccaaactggaccgcaaggtccgtgatgaggccagggtcgatcctgtctgccagcggctgatgagtgcgcctggcgtcggaccgattgtcgcgctcgcctatacctcgacgatcgacattccgtcccgctttcgccattcgcgagcggtgggagctgtactggggctgacgcccgtactcaatcagtcgggcgagaatagtcggatcggtcatgtctctttgcgcggcgacgccatgctccgggggcttctttatgaagcggcgcaggtcctgctgatccgcgtcaagaaatggtcgtggctgaaggcgtgggcgatgaatgtcgccaaacgacatgggatcaaaaaggcgatcgttgcattggcgcgcaggcttgcggtggtcctgcatcggatgtgggtagatggctcggagttccgctggacgcgggagataacgccaacaacgacgggcgcgactgcataacgcgaccaacagagttccgccgcgaggcggaaggcgtccttcgcggacgatggatgatgagttcgcatacggtcttatctccgatgagcaatcatcaggatgcgaaccagtttggaccacatcattctactggaccccataatgggagggcttcatgccgatcccggagagaagcgcgggccgcgaaaagacgtctaacgtcacccaggtgggaggctcggaagtgcttgaccgcaacacgccgattagaga

SEQ ID NO: 4435 - DNA, 1363 bp, unidentified
  source 1..1363: mol_type = unassigned DNA; note = element_6be3042
  misc_feature 1..2: note = core
  misc_feature 3..118: note = LE
  misc_feature 119..1102: note = CDS
  misc_feature 1103..1363: note = RE
  misc_feature 1078..1353: note = bridgeRNA
tgatgatgtagacgcccgcgacgacccgagtgtgtggcaaagtgtgattgtttgaaccactattggagataagcatcatgagcgaggttcgtacgactgggctggatttggccaaaacgtgtttcagctccacggagctaatgacatcggtgccgtggtgtttcgcaagcagttgcggcgtgggcaggttttgaaattctttggtggcctgccacggtgcttagttgcgatggaagcctgtggaagctcccacttctgggcgcgtgagataggctgtttgagacacgatgtccgcatgatcccaccggcctacgtcaagccgtttgtgaagcgccagaaaaacgacatggctgatgccgaggcgatctgcgaggcggcccaacgaccaacgatgcgctttgtcgcggtgaaaagcgaagaaacgcagggagcagcagtcgtgttgcacacccgtgatctcttgattagacagcgaacgcagaccatcaatgccttgcgcagtcatttggcggaattcggcgaggtggtgccaaaggggtcgacctacgcttccaagctaattgcgatgattgaagatccgcaaacggcgcttccagacactgcgcggactgctctgcggtttctgacagcaagcttatcccaagtgaatgatcagattcgcgccctggatgcacagattgcgcgccgggcccgcgaagaggagactgtaggccgattgatgacaatccccggagttgggccgttgattgccaccgcactggtggcgcttgcaccgtcgcctgagaccttcaaacgtgggcgtgactttgccgcatggctcgggcttgtgccgcgacaacattcgacgggcggcaagcagcggcttgggtccacgacgaagatgggagaacgatctctgcggcggctactgatcataggggccaatagcgagcttgtgtggcgcgcccgcaagggtgcaacaccaggaacgtggctggccaagatgctggcgcacaaaccacctatgctggtgcgggtggcgcttgccaacaagatggcgcgcatcgtctgggccatcatggccaagggagggatatacagagctccggttactgcggcataaatcaagccaacgtaaccgaggggacgtcgcagcgatagaggtcattggaaagtatggcgcaacggtcgtgagacgggatcaggaaaaccagtgtgcaccaaagtgtctcaagagcacgcggcgttgatttggacctgacctgcgaacaccttacgggcccgcggcatatgagaaagccgcatcaaaggccggacacatgtcagcacccgacaacgcgcaaataccgactaaagaatcctcttgccaaacggcgtctataca

SEQ ID NO: 4436 - DNA, 1193 bp, unidentified
  source 1..1193: mol_type = unassigned DNA; note = element_6bf0894
  misc_feature 1..3: note = core
  misc_feature 4..219: note = LE
  misc_feature 220..1185: note = CDS
  misc_feature 1186..1193: note = RE
  misc_feature 53..216: note = bridgeRNA
catcctatgtttgtatatatgatgaataaagttattaattcttagattcgggaattaataataaagggagaaagagcaagacaactatttgtcatttgtcataaagaccgttcggaatgcttgtccctttctcccagtgcttaaattttgaacagttcattaggccttgagcctgtatttaggatcgataaaataaaagcacttcttaaactataatctatggataaatttattggaattgacattagtaaacaaacctttgatgtttctttttccaaaaaggatcagcaggtatttaaaaatacacgtaaagggtttgaaaggtttttaaaacaagtaaatgataatacaggtttggtcatggaggcctctggaccttattacctaagtcttgcaaatttcatgtatgataaaggtttcaaggtttatgtggtaaaccctctaaagattaaacgctttagtcagatgaatttcaatcgtgctaagacagataaaaaagatgcagaagtcatacgtggttatgcactaaagatgcaagaagatttgaaaggatggaaaccagaatcgagacagatcaaggagatgaaacagcttcatactgctcttgagctgttaaataaacaattaactcaggttcgcaaccagttgggagcttttaaagatagtgggtctatctgtaaggagttgaaaacaagttatcaaagcatactgaaaaagctagaaaaggaaaaagataaattagagagtaaaatgttgaaaataggaaaagaggagtatcagcagacccttaaatcattaacatccattcctggcattggtaataaaactgccattatgcttatcgctatgacttcagactttgataagtttgaacactacaaggaattgattgcctatgtaggttttagcccgagaatatatcaatctggcaccagtataaatggcaaggggcatatatgtaaaatgggaaaggcacaaatccgaaaattactgtacatgtgcagttggactgcaaaaaagtataataagggctgcgtggaaatgtatgaacgtttaaagaagaagggcaagcctgaaagagtaataaaaatagcactagcaaataaacttttaaaacaagcctttgctattgcaaaaaataagacaatgtttaacgaaagttatcaatcaaaagtttgtttttaagcacagtt

SEQ ID NO: 4437 - DNA, 1443 bp, unidentified
  source 1..1443: mol_type = unassigned DNA; note = element_6bf5c9e
  misc_feature 1..2: note = core
  misc_feature 3..117: note = LE
  misc_feature 118..1149: note = CDS
  misc_feature 1150..1443: note = RE
  misc_feature 1195..1395: note = bridgeRNA
agatggggtattcggccggccggtgccctttcctggaaggcaggtgctgcgcttcaggctgatgatagaggcggtctgcgttgtggcagccacaaacatcagaaggagaagcgcaggatgaagcatcatgccggtctggacgtctccgtcaaagagacgtccgtgtgcatcgtcgacgagggtggcaaggtgtgtcgcgagatgaaggtgccgagccatcccgaggatctcgtgcaggcactcaaagatcccgcctggcgtctagagcgcgtcggtctcgaagccgggccactgtcgcaatggctgttcagtggcttggcggaagcgggtttgccggtggtgtgcatcgagacgcggcacacgaaagcctttctccaggcgcaggtcaacaagagcgaccgcaatgacgcacgtggaatcgcgcagatgatgcgtgtcaacctgttccgacctgtgcacgtaaagacgctagcgagccagaggcggcgcagcctgctgaccgcgcgcaagctgttgcaggagaaagccattgctgtcgataacgacatccgtggcctgctacggaactttggcctcaaagtcggacccgtcggtgcgtccaagtttgaggcacgcatccgcgagctcatcgaagacatgccggaacttgccgagatcatcgggccactgcttgatgcccgccggaagctgcgcgagctctttgccctccttcaccgcaagctcttggcgatcgtgcgggatgacgcagtgtgccggcgattgatgaccgtcccgggaatcggccctgtggtatccatggccttcaccgccaccgtcgacgttccggcccgcttcaagaactccaaggttgtcggggcggcgcttggattgactccgatcctcaatcaatccggcgagagcaaacgcatcggcagagtctcgctgtgtggggatggaatgacgcggacccttctctatgaggcagctcaggtaatgctgacgcggacgaccaagtggtcgtggctgaaagcgtgggctatgaaagtcgcggcacgccgcgggatgcagaaggcgattgtcgccttggctcgacggctggccgtcgtcttgcatcgcatgtgggtaagcggcacggacttccgctggacaagggacgtgcaaccaacttgatgcgaacagctccacaataggcgagtagaccaggaggaggcatccacggttccgcgctgaggcggagagttgtccctcgcgggacgatggacgaagtgagttcggtgcatgtgctgttccttgtgctccgcgagcacaaaggacgccctaaagattgttccacttcgttcttctgatcccatcatggaagggccaaggtgccgattccggagagaagcgagagcccgtagggacaagtccacgtcacaatgcaggcagcctgaaagctcttgacctcaaatggccgaatagaga

SEQ ID NO: 4438 - DNA, 1397 bp, unidentified
  source 1..1397: mol_type = unassigned DNA; note = element_6bffffe
  misc_feature 1: note = core
  misc_feature 2..89: note = LE
  misc_feature 90..1118: note = CDS
  misc_feature 1119..1397: note = RE
  misc_feature 1160..1391: note = bridgeRNA
gaatgagatggactccccctcccacaacggcatcaaattgtgccaaagtgtagttgcgaaaccaacacttgatagaaggagaagtccaaatgaatattacatctctaggcatcgatttggctaagaatactttcagccttgtaggtatgaataagcatagcaaaattgtttgccgcaaaacaatcagtcggaagaagctgcttcctttcatcgcacaatgcccgccttgtttaatcggtatggaagcctgtagtggttctcactattgggctcgtgagtttgaaaagctaggtcaccgcgttggcatcatcgctgccaagtttgtcgaaccatatcgtaaagggggaaagaatgacaataacgatgccgaagcaatttgcgaggctgtgatgcgccccaacatttggtttgttcccattaaatcacccgaccaacaagctgtgctgtgtatacaccgcgttcgacaaggcttagtaaaagaccgaacgggattattgaatcagctacgaggcctgctttctgagttcggtattattatgcccaaaggtcggtaccctgctcaacatgctatccctagcattttagaagatgcagaaaatggtttgccgatgctggcgagaaatattatttctgatctctggctacgaattcaagaagctaataaacagatcctcacctatgatcgagagttagcgaaactggttcgcgaagatagcgttgcgaaaagattgatgacgattcctggcgtgggcgagcaagtggccacaggtgtagtcgcaagtgttcctgacccccgaatattcaaaaacagccgacagttctgtgcatggctgggccttgttccgaggcagtttacaacgggcggacacattcggctgggtcgcattaccaaacgcggtgataaatatctgagaatgtgcctggttcacggtgctcgagcggttgttgctgcgctcaaagataaacaagaccatgtgagttgttgggtaagagagcttgttgagcggcgcggttatttacgggctgtcgtcgctctcgctgctcgcaatgcacgactgatctggacccttatgattaagggtgaagattacaaacccatgcctgttatacaggcttagaaaatcatgctttataagtaaaaagaaaacagttaaacaagaggtgccaaccgggtcctgcgaaggcggtagatgacaatcagaaaagaccgaggaagccacagcctgtttatcgcggggaccacaataaggtcgtctaacgaatgaggcaagtttcccgagcgagtactcatcttggtccgagcgtaaacgctcattaagtagaccgaatgtagaggtgcagtccaattctagattgtttgatagtgccctggcttgacaaccgggggagtccatgta

SEQ ID NO: 4439 - DNA, 1320 bp, unidentified
  source 1..1320: mol_type = unassigned DNA; note = element_6c09553
  misc_feature 1: note = core
  misc_feature 2..55: note = LE
  misc_feature 56..1066: note = CDS
  misc_feature 1067..1320: note = RE
  misc_feature 1096..1317: note = bridgeRNA
taatgaaatggacaccccttctatactgagagagtcagtttaaaaggaggcggccatgagtgaaatttatacaatcggtattgatctagcaaagtcggtttttcaattatgcgcgttcgatagagcaggtaaaaaactgattaatagatcattacgaagaaatcaggttataaagtttttaagtaatatagagccttgcttagtagggatggaagcatgcggaagctctcattattgggctagagaaattgagaaattggggcatgaagttaagctgatgccacctcagtacgttaagccttatgtcaaaacgaataagaatgatagtgctgatgcagaagctatttgcgaagcagttcgtcgtccaacgatgcgatttgtttcagttaaaagtgaagaacaacaagcgttattgctacttcatcgtgaacgagaaggcgtaatacgagatcgtacagcccttataaatcgaattagggcaagcctgcaagaatttggggtcagcgtacccgcaggtaggtttcagttaagaaagtggtttagagaaggctttggttcagtcgaagagcagctgccaaagttgttggttaatcatattaaatcgatgcaaaagcgtttaaccgatcttgagcagtacgttgatgatttagatatgcagattgatgttgtaagccaaaccagtgatgaatgccagaaagtgatggagatccctggtgtcgggcgtctaacatcttcggctttggtagcaagcattggcgatgcaaaagcgttttcgtctgggcgtcagttagctacttggctgggattagtgccaagccagcattctagcggaggcaagtcattgctacttggtatcagcaaaagaggtgatacctatttgaggcgtatgtttatacatggtgctagagctgtgataaggcatatgaaagaaggaaaaccattctatgagtgggtaacctcgctactcaaaagaatgcataagaacaaagtgattgtcgcgttagccaataagttggttcgcatcgcctgggccgtgttggtcaaagagaaaagttttagcgcttaaagagcgctattaagtaaacaaagaacatccggttttgctcggtaaaagcaagtgatgacaaaataggttagaccgtgacttggagattctgtgcctaacatcgtttcttagaaaacggtaaaatgattagagccaagtcagcgaagttcatcggggatcaagagcaagtctcttacaaggaatccgaatagatggctgcaaaaccacatttgttatcggttgattttgcttgcaaaaagcggggtgtccataga

SEQ ID NO: 4440 - DNA, 1200 bp, unidentified
  source 1..1200: mol_type = unassigned DNA; note = element_6c0fd75
  misc_feature 1: note = core
  misc_feature 2..209: note = LE
  misc_feature 210..1175: note = CDS
  misc_feature 1176..1200: note = RE
  misc_feature 35..201: note = bridgeRNA
tcttaagtttgattttcttaatttttacatattaatcagaaagaacaaaagagaggagtaaggttattttaagcataggaataataattccgtaaacattgaaaaccccctctcttttctacttcaatttcgttcagttctatgagacttttgatctcgttttcaagatggtgaaagcaaagtaggtgtcctttcctaatcatttacctatgaataaaagtaaacaaatttatggagtagacattagcaagaatgtatttgatgtagctgactcccaggggaaccattctcaatttaaaaacgatgtaaaaggatttaaatcatttttaaaaacactttcatcagaatctctggtcgtcatggaagctaccggatactatcattacaggcttgcacagttcctttatgaacagggaatacatgtgtctgtagttaatcctctttcggtaaagagattcattcaaatgaaactttccagggtgaaaacagataaatctgatgctaaagctatctgtgagtatgccacgataaatgaagttccattatatactgccaaagacaagaaccaggcagaatgtttacagctcctacgcctcatcgatatttatttaaaacaaagcactgccttaaagaataagctacatggagaaaaaaccctaggaacaccttctaaaacagtatatcattcattaaacaggtctttaaaagctgtacagaaggaaattaagataatggaggatcgcctaatggagatagtcaaagaagagcaacaaaaacaactaacccttataaaaagcattcccggcttaggcaacaaaactgccattatgattatcgttttgactgatggattttcaaactttgaaaatgccagccaactctgcagttacaccggaatcactcctaaactacgtcagtctggaactagtgtgagaggccgcagccggataacgaaaatggggaatgcaaagcttagaaacctactgtttatgtgcagcttctcagcaaggaaatataacaaggcgtgcagggaaatttatgagagaataatagcaaaaggaaaaagtaaaaaactggctcttatcgcggtgtgcaataaactattaaaacaggcatttgcaattgcaaaatcgggattgccttaccaggaaaattttgtctcgaaattagcttaaagaacttgttttttaactcagttct

SEQ ID NO: 4441 - DNA, 1379 bp, unidentified
  source 1..1379: mol_type = unassigned DNA; note = element_6c157e1
  misc_feature 1..2: note = core
  misc_feature 3..412: note = LE
  misc_feature 413..1276: note = CDS
  misc_feature 1277..1379: note = RE
  misc_feature 11..235: note = bridgeRNA
ctcgtataatatagttgtagtaataaatactacattttattctcaatctcactttcatatgggataataattgtatagatagaggtcgtagctatcctccttgaagctagtcttcctatttaagggttacgcctctactttacgtccttatcagtatgagctggatagcacatttcgttgctgtatgtctaacgaggtttgattgtcgtaaagttcttgagggttctttctctatctaaatttatattaaagctaggtgattttatgttttacattggtgttgatattgcaaagaataaccacgaagcctcaataattgattctaatggtaaacttgtttctgagtctttttctttttctaattctatcaggggtttagaaaagtttcagaaatttatttcttctttttcgattgattctaacaattgctcaaattcttaggttcggtgagttttctgtttctcatttttctgatgaggatacttttgctttaagaaatctttctaggttcaggtttgctcttgttgacgaagcttctgattggaaaagaaagcttgttgctattttagatcaagtttttcctgagtattcttcgcttttttctaatatttatggtgtagcttctagagagcttttgagtaagtatcctttgcctgaggatatgatttctatttctgctgatgagctagctaagatgttgtctaagtgtagtagaggtcgctttggccttgataaggctaaagaaattcaagagaaggcttctaattcctttggtgttaagtttgctttgaagtctttttcttttcaaatcaaacaaattattgctcaaatttcttttcttgaagatcagatttttgagattgaagatgaaatttcttctatgattaattctttatgccctgttattacttctattaccggtattggtgatgtcttaggtgctgctattttctcagaaatcggtgatatttcacgatttgagagagctaatcagttggtcgcttatgctggtttggatgttgctgttaagcaatctggtaattttaatgctactgatactaagatttctaaacgtggttctccttatcttagacgtgctatttggcttgctgcttgtgttgctgcttttaaagatcctgctttgtctgtgtattatcaaaaacttcgacaaaggggtaaggctcatggtacagctattggtgctgttgctagaaaacttaccaacataatttttgctgttttgagggataacaaagcttacatacctaatatttagttgttattcaattttgataagcctaaatttttaggcttgtttgacatgccttaaatttcaagataaattattttttattttctcttgacatttgatagctggt

SEQ ID NO: 4442 - DNA, 1513 bp, unidentified
  source 1..1513: mol_type = unassigned DNA; note = element_6c17cf0
  misc_feature 1..2: note = core
  misc_feature 3..210: note = LE
  misc_feature 211..1488: note = CDS
  misc_feature 1489..1513: note = RE
  misc_feature 6..210: note = bridgeRNA
ctgatggctctacgctccgcttccatggagtttctccccgtggagcgcttcggacgcttgtcccgtgaggactgaggtgagacggcgcccgcgggggtggctccgggaggcccgacgcccacgagggtgtcgtcccgcgaggactggtccatcagcacggcgccgcgtttccagcctgttgttgctctttttcgattgagagggggctgcgtgctcgccgtcgggatcgattggtcggaggagttccacccggtcgcgctggggcggccgggagagggcgtgttcgacgtgcgccgggtcgagcactcgccgaaggcggtcgacgccctcgttgagcggatcgcggtgctcgagcctgaggcggccgaggtcagggtggtgctcgagatgcggcacgggctgctggtcgagcggctcttggacgccggctacgtcgtcgtgccggtcaacccggatctcgtcgcccgccggcgtgggccggcgcgcaagaaggacgacaccgaggacgcgcggatcgcctgcctgctcgcgctggatcgcttcgagcggctgcggccactgatcccccacggcgagatcgccggcgagctccgggcattcgcgcgagacgacgagcgagccgcgagggacgagcggcggctgctgaaccggctgcgccaagagctgatcgcgacctttccggctgcgctcgaaatcgccggtgccgatctcggcgcgccaagcttcctgcgtctgctcgagcgttggccgagcgctgaggcgctgctgaccgcatcgcgtgacgagctggtcgcgttcgcccgcgagtcccgccacggctggccggagcgcttcgccgacaaagtcgtccaagcgctcgcagccgaccagttccagccgcgggcctacctcgtccgcgccaaggccgacacgatccggctcagcgcgtcccagctgctcgcaatcggcaagcagcgcagaagctgggagcggcggatgggtgagctgctgctcggcgcgccccaccggggcagagccaagcagccgcgcgaggacgagcggggacagagcttccctggcggcgaggtctacctgagctttcctggcctcggtgaccgcctcgccgccagggtcgccggcgagatcggcgaccatccccaccaattcgagtcgccgaacgcgctccaatgctacgccggcaaagcgcccgtcacccgccgctccggcaaaagcgagttcgtcgtcagctgccggctcgcctacaaccgccacctcggcgacaccgtccagcaatgggccttctgcagcctgcgcacctcgccctgggcacgcgagttctacaaccagagacgagcgaccggcaaaggccacaacgcagcgctccgcgcgctcgccaaccgctggctcgaagtgctctggcactgcctgcaaaaggacgtcgcctacgacgaagccgtccacaccgccaaccgcaaccgcgccctccaacagctcgcacaagccgcctgaccacaccgaggttgacagagggtgt

SEQ ID NO: 4443 - DNA, 1355 bp, unidentified
  source 1..1355: mol_type = unassigned DNA; note = element_6c1d429
  misc_feature 1: note = core
  misc_feature 2..81: note = LE
  misc_feature 82..1107: note = CDS
  misc_feature 1108..1355: note = RE
  misc_feature 1118..1351: note = bridgeRNA
taatgagatggtcagcctgaccaccctaaagcccagcaggttcacacttgttgggcttttctcatttcgggagtacgcgccatgacctccgtcgcactgctcggtatcgatatcggcaaacataccttctacctccacggccaggatcagcacggccatcaggtgctgcgcaagaagtacagccgacggcaactgatcgacgtgctggccaacaccccggtctgcaccgtggtgatggaatcctgcgccggggcccactggctggcgcgcaagctcgccgagtccggtcaccaggtcaagctgatcgcgccgcaatacgtgaagccctttctcaagggcaacaagaacgattacaacgatgccgaagcaatctgcgaggccgctgcccggccgtcgatgcgtttcgtcgccgtcaagacgccggagcagcaaacgctctcggcgctgcaccggctgcgcgaatcactgatcgcccaccgcaccgccgcgatcaaccaggtgcacggcttcctgctggaattcggcgtgagcctgccgatcggcatggcgagcatccagcgcctgccggcactgctggatgatccggttcacgcactgccgccccggctggtgcaggtgttgctgcggctgcacgcccggatcaaggggctaagcgccgagatcaaggacatcgaggcggagctggctcggcaactgcaggatgacgacgctggccgccggctgttgagcattcccggcatcggcccgatcagcgccagtgcgctggccgccgaggcgggtgacgcctcgcagttcaagtgcggtcgcgatttcgctgcgtcactggggctggtgccgcggcaatactcgaccggcggtaaacagaccctgctcgggatcagcaagcgcggtgacaagcacctccgccggctgctggtgcaaggcgcccgcgcagtgatgcaacgcgccgaccggcgtgacgatgcgctgggcacatggctgcgtggcttgctcggccgccggcacagcaacgtcgtggcctgcgccttggccaacaagctggcgcggatcgtctgggcagtgctggccaagggcgggcaataccagccccacccgcacgcagtttgatgttctaaccgttcagacctgcttttgcgatgccaaaccatgatggcggtaaacggcacactgcctggctgagaacctggccaaaaatccagcattcaatgctgtggggcttttaaggacagtcaggcgcgacgactcatcgagggccgggcgcgtatccgcgcccatacggagcccggatacattagcgcaagcatgctttaccaacaccacggcctgggccttgcagaaggaaggctgaccattca

SEQ ID NO: 4444 - DNA, 1199 bp, unidentified
  source 1..1199: mol_type = unassigned DNA; note = element_6c1ef74
  misc_feature 1..2: note = core
  misc_feature 3..221: note = LE
  misc_feature 222..1196: note = CDS
  misc_feature 1197..1199: note = RE
  misc_feature 40..200: note = bridgeRNA
tcctttagatttgttttttaaaatttaagtagatttatgattgagaaaggaagcaaaagtaaactattcgttcctctgagtttgtggctcatatcttgattaagactttggcttccctttcatcaaagactcagatagaaatttgggctagtgacccgttattaaggagttgagcttatgatgaatttctcaaatcattgttgaatcgtaaaagcaaagttatgaaaaacattattattggcattgatatcagcagcaagactttagatatttgtgtaaaagaagaatcattaaattacttttctattgagaataacgttccggctataaagcgcttttttaaaaaatattcagatgagaatgtaattttagcaatggaaaatacaggcagatacaattggaatctttttgaagtattggaaaaattcaactttaaagtttatgtaatatcggctctgcatatcaagaaaagtataggtcttgtcagaggtaaaaatgataaaattgatgccctgcgaatttgtagttttattgagaaaaattatcaagaaaatagagaatggaaaccaagttcgtgctccattaaaaaaataaaaatactattgaccgaaagagctttaagaataaaaatcaaaaagcagcttatggttcagcagcatgattacaaattaatgaaaggcattggattggacaaagagctaaaaagtctaaatgtaaaactcattaaaaatattgaaggacaaattaagattatagaaaatgatattgaaaatattattcgaagcgatgaaactcttaatcaccagcagaaattgataaaatctgttcctggagtaggtcaggttttatcctggacattattatcaaaaacagaaggatttacaattataaccgatccaagaaaaatggcatgctatagtggagttgtaccttttgattttcaatccggaacatcattaaaaagaaggcctggagtatcaatgcttgctgataaaaatttaaaaactattctgcatctggccgcaatgagtgcaattagattagataatgatctgagaagatattacattagaaaaattgatgagggaaaaaataaaatgagtgttttaaatgctgtgagaaacaaaataatccatcgggtttttgcagtaataaaaaaccaaaccttttatgaaaaagatttggttttatcatagaaa

SEQ ID NO: 4445 - DNA, 1400 bp, unidentified
  source 1..1400: mol_type = unassigned DNA; note = element_6c2d736
  misc_feature 1: note = core
  misc_feature 2..92: note = LE
  misc_feature 93..1115: note = CDS
  misc_feature 1116..1400: note = RE
  misc_feature 1163..1399: note = bridgeRNA
atgatgagacggtctcctcccctcttaatcggcgtcgcgatgcgccaggatgggtggtatcgaaatccccaaacacagagaaggaggagaccatgggcaaccgtatcgtgattggactggatttagcaaaacagagcaccgcggcggcggccctggacggtcagggccgggagcaatggcgtcgaacctttcgccgccagaagctgctgcccttcctggcccggcaggccccctgcatcgtggccatggaagcctgtgccggggcgcactacctggcccggcaggttgaccggcttgggcatcatgtccgcctgtatccgcccaagcatgtgaaggcctatcagcgcggccagaagaacgactacaacgacgctctggcgatcgccgaagccgcccagcatggccggttgcggtccgtaccggtgaaaaccgtcgaacagcaagatgaagggctactggttcaacagcgtcgccagttaaagcaggaacaggttcgccagggtaatcacatccgggccctactggccgaacgtggtctggtcctacccaaaggggtcgccgcgctgcggcgacgcctgcctgaggtgctcgaggaaggcgacaacggcctgacacctctggtccggcgtgttctgaacggcgcctatcagcgtctactggcgatcctggaggaactgacctggtacgaccgggagctggaacgccagactcaacaagacgacgttcgccagcggttgtgtgagatgccgggtgtgggcgccgtggtcgccagcgtcctcaaggcgtggatgggcgacggtcggcagttccgccgaggccgcgacgcctcggctgccttgggtctggtgccttgccaacacagcaccggtggacggcaagtgctcggtggcatcagtaaacgcggcgaccgctacactcggtcccaggtgatcaacggggctcaggcggtgctgctctatgcgcatcggaaagacgatgctctgcatcgctgggtggtgcgcttgcaagccacccgagggcacaacaaggctgtgaccgcgctggccaacaagctggtgcgcatcgcctgggtgatcctcgcccgaggcgagcgttactcgccccggcccgcttgaaggggcgccgacagggccagaaacagacatagagtcaaggaggtatccccaccccaggttgcgaaggcaacggacacgcgatgacacaacaggtcagaccggcgtaccgaaaacctgatgaatccgtcggctcatcaaagcctcagggatgataaggacggtacgcgcgagtactcatcgaggcccgaagcgttaatccctcgcttcatgcaaaggccggatatatggcagcaacctgtccctgcatcgatgcccggagccttgcaaacggggaggagaccatat

SEQ ID NO: 4446 - DNA, 1547 bp, unidentified
  source 1..1547: mol_type = unassigned DNA; note = element_6c34e14
  misc_feature 1..2: note = core
  misc_feature 3..261: note = LE
  misc_feature 262..1299: note = CDS
  misc_feature 1300..1547: note = RE
  misc_feature 3..241: note = bridgeRNA
cttgtatgattaattcagaagcaaattaatctactttcctttctttttgataactgtgccataatacattcagatactgtggacttttgatttgttttctgtagctttgactactacacaggagtgtattgccattacctttatctgaattgtttataagctggatgtgccatttatatcagagcacttatttcaatcaagtgtacgaggataatcgttggtggatatcacagtatcaatcttaattgaaaggagaacgttatgatttacgtcggcattgatattgccaaactcaaccactttgctacagccatatcttctgatggcgaagtgctactggagccttttaaatttacaaatgacaatgatggcttctgtctactggcttccaaactcaattcttttgagaaggaccagatcatcattggtcttgaatctacggctcactatggcaacaaccttttgatgttcttagtaccaaaaggctataatgtttgccttatcaatcctattcagactgcgcaaatgagaaagaacaacattcgcaaaaccaagactgataaggttgatactatcattatctgtaaagttttaatgatgcatccccacaggttcgttacgctctacgacataggtcttatacagctaaagaacctcggaaggttcagacaaaagattgtgaagcagcgaactcgattaaagattcagctgacttcttacttggatcaagttttccctgaactacagtatttctttaaatctggaatacatcataagggatgctatgcgcttcttaaagaagcacctacgcctgaagccattgcctctatgcatttgactcatcttacacaccttttgaaagccgcatccaaaggtcattttcaaaaggaaactgcagtagaattaagagttctagcacagaagtctgtcggttcaagcgacaaatctttatctattcaaatcactcagtctattgaacagattgagctattggataggcagttagaattaattgaatccgagatgaaagacattgtcacatcgttggattctgtaataatgaccatacctggcattggctatgtcaatggcggtatgattcttggtgaaatcggtgatatcactcgattctccaatccgagtaagcttttggcctttgctggacttgatccatctgtttaccaatcgggtaactttgaagccaagcacactcgtatgtcaaaacgcggctcaagagccttgcgttatgccttaattaaggctgcacataatgttgttaaaaaacaagactttcaataattactatcatcagaaagtatctgaaggccgttcgcattacaatgctttaggccactgtgcaggtaagctcgttcgcatcatttataagatgctaactgataatgtttcctttaacctagagtagcataggtcttacatagattttttgaaaggccttcgctagaaggtctagttaaggtcagctatttttagcctcataagtcaaacgaattattcgctaaattttttcttgactattcatagctggt

SEQ ID NO: 4447 - DNA, 1424 bp, unidentified
  source 1..1424: mol_type = unassigned DNA; note = element_6c3c9eb
  misc_feature 1..2: note = core
  misc_feature 3..129: note = LE
  misc_feature 130..1149: note = CDS
  misc_feature 1150..1424: note = RE
  misc_feature 1188..1423: note = bridgeRNA
gaatgaaatgaacgcgtcccacccgtgaacggtggagtcgcacggaagtggatccacacaggccaacgacgtcgaagtgcccaggatggtagatcataaaggtcttcaaggcgaactggagagtccgagatgaaccccacaccggttggaattgacatcgcgaaatcggttttccaagtgcactacgtggacgaggaaacaggcgagattgtgaacaggccaatcaagcggcaaaaattcctggaacactttgcgaaccgctctctctgccttatcggaatcgaagcgtgcggaggtgctcaccactgggcgcgagaactcgccaagatggggcatcaggtgaagctgatgccggcaaagtacgtcaaagcgttcaatattcgtaacaagaatgatgcggccgatgcccgcgcgatctggctagcggtccagcagcctggcaaaccagtggcggtgaagaccgaaatgcaacaggcgatgctggcgttacatcgcatgcgccagcaactggtgaagtttcgtacgatgcagatcaacagcctcagaggcctgctcaccgagtacggcgaagtgatgagcaaaggccgtgcggcactggacggggcgataccgaacgtgttggcaaggatcagcgagcgccttccagcgatgctggtcgatacgatgcgcgagcagtggaacggtctgacaaagcttgacgagcagattgccgcgatcgagcgccgaatgcgcgagtgggtcaagcacgatcccgccgtaaaggcgatcagcgaaattcccggcgtgggtctcctgacagcaaccgctgcagtggcaacgatgggcgatgcgaaggtttttcgctccggtcgggaatttgctgcgtgggctggtctcgtacccagacagagtggttccggcggcaaagtgaatttgcacggcataagcaaaaggggcgacacgtatctcagaacactgctgatccatggcgcgcgcgccgtgttgagtcacgccaaggatgcgggcacttggattgaggagatgcgcaggcgtcgcccagcgaatgtcgtgatcgtcgcgctcgccaacaagatggcgcggatgatctgggcggttctggcgcatgaccgtccgtaccagagggattacgtgagcaggaagccggcataggcggtaatcgcttcacgaacaactaacttgcgatcagattgatacgtctaaaggttgcgcaggcaccgtatgtgatgacacatcaggtcggaccatgacccacgaagcctgaaggctcatacgagcttcgagctcgcacggagaatgaggcatgggtcagcggatttcatagtgggccgcagcgaatcaggctgcaacaagcccggatatagagccgcgatcaacctgttttccagaacacacgagagcttgctcaaacgggacgcgttcatata

SEQ ID NO: 4448 - DNA, 1241 bp, unidentified
  source 1..1241: mol_type = unassigned DNA; note = element_6c3fa0c
  misc_feature 1..3: note = core
  misc_feature 4..209: note = LE
  misc_feature 210..1205: note = CDS
  misc_feature 1206..1241: note = RE
  misc_feature 2..199: note = bridgeRNA
tgcctttagtttgtatttataaaattatcataacttttcagaaggagaaacgggtgaactcgaacgttttgtaagcaccaaggcttattggctgcataagtcccgtttctttccttctgacttgcaagtgctaattggaatgttgggtgtaaggacccgttaaaggcgatagctccgcaagttgttttgttttatctaaatacgaatgtatgaaaaatgtaaatgaaagtgcaggtattgatgtgagtaaattaacgattgatgttcatctatttaaaaagaacaaacatcatcaatttgtgaataaatcaaatggatttaaggagatgattcaatggatcaaaaaggaaggtttagtggttgaagaagttctcttctgctttgaacacactggttggtactgccttgaattaagctttttccttcatgaaattgcattaaagtatacatgtgtcaacccaatagaaataaagcgttccattggacttaaaagagcaaagaccgataaagatgatgccggatatcttgcacattacgcttggcttcgaagagaggaaataaaacaatcagtgcctccttcacaaaatattattgagttgcagcgtatgatgagtttacgagaacaattggtaaaacaatcggttgcacttaagaatctgcgcactggaatgcttcaaattgtaataagtagagaaatagatccgtccattttaattcttgatcagaccattaaagaacttgaacaacaaacgaaaaacattgaaaaagagatggaactattgattaaatcagatacgaatctaaaagaaaactatctgttatctaaaacggttaaaggagtcggtaaaatcctggcagttcaaatgctcattcatacacacaattacacgcgatttctctcatggagacaattttcatcctattgtggattagttccatacccgtaccaatcaggaaccagtatcagaggcagaaataaaattcattccatcagtgatcgaaaaatgaaaagtctactttcgatgtctgcaatcagtgcaatacgaagtgataaagagctgaaaatgtactacgaacaacgagttaaagaaggaaaaccaaaaatggtcgttattaatataattcgaaacaaaatcgttgcgagagtcttttcaacggttaaacgaggaacgccctatgtggaattaaataagtttacagcctaaaaaaaagaaagaaaatatttggaagttatcttggaa

SEQ ID NO: 4449 - DNA, 1499 bp, unidentified
  source 1..1499: mol_type = unassigned DNA; note = element_6c45e88
  misc_feature 1..2: note = core
  misc_feature 3..243: note = LE
  misc_feature 244..1479: note = CDS
  misc_feature 1480..1499: note = RE
  misc_feature 14..232: note = bridgeRNA
ctaatcggttcggggagtgagccatccggcacacttcttggtggtagccggccagcgggtgagcactcggagctcctggatctgatgagtccttttgatagacagtgcccctgccggtggccgggagagttgatcgctgctgggatgtcgtgcccgtcgcttcggcggccgtgagcactgctcgattaggtcgctgatagttctccctcaggctgccgacgaaatcggtgatctggatcgagtatgggagaactgttgaagctgttcgtgggtgatgactgggccgaggaccatcacgatgtggagatgatggatgactcggggcgccgcctggccaaggttcggctgcccgagggtgtggccggggtggcgagactgcacgcgttgatcgggggcctggccgacgaagacaccgaccaggtcgaggtgctggtcgggatcgaaaccgatcgcggtccgtgggtgggtgccctggttgcggccggatacacggtaatggcggtgaacccgttgcaggcggcgaggtttcgtgaccggctcggggtatccggcgccaagagtgacgccgccgacgcgcacgttctggcggatatggtccgcacccacgcgcacgagctgcggcccgtggccggagattccgaccgtgccgaagcgatcaaggtcatcgcccgcacccataagacgatgatctgggaacggacccggcatacccaacggctgcgccacgccctgcgcgattactttcccgctgcgctggatgcgttcgacgacctcgacgcggccgacactctggaactcctggccaaggcacccaccccggaccgggcggcccggctcacgatcacccagatcagtgccgcgatgaaacgcgcgcaccgcaaacacatcgccgccaaggccccgatcatccaagccgcgctgcgcgccgaacacctcggccaacctgaagtcgtgaaccaagcctatgccgcttccgttggctcgctgctggcggtcatcgccgtcctcaacactcaaatcaaggccctcgctgagcaggtcgatacccatttcgggcaccacccggccgctgagatcatcctgacccaaccaggtttgggaacgatccttggcgcccgggtgctcgcagaattcggtgatgacccgactcgctacgccaccgcaaaagcccgcaagaactacgcgggcacctccccgatcacccgcgcttcgggcaagaagaaggtcaccctggccaggttcgttcacaacgaccggcttgtcgatgctcttctcacacaagcccaaagcgccctgctgtcctctcccggcgcccgcgactactacgacaaacaacgcgcccgcggatccggccacaacacggccctgcgccagctcgccaaccggctcgtcggcattctgcacggatgcctcaaagccggcaccccttacgacgaaacgacagcctggccggaacccaaatcgaaggttgctgcttgacatcaacgctcctgggatgt

SEQ ID NO: 4450 - DNA, 1407 bp, unidentified
  source 1..1407: mol_type = unassigned DNA; note = element_6c5abd2
  misc_feature 1: note = core
  misc_feature 2..97: note = LE
  misc_feature 98..1132: note = CDS
  misc_feature 1133..1407: note = RE
  misc_feature 1171..1399: note = bridgeRNA
caatgggatggactcctcctcaccctactccggcgtcagtgcgccatactggtaggtggttggaaaactatcagcttgagagtcaggagaagcccatatgaacattagccgagttggtgtggatatcgcaaagtctgtctttcacgtacatggcgttgaccggcatgagaagcctcaatggcggggtaaatattcccgggccaagtggctggaggctgtctgtcggcgcgttcctcaaggcgccaccatcggcatggaagcctgtgcagcggcgcattattgggcgcgcgaacttcaagcgcgtggttaccaggtaaagctgatcgccgcccaattcgtgaagccttacgttaaaacgaataaaaatgatcgggcagatgctgaagcgatttgtgaagcattaggccgtcccacgatgcgcttcgtggccgtaaaaaccgttgatcaacaggacagccaagccacccaccggatccgtgaagagctgattagccagcgcacggcgaaggccaatcaaatccgtggcctcgtcggtgagtatgggtttactgcacccaccggtatccagcagttacggcgggcgctgcctctttggctggaggatgccaccaatgggctcagtgaccgctttcgctgccttctggccgacttagcggatgacctccgttatttagatgagcgcgttgcgcagttaacgtccgccattgaaacgcacgccaacaccgaccccgtcgccaagcgcttgatgagccttcgcggcattggcccgatcaccgccagtgccttatcgggcgtgctgggtgatggcgctatctacaagcgtggacgcgattttgccgcctcgttagggctgaccccgcgtcaacacagcacgggcggacgagagcgcctgttggggattagtaagcgtggcaacagctatctacgaaagctgctggtacatggcgcacgagcggtgctgcgttttgccgtcaggcaagaagacgggcttagtcagtggatcaagcatcttgccgtgcgcaaacatcgtaacgtggcgattgtggcgctagccaacaagacagcgcgtatggcgtgggccgtcacgcgttacgaggtgccatataaccctgagttggctgccgcagcgtaagcaggcgacatggtcagaaacatttaaccagtgttccctccaccccgattgcaacaccacaagagagatggcgaacaggtcgaaccgacgccgggccataccgtgtagcgcgtagagcatgaaagctcgtttaccctgcgggtacccggcgtgcgaatagcccattaaggtccgatgcccacacgttaggcatcttttacgagaccggatatacgctagcagtcgaccgtgccgctatgaccttttgtgcttgcaagcgaggaggagtccatata

SEQ ID NO: 4451 - DNA, 1432 bp, unidentified
  source 1..1432: mol_type = unassigned DNA; note = element_6c5d4ea
  misc_feature 1..2: note = core
  misc_feature 3..120: note = LE
  misc_feature 121..1152: note = CDS
  misc_feature 1153..1432: note = RE
  misc_feature 1188..1389: note = bridgeRNA
agatggggtaatcggccggcgttcttgtggatagctgaatatttggggtgctgcgcttcaggctgatggtgaaacgaggtccgcagatgcggcctcaagcatcagtaggagaagcgcagcatggactattttgcgggactggacgtatcggtcaaggacacgagcgtctgcattgtggatggcacgggcaagatcacccgagaagtgaaggtggcgagtgaacctgacgctctgctcgcggttctgaacaatcctgcctaccacttcaagcggattggcctggaagctggaccgctatcgcagtggctgttcagcgcgcttgccgaagcagatttgccggtgatttgtgtcgagacgcggcacatgcgagcggtattgaaggcacggatcaacaagaccgatcgcaatgatgcccgcggcatcgcgcagatgatgcgggtggggctttatcgcccggtgcatgtaaagacgctgcgcagccagaaactgcgcacgctgttgacccatcgtaagctgctgcagtcggaggccatcgctgttgagaatgatctgcgtgccagtttgcgtaactttggtctcaaggtcggcgtcgtgggcacggtcaaatttgaggcccgtgttaaagagctggtcgagaacttccccgacctgctggcattagtcgaaccactgcttgttgtccgccgggtgctgcgcgaacagatcagcattctgcaccggcgcgtgctggctgccgtgcgtaacgatgaggtgtgtcggcggcttatgacagtgcccggtgtcgggccagtggtggcgctgacctatcgcgccactgtcgatgtgccagctcgctttcggaagtcaaagtccgttggggccgtattcggattgacacccgcccgggaccaatctggcgagagcgatcgtcctggcgccatatctcgctgcggagacgagatgatgcggacaacactctatgaagccgcccaggtcatgctgctacgttcggcaaaatggtcgtggctcaaggcctgggcgatgaagatcgccaggcaccgcgggatgaaaaaggcaatcgttgcactggctcgacggttggccgtgattatgcatcgcatctggattgatggcactgaattcagatggaccagagaagctgcggcggcgtaaccgccgctgaggatcaaatgcgataggaggaaactcgagctccaccaagcggtggaataatgtccctcgcgggacgagggatgaggtgagttcgcatgtctgcttggacctatcgttctctcgacggaaaggccgctcaaaagattgttccaccttgtcctcggatcccatgatggaagggccctagcgccgagtccggagagaagcacgagcccgcgagtgacattgacgccgccgtggacggtctgaaagcgcttgaccccacacggccgattagaga

SEQ ID NO: 4452 - DNA, 1671 bp, unidentified
  source 1..1671: mol_type = unassigned DNA; note = element_6c6e031
  misc_feature 1..2: note = core
  misc_feature 3..310: note = LE
  misc_feature 311..1495: note = CDS
  misc_feature 1496..1671: note = RE
  misc_feature 51..287: note = bridgeRNA
ctggtatattatagatgactcatttaacagtcatcatagtataccttttcctttccatcaatctattaaccgagattgataacggttaagtttgctagtaaaatattgaatatgtgaatgtggatttgtatacttcatccttgtggctttgactacttaagaaaggatctcaccacaccttattcctaaacagtaattagttagatgagtctaccctttagggttttaagaattcgtatattgcaccaggttctgtggtttaagtgttgtggataacacatcacattgtttattgaaaggatgtattatcatgattatagtcggaattgacattggcaagaacagccattatttctgtgttcttaatagaggtacaggagaagtactggtagatgccacaagttttaaaaacaatcagaatggctttgattcattgattaaagcactagagccttatgataaggcttctgttttgatcggtatggaagataccgggcattatcactttgctttattaagatacttattaagcaagggttttgccgttgctctgatcaatccagtggctactgatatgacccgtaaaatgcaaggtggtatctctaagaatgacaaactagacaccttaaccatttgcgatgttctgtcatcaaatgctcataagaaatcttatcgtatccttaagataagcaagtttgattactatgaacaacgacaactgacaagacaccaccacaacctgaaagaggaaattaatgtctacacaaaccgtttacagaagtgtattgatcttgttttccctgaattcaatagtctattcaagtccaagtatggtacagtctacatgaatattctgaaaacctttgggagcgctgacaggattgcccatgcagatatcagaagtatccgtaaatgctttgaaatcgaaggcagaggtaagcgtatatcccttactgctgaacaactcaaagaagccgccaaagagtctgtaggctttgcatctcttgctgaagaaatacaaatcagacatttgatctctcagattgaactaatgaatgcacaattggatgaaatagataaaaaaatagaagagttctctgtcaagaccaactctcctatcatatccataccaggaatttcacatttctctggtacttctattttatctgaattaggagatattttcaactactctaagccatctcaaatcataaaagttgctggagtagccccttatgagtatgaatcgagccaatatagagctgaacatactgccattaccaagaaagggtctaaatacttgcgtaaaacgctataccaaatcatagtgcctgtcatccagcataatgaggttttcaagcaatactatcagttaaagcgttcacagggcaagagtcaccgttgtgcgcaaggccattgtatcagaaaactgttgagagttatttatcatctgttgacaatgaaccagcaatttgatccttcacttttgagataatccggttacgtatcattccaatttttaagtgatcctcatacaggttgttttcgtcatggatttaaacacaaattttccattcacttttcaaagaccagctagaaattaactattaatttcaatgttttatattttcaaactttttcataaaaaacacttgacttttatatagttag

SEQ ID NO: 4453 - DNA, 1542 bp, unidentified
  source 1..1542: mol_type = unassigned DNA; note = element_6c71ae9
  misc_feature 1..2: note = core
  misc_feature 3..240: note = LE
  misc_feature 241..1374: note = CDS
  misc_feature 1375..1542: note = RE
  misc_feature 3..218: note = bridgeRNA
cttgtattatagagtcgtagttattaaagcccctctccaagggctgtgctacactgtaagagatgctgtggattggttacttcctcctaccgcaagacggttcaggaaaggctccaaccacaaccctttacagtattgttaatcagttagataccgccagacggtttatgtagaacaaggttacaagagtaaagcgtcctgtggacccagcatcaaacaaacacaccggaggtattcatcatgatttgcgtgggtattgacgttgccaaggacaagcacgactgcttcatcctcagctcggaaggtgaagctctggcagatgtattcaccatccaaaacaatgcggagggctttgacaggctcctgcaaaccattcgccgctgcacccgtccagaagataaaataaaagtagggcttgaggctaccggacactacagctacaacatcctcggatttctgcttgacaaaggcctacccacctacgtcatcaatccgctgcacaccaacctctaccgaaaaagtctgagtcttcggaaaaccaagaccgaccgtgtcgatgcgcgaaccattgcagctatgctcatgtctgatgtggacctcaagtcctacacagacacagcataccacaacgaggaactaaagtcactcacaagataccgttttgataaagttcgtgaacgggcgaagctgaagcagtctgttttccgcctggtcacgattctgttcccagaactggaaaagctggttccaacactgcacatggcatccgtttacgcacttctcagtgagtttcccggcgccaaacaggttgccgaagcgcacctgacgcatttgaaggcagtcttatacggcgcctccaaaggccgctacgggcgagatatggcaacaacgcttcgagacgctgccagatgttctgtcggctctgtcatgccagccaagtctctggaattgcagcatacgatccgcctgatccgcgaactggatgccgaaattgaagacattgagaccgcgatccagtccatgatggatgaaatacagtcccccattacaacgattccgggcattggtgttcgcatgggcgctatgattcttgccgaaataggagacttctcccgcttcgactcgccggataagatacttgcctatgctgcatgtcgccctctacttaccagtccgggcatctttctctgtctggagcctattcgcacatggaaaagcgaggctcccggtatctgcgctacgcactttacaacgccaccaaatatgtttgcctttggaacccggcctttgctgcttacctcgctaagaagcggggcgagggaaagcactacaatgttgcaatttctcatgcggcaaagaaattggtgcgtctaatttacgcgatggagaaatccaagcagtcatatcgtaacgctgcgtaaatccattcttctatatgctcagttaggcgtccatctggatgtctgctttgctatgccctttttgatccgtctaaaatttttaccactcctcacatttcagacttgacatttaatagttagt

SEQ ID NO: 4454 - DNA, 1383 bp, unidentified
  source 1..1383: mol_type = unassigned DNA; note = element_6c735e9
  misc_feature 1..3: note = core
  misc_feature 4..87: note = LE
  misc_feature 88..1122: note = CDS
  misc_feature 1123..1383: note = RE
  misc_feature 1148..1370: note = bridgeRNA
tgatgctgtggacggcgcccgctcttgcggcatcagagtgccatagggtggctgcgttgtagcaaaccacatcgaggggagccgtccatgggcgaggttagcacgattggtctggatattgcgaagtcggtcttccaagtgcacggggttgatagttcaggcgcggtggtgatccgcaagcgcgtcagtcgtttgaagctgctggagttcttcgccgctctgccgccgtgcctggtcgggatcgaagcctgcccgtcagcccatcattggggccgcgagctgcaggggctcggccacacggtgcggctgatgccgccgcgctatgtgaaggcctatctcaagcgcagcaagaacgacgccaatgatgcggctgcgatctgcgaggcggtgacgcggccgtcgatgcggtttgtgccgatcaagaccaaggagcagcaggctgccttgatgctgcaccgagctcggcaattgctggtgcgtcagcgcacaatgttgagcaatgccctgcgggggcacctggcggagctgggcatcgtgtcggccaagggccgcaatgggatcagcgaattgctcaggatcatcgcggatggcgcggataaccggatcgccgcggcgacccgcgccattcttgatgtgatggcgcggcaatacagcgccatcggtgccgaaatcaggtccatcgacaagagtatcctgacttggcatcgctcgtgcgaggcgagccggcggctggaggagatcccgggcatcggcccgatcgttgccactgccctggttgccgaggttggcgactggaaggagttccgctcaggacgcaaccttgccgcctggattgggttggtgccgaagcagcgcacgaccggcggcaaggacaggctcggcagcatcaccaagcagggcaaccgatacctacgatggctcctggttgcaggtgccatggcggtcatccgctacgcgcagaaacacgggacgaagaaccggccgtggctcgggcggttgatggagcgccgaccaacaatggttgctgcggtcgcgctggccaacaagattgcccgcatggcctgggccgtcatggtccgcggcgagagatacaaggagccgacgctgctgatggcggcataacagacgccagcagatagatcggcaaaaccaattggcgagggcatcacgacgtaatgcagatacggtcgttccggggaccgggagagcccgtttgggtcatcgcactgctctaaaagtgcgtgctaacgattgggacccgatccgcgcagagcattagggccagcggccacatacgccgcatcaacaggccggacacgtgaccgcacccgaccaatgctgcagcaacgtcaaaaaagctcttgccagggcgccgtccacacg

SEQ ID NO: 4455 - DNA, 1505 bp, unidentified
  source 1..1505: mol_type = unassigned DNA; note = element_6c77f62
  misc_feature 1..2: note = core
  misc_feature 3..237: note = LE
  misc_feature 238..1239: note = CDS
  misc_feature 1240..1505: note = RE
ctaataagggccaatgggtccgccgtccggcagactcaggtccggtagtcgccggcgggtgagcactggtgcctcctgggctcctttgggaagccctagccctagatcgtgcccccgccggtgaccgggagatgggatcgctgctgggatggcgtgcccgccgctgcgtggcgtgagcactggtttattaggtcgccggcagttctcccggaggctgccgctgggctggagctgacgatgggagagcgcatgcgggtgctgctggcgggtgatgactgggccgaggatcatcacgatgttgagctgatggaccaagccggggggacgctggcccgggcgcggctgccggagggtgtggcgggtatggcccggctgcacgcgatgatcggtgagcagctcggcgaggacgctgaggcggccgaggtgcgggtggggatcgagaccgaccggggcttgtgggtggcggcgctggccgcagccgggtatgtggtctacgggatcaacccgctgcaggtggcccgctaccgggagcgccacgcggtgtcgggtgccaaggccgacaaggccgatgcgcacaccctggccgacatggtgcgcaccgacgggcaccagctgcggccggtggccggcgacagcgagcaggcgcaggcagtgaaggtgatcgcccgtgcccacaagacgctggtctgggagcgcacccgggccgtgcagcggctgcggcaccagctgcgcgactacttcccggccgcgctggaggccttcgccgacttggacgcccccgacgcgctggaactgctggccaaggcgccggacccggcctcggccgcccggctgaccgccgcccagatcgacgcggtgctcaagcgtgccagacgccgggaccgggcgggcaagacagccgcgatcaagaccgcgctgcgcggccagcagctggcccagccgccggcggtcaccgccgcgtgcgccgcggtgacccgctcgctgaccgcgctgatcaccaccttgaaccagcaggtccgcgtgcttgaggggcaggtggctgagcattttcgcgcgcacccggacgctgagatcatcgcttcccagcccggcctgggacaagtcctcggtgcccgggtgctcgcagagttcggtgatgaccggtaccggtacacctccgccaaggcccgcaagaactacgccgccaccagcccgatcacccgccagtccggcaagcgcaagacagtcatagcccggtaggtgcacaacgaccggctccgcgacgccctcggcctgcaggccttcgccgccctcagcgcctcgcccggcgcccgcgcctactacgaccagctgcgcacccgcggcatcggccaccggcccgcgctgcgccagctcgccaaccggctcgtcggcatcctgcacggctgcctgaaaacccgcacactctacgacgaggccaccgcctggccgcagcacaccagccaggaaatcaagactgctgcttgacattcaagctcctgggatgt

SEQ ID NO: 4456 - DNA, 1155 bp, unidentified
  source 1..1155: mol_type = unassigned DNA; note = element_6c85f80
  misc_feature 1..4: note = core
  misc_feature 5..354: note = LE
  misc_feature 355..1143: note = CDS
  misc_feature 1144..1155: note = RE
  misc_feature 12..213: note = bridgeRNA
cttgtcttatgactttcccggttccatgcgaggatggagccaccgcacgccacgccaatcatggcgtgcggtggcggcggttggatcgtttcgcgcccggtcttggaggaccgtaatcaagtgagatcgaccgccgtcttcgcatggggcctgaacggatacgcagcggcacgtcgccctgcacgacaagcataggacatgacgaagatgacacatgataccatcggcatcgatatctccaaactgcatttcgacgcgcaccgccgcacgacgggcagccacgcgcggttcgacaacaccgccgccgggttcaaggccttcgcgcactagatcggcgcggagcatccggacctggtggttttcgagccgaccggtccctatcaccgcgatttcgaagcggcgttctctgggcgcctgcagctggtaaaggtcaacccgctgcaggcgcgccgctttgcgcagtctcagggcacgcgggccaagaccgatgccgtggacgccgcgatgcttgcgcgcatgggccgggcgctggagctggtcccggatcggcccgccgaggaaatccagatcgttctcagagagttgcgcgtcgcccgctcgggccttgtccgggaccggaccgccctgatgaaccgcctttcagcggcgcgcctgcccctcgtccggcggctcgtgaaggcccgcctcgcccaggccgagcgccagatcgccaccctcgacgccgagatcgaggcgcgcctcgaggcctgccccaagcgccgccgcgccgcgcagattctcacctcgatccccggcatcggacgcatcaccgcgcgcagcatcctcgcggaatgtcccgaaatcggcaccctgcgccacaagcagatcgccgccctcgccgggctcgcgccgatgacccgacaatccggcacctggtgcggcaaggcgaggatcgagggcgggcgcagacacctgcgccaagccctcttcatgcccgccctcgtcgcgatgaagaaaaaccccgacctgagcgccaaataccacgccctccgcgccgccgggaaacctcacaaggtcgccctcaccgcactcatgcgaaaactgctcatcctcgccaacacgcttctgaaggagaacagactctggcagccaaaatcagcttgacccggacggata

SEQ ID NO: 4457 - DNA, 1531 bp, unidentified
  source 1..1531: mol_type = unassigned DNA; note = element_6c8c57e
  misc_feature 1..3: note = core
  misc_feature 4..371: note = LE
  misc_feature 372..1418: note = CDS
  misc_feature 1419..1531: note = RE
  misc_feature 8..223: note = bridgeRNA
tttcgtattatcaggttagccagtaattactggttagccttttttgtggtcgttttacgatgggggaagccgggagaacgtgagtcttttaggggcttggacctcgtaataaaaactgttctcccacgacctccaaaataccatgtttgagctggtaggggcgatggatctcgtataacaagcgaagctatgggtttggaaccatcgtggaaaggccggcgaatttcaaaacaaggagtgaggaaattggaacctgttgtcggtgtggatgttgcgaaaggtgcgagcgtggtgcaggcgtttaggaatcgaaatgaaccgtttggcaagacatcgtgcatgaaaagagcggatacgaacaattctcgcgtatgttagaggagcttcaggtcgaaaccgggcttgctccagtcatcgttctggaagcgacaggacactaccatcgcgcctgggtttcgtacctggaacgaagcggttacacctgctacattgttaatccgctgcaatccaaacgtgccaaaggcacgcagttacgcaaggtgaaaacggacgcggtggatgcctggcatctggctgagatgtactaccgtggcgatgtgaaaccccaccggacttgggaagaaacgtttacagaactgcagcatttgacccgacagcacgaattcgtcacagggatattcgtacaggcgaagttgaacagcagagccttattagaacaagtatttccagcgtatgaacaggtattttacaatctgttttcactcacgtcattacaggttctatcccgttgtttagagggaactatggaaaattgggatgaagtaattgaggaaggtagcaggaaatctcattccaagcgatgggtgagtgaaaaagtcaaaacattggaggacgtgctatgtgactggagagagacccggaggagttcttctcaaagcaaggcgttgctcgggatggtcacgttattgctaacgatggtacgtcaattagaggatctcgaaaggcaaatggaagacgtggctgtgagtctacctgaagtggaactcgtgaaaagcattcctgggattggaacaaaattagcggcagccattgtagctgaaatgggcgatgtcaggcagtttaacgatgcgaagcaactcgtggcgtttgcaggtcttgaccctgggatttttagttcaggaaaatttacagcaacaagtacgcgaataacgaaacgaggatctaaaagacttagacgttcgttgtacctggctgtgcaatgtggtatacggaagagcgcaaatgcaaaaatctgtgcgtactatgagaaaaaaagaaaagagggcaagccctacaaggtggttgtgatcgcctgcgcaaacaagctgttacatcacatcttcgccatcttgcaaaagggagagccctaccaagcttaaaccatatttaaccaaaatctccatagccgtggaggttatttgtgttggtcggaaaaagtatatcacgaacagagaacttatccaacctgaaatgcttgacaaacattagctgg

SEQ ID NO: 4458 - DNA, 1442 bp, unidentified
  source 1..1442: mol_type = unassigned DNA; note = element_6c8d01e
  misc_feature 1..3: note = core
  misc_feature 4..231: note = LE
  misc_feature 232..1425: note = CDS
  misc_feature 1426..1442: note = RE
  misc_feature 1..232: note = bridgeRNA
cccgttaccttcgtgatgggtcctcgacctgaggatctcggtcgctgagtccggcatgacttcctgcccctgtcgtcgatgatccggggggtgttgtcaccgggctcggtggcgttggccgaccgctgatagggacatggccaccatgcgtggtctcttcgtaacgtgggtgccggcagctgacgctcctccgatcggcgaccgttcggcgcggatggaaggatgccgacgatgaccgagtacgccgcgtattgcggcttggatgtgggcaaagaggcccatcacgcgtgcgccctggatcctgagggcaagcgcctgttcgatgcggagctgccccaagacgaggcccggctgcgtcgcctgttcactgacctgtccggccatggccgggtcttgatggtggtcgatcaaccgaacaccatcggcgccttgccgatcgcggtcgcccgctcaatgggcatcgatgtcgcgtacctgcccgggttggcgatgcgacgcatcgctgatctccatccgggcagcgcgaagactgatgctcgtgacgcctacatcatcgccgacgcagcccgcgccttgccgcacaccctgcgccgggtcgacgtcggcgaagaagcgttggccgagttgaaggtgctcgtcggcttcgacgatgacctggccggggaagccacccgcctgagcaaccggatccgcggcctgctcacccaggtgcatcccgcgctcgaacgcgttctcggaccacgcgtttcacagaaggccaccctcgcgctgctcacccagtacggcggccccaccggcctgcgcaaggccggacgagcccggttgctccaggcagcccgcaaggccaacccgcgcggcgccgacaccctcatcgaggccatcgtggcggccttggccgagcaaaccgtcaccgtcccaggaaccgctgccgctgaccgggtgctgcctaacctcgcccgctccttggccgacactttggatcaacgtcgccagatcgcggccgaagtggaacaggtccttgatgtccaccctctcgccgaggtcctgacctcgatgcccggagtcggagtcaggaccgccgcaaggatcctgcttgaagtcggcgacggctcctccttccccaccgcaggccacctggccgcctacgccggcctggctcccgtcacccaccgctccggtatctcgatccgcggtgagcacccagccagatcaggcaacaaacacctcaagcgagcgttcttcctcagcgccttcgccgccctgcgcgccgaccccaacagccgcgcctactacgaccgcaaacgagccgaaggcaagaagcacaacgcggccctgatctgtctcgccagacgtcgctgcgacgtcatacacgccatgctccgcaaccgccagccctaccagccccgcaccgccgctgccgcttgacaccgaacatagggaca

SEQ ID NO: 4459 - DNA, 1377 bp, unidentified
  source 1..1377: mol_type = unassigned DNA; note = element_6c91983
  misc_feature 1: note = core
  misc_feature 2..87: note = LE
  misc_feature 88..1119: note = CDS
  misc_feature 1120..1377: note = RE
  misc_feature 1151..1372: note = bridgeRNA
caatgggatggactcctcctcactctaccggccttgatgtgccaaactgagattggagtttcagttaacgagaaagaggagtccgaaatgaagattaatcgagttggtgttgatttagcaaagaatgttttccaattacatggtacggatcggaaaggcaaggcagtctggagacgccagttatcccgaggtaaatggttacaggtattgagcgacaacgttgagcccggaaccgagatcggtatggaggcctgtgccggtgcccatcactgggccaggttactcgcgcagcgggggtacccggtcaaaatcattcccccgcaatttgttaaaccatttgtcaaaagtaacaagaacgatgccaatgacgcccaggcgatatgcgaggcgatgggtagacccaatatgtacccggtcagggtcaaaacagttgcgcaacaggatattcaggcgattcatcgtgtacgggaagaaataaaaagtcatcgtattgccaaggccaatcaaataagaggcctggtggctgagtatgggttagtagcaccgcaacaattgcctgcattgcgcagagccatccccggttggctggaagaggctgacaatggcctaaccctattgtttaggcatcttcttcaggggttatggggagacttatatgcgctggatcaacgtatggccgagttggataagcaaataaccgtgattgcacaggaagatccaacggcgaggcgtttgcagcagttgcgtggtgtgggtccgctgattgcgacggccctggtggcgacggtcggtgatgccaggcagtatcgtaaaggccgagacatggcggcagccctgggattaacgccaaggcagcatagttcgggtggcaaagaccgactgctcgggatcagtaaacgcggtgatgcgtatctgcgctgtttactggttcacggtgctcgttctgcggtgcgcacggccaaagataaagaggatcgattaagtcgctggatcatcgatcttcaagcgagacgacacgccaatgtggtggctgtggcaatggccaacaagatggcgagaatggcctgggcgatgatggttaaagagactgattatgatccaggttttaccgcctgctaaatgtagagtaatgaggtgagcatattcaattgacgattgcgaagtaaactgtgtaatggcaaacaggtcgaaccggcgctggtaaaacccgagagggtctgagtgtgtaacaacacgtcaaagcaatagggaaccggcgcgcgaacaacccattatggcccggcatcatcgtatgccacctttagaggccggatatacgtatgcagtcgagccaactgccattgacagattacttgcaaacgaggaggagtccatata

SEQ ID NO: 4460 - DNA, 1346 bp, unidentified
  source 1..1346: mol_type = unassigned DNA; note = element_6c92f55
  misc_feature 1..2: note = core
  misc_feature 3..81: note = LE
  misc_feature 82..1095: note = CDS
  misc_feature 1096..1346: note = RE
  misc_feature 1074..1333: note = bridgeRNA
tgttggggtggatggccccctaccggcatctgtgtgccaaatggtggctgtcgaaggtcaccaaccggggagccatccaggatgcagattacaacaattggtcttgacctggccaagcacgtcttccaggtccatggctgcgacgcagcgggcaactgcggtgtgaagcgccgccttcgacgaaatcaagtgctcgagttctttgccggcctagcaccttgcctggttggcattgaggcttgtggcacggcgcaccactgggcgcgggaactgcgggcgctcgggcatgatgttcggctgatgccggcgcactacgtcaaggcgtatgtcaagcgcggcaagaacgacgcagctgacgctgcggcaatttgtgaggctgtcagccgcccttctatgcggtttgtacctataaagacgcgagagcaacaggcggtgctcacgatgcacaggacccgcgatttgctcatgcggcagcgaactcagctgatcaacgctgtccgaggtcatttggccgagttcggtatcgtagagccacagggcgtctggcacctgggccgcgttcttaggcacttggaggtagatgatgaagtgatcgaaccggcccgacaggttataggactactcgccagtcaactgaacgacctggaaggacggatcaaggaagtcgataagcaaattgccctctggcacaaagccagcccaactagccaacgcttggcgacgattcccggcattgggcctgtgattgcctcggccattgctgccacggtacccgacgctggcgtcttccgcagtggtcgtgagtttgcggcgtggctcggtcttgttccgagacaacgatcgacgggaggaaagcagaggctcgggcggatcacccgtgacggcgatcgctacattcggcggttgcttatcatgggcgcgcaggccgtcctgcaaagttcaaaggcggcgcgtgcaaacccgtggatccaaaatcttctagcgagatgcccgcgactgaaagtcgccgtggcactggccaacaagaccgcccgcatcgcatgggcagtgatgacgaagggcgaaatataccggcaggctgctgcgtcggcgtaggtcgcgcgcacctgcaatgccatgcttgcgaagagaagaactggatggagcagtcggttgactgacggatcggggaaacctggcgttactgaggggcatccagcccgactagatgatgaggcccgacccgcggaacccatcggggccagcggtcatgccacgactgcagtacaggccggacacatgactgcaagcaactcaaactgcgccagacagcaaatttctcttgcaagccgggggccatccacaca

SEQ ID NO: 4461 - DNA, 1568 bp, unidentified
  source 1..1568: mol_type = unassigned DNA; note = element_6c99564
  misc_feature 1..2: note = core
  misc_feature 3..259: note = LE
  misc_feature 260..1432: note = CDS
  misc_feature 1433..1568: note = RE
  misc_feature 8..239: note = bridgeRNA
ctcgtattattaagtaagtcaagcaaatcgcttgatcatatgctccggaaggagtatacggtatactgttttgagatactgtggattggtcacatgctgcgctactacacagatggtttttcagagtctccaaccacagtctctttgttactttgttgatcagttagataccgcttgacggtttatgtagaacgagtatacaagcgcaaagagccctgtggatccatacagtatcaaaaatcatacgggaggttataatatgatcttaattggcattgatgtggccaaagacaagcacgactgctgcatcataaactctgacggagaatttcctgaggaggtattctctattttaaataaccgtgagggttatgagactctttataagtggatttgctcattggctgtagatttcacaaaagtaaaagtagggctggaatcaaccggacattacagcagcaaccttcttgcctttctgctggacaagcatctcaccgcttatgtaatcaatcctttgcgcgttaatcttttccgtaaaggacagagcctaaggagaacaaagactgacaagattgattcaagagatattgcgcatctgcttatgaccgattcaagcttaaagccctactccttatcatcctaccacatggaggaattaaagtctcttacaagatatagagcttctatggtcagggaacggacaaagcttaagacttctatagccaggcttgttaccatattgtttcctgaacttgagcagatggtttccagtatccacatacattctatttacgctatgctggaagagtttccgggttctgcatatatcgcagccgcccatcttacccggttaaccgccctgctcctcaaggcttcacgaggacgcttcggtagaggaatggccattaggatcagggatacggcaaaacaatctgtcggggccgtcagtcctgccaaatcgatggaactgcggcacaccatagcgcatttacgggtttatgatcaggagattggtgaaattgaatctgagattgaaaagatcatggatgatgtaaattctccaatcacttccgtgccgggcatcggtatgcaaatgggggcggttattcttgcggaaattggcagtttccgcagatttgactctcctgataagattctggcctatgcgggcatgtcaccttcaacgtatcagtccggtaaactgacaggcagctattcccgtatggagaaaagaggatcccgctatcttcgttatgcactgttcaatgtcacaaggtatgtctgtcactatgatcccggcttcactgcctacctgtcaaagaaacggaaggaaggaaaacattattacgttgccatctcccatgcagtaaagcggcttgtgcgggtgctgtacgctatggaaatatccggcaattggtaccaaacggcctgattcgcattcatgagtattttaattttttgaggcatctttatagatgtctttttgtcctgctctaaaaacagtatgaacttgttacacactattcataaaataattgttttgtagcacttgactttttatagttaga

SEQ ID NO: 4462 - DNA, 1412 bp, unidentified
  source 1..1412: mol_type = unassigned DNA; note = element_6c9ea6b
  misc_feature 1: note = core
  misc_feature 2..219: note = LE
  misc_feature 220..1398: note = CDS
  misc_feature 1399..1412: note = RE
  misc_feature 13..234: note = bridgeRNA
ctacttgttgaatgacaggagctcgaggcccggccaggctgacggtcaggtgtcggtggggatgctccgtaaccggctgcccactgttccattggtgtggctcgctaaggcagtgctgacccaccgacaccgccctggggtggagtggctcaagaggggtttgcttcgcctgaagtagcgctgccctccgcccgtccgaacgagctcgggaggccagcgatggtggcagtgatgatcgggatcgatccgcacaagcggagcaacacagcggtggtgctcgacgacaaggagaaggttctcggtcgtcgccggttcaacaatgacggtgccggctatcgcgagctcaaggcgttcgtgaaggcgtggaagcagcggacctgggcggtcgagggggcaggtggcgtcggtctgagtctggcccagcggctagcgatggaaggcgagctggtgctcgacgtccccgcgttcctgtccgcgcgggtgcgggcgttgggcggcggcagcggccgcaagaccgacgacagcgacgcctacgcggtggccgtcgccggtctgcgcgggcatgccttgcagatcgtgcgtcccgagggcgcagtggcggtcctgaagatgctctccgaccggcgtcagcagctggtagagcagcgaatcaccgctatcaaccgacttcatgacgtcctgcaggatctgttgcctggaggggcatccacccgcctcactgccagcaaagcgctggagatcctcgccaccgtcaacccgctcagggccatcgagcggacccgcaagcagatcgccatggagcacgcccaagacgtcgcagagctcgacgcgaaggtcaaggccgcggccaagcagatcggactcgccgtcgcggcccagccctcacgcgtgaacgagatccgaggcatcggcgccatcggtaccgctctgatcctcggcgaagttggagacgtccggcggttccgcaccaagcatcacttcgccagctacaccggcaccgcacccatcgacgtcagcagcggcgaccaggaccggcaccgccgcgaccgcggcgggaaccgacgactgaactacgccctgcacgtcgccgcgcttgtccagatccggcaccacggaccgggcaaggcctactacctgcgtaagcgagcagagggcaagaaatctctggaggcgatgcgctgtctcaagcgacgactgtccgacgtcgttttccacgccctgcaggaggatctgcagctgcgtctcgaggcggcgggcccggaaggacactcgggggcgactgttcaatccagcgcgtctgacccaaccacgatggtcagcccttcggatcagtcactaaccggacccgccgcagcgaacgctacgccccgccgaacgaaggtgaaagcgctcgcttgacaacagaggggagc

SEQ ID NO: 4463 - DNA, 1417 bp, unidentified
  source 1..1417: mol_type = unassigned DNA; note = element_6ca440e
  misc_feature 1: note = core
  misc_feature 2..64: note = LE
  misc_feature 65..1102: note = CDS
  misc_feature 1103..1417: note = RE
  misc_feature 1186..1408: note = bridgeRNA
taatgagatggtccgccgccgagtaggataagcggctcggcagtttacatgaggaggatcatccatgcacatcgcatccatcggcatcgatttgggcaagaccacctttcatctggttgcattgggagagcggaacaagattctgctgcgtaaaaagttctcacgtgcgcagttactggcctacaccgcgaacctgccgacttcgttgatcggactagaggcatgtgcgggagcacactttctgggagccgcgctgcgcgaacagggtcacgaagtgcggctgatcccagggcagtttgtgaagccctaccggaagtcgaacaagaacgacttcctcgacgcggaagcgatcgccgaagcggtgaccaagcagaacatgcgctttgcccagctcaagacgcaggaacaactcgactggcaggccatgcaccgggtgcgagaccgactggtgcagcgtcgcaccgcgctgattaatgagattcgcggattcctgctggaacgcggcatcactttcgcggcccagcctatccacctgcgcaagaacctacccactgtcatcgaagacgccgagcagaacctgagcccacgcctacgctggctgctagatcgcatgtggcaggagtggaagcagatcgagactgacgtggaggcgatcaccgatgagattgaacgcatcagtaatgaagatgcgcgctgccggcagctccggcagatcccaggcttcggcccgctggtctccaccgccaccgtggccgccatcggcaacggctctgcctttcgtcgcgggcgcgactttgcggcctgggtgggcgtggtgccccgacagtactccaccgggggcaagcagaagctgtacggcatcagcaagcgcggcaatgtctatctgcgtcgcatgttgatccacggtgcccgcgctgtgttgtttcgcgtcaagtacgacaccggaggattcgggcagtgggtgcatcggctggcgcagcgggctccacacaacaaggttatagtggcgatcgctaataagctggcgcgcatcgcctgggccgtgttgtccagcggccaagactatcgacatcagccgctgcagcaacgggcggctgcttgatggccgtggaaaagacgctgcgcttggaaagcacaaaacgctttccacttttccaccgccacgacggcggatattagagggagttctaccaaggtctgctgaggagagaagaagaggagaagaacagcccaaagacgtgccggaaaacctggtggcgaaaatgcgtccctggtgaccgagggatttataaggaccgacacgtgcgtatcatcatcgagtgcccggagagaattctccacttagaggccggatacatttacgcggaccgtccttcctcaacttcaaccctcttgcagtccggcggcggaccataca

SEQ ID NO: 4464 - DNA, 1408 bp, unidentified
  source 1..1408: mol_type = unassigned DNA; note = element_6ca7abd
  misc_feature 1: note = core
  misc_feature 2..90: note = LE
  misc_feature 91..1125: note = CDS
  misc_feature 1126..1408: note = RE
  misc_feature 1178..1400: note = bridgeRNA
caatgggatggacgctcccacctaaacggcatcgtaatgtgccaaagtggagatgcgaatcaaccacttaaacagacaggagcgtccgatatgaaggttacaacagtaggcatcgatctggctaagaatttgtttcaactgcacggagtcaatgagtttggcaagcccgtcatcaagaagcaaatccggcgcgaccagatggccgagttcttcgtgaatctgccagcttgccttattggcatggaagcctgcggcagtgcacaccactgggctcgcaagctccaaagttttgggcacaccgtcaaattaatggcgcctcaattcgtcaaaccgtacgttaagaccaacaagaacgacgctgcagatgccgaggcaatctgcgaagcggtaaatcggcccaatatgcgctttgtgccaatcaaaaatgtcgaacagcaaagcgtattggcgttgcatcgcgtgcgccaaggctttgtgaaggcacgcacggcacaggccaaccagatccgcggcttgttgtctgagtttggtctgatcattccacagggaattggctacatcgaaaaccgtgtgcctgaactcatagaaaacgccagcaacgaattgccgggctcatttcgaatactcgtacagcgactgctggatcatttgaaggagctcgaccgtcaggtcgatgacctggagtcgcagattgtgaaatggcatcgacaaagtgaagccagtagcaaactggcacaagtccctggcattggccccattactgccagcgcgctggtggcttcactgggggatgcgaagaactttgagggtggccgtcaggtcgccgcatggctgggcctggtgcccaagcagcattccagtggcggcaaacagaacctattgagtattagtaaacgtggcgacacctatctcagaaccttgctgattcacggggcgcgctccgtgatttaccgggcgcagcagaagcctgacgcctgcagttggattaacggagtggttaatcgacgaaacaaaaatgtggcagccgtcgcgctggccaacaagaatgcgcgcatcgtatgggcattgttggtccacgatcgagagttccgatcagactacatggccgccaaagcggccctatagtctgatcggttgtgcgcaaagtcgaaaagaacaaagcagggagcaataaaccaccgattgctcaggcgatcatgaagtgatggcaagataggtcagaccgtggttgacaaagcccgtgccggacggggcacccagagtgcgtgtaagcgatcgaggcgtcaaccagcgaatcccatcagggacagtgacccaaagtcacaccaaaagtccgaatgtacgggtgcaatctttaccttcgagttgtcatgaatcgaaagcttggcaaaccgggagcgtccatgta

SEQ ID NO: 4465 - DNA, 1351 bp, unidentified
  source 1..1351: mol_type = unassigned DNA; note = element_6cb1f21
  misc_feature 1..3: note = core
  misc_feature 4..234: note = LE
  misc_feature 235..1104: note = CDS
  misc_feature 1105..1351: note = RE
  misc_feature 1120..1338: note = bridgeRNA
ggatggggtggatggctcctgcttcatcggcgtcgcaatgcgccatactgcagttgtcatgaactgcgattagaggggccacccaatgcagatacaacagttggcgtcgatttggccaagaacgttttccatgttcacggtatcacacaagacggagatttgggtttcagccgatctttgcggcggaaccaagttctttcattcttcgggagattggagccttgtttgatcggcatggaggcctgtggcgcaagccactactgggcgcgagaactgattaagctgggtcatgaagtcaagttgatcgcacccgtctatgtgaaaccctacgtcaagcgcggcaagtcagatgcggctgatgcggaagccatttgcgaagctgtcagtcgcccgactatgcggtttgtcgaggtgaagtcgcccgaacaacaggccattctttcgctgcaccgagcgcgtagcctcgttgtccggcagagaacccagaccatcaacgcgcttcgcggcctgttggctgagtttggaattgtttttgcgcaaggtgtcggccatgccatccgatttgccaaacgggtgtcccaaggtgacgctctggatcttccgccaactgcgcatgacaccattatggatctgggtgagcagctcttgacgctgcatggacgggtgctctggtatgggcgcaagctgacgcaagcatcgaaatccgaacctcggattgccttgcttgaaacgatccctggcatcggaccgatcaccgcatcagccattgttgctacgattggcggcgcggaacagttcaggtgtggcagggattttgcagcctggttgggtcttacgccgctcaacagatcaaccggtggtaaggaacgtttgggccgaatatccaagatgggagatcggtacatacgcaacctgatggttgtcgggatgacatcgcgcatcaagcaaatcaagacagcgccagaaagatttgatccgtggttctcggacatcttggagcgaaagcctgcgaagcttgctgcgatagcaatggcaaataaaactgctcggatcatttgggcggttctcacacggaacgaaccctacagaattagaaccgtctaaagacaaaggaaggaaccaagatagcaaggccagtgaagtgatggcaaaagagtcagccgcaatctcaagacaccccgggctttgtccaggacgacatctgtccgcttgcgaggatggggacttgcgtcgcggaaaccatcagggccagcggacatgtgttccgcgcgaacaggccggacacaagaccgcttctgacaaaatgccaatcacctcaaaaaagtcttgctttgcaggagccatccacaca

SEQ ID NO: 4466 - DNA, 1392 bp, unidentified
  source 1..1392: mol_type = unassigned DNA; note = element_6cc9708
  misc_feature 1: note = core
  misc_feature 2..234: note = LE
  misc_feature 235..1377: note = CDS
  misc_feature 1378..1392: note = RE
  misc_feature 4..230: note = bridgeRNA
cagtgatgatgggtgcgggcccccgcgccgggtcgtcctgactcgccgcctgactgacttgaggtcttcaacgggatctgtcggtcggtcccggcgcggggtctcacggcactcatcgtccgagggttgtgacctcataggagcctgtgccagcaggcacccatcactgtcttgtccactcgttcggatggtgcatgccgcccacccaccgttcgagagtgagagaggacggcgatgaccaccatcgcacgcggcaccacgacaaaccatcggcgagaccagcaggcggatccggatccgcagctggaccagcagcgcgagcccggtcaggtggttggtggggtggacacccaccttgacacccacacggcggccgcgctcgacccggtcgggcggctgctcgggcatgccacgttcccggccgacccgggcgggtacgcggcgctgctggcgtggctgcggtcgttcgggacggtggtggtggttggggtcgagggcaccggcgcgtacggcgccggcctaacccgccacctgcgggccgaacaggtgcagctgctcgagatcgaccgtcccgaccggcgggcgcgccgcagcgccggcaagtccgacccgctcgacgccgaagccgcggccctggccgcgttagcgcgcacccgcaccggggtcccgaaggtgcgcgacgggcgggtcgaggcgctgcggaacctgcgcgtggcccggcgcagcgcgatcgaccagcgcgcggactgccagcgacggatcaagaccctcatcgtgaccgcggccgagccgctacgcgcgcgactgcggggcctgccgacgcggcagctgctggcagcgtgcgccgggctgcgcccggacctgacccgggtcggtgaccccgagcaggccaccaagactgcgctgcgggccttggcccgccgccaccacgccctcagtgaggagatcaccgacctcgacgcggtcatcgaccccctcgtggccgcgatcaacccccagctcgtcgcgttgaacggcgtcggcgccgacgtggccggtcagctgctggtcaccgccggagagaacagcgaccgggtccactccgaagccgcgttcgcgatgctgtgcggcgtcgcgccgatccccgcctcgtccgggcggacccaccgccaccgcctgaaccggggaggggaccgtcaggccaacgccgccctgtaccgggtcgtgctgtgccggctgagatgggaccctcgcacccaggcctacatgcaccgccgaaccgagcaaggcctgagcaagaaggacatcatccgctgcctcaagcgcctcatcgcccgggagatctactacgtcctcaacccacgacttcagccgtcgccggccctacagaccatttgacatccataggagcat

SEQ ID NO: 4467 - DNA, 1417 bp, unidentified
  source 1..1417: mol_type = unassigned DNA; note = element_6ccc6d1
  misc_feature 1..3: note = core
  misc_feature 4..136: note = LE
  misc_feature 137..1153: note = CDS
  misc_feature 1154..1417: note = RE
  misc_feature 1178..1415: note = bridgeRNA
agatggtatggacgcctccctcacgcgtcggtgagcagaggcagtagaaacggaggagccctcgctgtacccgacgggcatcagagtgccaaagtggtggtgtgacaacgaccactgagggtaaggagggctcgaaatgaaaactacgacatttggcgtggacctggcaaagcgggtctttcaggtgcactgggtagacatggatacaggcgaaatcaaccgcaagcagttcaagcgcgaacagctggtgagcttctttgcgaagcaggcgccagcgctcatcgcgatggaagcgtgtggcagcgcccactactgggcgcgccgttttgcaggctttggccatcaggtgagactcatcgcgcccgcgtttgtgcgcccgttcgtcaagcgcaacaagaccgatgtcgctgacgcccaggcgatctgggaggccgcgcaacgaccggaaatgcgctttgtggctgtcaagagcgaagcgcagcaggcggtgctgacgctgcaccgcgtacgccagcaactgaagaagatgcaccgcatgcagactaaccagatccacggcttgctttatgaattcggcgcaaccgtacatcgtgggtggcacagcatggacgatgcgacacgccaattgaccgaactggccgacaccttgcccgcgatggtgatcgatacgctgcgcgaacagctgcagcgtgtcgaaacactcgcgcaagatatccgcaccattgaacgccggcttgccgcatggcagcgccaggacgaagcggccacacggctggtcgcgattcccggcgtgggcctgcttacctcgaccgctgcggtggccaccatcggccaggccagcacattccgctcgggacgtgagttctccgcctgcatcggtctggtgccgcgacaaagcggcacgggagggcgcgtgaagctgctgggcatcagcaaacggggcgacgtgtatctgcgtaccttgctaattcacggcgcgcgctcggtgctcactcactcgaagcatctggacgacacgctgcagcgtctgctggcgcgacgaccttttaacgtagtggtcgtcgcactggccaacagaatggcacgcatgatctgggcgctgctggcccacggccgtatgtaccaacccggctacgcggtgcatgccgcgtaaaacttccacttaactatggagactggtcgtcaacaggttgcgcaggttgataaccatgtgatggcacaacaggtcggaccgcggggaagcaagcctgaacctcgtcttgtccctcgaggactcgcaggagatgaggccttccccggcagattccatcagggccggcggactaccgtccgcatccagaggccggatataagtctgcagccacatcctgtcggtcacacatgtatatcacctggcaaaccgggaggcgtccatata

SEQ ID NO: 4468 - DNA, 1429 bp, unidentified
  source 1..1429: mol_type = unassigned DNA; note = element_6cceed6
  misc_feature 1: note = core
  misc_feature 2..140: note = LE
  misc_feature 141..1160: note = CDS
  misc_feature 1161..1429: note = RE
  misc_feature 1182..1427: note = bridgeRNA
atgtaatggacgcctccctcccgccgacgggtaatggaagctgagggggtaatgggattgagccctcgcattacctgacggcatcgaagtgccaaagtggtgttttcaatcgcaaccacaaacggtaaggagggctcgacatgaaggctacgacatttgggctggacttggcaaagcgtgtgttccaggtgcattgggtcgatatggaaactggagaaatcggtcggcggcaattgaagcgggcgcaggtggcggaattcttcgccaaccgcgaggcatcggtgatcgcgatggaagcctgcggcagcgcgcactactgggcacgcaagttggctgcgctgggccacgaagtgcgattgattgcggcgcagttcgttcggccgttcgtcaagaccaacaagaccgatgcggccgacgcgcaggcaatttgggaagcggcgcaacggccgggaatgagattcgtggcggtcaagagcgaaggtcagcagggggtactgctgctgcaccggatgcgcagccagttggtgaaaatgcgcacgatgcaggtccagcagttgcgcggcctgctctacgaattcggggccgacctgccgcaggggcggcaacgaggcatggcgcaagttccggccgagttggaaaggctggagcagaccttgccggcgatggtcatcgacaccttgcgcgggcagatcgcgcggatcgaggcactggaccgcgacatcggcgagatcgagaagaaactggccatcggaaagaaggaaaacaagtcggtaagaaggttgctggaaattcccggcgtcgggccgctcaccgcgacggcggcggtggcgacgctgggcgatgccaaggcgttcaagaacggccgggagttcgccgccttcctggggctggtgccacgccaaagcggcaccggcgggagagtgaagctgttgggcatcagcaagcgcggcgacgtctatctgcgcacgttgctgatccacggcgcacgagccgtggtcaacagcgccaaggaacgcggtccctggctggaggggctgctggcgcgccggccgaagaatgccgcggtggtggcgctggccaacaagatggcgcgcacgatttgggcgctgctggcccacgaccggacgtaccagaaaggttacgcggcgcatgccgcgtgaggtgttcaacgaaccgcaaggagccggaacgctgaaaggttgcgcaggttgatgtgcgaatgatggcgtaacaggtcggaccgcggggaagcaaacctgtccctctcccagttcttcgagaacgacaagaagatgaggtcttccccggcgaattccatcagggccagcaggctgattccagtctgcaatacaggccggatataagactgcagccgtttcctcgtccgccgcattcaaacatcgcttgccaaacgggaggcgtccatata

SEQ ID NO: 4469 - DNA, 1389 bp, unidentified
  source 1..1389: mol_type = unassigned DNA; note = element_6cd7457
  misc_feature 1: note = core
  misc_feature 2..88: note = LE
  misc_feature 89..1129: note = CDS
  misc_feature 1130..1389: note = RE
  misc_feature 1129..1376: note = bridgeRNA
tgatggcgtggacgacacccgcgcggctcgtcccggaaggatggtgtgtcagaatatcgtcgtgcacttgagcgagggagcatcattcatgggcaacggtacggttgatatgtccgccgtcgcggctgtcggtctcgatctggccaagcacgtctttcaggttcacgcggtcgatgccgcaggccgcgtccttgcgagcaagtccgttagacggaaggacctgctggcgttcttcgagaagctgcccggttgccttgtcgggctggaggcctgtggctcggcccatcattgggcgcgcgagctgatcaggcttgggcatgatgtgcgactgatgccgccagcctacgtgaagccttacgtccgacgccagaagaacgatgccgccgacgcggctgccatctgtgaggcagtgacacgtccctcgatgcgcttcgtgcccgttcgctcggtcgagaaccaggcggtgctcatgcatcacaaagtgcgtgaacttctggtggcgcagcgcacgcaattgctcaatgcccttcgcggccatcttaccgagatcgggatcatcaccgcgcaagggccaaacaacgcccgtagcttggctgctcatgtcatggacagccacgacatgatcccggccggcgtgcgaacggcgctcatgccactggtgcgtcaattgcaccttctcgacgaggagatcgccgagagcgacaggaccatccaggcgattgcgaagaccgacgcgaccgcccgtcgcctgatgagtatccccggtatcggccctgtcaccgcttctgcgattgcggcgagcgtgcaggatatctccgtcttctccggtccgcgtgagtttgcagccttcctcggcctgacgccacggcagaactcatcgggcggccgggaacggttgggccgggtatccaagatgggcaaccgataccttcgcaagctactcgtggtcggggctcacgcggtgctttaccatcgcaaggtgcacaaggatgcgttgcgaacatgggcgagccatctgatggagacgaagcccttcaagcttgtcgccgtggcgatcgccaacaagctggcacgcatcgtcttcgccatcttacgcggcgggacgcgttatgccggcgtgaacgcgtaggacacggcagtatcgtcccgcgctgaacccgcgcaccatcatcgagggtgaccacgacgtgatgtgagtgaacgaggaccgatccgatagcctgaagcatagtcagagcctctgagctcgctctcttgatcaggacaaggatcagcggacaccatcagggccagcggagacctccgcgtcaacaggccgaagacatgaccgcacccacgagaagcacatcaccgagaagaaatccttgatcagcgggtgtcgtccagaca

SEQ ID NO: 4470 - DNA, 1397 bp, unidentified
  source 1..1397: mol_type = unassigned DNA; note = element_6cd8bd4
  misc_feature 1..2: note = core
  misc_feature 3..78: note = LE
  misc_feature 79..1113: note = CDS
  misc_feature 1114..1397: note = RE
  misc_feature 1112..1385: note = bridgeRNA
tgttgaggtggacggctcccggcggcatcgaatgtgccagaatgagttcgttgaaatctcaatcgagggacaccgcccatggaacagattatccgaattggcatggatacgtcaaaaagcgttttccaactgcatggagtgaacgtgatggagcagcccatcttgcgcaaaaaactttcgcgcaaggagatgctgaaatttttcgcaaatactccgccaaccaccgttgcggtggaagcatgcggtggttctcaccactgggctcgattgctgagttcgtttggtcacgatgtgaagctaattgccccacagctcgccaagccttatgtcaagcgcggcaagaacgacgctgcagatgccgaagccttgtgtgaggcgatgagccgcccgacgatgcggttcgttactgtaaagaccgctgatcagcaggcagccttgatgctgataggagtgaggcagagattactgcacaatcgcacccaactggccaatgccattcgtggttttgctatggagtttggggtcgtcgcagcgaagggcatgtgccgaatagaacccttgttggagcgcctcgcagcagatgaatccctaccggaactggcccgcgaactatttgccatgcatggagaggagcatcgcgaattgcttcggaaaattgaagaagttgatgaaaggcttatgaagttgcatcgcgctgacgaatgcagcaagcgcctagccgaaatccccggtgtcggtccggtgggtgcatcacttctgatgatgaaaacgccagatccgcggatgttcaaatccggtagagacttcgcagcttggatcggtctaactccgaaagaccattccacagccggaaaggtgcgcctcggggtgatcactcgggcaggagacgagatgctgcgaagcgtcctggttgtcggggcaacatctctccttcagcaagttagatcaggccgaagcaggcatgcctcctcctggctcctcgggctactgcaaagaaagagaccgaagcttgtggccgtagcgctcgctaataagattgcgagaatcgcgtggaagctcatgattagtggtgagacctaccagcgtgcagagggccagagaccgacagcataggagattagccatcatggcaagcggtgaccaggtcgctgccatgctgagctgatgctgtgaacttgcaacagaagagcagatgatgcgatcggaggatccaagacgtgtaaattccgttaagcccaatggccttcaaaggccgaggctgtgttaggaacacgcgttgcggaaatcatcttggccagtggtcatgtgcgaccacatcgaaaggccgcacatatggaagcaagctatccgctcaaaattatctgaaaaagtgcttgcaagtgggagccgtccacata

SEQ ID NO: 4471 - DNA, 1957 bp, unidentified
  source 1..1957: mol_type = unassigned DNA; note = element_6cddd73
  misc_feature 1..2: note = core
  misc_feature 3..244: note = LE
  misc_feature 245..1465: note = CDS
  misc_feature 1466..1957: note = RE
  misc_feature 6..239: note = bridgeRNA
ctaatggggttcaccgggccgacaacatgacaggctcggtgcctggtagccgccgatggatgagcactgtagcgcccctggacctcgagtcctagggacagatcgtgcctctatcggtggtcagggaaacgaaccgctgatgggatgtcgtgcccgccgtcttggcgtgagcacttgaccattaggtcgcgggttttcctgcaggctgctgaccgggtagtcgagcgaagtggaggacatcacagtgttgttcgtcggagatgactgggctgaggaccatcatgatgtggaggtccaggacgagaccggacggcgacttgccaaagcccgcctaccggaaggcattgccgggatagccaggctgcacgggctggttgggaggttcctacccgaggacgtcgaccctgccgaggtgaagatcggcatcgagaccgaccggggcccgtgggtcgccgcactgatcgcctccgggtaccaggtgtacgcggtcaacccgttgcagtccgctcgtgcccgccagggccaagacgtctcgggagccaagagcgatgccggtgatgctcatgtcctggccgacctggtccgcactcattcccaccagctacgtaccgtcgccggggacagcaagcaggccggcgcggtcaaggtcctgacccggatgcaccagagcctgatctgggaccgcacccgcctggtgctgcggctgcgctccagcctgcgggagttcttcccagccgctctggaagcctacgacgacctcgattcccccgatgtcctggagctgttgaccaaggcacccgagcccagccgggcggcccggttgactcgggcccagatcagcgccgccctgaagcgggcccgtcggcacgaccgggacaccaagaccaccgcgatcatggccgcgctgcgcaccgagcacctcacccagccgccggttatcgcggccgcctacggcgtgacggtccgggccctggccgccctgatcacgacctccaacgagcagatcaccgccctggaagggccggtcgaggcctgttttggccagcacccggacgctgagatctacctcagccagcccggactggggtccatcctgggcgcccgggtgctcgcagagttcggcgacgaccccacccgctacgacggcgcccgggcccgcaagaactacgccggcaccagccccatcacccgggcctccggcaagaagaaagtcgtcctggcccgatatgtgcgcaacaagcgactgaccaacgcactgcaccagcaggcgttcagcgccctgagcggatcgccgggagcccgcgcctactacgacgcgctgcgggaccgcgacatcggctacaacgcggccctgcgccagctcggcaaccggctcgtcggaatcttgcacggctgcctcaaaacccgcacctgctacgacgaggccactgcctgggaccagcacacccaacgagtagcagcttgacgtccaagaagaactcagcagggcacatcgcggccagcctcgggcgtcaacgacctgttgacagccagctgctgtgccactacgccgacgaccccgcacgccgaccgtggtgcacgctgagcgcgaccgtccggtacggcgccgtggcgctgtgcccgtcctgcaacgcgggccgctcgaccctcggtaagggccaagccccggtccggctgtcagccggtccggcgttcgacgtcctgggttgggttgccaccgcccaccagcaggcgggcgccgccgaggcgaccctggccgccgccgtcaccagagcccgccagggcggagcaacctggtcagtgatcggagcccaactcggcgtgtcacgtcaaggcgcacagcagcgcttcacatcctgcctggctgcctcaaaacgcccacccccaacggcgaggccactgcctggaaccagcacacccaacaagcagcagcttgacatctaagcccatgggatgt

SEQ ID NO: 4472 - DNA, 1351 bp, unidentified
  source 1..1351: mol_type = unassigned DNA; note = element_6cdf503
  misc_feature 1..2: note = core
  misc_feature 3..87: note = LE
  misc_feature 88..1107: note = CDS
  misc_feature 1108..1351: note = RE
  misc_feature 1123..1338: note = bridgeRNA
tgatggggtggatgacccctgctccaaccggcgtcgtaaggcgccatagtgcaggtgtgattgcctgcttacgagaggagccacccaatgcaagttgcaacaatcggagtcgatctcgccaagaacatttttcaggttcacgggatcacggaatgtgacgaggtcgcttttaaccggcctttacgccgggctcaggcgctgccgttcttcgcgcgacttgatccttggcttgtcggcatggaagcctgctccacaagtcattactgggcgcgtgagttaaccaggctgggccatgaggttcggctgatcccgcccaggtacgttaaaccctatgtgaagcttggaaagtcagacgctatcgatgccgaagcaatctgcgaagcagttactcgtcccacgatgcggtttgtagagattaaatcggtcgaccagcaggcgctgctatctctgcatcgagcgcgcaatctcatggttcgtcaacgcacacagttggtcaacgccttgcgcagcatgctggcagagttcggcgtctacatcgccagaggcctcacacggctcctcagttttgcgcagggcgtgctggcgcgtgccgaaccgggcctgcccgagatcgcgcaagacgtggtccataatctgtgcgggcagctgcaagttctgcacggacaggtgcgccggtatgaagcccgtctgagagttgaaggcaaacgcgatgcccgcgtcagtctattgcagaccattccgggcgttggcgtggttacggcctctgcgatcgctgcgagtatcggcagcgggcaccaattcaagaacggtcgcgagtttgcggcgtggcttggtttgacgccggccaatcgatcgagcggaggaaaggaacgattgggtcggatcacgaagatgggcgaccaatatctgcgccaactgcttgtagtaggaatgacctctctggtcaggcagacaaaatcccacccagaacgggcgaacaaatggctcgccgcacttttggaacgcaagcctgcgcgcttggcaactgtcgccatggcgaacaagaccgcaaggatcgtctgggcggttttgacaaagaacaagccatacatgccgagaaccctctgaaagggcctgataacagcgagatagcaagacctacgaagtgatggtgcaaaagtcagccgtaaaaaccaggacaccccgccgaacggcacgggcacaatagcccgcattgctgatagggacctggtttacggaacccttcagggccagcggccgaagccgcgcaaacaggccggacacatgactgcttctgacaatggcgcaaatcacctcaaaaatgtcttgctatgcagggaccatccacaca

SEQ ID NO: 4473 - DNA, 1601 bp, unidentified
  source 1..1601: mol_type = unassigned DNA; note = element_6ce019d
  misc_feature 1..2: note = core
  misc_feature 3..280: note = LE
  misc_feature 281..1489: note = CDS
  misc_feature 1490..1601: note = RE
  misc_feature 16..303: note = bridgeRNA
ctcctaatatataagtgtagggtttagataccccaacagccagttgggttctatccctcttattgctaaagctgtacaatgatgaggtatcggtctgacagtattctccttggactcaatagacgtccgtatgaaagccagtcagccagcctatcatttgcagccgttcgatttatgcaggttggactgccctgtgcacgtccgtttgataccccaggagattgaataagcaatgagaaatagctggacaccatacaaattcactttcggaggtacgagaatgtacaacgcagtaggtattgatgtatcaaaaggcaagagcaccgtcgccgtcctgcaaccagcaggtgttattattcgtaagccttttaatgttaatcacacatcaagtgaactggatgagcttgccaaatacattggcagtctggaaggtgaaacccgtgttgttttggaatgcaccgggcgttaccatgaaccagtggtaaaaactctttctgaagccggtttgtttgtcagtgctgtcaatccacatctgatcaagaactttggcaacaactccatccgcaaagtcaaatccgaccctgctgatgcgaagaagattgcacgctatactcttgacaactggatagaactgcgacagtattcaagtatggataatacacgtactcaattaaaaactttaaactcacaattcagcttcttcatgaagcaaaaggttgccgctaaggctaacctgattgcactattggataatacctatcctagtgtcaataaactctttgacagccctgtccgcgatgatggcagtgaaaaatgggtggattatgcttactcattctggcatgtggattgtgtccgcaaaattggattaaaaacattcacggaacgctatcaagcattctgtaaaaagcatcactataatttccaaccagcaaaaccagcggaactatttcttgcatccaaagaccttattgctgtctttccaaaagaagcgtcttataaactgcttattcagcaaagcattcagcagcttaatcttgcttcttcccatgtagaagaactacgttcaaagatgaatgaacttgcttctactctgcccgaatacacaacggtaatgggcatgtatggcgtgggaaaaacttttggttcccagcttatagcagaaataggtgatatttccaatttctcacatcgtgaagcattgactgcttttgccggagtagacccaggtgtggatcagtcaggcacccacaattcaaagagtaataaagcatctaaatgcggttccaaccgtctaagaaagactttgtttcaaatcatgtctacactgcttcaaacagctcctgaagatgataaggtatatcaatttcttgtcaagaagcgtgcagaaggaaagccttactatgtttacatgactgctggggctaataagttcctgcgtatctattacggcaaggtcaaggaatgcatccgtaatttagagcaataaccaagtctaaactcatttttcttcaaaccggcaaatatggcggttcaaaacttgtgcccaaaatcacaatcataaaaataattcattttactattgactttttattagcagg

SEQ ID NO: 4474 - DNA, 1662 bp, unidentified
  source 1..1662: mol_type = unassigned DNA; note = element_6ce09a8
  misc_feature 1: note = core
  misc_feature 2..91: note = LE
  misc_feature 92..1012: note = CDS
  misc_feature 1013..1662: note = RE
  misc_feature 1427..1660: note = bridgeRNA
taatggaatggtccacctcactttttcagctgtctaaaataagatttagatataggataagaagtgattccaaaaacaaatggggtagatcatgaataatcataatgtaaacggtaatattacagttctgggaattgacttagctaagcagagtttccagttgcatggcactgataaacacggcaaagtagttcttaaaaagaagttaactagaaataaactatcggcttttattgcaaacttagccccttgtttaattggattagaagcctgtagaggcgctcattactgggttcgaatatttaaagcacagggacataaggttcgaatgatagcaccccaatttgttaagccctatgttaaatccaataaaaacgatgcggttgatgcggaagcgatatgtgaggcagttcaacgacccagcatgcgttttgtacctgaaaaaagtattgtacaacaagacatccaaagtcttcacagagtgcgtagtcaactggttactagacgaacagcccaagtcaatcaaatacgcggtcttttgcaagaatatggccttattatcccaaaaggtatttctaatgtaagaaaagcaatacctatgattcttgaggatgctgataatacattaacctgcttatttagagcgatactcagtgagttatacgatgaattagttcatttagatggtcgtattaaaatattggaacagaaactggacatgatctgtcgtgaaagtgatgattgtcaacgtcttcttaccattcctggtatcggtttattgagtgcaacggctctgatcgctgctattggtaatatttcagtcttcaatagtgggcgtgaactagccgcatggttaggccttgttccaaaacaacattccacgggtggtgttcccacattattaggaattagtaaacgagggaatagttatttaagaacgttgttaattcacggaggacgagctgttgtacgaattgcaccttcggtgtttttcaagatagttttcgcctaaatatttttggcctttaattttctacacgatcaggattcaataaaaccgagcctattggcttccagttccgtgttgatttagaccaccttctagggttcttttgttgcattttaaggtagagctgatgacgcgcatttaatagctgctcatccttcccttgatgcctttctattggggttacaaatctaattctgctatgtcgatgggcctttatattcagacaaacgaaatacatgggtcaatacgttaagtgatcgccgaggaaaaaacatttcagccgtagcagttgctaataaaaatgcgcgtattgtatgggccttactaagcaagaaagagaactataaagccgcatgagccttatgcaatattaatcaggaacaagatgattagttttttagataatatttgaagtatcttacaaccaaattgtgtggataaattgaagtgatggcataaaagataacatctgcattcctaaaaccctgaagccgtcttgggttcatttgaaaccgttgacttgatgaggacaggagtgcgctaattccatcagggccagagattaaaaacatctcacttaaggccgaatatatgggagcaatatttctttatgtttcagtttaattttcttgcaatacgaggtggaccatata

SEQ ID NO: 4475 - DNA, 1660 bp, unidentified
  source 1..1660: mol_type = unassigned DNA; note = element_6ce296b
  misc_feature 1: note = core
  misc_feature 2..287: note = LE
  misc_feature 288..1214: note = CDS
  misc_feature 1215..1660: note = RE
atctccattccgcaggcaagccgcggcacaaatagtaatgaaagtgttttacatctcaactttgtgatttaaaatagataacaagaagctatactacaaagtacgtgaggagaagttgtaaaaactttctctgttttagacagcataaaaatcagtgtaagttctgccttttcaagcacaaataagtgttatcatgaatccgtacactaagaattgttaaagctcttcgttttattgtgtggcagttcagtcaatggcttcttatcttttacgaaaggagttacactatgaaagttacttatccaacctgttgtggtatcgatgttcacaaatcttttctcgttgccacaatcatcaaaactaccggtggtattgaaccttcttatcaaaagaagagattctctacattcaacaattctattttagactttaaatcatggcttcttgaaaatgaatgccatgatgtctgtatggaatctacaggtaaatactgggttcctgtctttaatcttctcgaagaccaaatcaatgttaccattgctaatcccaaatgggttaaagctgttaagggtaacaaggatgataccaaagattctaaatggattggaaacttatttcgacttggacttgtaaaaggcagttttattccttgtaagtcgattcgtattcttagagaatacacaagatatcgctataagcttgtttcttgccgttcaagtgaaaagaatagatatcagaatgctcttactgtttgtaatgtcgcattagattctgttgtatccgatatctttgggaagtcatcctcattcattattgattatctgcttgaacaatcaggtactacgattaaccatgaagaaatcgcttccaaacttcttaagagactcaaatccaaagaagacgctgtgattgaatctatcgaaggatatcagatgactgatgcccagaaatatcgtatgcgcctagtacgcgcacatatagattatatcacagctgaaatcaatgatgtggataaacagattgaatctttgatttcttctgttcctgattatgttaaagctatccagttcctaactaccattccgggtgtcaaacatgatagtgcaattactatcatctccgaaattggtattgatatgtctcagttttgtaattctaaacgcttatgttgttgggcaggtcttacccccggcaacaatgaatccgccggttaagaagaaatctgtccgtattacacgtgccggtatctacctcaaacctgcattagtacagtgtgctcatgcagccgtgaaatctgacaagtctccttactacaaaaagaaatatgaatccctttttaaacgccgtggcaagaaaagagctgttattgccatcgcccgtatgattcttacagccatctaccggatgctgtctaccggagaggtatggaatccaagcgttctttacaaaatcgatatgcctgcacctttagttgaaaaacagaaggctaaggctatcaagcaagccaaaaaacttttacaaaaggaaggcttacttcctcctgatgaacctttagcttcttgatcaatctactaaatctatatcctcaaataagttgcctacttaagacagcttatttaagtgcgccggtttatggcttacctctactttctttcacact

SEQ ID NO: 4476 - DNA, 1391 bp, unidentified
  source 1..1391: mol_type = unassigned DNA; note = element_6ce2abb
  misc_feature 1..2: note = core
  misc_feature 3..94: note = LE
  misc_feature 95..1117: note = CDS
  misc_feature 1118..1391: note = RE
  misc_feature 1091..1375: note = bridgeRNA
agatggggtggttgccgccctccccagacggcgtcgcaatgtgccaagttagtggtgttgaggccactgagcggaaaggacggcaaccgtgacaatggatacgatgattggcgtggatttggcaaaatctgtctttcaggtgcacggcgcatcgatgacaggacagcttaagtttcgaaagaagctgtcgcggcagagttttgccgatttcatgaccaaacaaccccccgccgtagttgtcatggaagcgtgcggcagcgcgcattactgggcacgcgagatgagcaggctcggccatgaggtaaagttgattgctccgcattacgtgaagccgttcgtcaagcggcagaagaacgacgcggcggatgccgaagccattgtgatcgctgcacagcggccggaaatgcgtttcgtcgaggccaagtgtactgaacagcaaagtcgtgccattctgtttcgcggtcgagagcggctggttcaccagcgcacggagctggtgaatgctcttcgggcgtgcctctacgaatttggccatgtcgttccgcaaggcattcaccagctcggcaggatcaaagacatcctgaatgaaccgaacagcgacctgcccgaactgatgcgcgaagagtgcggtgatctgatgaagcagatcgccgagaagacggtccgcatcgatacccggacggcgaagatcaaggcgctcgcagctgaagctgataccgcgcggcgcttacagacgatacccggggttggtccgttgactgccttggctgtcgaagcttttgctccgccgatggagagcttccgctgcggccgtgactttgccgcctggcttggcctcgtcccgcgccaattctcctcaggcggcgaggaacggctcggtcgggtatcaaaagcggggcagagcgatatccgaagacttctgattatcggagcaatgtcgcgcctgaattggctcggccggaaatcgatcccggaaagctcgtggctggcgcgcatctcggcgcgaaaaccaaggatgctcgtcgcgatcgcgcttgccaataagatggcgcggacgatctgggctctactgacaaagaacgaggattatcgagattcggcgcaggtagcagcatgatcgacatgcagttgctacctgacgtcggataaagggggtgtgagaaggcgacgacccgaatgggcacaatgatcgaacagatctgggttaggaaaaccagccggcttccgtgagccttagagctcgaaaagcagatttggacctgatccgcagatcaccatactggcccgcggcttttgaaaatgccgcatgtaaaggcctgacagaagaccgcactcgatcgcacgcacattcgatcaaaacctcttgcacactgggcggcaaccacagaaga

SEQ ID NO: 4477 - DNA, 1317 bp, unidentified
  source 1..1317: mol_type = unassigned DNA; note = element_6ce98c6
  misc_feature 1..2: note = core
  misc_feature 3..73: note = LE
  misc_feature 74..1105: note = CDS
  misc_feature 1106..1317: note = RE
  misc_feature 1092..1311: note = bridgeRNA
ttaattagatggtccgcctcttttctcagcacctaagctgagagtgcttaagaggcataggaggcgaaccatcatgtcaattcaagttattggtatcgatttaggcaaatcgaattttcatcttgtgggtcatgaccataaaggtcaggtagttctgcgcaaaaaactcagccgtcagcagctggtgcagtttgttcaaaacacgccagtaagcacaattgcatttgaagcatgcggcggagcccactggcttgggcgtctatgtatgtcgcatgggcactcagttaaattactgccaccgcaatatgtgaagccttatgtcaaaggcaataaaaacgattttattgatgccgatgcaatcgcagaagcagccacaagaccctctatgcgctatgttccggtgaaatctgaagaagcgcaattgctcagtgctattcatcgtattcgtcaggggtatatcaaagaccgcacggcctgtatgtccagaattggcgctttgctgctggagtttggcgtcagctttcctcaggggcatagtgtgatgaagacacttccagcatggcttgcgatacatgccagacacttacccatactgatacaaaatgaactcttaggcctgcatcagcactatcaggcgcttatgctcaaggttgctgagcaggatagtaagctcaaaagatacctggcacaaaatgaagatgctcagttattaaaatccattcccggtattggcgatatcacagccagtcagtgcattgcagagcttgggaatggaagtcagtttcataacggacggaatttagcagcatggcttggcttggtgcctcaccagcactcaaccggcggaaaagcgcgattgcttggcatcagtaaaaggggcaataagcatcttcgaaccttatttatccatggtgccagagccattttatccaggccggaaaaaacaggtgcggtgtttggcagttggcttacccagctcagagccagcaagccatttaatgtggtgtgtgtagcgctggcaaacaagctggccagaatggtgtgggcagtgctgaagtacaggcaagggtttaatgcagcgaagctgcaatcagggtgtgcatgaacaaaaggctgatgacaataacggtagaaccaccggaataaaacctggcataaaaaacagcagttgatgcttagtcgtttttgaggatattccggcgcggaactcatcgtggagcgggaagctagagcctccctaaagagactccgaatacattagcgcagaccaatccagtcatcgatttttgttcttgcaataacgaggcggaccataca

SEQ ID NO: 4478 - DNA, 1355 bp, unidentified
  source 1..1355: mol_type = unassigned DNA; note = element_6cef44c
  misc_feature 1..2: note = core
  misc_feature 3..74: note = LE
  misc_feature 75..1085: note = CDS
  misc_feature 1086..1355: note = RE
  misc_feature 1061..1342: note = bridgeRNA
tgatggggtggacgcccctcacagcttcccctgtggcaaggtggcggcgtgcatcattcgaaacggaggttcccatgtcaggagttggtacaattgggttggatcttgcgaaacacgtgtttcaggtacatggctcgagcgtttcaggagccgtgatcttccgcaagaagctgcgacgagatcaggtactcaagtttttcgccacccagccggcctctacggttgccatggaagcctgcgcgagcagccatcattgggggcgagagatcgcaaaattggggcatcagattcgcctcattgcaccggcttacgtcaagccgtttgtgaagcggcaaaagaacgacgcagccgatgcggaagcgatctgtgaagccgcacagcggccaaccatgcgcttcgtagcaataaaaacagaagagcaacaggcagcgtctctggtatttcgtgctcgcgatcttctggttcgccaacgaacccaaatcatcaatgcaatacgaggccatctggctgagttcgggatcgtcgtcgcaaagggcccctgtcacgtcgccaaactcctgggtaggatagcagatacccccgcgatggcccaatcgatcctacaattgctcgtcgaccagttgcagtccctggatgagaagatcgcccatttagaccgagaactcgcacaccgtgttaaagcggatacggaagccaagcgattgatgaccattcccgggatagggcctgttaccgcgacagcgcttgttgcgttagccccgactgctcaggccttcgagaagggccgcgattttgcagcttggctcggtctaacaccgctgcagcgctcaaccgggggaaagcagaagcttggtgagacctctcgaatgggtgagcgaacactacgcagactactgatcatcggcgcaagtgctgcggtgcgatgggcaaagcgcaagggctcttctaacccatggctcatgaacatgttgaatcgtaagccacccatgctggtgactgtggcgcttgccaacaagatggcgcgcatagtctgggcattgatggcaagaggcggaacgtatcgagctccggctatggcgagctagcttcaccactggcgggctgggcccaccaccgcccgcggtgcgagaaggtcgaacggagagtatggcgcaacggtcagagacgggatcgggaaaaccaggttatggacacgcgcctcgagcgcgcatcactgaattggacccgctccgcgaactcccatacgggccggcggcacacaacggccgcataagaggccggacacatgtcagcacccgaccgcgctccttgctcattccaaagattcttcttgcatcactgggggcgtccacaca

SEQ ID NO: 4479 - DNA, 1329 bp, unidentified
  source 1..1329: mol_type = unassigned DNA; note = element_6cf4f81
  misc_feature 1..2: note = core
  misc_feature 3..194: note = LE
  misc_feature 195..1289: note = CDS
  misc_feature 1290..1329: note = RE
  misc_feature 36..194: note = bridgeRNA
cttgtatgattaaatttaaaataaatattggacaaagagatcaagtaagctttaacagtttattgggaggccgtcccgacctgaggactggttattaaccagagcctgtcgcgtagattagcccccgccctattcacccataccgtggagtatctgaggcttagagcctgtatacacaaggaaggtaggtgcctatgcagggtcgggaaccagtaaatagtctactttctttaattccatgcttacaaacaattatgacgaacactcaatttaaagatatcgaccttgaagccaagccagtgcttttcgcaggtatcgatgtcggtgccgaggaactgattctggttgttcgcaagaacggcaaaccatttgatccacagaagttcgccaacacccccgctgatcgaaatcgattggtgaagaagttggttaagctgcctggtatcatcgtctgcctggaagctacgggtgtctatcactttgacttaagtctagccctccatgatgccggcgtgttactcagggtggtgaatcccaaagccgcccacaattttgccaaggtcttgatgaaaaacagcaaaaccgatgcggtcgatgccaataccttgtccgaatacgccgcgagaatggacttcgttgcgtggactcgtccgtccaatgagatgttcgctttacgcagtttcgctcgccgcattgacgtactaaccggtcagaaagcggctgctaaaaaccatctgcatgcgctaatcgccacgtcggaaactccgaaagcgatactcaaggatgtcaaactggctattgcccaattggagaagcgcattgacagcttaacagctgaggcgctgatcttgattggcaaatatcccaatcttgagcgagttctggccttactgatcggcatcaagggcattggcaatacccgtgcccttgcgctcatgggcgagctcttgttactgccgccagacctttcacatcgagaatgggtaaaatttgccggacttgatccacgggctttcgactccggcaaaagcgttcacaaaaaaacgcgcatatccaaggccggtaaccgtcatcttcgttccgccctttatatgccagccttgagcgctaaacagcatgaccctcacgtcaaagcttatttccagcatctcgtggctaacggcaaaaaaccattgcaggctgtctgcgcgatcatgcgcaaactactccatgctattcatggaatgttgaaacacaatgaacctttcgacaacacccgtttttatgcaattccagaatgtaacggatagtaaaaattagcgaaatttaacttgaaattgaacagagtat

SEQ ID NO: 4480 - DNA, 1384 bp, unidentified
  source 1..1384: mol_type = unassigned DNA; note = element_6d046c7
  misc_feature 1: note = core
  misc_feature 2..88: note = LE
  misc_feature 89..1111: note = CDS
  misc_feature 1112..1384: note = RE
  misc_feature 1152..1379: note = bridgeRNA
caatgggatggacgcccccacccgaaaacggcatcgatgtgccaaagtggaagtgtctaaacaccacgacatcgagggaggcgtcatcatgaagattacgacaatcggcatcgacctggcaaaggatgtctttcaagtgcacggcgtggacgaacacggcaacgtgacggtaaagcgtcagctcaagcgtaaagagatgatcgaattttttacgcagcagaagccctgtctagttggaatggaagcgtgtggcggtgcccacttttgggcccggcgtctgacgagtctgggtcatacggtgaagctcatggcaccacaattcgtaaaaccttatgtaaagggcaacaagcacgatgccgcggatgccgaagcgatctgcgaggccgtcacgcgccctacaatgcgcttcgtaccaattaagacgacggaccaacagagcattctggccgtgcaccgggtgcgacagggaatgatcaaagcacgtacagcacaagcgaatcaaatccgcgggttgcttgctgagtttgggctagtccttcctatcgggatcgcaaacttgtttttgcgagtgccaacattgctcgacgaggcgaaagacactatgccaggcgtgtttcgagaactcatcctccgtttgttgacatacatgaaggaactgagccgccatatagacgacctcgagatccagattcatcggtggcaccgcgccagcgaggcctctcgtaatctggaaaagattcctggaatcggccccgttacagctagcgcactaatcgcctcgatcggggacgcgcgcaacttcaagaacggcagacaactggccgcctggctcgggttagtgcccaagcagcattcaagtgggggcaaaacaaagctccaaggtatcagcaagcgcggcgacagctatctgcggaccctgctgattcatggagcgcgagcggtcgtaaaaaacgttgaacgcaatccggaccggcatgtatggcttcgcaagctgatggcgcgcagtcataccaatattgcgacagtggcgttggccaacaagaacgcacgaattgtctgggccttattggcgcatgaacagacgttccaatccgattacgttcggacgtaatcggatcggttgaaaacagcttcgtcgtaccagcagtagattcaccaggttgcgaagacacttcacacgttgatggcaaacaggtcagaccgtggttggcatagcccgatgttcgcgtagcacccgagtgcgtaatagcgattggggaggtcgaccagcggaacccatcagggacggggctcaagcccaggcaaagtccgaatgtacggttgtaaccttacctgttacctacagcgattgaagatgtccttgcaaacagggggcgtccatgta

SEQ ID NO: 4481 - DNA, 1551 bp, unidentified
  source 1..1551: mol_type = unassigned DNA; note = element_6d0922a
  misc_feature 1..2: note = core
  misc_feature 3..244: note = LE
  misc_feature 245..1423: note = CDS
  misc_feature 1424..1551: note = RE
  misc_feature 6..222: note = bridgeRNA
cttgtattatagagtagtagtgattagagcccctctccaagggctgtgtgctacactgtaagggatgctgtggattggtgtcatgctcctaccacaagatggttcacgaaaggttccaaccacagccccttacaattttgttgatcagttaaataccgccagacggttgatgtagaacaaggctacaaaagtaaggcgcactgtggacgcagcatcgcaaatctaaccgccggaggtttttgttatggtcatttctgttggtatcgatgtttcgaaggataaacacgattgcttcattctcagctcggaaggagaaactctggcggatggattcaccatccccaatacactggatggattcaacttcctgctgcggaagatccaagattgcaccacaccacaggataaaataaaagtagggcttgaggcaaccggacattacagctacaaccttctcgggtttcttcttgacaacggtctggccacctatgtcttgaaccccttgcgtacaaacctctaccgaaaaagcctcagccttagaaagaccaaaaccgaccgggtggatgcacgaacgattgcttctatgctgttatccgatgcgggcctcaaaccctacacaagtacagcataccacaacgaggagctgaagtcactgaccagataccgctttgacaaggtgaaagagcgggcaaagctgaaaagctctatctctcgattggtctgcatcctgtttcctgaactggaaaagttggttcccacacttcacatggtctctgtttacgcacttctggaggagttccctggtgccaaacaaatcgcaggcgcacacttgaccagactcaaagcacttcttgaaactgcctccaaaggccgctacaaacgggatgtggcactgcagatccgagaagccgccagaaactccattggatctcggatgcccgccaagtcccttgaattacagcataccattcgcctcattcgagaactggatactgagattagtgaaattgagaaccagatccaatccattatgaaagaacttcattctcctattaccactataccgggtgtggggttccgcatggctgctatgatcttagctgaggtaggagacttcactcggtttgcctccccggacaagctgttggcctacgccggaatgtctccttctacctatcagtccggacagcttaaaaactgctaccctcatatggagaaacgtggttcacgctacctgcgctatgccctttacaatgcgaccaagtatgtctgcctctgggacccgaccttttccgcttacttggccaagaaattaactgagggcaaacactacaatgttgctctttcccatgcctccaagaaattggtgcgtttgatttttgctatggagaaatccagacagccgtaccgcgtagcgccgtaattccgcctccttatcctgttagtctgtactggggtcctcccggacctctattttgctataccctttttcaaccatctactttctttgccaccgccgtcccttttcggggttgacttctaatagttaat

SEQ ID NO: 4482 - DNA, 1424 bp, unidentified
  source 1..1424: mol_type = unassigned DNA; note = element_6d147c7
  misc_feature 1: note = core
  misc_feature 2..125: note = LE
  misc_feature 126..1145: note = CDS
  misc_feature 1146..1424: note = RE
  misc_feature 1185..1424: note = bridgeRNA
gaatgaaatgaacgcgtcccacccgagggtgagagcaaaggacttgggtggatcctcacgggccaacggcatcgatgtgccaagatggaaaatgcacgcatttcccggcaaccggaggatccacgatgaacagtatggccgtgggcgtcgatatcgccaagcatgtgttccaggtgcactacgttgaccacgagaccggcgaggtcgtgaacaaaccgatcaaacgggcgaagttcctggagcacttcgtgaaccgtccacagtgccttatcgggatggaagcgtgtggtggtgcgcaccactgggcccggcaattgttgcaaatggggcacgaggtcaggctgatgccggcggagttcgtcaaggcattcaacgtacgcaacaagaacgacgcggcggacgcaaaggcgatctggctggccgtgcagcagccgggcaagcctgtagcagtgaaaacggaaatgcagcaggcgatgctggcgttgcaccgaatgcgcgaacagttggtgaagttccgcacgatgcaggtcaacgggctgcgtgggttgctgacggaatacggcgaggtgatgaatcgaggccgagcaaagctggatgcacaaattccagcggcatttggacgtctcgcggagcgcctgcctgcggtactggtcgatacgttgcgcgagcaatggaacgaactggcaaagctggacgagcggatttccgaaatcgagcgccggatgcgtgagtggaagaaggaagaccggtcagtgaaggcgatcagcgagattccgggcgtggggctactcacggcgactgcggcggtggcgattatgggcgatcccaaagcgttccaatccggccgtgaatttgctgcgtggactggtttggtgcccaggcagacaggctcgggtggcaaggtgaatctacacggcatatcgaagcgtggtgacacctatctgcgcacgctgctgattcacggcgcgcgcagtgtgctgacgcatgcaaaagaacccggcgaatggatcgagcggataaagaagcgtaggccggcgaatgtggtcgtcgtcgcgctggccaacaagatggcaaggacgatctgggcggtactggctcacgaccgtccgtaccgaaaggactacgtgagcgtgaagccggtctgaacggcttacgcaccgcagaaaatcaacatctaacacaggatgaacgtcgaaaggttgcgcagcaatcgagtgtgatgacaagccaggtaggaccgggactcgcaaaacctgtatatcggcaagagcttcgagctcgccaggagaatgaggtgcgggtcagcgaatttcatagggggccgcagcggcaacaccggctgcaccaagcccggatatagagacgcagcccatcctgtctatcaaaatgttcgagaactgttgcaaacgggacgcgttcatata

SEQ ID NO: 4483 - DNA, 1332 bp, unidentified
  source 1..1332: mol_type = unassigned DNA; note = element_6d15ab0
  misc_feature 1..2: note = core
  misc_feature 3..256: note = LE
  misc_feature 257..1318: note = CDS
  misc_feature 1319..1332: note = RE
  misc_feature 27..226: note = bridgeRNA
ccgacttgtatgagtgtcacggcaggtgactgggattgcagcccataacgtgtcgtagcagaccggagggaatgactcgcgaaattcctgtcacccacagttcgggttgaccctggtggggtgtgtcaccccctccggtctgcgttcgcggcgtgactgaagagaggcgtgaccacaagctgctgtgagaggtacttgaagtcggattgtccgccgcggatcccccatccatcgagcgaaaagggaaccgaacaccatgatcgtcatcggcatcgatccgcacaagtccacccacaccgcaacagccctcgactccgccacgaactccgatctggggtcgatccgcatcgatgcctcgattaccgagtacaagcggctgatcacctgggccaaagcctggccggaacgacgctgggccatcgaaaacgccgatggactcggacaccaccttgcactgtggctactcgcgctcggtgaagtcgtcctcgacatcccgaccaccgccaccgcccgagtacgtgagctctcccgcggtggacgacgcaagaacgaccgcatcgacgccgccgcagcagccagtgtcgcagcactgcagggtgacgcccgtcgggtccatcccgagaccaccaacgacgcgctggccctcctcgacgaacgccgagtcaatctgtcctacagtcgaactcgaacagtcaaccaactgcacgcgctgctacgagacttgatggccggcggcgcaccgacctcgttgacacccaagaaagcggcagctgcgattcgcggattccgggccaagaccgcgccggacaagattcgagtcgaactcgccaaagatctgatcgcagacttcgagcgcctcgatcagcaactcgccgccaatagccggaaaatcgtcacgttgctcgacgagcacggcacacgcctacgcgacatcgacggtgtcggaccggtcctggctgcccgaatcctcggtcgcagtggacacgccagcaggtttccttcggccgcggcgtatgcaaactacaccggcaccgcacctgtccagatcgcgagcgcggatgcctcgcatcaccggctctcccgatacggagaccgccaactcaactcagccatctacacgatcgccatggtccagatccggatgccggccagctccggccgagcgttctacgacaagaaaatcgccgaaggaaagtcgccgcgatctgccgcacgagccctcaaacgccacctcgcctcacacctgtggcgagtcatgctggcagacgaaaagcgagctaaccgcgcaccatcgaaccaagtctccactgctgcttgacaaacagagaggca

SEQ ID NO: 4484 - DNA, 1136 bp, unidentified
  source 1..1136: mol_type = unassigned DNA; note = element_6d22c30
  misc_feature 1..2: note = core
  misc_feature 3..210: note = LE
  misc_feature 211..1125: note = CDS
  misc_feature 1126..1136: note = RE
  misc_feature 12..194: note = bridgeRNA
cttatctcttcgagatctggcactttaggtgccgagagcccggcgcgggcgaccgttcggctctaggtcttcgcgatcgcttggtagcaaggatccccgcgccggtcttctccctgatccgcccgaacagttgatcgagttggcgctcgtaatgataagactgggcaagcggggggagctctcgaccctgtcagcgtaccggagattgccatgtttgggatcgggatcgacgtaagtaaggaccgtctggacgttgccgtgcacgagcagcagttccgccacttcagcaacagcaagcgcggctttgaagcattggttcgctggctgcagaagtggccggccaagcaggtcgtgcttgaagcgagcggaggttacgagcaggcagccctggatgcgcttcatgaggccggcctgccaatggtgcggatcaatccaggcagggcgcgtagcttcgccaaagccactgggcagctggctaaaacggaccggatcgatgcgatggtgctggcccagatggcacacctgttgaagcacactcgatatacaccagtagcgccgtggcagcgaaaactagctgaattttcactgcgccggcgtcatctggtgcagatgcgtagcagtgaaaagcagcgcatgcgtgcattcagcgagccagttctccaggtgatgatgaacagccaactggagtacttggacgagcagatccgcgtgctggacaaggcaatcgccgaacagctcaggaatcagcccagttggaacagcttggtggagatgaaaggcgtgagcaccgttgtgatgaccacgcttgcttgtgaactgccagagctgggaaagctgagtggcaaggcgatatccgccttggtcggcgtagcccccatgaaccgcgagagcggctcctggcaggggcatcgacgcatcaccggcggccgcgcggtcgtacggcaagcgctctacatggccgccttgtcagcctgccggtatgaaccgcaattgcgtgacttctttaaatccctgaaagcaaaaggcaagccggggaaagttgccctggttgccgtcatgcgcaaaatgctggtcatcctgaatgcccgcaaacgcgacgcggaggccatgatggcctccgcctgacaacacagttg

SEQ ID NO: 4485 - DNA, 1317 bp, unidentified
  source 1..1317: mol_type = unassigned DNA; note = element_6d234ff
  misc_feature 1..2: note = core
  misc_feature 3..71: note = LE
  misc_feature 72..1136: note = CDS
  misc_feature 1137..1317: note = RE
  misc_feature 1108..1302: note = bridgeRNA
agatgtatggactcccacctccctcgggagtagcgtaataagtgacaaaacttttaccaagtagcccatacatgtttgattgtaatgtgatagcaattgatttagcaaaaaatttatttcaggtttgtaagacagataagaacggtcaggttatttataacaaagcaatctccagagctaaactcaaaggattactaattaaagagaaaaaatctttagttgctatggaatcatgtagcagtacacattattgggcacgctttgccaaacaagtaggtcattatgtgaaagctatcaatgcccgacaggtgaaagcgtttaggcaaggccagaagacagatgcgaacgatgcattggcaataagtgttgcggctcgccagcctcatataaaagaaagtcgtttactttcagtgcaagagcaatgtctacaaggaatagaatgcatgcgggatttattagttaagcaaaaagtcaacttaagtaatcagctccgcgctttattacttgaattggggcatgctattgctcaaggtgatgctcagttaatacaagccattcctgggatacttgaagatgcagaaaatgatttaacacatcgctttcgcttttcaatacaactgacttttaggcgttttattggaacaatagaagaagttaaactgattgaagaaaagttacgagaaatcgttaaacaagacccaatctgcactcgtttacaagcattagaaggagtgggtcccgtctgtgctattttaatgaaaatagctttaggtaacaccacacatttcaaaaatggtcgggaagctgctgcctgtttaggcttaacgccagtacaacatagtagtggtggtaaggagaaaataggctcaatatcgaaagtgataggaaacaagaagctgcgcagcgctttgtataaaggtgcattagctgttgtttgccaactagaaaaaagagaaagccgtagccaaaaagatatctggttaagagaattaaccgttcgtcgaggtaaaaaaatagccgcgatagcgttggcgaataaaacagtaagaactgcttttgcgttgctaagcataatgcagagtatcagccacaattacttgtggcttaaacttgtcagaaagagcgtattaaaataggtaagaccgaccttcaagagactgttaggggctgaagtttataaaactgctcaacagaaaactcatgaaggtgcgaaaacatcagaggccagaggtagcacctcaatttgagcccgtatataagcgagcatctaacttattttaaactttttctttttgacattaacggggagtccatata

SEQ ID NO: 4486 - DNA, 1353 bp, unidentified
  source 1..1353: mol_type = unassigned DNA; note = element_6d38699
  misc_feature 1..2: note = core
  misc_feature 3..81: note = LE
  misc_feature 82..981: note = CDS
  misc_feature 982..1353: note = RE
  misc_feature 1150..1348: note = bridgeRNA
tgatgtgatggacgtcccctttttcagcagtaaacagtgccatctttttttccgatgcactgaatttcaggagaacagctcatgaatacgatcaaagtggttggcattgaccttgccaaaaatgtttttcaggtctgcgtctggatggcggacggttccgttgcctctaaccgaaagatttcacggcaaaaactccttgatgttgtgtggactttcccgccatcaaccgtcattgccatggaagcctgtgccacttctcattattgggggagaacgttacaggcgatgggctataccgtcaggctcgtccccacccagcacgtcaaagcctttagccatcatcaaaagaacgatgccaatgatgcgttggctatctgcgagactgcctgtcgtccgggtatccattttgtcccggttaaaacagtggaacagcaggatattaaagcactgcgtagcgcccgacagctcatggtggagcaacgcaccgcgcttgccaatcaactccgggcgttcctcgctgagcagggcgtgattattcccgttggcattcagtcacttcaacaccatttacctgatgttctggaagatgagaacaagaccttgtcttctgtcctgcgacgtttactttatacctcgtgggaagatttacgtgccctgaacctgcgtatccatgatatggataaagaaattgcggcactgtctcgccagcaaccgggttatgaccctctgctcactattcccggcgtcggtccccttattgcggctgctttcgtgagtgacgtcagcacatctcaatttgccaatggccgacaactgtctgcctggtgtggtttagtcccccggcaacacagttcgggcgggaaaaatcgtctctcttccctgagcaaacagggtaatcgtcatctccgaacgttaattattcatggtgcccgcgccatgatgcgcggcgtacaaaaacgggatgaccctttaggcgagtgactaagagccctgattacccgatgtggggccatgaaagccgtggttgctttagccaacaagctgacccgaattatctggcgtgttctgacggataaggttgattataatatgaagaaggcttttgctatcaattaattgaattgagtgaatcgaaatagacgctttaaccgagtttgcaaacactgatgaaaaaacggctatcggccctgcgataacctgagtaaaaccgaggtagtcacataccgatgacggatgataaggaaacagggtgcggatgacatcatggcgcgagcaaataagccctttatgacgccggatatatggtcgcaaaccgtatcaatttagtgcttgcataatcgtggcgtccatata

SEQ ID NO: 4487 - DNA, 1433 bp, unidentified
  source 1..1433: mol_type = unassigned DNA; note = element_6d3f3ec
  misc_feature 1..2: note = core
  misc_feature 3..121: note = LE
  misc_feature 122..1150: note = CDS
  misc_feature 1151..1433: note = RE
  misc_feature 1186..1386: note = bridgeRNA
agatggggtaatcggccggcgagtttgtggatagctgaagattttgggtgctgcgcttcaggctgatggtgaatacgaggtccgtgtctacggcctcaagcatcagaaggagaagcgcagcatggaccattttgctggactagacgtgtcggtcaaggagaccagcgtctgcattgtggatgacacgggcaagatcgttcgggaagtgaaggtagcgagcgaacccgaggcattgttggcggtactgaacaaccccgcctaccacttcaagcgaattggattggaagctgggccgctgtcgcaatggctttacagcgcgctcgccgaagcgggcttgccggtggtctgtgttgagacccggcacatgcaggcggtgctcaaggcgcagatcaacaagacggatcgcaacgatgcgcgcggcatcgcgcaaatgatgcgggtcgggctttaccgcccggtgcatgtgaagaccttgcgcagtcagaaactgcgaatgctgctgacccatcgcaagctgctgcagtcgaaggccatcgccatcgagaacgacctgcgcggtacgttgcgtaactttggcctcaaggtcggaatggttggcacggtgaagttcgagggacggatcaaggagctggtcgagaacctgcccgacctggcccttctggtcgaaccactgctcattgtccggcggacgctacgcgaacagatcgtcattctacatcgccgtttgctggcgatcgtccgagacgatgcggtgtgtcggcgcctgatgacgacccctggtgtcggcccggtggtggcgctgacttatcgcgctaccgtcgacgtgcccgcgcgcttccgtaaatccaagtcagtcggtgccgtttttggactgacctgctccaagtatcaatccggcgagatcgatcggagcggcagaatatcgcgctgcggcgatgagatgatgcgggtcatgctctacgaagcagcgcagagcatgctgcgttcgaagaaatggtcctggctcaaggcttgggcgatgcagatcgccaggcgccgcgggatgaaaaaggcgatcgtcgccctggcacgccggttggccgtgatcatgcaccgcatctgggttgacggcaccgagttccgctggacccgggaggctgcagcagcgtgacgaccgcgcaggatcaaacgcgataggaggaaagtcgaactccaccgagcggtggaatgatgtccctcgcgggacgatggatgaggtgagttcgcatgtccgcttggacctgccgttcgtctgacggcaaggccgaccaaaagattgttccacctcgtcttcgaatcccatgatggaagggccctggtgccgattccgaagagaagcacgagcccgtgagtgacatcgacactgtagtggtggaaagtctgaaagcgcttgaccccaaacggccgattagaga

SEQ ID NO: 4488 - DNA, 1861 bp, unidentified
  source 1..1861: mol_type = unassigned DNA; note = element_6d45404
  misc_feature 1..2: note = core
  misc_feature 3..274: note = LE
  misc_feature 275..1492: note = CDS
  misc_feature 1493..1861: note = RE
  misc_feature 14..294: note = bridgeRNA
ctactacaatatatttatggttaataccccttacagccagtaaggaattacccatcttgttgcttaagctgttagaatgagtaaggcaataggtctggccgtcacctcctaggactttacgtccgtaaaaaagtcagccaaccagccctcattcgcagcattcgttttacgcaggttgaacccttaggcgttcgtgtgatacccagtagattgaataggcaatgagtaaatctggtattgaccattgctaattcattgtaaaggagtatctgttatgaacgctgttggcattgatgtttccaaaggcaagagcacggttaccatccgaaagccgggtgatgttgttctgttgcctccccgtgatattccccatacccagtcccaaatcaatgccctgattgagttgatcaagggcctcgacggagaaactaaggtctgcatggagcacactggacggtactacgaacccgttgcctcgtggctttctgatgccggtatctttgtcagcgctgtaaaccccatcctcatcaaggacttcggggatgattcccttcgctccccaaaaaccgacaaggccgattccaaaaaaatcgcgcgctatactcttgaccgctgggcaaatttgaagcaatatggatgcatggataaaacacgtaaccaattaaaaaccatgaaccggcagttcggtttctatatggaccagaaaactgccatgaaaaacaacctcattgccctgattgaccagacctatccgggggccaatgacttctttgacagccccgcgcgtaacgatggcagccagaagtgggtggatttcatccatacctactggcatgtggattgtgtccgctccaagtcactggaggcatttacagagcattaccagaactggtgtaaacgcaaaggctacaatttcagcactcagaaagcgcaagaggtctatcagctctcctctgacctgatcgccgtatttcctaaggacgccaacaccaagatgttcatccggcaggctgtggcaatgcttaataccgcttccacaaccgtggaatccctccgtctggaaatggataagaccgcttccactctgccagaataccccgttgtcatggcaatggacggcgtcggccctaccctcggtccccagctcatggctgagattggggatgtgacacggttcacgcactgcggggcactgactgcctttgcaggcgttgaccccggaaaggacgattccgggcagcgcgtccgtaaaagtgtacctaccacaaagaaaggctcgccaagtttacgcaaaaccctcttccagatcatggatgggctcatcaagcgctccccggcagacgatcccgtttatgcctttatggacaagaaacgggcccagggcaagccttattacgtttacatgactgccggcgcaaacaagttcctccgtatttattacgggcgggtaaaagagtatatggcctccctcgaacccacacagcagcaataggtatatacctatcagaaaggaggtctcctcatgaggggctggatagacaccatacaagcccatacccaagcccaggcaaaatacgacaaaaacaatacggcgggcttttacacgaaactgaatatccatacggatttagacatcatccgctggctttggaagcagctgtcaaagcagggggcggttaaaaaactcatccgggaagagatcgccagagagaaatctgaggattctcgatcctgatctagcacctaacatttttatgaccacaggtcggcgtcttgcggtggccttattttggtgcctttaattcaacctgtataaaattttcaaagttcacaaatttctgcttgactttttctttgcagg

SEQ ID NO: 4489 - DNA, 1381 bp, unidentified
  source 1..1381: mol_type = unassigned DNA; note = element_6d46530
  misc_feature 1..2: note = core
  misc_feature 3..77: note = LE
  misc_feature 78..1118: note = CDS
  misc_feature 1119..1381: note = RE
  misc_feature 1118..1368: note = bridgeRNA
tgatggtgtggacggccccctacggcatcagttgtgccagaatgaggttgttgagatctcagacaagggagccgtccgtgagccagattatccgccttggaatggatacgtcgaagcatatttttcagctacatggggttgattctgcagagcggccggtgttgcgcaagaagcttcggcgcggcgagatgttggctttttttgccaagtgtccgcccaccattatcgggatggaagcctgcgccgcgtcgcattactgggggcggaagttgcgcgaactcgggcacgaggtgaagctgatcgcgccgcagcacgtgaaggcctacgtcaagcgcaacaagaacgacgggcgcgacgccgagggactatgcgaggcgatgagccggccgacgatgcagttcgtgccagtgaagaccgaggagcagcaggccgccttgatgctgatgggagttcgcgagcatctggtcaaaaggcgtacccagcttggcaacgcgatccgcggctatgcggcagagtttggtctgatcaccgccaagggtctcgacaagattgagccgctattggcgcggatcgcgcaagaccaaagcttaccagaactggcgcgtgagatatttgcgatgcagggccgcgactatgcgcggctgcaggtcgaactgaagacgatcgaggctaggctgcgggcttggcaccgcgccaatgccgatagccgccgtctggcggagattccgggggtcgggccgatttgcgccacggcgctggtgatgaaggcgcccgatccacatgcgtttccgtccggtcggcactttgccgcctggatggggcttactccgaaagaccattccaccgctggcaagaccaggatcggcaagattacccgcgccggggatgagatgctgcgcagcgtgctggtggcgggagctaccgccgtgatccagcaggcgaagaagggccgtggtcatccggcaccctggctggtggcgctgctggcgcgcaagtcgccgaagctcgcagcggtggcgctcgccaacaagattgcccgcatcgcttggaagctattgacgacgggcgagagttacaacgatgcgcggatgcccggcgcatccgcagtcgccacttaagagatcggccggtcggctagctcgccaaccggctgagccggagctgcaagaggagatcagatggtaggatcgatcgatccgaggtgcgagacactccgtgggacccattggcctgcaaaggtcgctggcgtgtttggaactcgcgtcgcggaaaccatcttggccagcggtctatcaaccgcatcaacaggccggacatatggatgcaagcgatccgatcagaccctgaaaaaaactcttgtggcacgggggccgtccacata

SEQ ID NO: 4490 - DNA, 1352 bp, unidentified
  source 1..1352: mol_type = unassigned DNA; note = element_6d4dcf3
  misc_feature 1: note = core
  misc_feature 2..63: note = LE
  misc_feature 64..960: note = CDS
  misc_feature 961..1352: note = RE
  misc_feature 1114..1338: note = bridgeRNA
tgatgtcgtggacggctctccacccttgccgcaggttgaggcggcttgagatggaggagagcgatgggagaggtcacgacggttgggctggatatcgctaagtcggtgtttcaggtgcacggcgtagatgctgaaggcgcggtggtggtgcggcggcgcctgactcgagcgcgggttctaccgttcttcgagaagttggcgccgtgcatggtcgggatcgaagcctgcgcggcggcgcatcattgggcacgacagttacgagcgttcggccatgaggtgcgactgatgccgccatcgtatgtgaagccatacgtaaagcggcagaagaacgatgcggccgatgccgaggcgatctgcgaagcagtcacccggccgagcatgcgctttgtcgaggtgaagacgccggagcagcagagcgttctggtgcttcaccgcacgcgccaagtgctcatccgtcagcgcactcagattaccaacgccactcgcggtcacatggctgagtttggactggtagcgccaatcggacgtaatggcctagagacgcttatcgagattatcggcaatgaggccgatcaacgattgccagaggcggctcgcagatgcttggtcacgctgattgcccagcttcagctggtgaatgcccagatcctcgagactgatcgtcggatcatggcgagcgcccgggccacggagatggggcgccggttgatgggcatcccgggagtcgggccattgctcgctagcgcgctggtcaccgcaatcccggatcctcatgccttccgctcgggccgcaatctggcggcgtggattggcctcgtgccgaagcaaaactccagtggcggtaaggagcggttgggcgggatcagcaagcagggcaaccggtatctacggcagatgctggtggtcggcgctttcgcggttattcgctacgccgagcgacacggatcccgacgaccatgactcgtgcagctgatggcgcgacgaacgacgaaggtcgcggcagtggctctggctaacaagacgacgcggatgatctgggcgatcatgaccagcggccaaccatatcgcgagccacgagtggctcctgcataaagaccaggcgcacagcgccgaccaccttgggaagggcggacaggatggaatgcgatcagccggtcgataccgggaagcgggaaaacccatttgggtcagggcgccttagagcgcgtcagtttgatcgggaccaagcttcgcggaaggcattatggccagcggacatgcgcgccgcaccaaaaggtcgaacacatgaccgccccgaccaggcctcgcacgacatccaagaaaacccttgccaccggagagccgtccacaca

SEQ ID NO: 4491 - DNA, 1908 bp, unidentified
  source 1..1908: mol_type = unassigned DNA; note = element_6d50e74
  misc_feature 1: note = core
  misc_feature 2..629: note = LE
  misc_feature 630..1655: note = CDS
  misc_feature 1656..1908: note = RE
  misc_feature 1684..1906: note = bridgeRNA
caatggtatggactccccacctcaactgacagcgtcagctaaagttacaggtgcgaaccaaaacaggagcccatgcaagctatcgctttgaaagtaataaagaagcgaatgaggcgatgcaaaatgtattcgataatacagtgggcactgaacatagcgacaagtttcaaaactctaacgcccaacagttaaaactagtcacgcatttgtggttgttcattcaaggacgactaggaatggattacagcctagccaatgatcatgctgctgcgaccgcaacattactgtctcgcctttcgagaaatactgatgacgagattcgagtcgagttcatgggcagcttttatgatggcttgaacctctatcaagctgagaacaaaccatcaggttttgttcatcgctttaagcgtttgtttaatcttacttaagcattccaccagctgaaatcaatttgcgctttgcactgtgtagagcgcacctatttccaaccatttttcccactattacccctgaacatgagattccctactacgctcaatggtatggactccccacctcaactgacagcgtcagctaaagttacaggtgcgaaccaaaacaggagcccaaccaaaacaggagcccataccatgaataaatttaacacaatctcgattgatttagccaaatccgtctttcaagtcgcggtatttaaccgccatggcaagcgtaagttgaaccaagctatgtctaaaaagaaaatgctaacggtcatcagccaacaccctggcgcgaccatttgcatagaggcctgtgcagcatctcattattggggacgaacgtttcaaagccgtggtcataccgtcaaaatgatacctccccaaaaagtgaagccgtatcgcagtggtaataagaacgatgctaatgatgctatcgcgatttacgaagcttccttacgctccgatattcatgctgtacctgtaaaaacaccggagcagcaagatatcgcaatgctgctgagtttaagacaaagctatataaaacaacgcacggcagtaagtctacgtatccgtggctatgcagcggaatgtggcattaccttcccacaaggagccaataaactgcgagaactgctccctttcgttatcgaagatatggagaatgaattaacaccgacaactcgattcgttctccgagaattacatgctcagctactaaatcttgatgagcctatcgagagagttgaatcgcaacttatagactttgcaaagcaaatacccgcttgccagttattaatcactttacgaggtgtacgttgggtgattgcaagtgccattttttcccgtctaggtgacgcttcggcctatagaaatggtcgaggagctagtgcgagcttaggtttagttccggctcatactggcagtggtggtaagaacaaaaaccacggaataagtaaatcaggtgataaaaccttacgctctcttgtcgttcatggagcaagagcggtggtagcgaatatccgagataaagaagatcgcttaagttgctggatacgaaacttattagaaagaaagtcgtttaaccaagtggttgtcgcccttgcgaacaaaacgatcagaatggcttgtgccatgctgaaaagcaatcaatcttataatgagacgttaatcgcttaacagttgattttataaggttaagggagacatcaatccccccatgtaagcaagtaaattatggtaaagagtaagcatagcaagcaaaagaaactctgagagggacgaaggtgataatacaccacacgctcgataagaacttttgctgagtggattaagccatagaggttcggggtagctccccataaagaaaccgaatatacgtgcacttgcgtacctttactcgtttccttgcaatactaggggagtccatata

SEQ ID NO: 4492 - DNA, 1403 bp, unidentified
  source 1..1403: mol_type = unassigned DNA; note = element_6d5a0bb
  misc_feature 1: note = core
  misc_feature 2..226: note = LE
  misc_feature 227..1390: note = CDS
  misc_feature 1391..1403: note = RE
  misc_feature 13..241: note = bridgeRNA
ctacttatctactggtgggacgaccgcagcccgggccaggcttggtcgaggtgaccggtgggatcgctcgtattgcggctgtccaccgctggttggtatgactcactcatggcatgcgtcctgccggtcaccgtggcgcggagaggctcaagaggggactgcccagctcgaagtagcgctgccctcctcgccggattcacccccggttcgatcgaggagagcaggcatgggacaggtcatcatcggtatggacccgcacaagcggtccgcgaccatcgagatcatcaacgaccgggagaagattctcgcgcaaggccggttcggcaccgaccgcgacggataccagacgatgctcaagctcggccggcagcacaaggaccgggtctgggcagtcgagggctgcaacggcatcggcaaacacctcgcccagcgcttggtcgccgacggcgaaaccgtcctcgatgtcccggcaaagttgtccgcccgtgcccgggtgttcgacaccggccagggacgcaaaaccgacccggccgacgcccaccacatcgcggtcgccgccctgcgcagcaagggcttgcggcaagtggccgccgacgacgcgacggtggcgctgcggctgctggtcgaccgccgcgacgaactgggccgcgcccacaccgatctgctcaaccggatccacaaactgctgctcgaactactgcccggcggcgccaagaagtatctgtccgctacccaggcccgtgaactgctcgccacgatccgcccgcgtgacctggtcggccggacccggcgccggctcgcctccgagctgatcagcgaactcgtccaggtcgacaagaagaccaaagcggccgacaaggaactgcgtgagcttgtcgaggcgaccggcagcagcctgcaggacctgcacggcatcggcccgtccggcgcagcccggctcatcggcgacgtcgccgacatcaaccgcttcgccagccgcgggcacttcgcatcctggaacggcaccgcaccgatcgacgcctcctccggcgaccagactcggcaccggctgtcccgagccgggaaccggcgcatcaaccgcaccctgcacatcatggccgtcgtccagctgcgcaacgacaccgaaggccgcgcctactaccggcgcaaactcgccgccggtaaaaccccgatggaagccatgcgcgcgctcaaacgacgactgtccgacgtcgtctaccagcagatggtcaacgacgccaaaaccgtcgagacgggcccgggaggacacgcgggggcgactctgaaatccagcgcggccgatccaatccccatgatcgacacttcggacaagtcacttcccggacccgccgaaccccagcctagaacaccacttccgaccacctcttgacacagaggggtgc

SEQ ID NO: 4493 - DNA, 1110 bp, unidentified
  source 1..1110: mol_type = unassigned DNA; note = element_6d5ef14
  misc_feature 1..2: note = core
  misc_feature 3..162: note = LE
  misc_feature 163..1104: note = CDS
  misc_feature 1105..1110: note = RE
  misc_feature 1..164: note = bridgeRNA
ccctgtgtctggaaagtctgtcatggtggggtgggcgggaagccgttgggtccttggcgcttgacgccgtgagccggctcggtctcccgcccgttccatccataaacctgaacagttgcacgaggctgcgccaacagacctcgcatcacagggacaggcaccgtgaccatagcccttcgttgcgtcggaatcgacgtctccaaacattttctcgatattttcgatgaggccacaggtgcctcggaacgcatcgccaacgcgacacaggccatcacacggctggtggcgcgttggcgatgcgatgcgctggtggtctttgaggccaccggcatctacgacctcgagcttcgcgaggcgttgcgtcaggccggcatccgcttcgcccggatcaacccggcccgtgcccgcgatttcgctcgtgcgagcggcaagctcgccaagaccgatccaatcgacgcgcgaatgctggcggcctttggccgtgccatgcagccggccaccgagcaggtcgctacaccggcccgcgacgccctcgcaaggctggcaaagcggcgcgatcagctggtcctgatgcgtgccatggagaagaaccgccgcagcgaggccgacgatcgagcgatggccgaacgcattggccgcctgatcgagttcttcgacggcgagatagaggaaatcgaggccgacatccgggctctgatcaaggcagagcaggagatctcggacgatgcacagttgatgcgctcgctacccggcatcggtcccgtggcctgcatgcagctcatcgcccagatgccggaactcgggcatgtcgggccgaagcaaatcgcggcgttggccggcctggcccccttcaacgtcgacagcgggacctatcgcggcaagcgtaaaatcggcggcggtcgcaaacgcgtccgcgacgccctctacatggctgccctcaatgcggtccgcagggcagaacccttcaaagccttctacgcacggctgcggcaagccggcaaaccagcaaagctcgccctgatcgcagtcgccaggaaactgctgacagtcctcaacgccatgatgcgagaccgaaaaccttacaaactggcctcagcagcataacagttg

SEQ ID NO: 4494 - DNA, 1385 bp, unidentified
  source 1..1385: mol_type = unassigned DNA; note = element_6d6da48
  misc_feature 1..2: note = core
  misc_feature 3..128: note = LE
  misc_feature 129..1154: note = CDS
  misc_feature 1155..1385: note = RE
  misc_feature 1160..1355: note = bridgeRNA
acatggggtaatcgcgggagcgacgcccctttgaatccgatcatgatcttggaaggcggctgttccccgataagatgaaatacgggctctcgactggacgctgggcccagcatcaatggagaacagccatgacagagtatatcggtctcgacgtatcaatgaaagagacggcaatctcgatccgccgtgagggtaagcggatctggcgcgggaagtgcgcctctgatcccgccgtcattgccgaacttatccgcaagcgcgcaccaattgtaaaacgggtggtgttcgaaacggggcctttgtcggtatggttctttcatgcactgcgcgccgagaggctgccggccatttgcatcgatgcccgtcacgccaaagcagcgctcgatatggcggcgaacaagacagatgcaaatgatgccgacggtttggcacacctggcagaagtcggattctttcgcgaagtgcgggtgaaaggtttcgacagcatgttagcccgcacgcttgtcgcggcgcgcacccggttggtccggatgaccaccgagctttccaaccaaatccgcggcatcatgaagactttcggtctggtcgttcccgcaggcaagggaagcacgtttgagaagaacgttcgcagccttcttatcaatcataaggatcttgctgatatcgtgctgccgatgctggatgcctggctgggccttcgcatccgtgccgcagagctcggtcgccaactgctcgcggacgcccgtcagagccaagcctgccgtatactcatgtccatccccggcgtgggcgcgatcactgcaacctccttcgctactgccatcgaagatcccgacaacttcaggaaatcccgagctgtaggtgcgtggataggtctcacgacgcgccgttaccaatccggcgaagtcgattacgatggccatatatccagacgcggcgaccgccatttacgtgggcttctctacgaagcggcgtcggtcattctgacacgtagctcaaaggagagttacctgcggacatgggggcttcagctccgggaacggataggcttcaaaagagccgccgtggctgtggcgcgcaaacttgcggtgatcatgcacacaatgctgaagactggtgagttctttaatccgaatgcgggagccgcaacctaaatccgcatagcgttcaacgtctgaacgccgaaacgtccctgccgggacgtgagccgagccattccgttgatggggttgcatcgctgtctcagctgaatgcgtcgtccacattgaaggctcgttccgcggagctccatcatgcggcggctaatgtcgaccgcgaagacaaccatgcacccggcagtgtcgtttcaacatcagaatgcttgacaccccacgtgcgattagaca

SEQ ID NO: 4495 - DNA, 1406 bp, unidentified
  source 1..1406: mol_type = unassigned DNA; note = element_6d8229d
  misc_feature 1..2: note = core
  misc_feature 3..80: note = LE
  misc_feature 81..1124: note = CDS
  misc_feature 1125..1406: note = RE
  misc_feature 1122..1394: note = bridgeRNA
tgttggggtggacgacccccgaacggcatcgaagtgtgccagaatgaggttgttgaacatctcaatcgaggaggtcgtccgtggaacagattattcgcattggcatggatacgtcaaagcatgtctttcagctacatggggtgaacgcagcagagcagccggttttgcgcaagaagctccggcgcaaggagatgcaggattttttcaccaagttgccgccaacggtagtagcgttcgaagcatgtggtggatcgcactattgggcgcggcagttgcaacgtctggggcacgaagtgaagatgctgccaccgcagtacgtcaagccttatgtgaagcgcggcaagaatgatgccgctgatgccgaggcactgtgcgaggcgatgagtcgtccgacaatgcgcattgtgccagtgaagacagctgagcagcaagccgcgctgatgttggtaggcatgcgcgatcggctgatccgtaatcgaacccagcttgccaatgcaattcggggctattcggccgagtttgggtatacggccgccaagggggttcgacatattgtgccactgcttgatcggatttccgccgatgagacactgccagagatggcgcgcgatctgtttgcaatccacgcccgtgaatatgtacaattgcaggcagaaattgagaaggtcgagacccgtttgatggcttggcaccgcgctgacgaatgcagtcgccgccttgcgcagataccaggtgtaggccccatcggtgcttcgctgttgatcatgaagacaccagcgcctgagcttttccgttccggacgggatttcgcggcgtggctcggactgacgcccaaagatcattcgacagccggcaaggtcaagctcggcgttatcacccgtgccggcgacgaggcgttgcgacgaacattggtcgttggatcaacttcacttctgcaacagattcgcgccggacgtgccaggaatgcatcgccttggctcgttaacatgcttcggcgcaaaccgcccaaacttgtggcggtcgcgttggctaacaagatcgcccggattgcatggaaaatgatgattacgggcgcggtttacaattcgcgatctgcaggacctgcagcggcaagcgcgatatagagctcactcaggcgtggcgagtgcgggtgatgataccgcgccgagttgaggttggaacttgcaagtgaacgaacagatggtgtgatcgatcgatccgagacgcgtggcaatccgtttgaatcagtggccattacaggtcgcttttctgtttggaaatcgcgtcgcggaaaccattttggcccgcggtcatgtgcgaccacacccagaggccggacatatgatcgcaagcgatccgatcaaaatatctgttcagggaccttgtaagagggggtcgtccacata

SEQ ID NO: 4496 - DNA, 1309 bp, unidentified
  source 1..1309: mol_type = unassigned DNA; note = element_6d840b1
  misc_feature 1..3: note = core
  misc_feature 4..215: note = LE
  misc_feature 216..1163: note = CDS
  misc_feature 1164..1309: note = RE
  misc_feature 37..185: note = bridgeRNA
gcttgtgtcttgatgagggattaaaatctggagtgagagcggtgaatgacaagctgaatgccgcaggtgccatgagcacgagtgggagcacaagctgtcattcaccgttccactttggcgagagcccgaacagttggatgcggctctgatctcgaatcacaagcgtgggccaagccaaagtcctctcacagtgttgagtttaggagggtttggtgatggcgtccttcctgggtattgatgtttccagtcgatcactcgatgcgctggtgcggccacagggcataaaaatccatgtgagcaatgatcgggcaggcttcgaggagctgcagcgaagccttggcgggcgcagtatcaagcgcgttttgctggaggccacgggcggctacgagcgagatgtcatgcatttcttgcaggatggcggctacaaagtcatacgcgtcaatcccaggcgagcccgagcgttcgcagaatccatcggcgtcaaagccaagaccgacgccatcgatgccgaagtactggcccactacgctgaggtcattccagaccagtccaccctgcggatcagcccggaacgtgcgctgttgcgggaattgctgcagcaacgtgatcggctggttcagcagcgtgatgacgatctgaggcgcctgaaacaggcgcagtcccgcgtggtgtccgactttctgaaagccaacctccagcacttcaaatcgcagatcaagctggttgagcaagcgatcagccagcaagcggaagccctgaaagatgaacgggttactcagctggtccaggtcaaaggcattgggctggttacggcgggcaagctggtaacgcttctgccagaactggggcgtgtcgagtctagagaaatagcctcattggtcggggtggcgcccttcaaccacgacagcggaaaattcgtgggcaagcgctctatctcaggcgggcggtttgaggccaggcgatcgttgtacatgtcatgccttgtggcgatgaagtacaacccagcactcaaggctcgttatgaggcactgcgcgaacgaggaaaagttgccaaggtcgctatcgtagcctgtatgcgggtattcctcgtacggctcaatgccatgctcaggactggcgagccttggctggatctggtcttgccacagcctaagcggacctagatcaggaaaccgacgtaattcatatgagagcgggcttgcccaccaagccaataccgcgctggatggcacgggcttcgcccgtgttcgcgggacaagcccgctcccacaggtgacgcgctagattttagaaattgagcaagacagtt

SEQ ID NO: 4497 - DNA, 1495 bp, unidentified
  source 1..1495: mol_type = unassigned DNA; note = element_6d881f3
  misc_feature 1..2: note = core
  misc_feature 3..242: note = LE
  misc_feature 243..1475: note = CDS
  misc_feature 1476..1495: note = RE
  misc_feature 7..238: note = bridgeRNA
ctaatgggagtccaacagcgtttgtcgggttcgttccggcgagggttgtgaccgagccgccttccggtgagcacttcgttgttcagggattcgatctctgcgatcagaccgtgccccggttggttggtgagggttgccgatagcaccgatggggtgtcgtgcctcgagcactgatccattagaacgcgcaaggctgccttccggttcgcgaagtcccagaccacgagtgcgaggaggatgcagtgatctttgttggcgatgactgggccgaggcccatcacgacgtctacgtgtgcgatgaagccggcgtgaagttggcggcgagacgattgcccgagggcatcgagggaatggccaagctccatgacctcgtcgccactcatgccggcgagcccggcgatgtggtggtcgggatcgaaaccgaccgagggctctgggtgaacgcgctcgtcgaagccggctacgtcgtgtacgcgatcaacccgaaagcagcgtcgaggtatcgggatcggcacacgttgtcgggtgcgaagtccgatccgggcgacgcaaaaatgctcgccgaactggtgcgaaccgatcgccacaaccatcgccaagtcgccggcgacactgctctggccgaggggatcaagatcctcgctcgcgcccaccagagcctcgtctgggaacgaacccgagcaacgaataggttgcgcagctcgctacgcgagtacttccctgcggcactcgacacgttcgctgagctggccgatcgcgacacccttgtggtgttggcggcagctgcgacgccgagcgaagcaaccaagctcacgccgggcaagatccgcaccctgttgcgtcgcgccggtcggcaacgcaacgtcgagacccgcgccgacaccatcgccgcagggctccgcagcgacgccctgcgcgccccgtcagcagtcgaggcggcacacggcgcgaccacccgctccagcgtggcgattctcgctgaactgaacactcagatcaagacgcccgctgctgagttggccgaccattttgagcagcacccggactccgacttctacctttccttgccaggtgtcggtgtcgttctcggagcccgggcgctcggcgagttcggggatgacccgaaccgctatgccgatgccaagtctcgcaaaaactatgccggaacctcgcccatcacgagagcatccgggaccagatcggtcgtgctcgcccgatacgtgcgcaacgatcgcctcgctgacgcgctcgaccagtgggcgttttcctcgatcacctccagtcccggggcgcgagcgttttacgaccggcggcgcgctgcaggcgattcgcaccacaaggctcttcgagcgctcggcaaccgttgggtcggcatcctgcacggctgcctcgaccacagggtccgctacgacgaaaacatcgcctggggacaccggatcgacaccgacctcaaagaaatcgcacaagccgcttgactcctacagccctggggtgt

SEQ ID NO: 4498 - DNA, 1541 bp, unidentified
  source 1..1541: mol_type = unassigned DNA; note = element_6d91bdd
  misc_feature 1..2: note = core
  misc_feature 3..257: note = LE
  misc_feature 258..1421: note = CDS
  misc_feature 1422..1541: note = RE
  misc_feature 1..236: note = bridgeRNA
gtatgattaattcagaagctaattaacatacgttcctttctttttaataactgtgccataatacattcagatactgtggacttttaatttttttcttgtagcatgactactcgacgggagtgtattgccattacctttatctgaatcgtttataagctggatgtgccatttatttagagcacttatttcaatcaagagtacgaggatgatcgtcggtggatatcacagtatcaaatcttaattgaaaggagaaccttatgatttacgtcggcattgatattgccaagttcaaccattatgcctctgccatgtcttctgatggcgaagtgctacttgagccttttaaatttacgaacgacaatgatggcttctgttttctggtttccagactcagttcattcgatatggaccagatcatcattggtcttgaatcaacggctcactacggcaacaaccttttatcatttcttgttcctaaaggttacaaagtttgccttatcaaccctattcagacttctacgatgcgaaagaacaacattcgtaaaactaaaactgacaaggttgatacctttatcatttgtaaaactttaatgatgcatcctcacaggttcgttactctttatgacattggtttaatgcaactcaagaacctgggcagattcagacaaaagatcgtgaagcagcgtactcgtttgaaaatccagctgacttcttacgtggatcaagttttccccgaactgcagtatttctttaaatccggaatacatcaaaaaggatgctatgcgcttcttaaagaagcaccttcgccggatgcggttgcttccatgcacttgactcatcttacgcaccttttgcgattggcttcccacggtcatttccaaaaggaaactgctgtagagttaagagttctggcacagaagtctgtcggctccagcgacaaatctttatctattcaaatcactcagtccattgaacagattgagttattggataggcaacttgaaatgattgaatccgaaatgaaagacattgtttcgtctctggattccgttatcatgaccatacctggcattggatatgttaacggaggtatgattcttggagaaatcggcgatattcaccgtttctcaagcccttgtaaactgttggcttttgcagggttggatccctctgtatatcaatcaggaaacttcgaagccaaacacactcgaatgtcgaagcgcggatctcgttctttgcgctacgccttaataaatgctgcacacaatgtggtgaagaataacgcgacatttcgagattattacaaccagaaaatgtctgaaggtcgttcgcactacaacgctttaggacattgtgcaggaaaactcgtccgtatcatatataaaatgttatctgacgacgttccttttaacttagcttagcaaaggctttaatatagatttcgaaaggccttcgctggaaggtcttgttaaggtcagctatttttgagccataaatcaaacgaaatattcgctaaatttttccttgactattcatagctg

SEQ ID NO: 4499 - DNA, 1399 bp, unidentified
  source 1..1399: mol_type = unassigned DNA; note = element_6d95eb6
  misc_feature 1..3: note = core
  misc_feature 4..130: note = LE
  misc_feature 131..1156: note = CDS
  misc_feature 1157..1399: note = RE
  misc_feature 1184..1359: note = bridgeRNA
acatggggtaatcgcgggagcgagtcgccccgaatttcagccttagcattggagagtggctgttccccgataggatgaaagtgcgggctcacgactgcacgccgggcccaagcatcataggagaacagccatgacagagtatatcggtctcgatgtgtccctcaaagagacggcagtttccatccgacgcgacggcaaacgtgtctggcgcgggaaatgcgcctctgatccaaagaccattgtcgatcttatccgaaaacgggcgcctgctgcggaacgcgtcgtgttcgaaacaggccccttgtcggtttggtttttccatgcgctgacaaccatggggcttccagcggtctgcattgatgctcgccatgcaaaggcggcgctcgacatggcagccaacaagactgacgcgaatgacgctgacggactggcacatcttgcggaagtcgggttctttcgcgaggtgcgcgtgaaagggttcgacagcatgctgacccgcacacttgtagcagtgcgcactcggttggttcggatttctgttgagctttcgaaccagatccgcggcatcatgaagacatttgggttgattgttcgcgcgggaaagggaagccgcttcgaaaacagtgtcagggagcttctttcagatcaggacgaactcgccgccgttgtcattccaatgctgcagacatggagcagtgtgcgcatccgtgccgcggaactcactcggcggctggctgctatggcgcgccgaagccaggcatgtcgaattctcatgtctatccctggcgtcggcaccatcacggcaacctcctttgtcaccgcaattgaagagccgagtaactttcgaaagtcacgctcggacggcgcgtggcttgggttaacacctcgacgctatcaatccggagaagtcgattatgagggtcacatatcccgacgcggcgaccgtcatttgcgaggacttctctatgaggctgccaccgttattctgacccgcagttcagccgattgtgacttgcgggtgtggggcctcaaactccgtgaaaagatcggtttcaagcgcgcggcagttgccgttgcgcgcaagctggcagtcataatgcatgccatgctcaaaaccggcaggcccttcgaacaaactggccaaccggccgcatgatggtatcacggctcgcatttggtctttgagtactctctaacgtcctcgccgggacgtgagcagagccatttcgctgaaggtgttgcactgctggatcagctgagtgcgtcgtctacatttggaaggcacccctcgcgaagctccatcatgcggcggcagatgtcgaccgcgaagacaaccatgcacccggcaaccggtcttcaaagtgcaagaaaaacttgatctgagccgtgcgattagaca

SEQ ID NO: 4500 - DNA, 1216 bp, unidentified
  source 1..1216: mol_type = unassigned DNA; note = element_6d9f5dd
  misc_feature 1..2: note = core
  misc_feature 3..218: note = LE
  misc_feature 219..1193: note = CDS
  misc_feature 1194..1216: note = RE
  misc_feature 12..192: note = bridgeRNA
cttgtatcttcgttcctgtggtgattagctatcaccactgcgtattcgatgagtttgctctgacaccgaaagcttggactttgcgataaagattaaacctcgatctgctcttctgagccggctggacactggacggtagcctagggcattgggaccctgcatgtacaaggcaagtgggcgcagcgggcatcttcagtattgtgatgggagctaagtccatgttcttcctgggaatagatgtgtccaaggccaagcttgattgcttgctgcttatggacaacggcacaacacgcaagacaaaggtcgtacccaacaccgccgccggcgtgcaaacgctgttggactggtgcatcaaacacggcgcacagcccgagcaaactcacgccgtgctcgaacctacaggccaatatcacgaaccggccgccacagcgctgcatgatgcagcgatgaatgtatcgctgattaatcctgcgcaagtgcgcaactttgctgatgcattggccgtgcgttccaaaaccgatgggatcgacagctacgtcctggcccgttatggccaagcacgcaagcctacgctgtggcacccggcccccatgcatgccagacaactacgcgcactcctggcgcggcgcgaagccttggtcaaagatctcttgcgagagctcaaccgccaggaaaagacgcaattcagcagcccaccggcgttggttgaaagctccatcgacaaggccatcgcgttcttgcgcgaggagatcaagcggttggatcgcgccattgacgagcatatcgaccggcatccagacttgaaagcagatcgggatttgctcatcagcatccctgccatcggaccgcaagcggcaaacgcgatcctgtcgatcatgcacaaccggcgtatcgactccgcagagggcctggcggcatatctgggcctgattcccgtgcaccgacaatcgggaaccagcctgaatggccggccctgcctgtccaaggccggtccaccacgcgtgagagcgacgctttacatggccgcgattgtaggaacacgctttaaccctcatgtccaagcgctatacgcccgacttcttctggcaggcaaaagcaagatgtccgcactcggcgctgctatgagaaagctcgctcatctgtgcttcggtgtactaaaaacacgctcaccataccgccccgactactgctaaacgcttgacgggcaagacggtat

SEQ ID NO: 4501 - DNA, 1725 bp, unidentified
  source 1..1725: mol_type = unassigned DNA; note = element_6daaa8e
  misc_feature 1..5: note = core
  misc_feature 6..698: note = LE
  misc_feature 699..1607: note = CDS
  misc_feature 1608..1725: note = RE
  misc_feature 185..391: note = bridgeRNA
ctgctataattcgtccataggaaaaactcggataaaaatgcagacatttcgcataatcggcgaaaacccttcccacgaaaatgcggcttccaagctcgttctggcggcagtccgattctttgtccttgcgaaatttgttcgctctaagcagcattcggcgctgctgtatgagaccgcagttcttcttttttcgccgttatcaacgcgcggatacgcgatgatataatatcctcatgcagacagaggttctcttcttttctccttgcggcgttcgtccgctctaagcagcgtgggacctctctcttatgagctttcatttatgagccggatgcgggatcctccgctgatatcgaagcagggtatgactcataagaccatgaggactgtctgtaaatcttatgttgaggtgtatgttatgttcattgtcggtatcgatgtcgccaagcgcagccacgaggtctgcatgatcacatcggacggtcagaccgttcagcgcccgttctccatccgcaacaactgcaccgggtacaatctcatgctggagaaaatcagaaaacacacgaacatcaaaagtcagatcgtatttgcgatggagtccaccgcgcattactggctggcgctctttacgcggctgcgcaaggacggctaccacgtcattctgctcaacccgatccagaccagcgccatgagggagggatatgttcatccgcaagatcaaaaccgataccaaggattccttcatcattgccgagctgatccgctttgggcgctatgccgaaagcaatgttgcacaggatcgtctgctggcgctgaaggagctgtgccggaaccgcttctatctggtcgacatggccggtgacctcaagcgaaagctgatcgcgctgatcgaccgtgtctttccggagtacgaggcgcagttcgatacgattttttgtaagtcatccgtggcgctcctgaaaaagtatccgacgccgcagaagctttccaacgcacatctggataagctgacggagttgctctggaacagcagcaacggtcacttcggcgagtggaaggcgcgcgaactcaaggagcttgcacgaaacagcttcggcgttgaagactgcgacggtgcgtattccacgctgattctcctgatgctcgaccagatccagtcgctctctgggaaggcagacgctctggaaaaagaaatatctcgactgtttcagagctttgatacgacggtcacgacgattcccggcgttggaccgatcattggagccgtcattctcagcgaagtcggagatatctcccgtttttcttccgcggacaagctcgcagcctatattggcgtcgatccgtctgtcaaccagtccggcgagttccaggctgcgcacgcgcatatgtccaaacggggctctccgtatctgcgcagatgcatctggatggcgtctcaggtcgctgtacagcgcgatcccatgttccgcgcatattacgagaagaaagccgcagaagggctcaaatacatgacgatcatcggtcatgtgacgaggaaaatgactgccgtggtatttgccattctgcgtgatcataaggtctatgagccggttctgccgaccgccgcatagaagcttcgcacccatatccgcctgctcacactccgtgagcctgcattgccgcgcccatttccagcggtgaccatttcatttcttctgcatttttatcccttgacaaatccatagccgg

SEQ ID NO: 4502 - DNA, 1417 bp, unidentified
  source 1..1417: mol_type = unassigned DNA; note = element_6dadef7
  misc_feature 1: note = core
  misc_feature 2..272: note = LE
  misc_feature 273..1307: note = CDS
  misc_feature 1308..1417: note = RE
  misc_feature 16..235: note = bridgeRNA
ctgatagaagatctcgtgcaggcgttacgggttcgctcgtagcgtgagaggacctgagcagcggtctcaataatgccctgccgcctgtggttggttggcttgcgaacgaagcggccgccgttcgggttctcgctgcggcgtggctcgaaagaggcgagcaatcacccttcatcaggactgcccgccgtggcatcccacgatggtcagcctgcagaacggacatgtcatgttcgtaatcgggatcgatccacaaggcgtcgcacacggccgcggtgctcgacgacgccgagtgtcttgtcggtgagctgcgcgtgaacgcggatcgttggcaacgagaccggctgttgcggttcgcggcgccgtttgagccgcgcacctgggcagtcgaagctgccggtggtctcggcgcgttgctcgcgcagcagctcgtcgcggctggcgagtgcgtcgttgacgtgctgccgacgttgtccgcgcgggtgcgactgttggactcgggccgtaccgacaagtccgacccccacgacgctcgctccgccgcgatcgtcgcgttgcgacacgccccgctgcgtccgatccgaccggttgaccattccgcggtgttgcgcttgttggcgaaccgtcaccatgacctcaccgcgtcgcggacccgcacgatctgcaggctgcatgctctgctctgcctgctgattcccggcggttccagcggtcgcttgagcgctcagcgagccggtaaggtcctgcggggtctgcgtccgatcgagctcgtcgacatcgaacgcaagcgcatcgcacacgagctcctcgccgacgtgcgtcgcatcgatgaccaagtcgaaacactcgccaagcgcaccgcagtcgcggtgagcgcgtcgggcaccaccgtcaccgacgtgtacggcatcggccccatcggcgccgcgatcaacatcggacacaccgccgacgtgacccggttcccgagcgccggtcactacgcccgctacaacgcaaccgcaccactcgaagcctcgtccggaccgcgcgtgcgtcaccgactgaacccgcgcggcaaccgccagttgaaccacgcgctccacgtcgccgcgatcacccaggtgtctcacgacactccaggccgggtctacttcgaccgcaaaatcacggaaggcaagacccgcaaagaagcgctgcgcgcgttgaagcgtcgcatcagcgacgccgtctaccgacaactcgtcgccgacacccgaccctggcttgaggggcccgggaggacagacgggaacgactccaaggccagcgtgaccggctctgcaccctgacggccggctcttcggtcaagtcactcccggacccaacaccaacgctacgcccacccgaccaacccctgctcgaacgcgcccgaaaacaggcccttgacacaaacaggctt

SEQ ID NO: 4503 - DNA, 1357 bp, unidentified
  source 1..1357: mol_type = unassigned DNA; note = element_6dafa02
  misc_feature 1..2: note = core
  misc_feature 3..79: note = LE
  misc_feature 80..1090: note = CDS
  misc_feature 1091..1357: note = RE
  misc_feature 1066..1345: note = bridgeRNA
cgatggggtggacgccccctgacggcatcgaagtgccaaagtggtggtgtttgagcgcaccactgcaaaggaggcgtccgtgagtgaagttaccaccattggcctcgatctggcgaaggctgtcttccaggcgcatggggctgacgcgaccggctcggtcatattccgcaagaggctccggcggaatcaggtgctatccttcttcgccgccctgccacgctgcctggttgcgatggaagcctgcgccagtgctcattattgggctcgggagatctccaccctagggcacgagacccggctcatcccgccagcatacgtgaagcccttcgtccaccggcagaagaatgacatggccgacgcgcaggcgatctgcgaggcggcgcagcggccgacgatgcggttcgtcacgcccaagagcgcgcaggcgcagggggcggcggtgatcttccgcacgcgcgaccttctggtgcgccagagaactcagctgatcaacgcgctgcgcggccacctcatcgtggcccagggacccggccatgtgagcaagctcatcgacctgattgacgatcctgcgagtgacatgccggccgaggctcggccggtcctggcaatgatcgccacaagcttgcagatgctccaatcaaacatcgcagagctcgatcgaaagatcgcggcccggtcgaaagccgatcctgtcgcaaagcagttgatgacgatccctggcatcggaccaatcgcggccacagccttggtggcattggcgccagcagcgcacacctttcgacggggcagagacttcgccgcgtggttggggcttaccccccagcagcattccagtggtggtaaggagcgtctgggcaggaccacaaagatgggcgaacgcagcctgcgcagactcctgatcctgggcgcaagctcggcggtcaaggtcgcggcccgcgacagatcgcgagccagtccggggctcgacggcatgctggcacgcaagccacgcatgctggtgacggtggcattggccaacaagattgccaggatcgtctgggcgctcatggcgcacggcggatcctacagagctccgactgctgcggcatagaagccgaggcggtcagaggcggtcagggaggcaggaaggtccgaagagaggtatggcgcaacggtcagaagacggggtcgggaaaaccagggaatatgtcccagcgcctcgagcgcgcggaagcggtgtggacccgacccgcgatctccatacaggccagcggtcccgtgaacggccgcaccagtaggccggacacacggacgcacctgaacctgagcgccaatcgcctcgacaaaaacctcttgcatccgaaggggcgtccacaca

SEQ ID NO: 4504 - DNA, 1349 bp, unidentified
  source 1..1349: mol_type = unassigned DNA; note = element_6dbd815
  misc_feature 1..2: note = core
  misc_feature 3..77: note = LE
  misc_feature 78..1112: note = CDS
  misc_feature 1113..1349: note = RE
  misc_feature 1146..1344: note = bridgeRNA
tgatgttatggacgcccctccctgaagtagccagtgccatactctattgactgcaattaattcaggagtgatatcacatgaacacaatcagagttgttggtatcgacattgccaaatctgtttttcaggtatgcgtctggatggttgatggttcaattgcatataacaagaagatctcccgttcaaaattgctggattgcgttcgacacttcgagtccggaacgcttatcgcgatggaggcatgctctacttcgcacttctggggcagaaccttcagaacgatgggatacaacgtcagactgatacctgcccagcacgttaaagcctttgtcagaagccagaaaaacgatgctaatgatgcgctggcgatttgtgaaacagcactccgccctggcatccactttgttccggtcaaaactgctgagcagcaggatatcaaagcgctgcgaaatacccgtcagctcatggttgagcaaagaacggcgctggctaaccagcttcgttctctgctcgctgaatatggtctcattatccctgtcgggatacagtgcctccagcagaacctgcctgaactgatggaagacgcgtcgaatgagttaacgttcactgtccgccgtttactttctacattgcgggaagacatgcaggcgctgaatgaacgcgtcaccggactggataaggaaattgctgcattgtcttcacaacaagctgcctatcgccagttgttaactattccgggagtcggcccgctcatcgcggcagcgtttatcagtgaagtggatgcagggcaattttccaacggcagagagttatccgcctggtgtggcctggttccccggcagcacagttcgggaggcaagcaacgattatcctccgtgacaaaaaatggcaatcgtagtctcagaacattaatcatccatggagcacggtctgtaatgcgctgtatgaaaaagcgcgatgacagtctgggcctttggctgcaaaggcttgaagctcgtcgggggttcctgaaaaccacggttgcactggcgaataaactgacgagaattatctggcgtgtgctgacagatggggttgattttaatatgcagaaggccgttgcgatgaattagctaaaaacagcaatttacagaaacttatttaactgagtttgcaggcactgatgagaaaacggctaccgtccctgtaacagcctgaagttgacctgggtaatcatataccggtgtagtgataaggaaacagggctcggatgacatcatggcgcgggtaaattaacccactaacgacgccggatatatggtcgcaaaccgtatcgaaccagtacttgtaacacccggggcgtccatata

SEQ ID NO: 4505 - DNA, 1189 bp, unidentified
  source 1..1189: mol_type = unassigned DNA; note = element_6dc0ed2
  misc_feature 1..3: note = core
  misc_feature 4..220: note = LE
  misc_feature 221..1168: note = CDS
  misc_feature 1169..1189: note = RE
  misc_feature 30..183: note = bridgeRNA
gattgtaagttaaatcttctttataatttatgtttaaggagtcaaactaaagtgtaaaactttagttataacctaagcgaccgtcataggatagatttaagcaatcgttgtcatcaaggtacttaggttatctccttaatacgtttgaatagttggatggtctataacgaccgcttacaatcgtaaacatagaacaaatatactaaggagatatttaaaaatgtatcataatttcataggtattgatatgtcaaaaaatgattttgtagtagctatacatggtagtaaaaaaacttttaaatatcttaataattctaaaggttttaatgatctgttagaaaaacatcctatacttaaagataacagtcttgtggttctagagactacaggagggtatgaaaaagctttgcttgaatatttattagttgaaaaaattatagtacatagagctaatactcgtgttgttaaacattttattcgttcaactggacagttagctaaatcagataatattgatgctataggtttagctagatatggctatgaaagacatgctcacctcgattgctataaacctaatgagaataatcttcaaaagcttgtaaaatatacacttagaaagcaagaccttaagaaacaattagctgctgaaaagaacaggattcaagctccagatcaagagtgtacaaaagaatctcatcaaagagtaatagagttccttgaacaagaaattgctattctagatagcttaatagataatcttataaaggactgtgaatatttaacaaaagcaagagacttgttagttaaagaagttgcaggtttgggaaaagctactgcagtatcattacttgcacttatgcctgagctagacaatttgaatcgtaagcaaatagcctctttagctggagtcgctccctatgcttatgaaagtggtaagaagattggttataggaaaacttatggtggtagagctgacttaaagccagtattatttatgtctgctatgacagcttctaggagtaatggaaagcttggaactttttacaataaacttgtcgaaagtggaaaaaagaagatggttgctcttattgctgttatgagaaaaattattgttatagctaacgctaaaattagagatttaaaaagagatttgaaaattttataagctataattattaacatagtt

SEQ ID NO: 4506 - DNA, 1371 bp, unidentified
  source 1..1371: mol_type = unassigned DNA; note = element_6dc953f
  misc_feature 1..2: note = core
  misc_feature 3..86: note = LE
  misc_feature 87..1115: note = CDS
  misc_feature 1116..1371: note = RE
  misc_feature 1118..1361: note = bridgeRNA
ttatgggatggcccgcccctctagcggccagcatttgctgagcagcttatgctggttcggataaccggaagggaaggagcacggctatggcgattacagttctaggaatcgacctggggaagaacagttgcagtgtggtggggctggacgggagcggtgcggttgtcctgcgccgacgtctgcatcgtgagaacgtgatcaagttggcctctgacctggcaccgtgcctaatggcgatggaggcttgctgtggagcgcaccacctcggccgcatcttgcgcgatcagggacaccaggtccggctgatatcaccggagtatgttcggccctacgtgaagtcgcacaagaacgatgattgggatgcagaagcgatcgcggaggcggcgacacggccaacgatgcggtttgttgagttgaagagctcggagcaacttgacatgcagtctctgcaccgcgtccgcgaccgcctggtaggtgaacggacggcattactgaaccagctgcgggcggttctgatggagcgcggcatcaccattgcacaggggcgtcgcaagctggagcagcacctaacagcgatgctggaaggcgacgaagtgcgattgagccgacgagtacgggccctgctcgaggacatgagggcggaatggtgcgagttggaccgtcgtatcgaagcgttcgacgacgagttcgctgccctggccaagactgacgacgccgcccgacgcctggtgagtatccccggtattggcgtgttgaacgcgacagccctggtggcagcgatcggcaatggcgccatattcgcccgtggccgcgaccttgcggcctggcttggcttggtgccacggcagatgacgacaggtggcaagccgcgccggctggggatcagcaagcgagggaacaaatatctgcgcaagctgctggtccacggtgcccgggcggccttgccatccttatcgtcgagcccgacgccgattgggcaatggctgcaaggtctgatggcgcgcgcgcacaagaacactgtcgtcgttgcgctggccaacaagctggcccggatcgtgtgggcagtgctacgccacggtgggatctacaatcctgctgccgtgagagcgatctgattgagattggccggccgcgctgacctgcgcagccggctgacgaggtctgtgggtggtggaaacgagatggcctgacagtcaaaccggcgttctggcaacctggtaccgagaatggcggtcacacgccgatatagttatgaggaccaggacgcggaaactccatcttggccgggctaagcccacaggccggatacgttgatgcagactgccaagagccaaatcgctgaaactgcttgccgacggggcgggccatacg

SEQ ID NO: 4507 - DNA, 1590 bp, unidentified
  source 1..1590: mol_type = unassigned DNA; note = element_6dc9fd9
  misc_feature 1..2: note = core
  misc_feature 3..256: note = LE
  misc_feature 257..1459: note = CDS
  misc_feature 1460..1590: note = RE
  misc_feature 12..276: note = bridgeRNA
ttagtaccataaaagtgtagttgttagagagtagttaactctgacatctgcacttatttttttataataaggggagtaattggtatggcgaggtcctttttggatttttacatccggcaaccaaaactgtcagccaaccccttattataagtattcgcttaagcaggtagggatcagctcccgtgtaaccaactaaaatgaatggtaataagtgtgggtggtaaacaattactaattcaagcacaggaggttatgtatgattagcataggtattgatatttcaaaggggaagagtacagtgtgcatgctgaaaccatatggagagattgttgcaagtccatttgaagtaatgcacacggagagtgaactgaagaatctgattcaaatgattcaaaggctggacggcgaaatccgcatagttatggaggcgacaggcatatatcatttgcctatgttgacggcacttcaagaccaaaaactatttgtagctgtgatcaatccgtttgaaatgaaggagtacgcgtccagagggcttagaagagtaaagacagataagcaggattcaattaccattgcaaactacgggattgataactggtatcggttggaaaatcatcaaggaaacgatgatgtgtattctgagctaaaacttctgggaaggcagtattgccattatatggaacttcatgtaaaggcactgcttgaattaacgcatatgttggattatacaatgcctggagtaaagaaggagtttcatagttggaatgaaagcaacggaaaggacaagttgagtgattttgttgagagatactggcatttcgataatataacggcaatgaccaaagaggattttatcgaagattacatttcttgggctgctgaaaagaaataccaccagaaccgatcaaaagcggctgagctttatgatcttgcatctgatggcatctcaacattacctgccaataccccatcgaccaaaatgctggtattggaagccgtaagggtacttcgagaaatcgacagtaccttactgaagataataacacgaatgaaagaactggcaaagacgcttcctgaatacaatacggtacgagcgatgggtggggttggagatgtcttggctcctaaactgattgcggagataggcgatataagaagatttcatagtggtaaggcactgattgcatttgcaggcatagatgcaccgccatatgaatccggtcaatttgtgggcaccaatcgaaagataagtaaacgtggctcaaaggtgctgcgtaagattggttatgagaccatgagagtcttaaaaacacacaaagctccagaggatgatgcggtataccagtttattctgaagaaagaagccgaaggaaaatcgaaacgtcaggctaagatagcgggactaaataagtttctgcgaatttattatgctcgtgtaagcgaagtttacaaagcataaagaactagaaaatacagcttattattggctgatgaaagtcagcctttttagtgtgcacaaaaataataagaatagggcaaaaagaaaaacctgctgggaaaagcaatttacgcttgacttttcttagcagg

SEQ ID NO: 4508 - DNA, 1372 bp, unidentified
  source 1..1372: mol_type = unassigned DNA; note = element_6dca0e0
  misc_feature 1..2: note = core
  misc_feature 3..85: note = LE
  misc_feature 86..1120: note = CDS
  misc_feature 1121..1372: note = RE
  misc_feature 1165..1367: note = bridgeRNA
tgatgtgatggacgcccctccctagtggccaatggcgtcatctttgccataattagattagttcgtttaatcaaaggagcatcgcatgaatattaaagtggttggtattgatttagcaaaacattattttcaagtctgcgttcttactgacgaaaacaagatacattccaataaaaaagtaaccagagctcgtcttttagatgtcgttcgtcaatttccagaaggcacattaatcgcaatggaggcgtgtggtagttcaaactactgggctcgtaccttcgctaagatgggctttgaaataaaactcattcctcctcaacatgtgaaaccatttgtaggtcatcaaaaaaatgatgctaatgatgctcgcgctatatgtgaggcagcatttagaccagatgttcatggtgttccaactaaaaccattgaacttcaagatattaaatcagtaaggtgcattagacagcgaagagtagagcaacgactggctgctgcaaatcaattgaaagggttagctggtgagtatggcgtgatcatcgctaaaagctttaaatgcttaagagaacaagtacctatcgctttagaagatcctgataatgagttatctctcgtcatgagacgaatgcttcatgatttactgactgaaattaatatgcttactgctgaaataaagtcgttaagccaagatcttgaagctctttgcaaacaacaaccacgttatcaggccctattatctattcctggatttggtccaattgtaacagctgcatttttaagccaggttggttcaggaaagcaattctcgaatggtaggcaattatctgcatggtgtggtctcgtccctagacagtttagctcaggcggaaaaaccagacttggaaagataaccaaaaatggtaataacgaacttagagcgttactcattcatggcgcaagatctgtttctaaatacacaccagagcgaacagatgcattaagccggtggtttaatgcgcttgcattgcgaagtggtaagacaaaagcgatagttgccctagccaataaattaacgcgtattgcctgggtaatcgttactacaaatgatgaatttaaagcgaattgtgcatttaaaactgcatagttaagcaagagaagtattaagtaagaaaagtttataccctagtttaagtttgcaatgcttgatgaaaaacggtcaaccgttcctgtaaaaacctgctttggggcttggcatttaagatgtcgactttgtgattaggagacaggactcggattacatcatggcgcaggttattgataacctactgagacgtcggatatatgacagcagactgttatcctcattaaaacttgcaataaccggggcgtccatata

SEQ ID NO: 4509 - DNA, 1555 bp, unidentified
  source 1..1555: mol_type = unassigned DNA; note = element_6dccb95
  misc_feature 1: note = core
  misc_feature 2..243: note = LE
  misc_feature 244..1446: note = CDS
  misc_feature 1447..1555: note = RE
  misc_feature 11..212: note = bridgeRNA
gtctcgtacaatataagtgtagagaaaattctctgcactttatttttttgatatgatgagagtgattggataacgtcaagtggtttgggtttctacacccgtcgtctagcgtgttaaccacctctcatctttgtgcattcgattaagcaagttgggattatctcccgggtaactaacgaacatgaatcaattatgagtctggtgctgccaatcttttttacctttaagaaaggagatttttgtatgattgctgttggtattgatgtttctaagtacaaaagtaccgttgccattatttctaataccggcgagatactgttgccacccaaagtatatacccatacttacagcgcactgctttctttagtttctttgctaaaaaagcaaaatgatgatatacggatagtaatggaggctaccgggcactatcactatcccattttaaaattgttattgggccaccacttttttgtttctgtcgtaaacccttacataataaaaaaatataacgacaataacctgcgcaaagttaaaacggataaacaggatgccatccgcttagccttttatgctttggaaaagtcctactgccttaacgcttatgtgcctgccggagaaaaatatgccgatttaaaatttttatatcagcaatacactcaaagaattcatattattcaaaaagaaaaaattaacctttgccatttacttgaagaatccatgccgggcctttatgatatgctttctaccagcgtaagaaacccaagtaaaaatttgctgtattcctttgttaagcgtttcaaaagctttaaccgtataaaacgtatgggcaaggaacgctttttaaacagttattttaaaatggctgccgaaataggcagcagaagaagaaaaaactatgcgttagatatttatgaaatggctaaggactgcattgcaacaggaagcaccgaaccttattccactatggcccaagaagaatgccttcgttcactgatactggcagaagaagcagccaacaggctctgcgaacagatgaacagtatcgccaatactttaccggaataccctttagtacgttctatgtatggggtaggtgataaaatagctccgcagcttattgcattaataggcgatattcgtaagttcaaaagcggcaaagcattaaatgcatatgcaggaaacgatgcacctccatatcaatccggacagttcgagagtaaaaaccggcatatctcaaaaagaggttcaacagaattacgcaaagtatgctttgaaatcatgtgctgcataaaggtacataaatcacccgaagaccctatttataaatttatgcaaaagaaagaaagcgaaggaaaagctaagaaagtagctataatggccggaataaataagtttttaagaatatattacgcaagggtaagtgaagtatatcaaaaagctttataaaattaacaacatcaatatctgttaaaatacaaaaagcagcaaggtttattaagtgcgcccttttttatctttataaaaaatttaaaaatctcttgacttttcttagcaa

SEQ ID NO: 4510 - DNA, 1256 bp, unidentified
  source 1..1256: mol_type = unassigned DNA; note = element_6dd0c78
  misc_feature 1: note = core
  misc_feature 2..190: note = LE
  misc_feature 191..973: note = CDS
  misc_feature 974..1256: note = RE
  misc_feature 1015..1255: note = bridgeRNA
attgaaatgaacacgtcccacccgtcaacggtgaacaggatctgaaggtgaaccctcacgggccgacggcaccgagtgccaaagttgggagatcatcgagatcttcataggcaagcaggagggtccatcatgcctgatcggcatggaagcgtgtggtggcgcgcagcactgggcacgagcgctgagcaggatgggacaccaggtaagactgatccctgcggagtttgccaaggcgttcaacatccgaaacaagaatgatgcagcggacgcacgggcgatctggctggccgttcagcaaccgggtcgaccggtcgcgatcaagagcgaagcacagcaggcggtgctggcgctgcaccggatgcggcagcagttggttaaattccgcacgatgcagatcaacagtctgcgtggcttgctgaccgaatacggcgaagtgatgggcaagaaccgctcggcgctggataaagcaatacccgccgtgctggcaagggttgcagagcgtctgcctgcggtcctgatcgatacgctgcgcgagcagtggaacggattgaccaaactggatgagcagattgctgaaatcgagcggcggttacgtcagtggatgaaggaagaccaggcggtcaacgcgattaccgcgattctgggtgtcggcgtactgacggcgacagcggcggttaagtttgccgcctggattggacttgtgcagaagcagacgggctcgggcggcaaggtgaacctgctgggtatcagcaaacgtggagatacgtatctgcgcatgctgctgattcacggcgcgcgcagcgtgctgcatcacgcgaaggaaccgggtccgtgggtcgagcagatcaccaaacgacggccggtcaatgtggtgatcgtggcgctcgccaacaagatggcgagaatgatctgggcgatcctggcgcatgatcggcagtaccagaaagggtatgtcagcgtgaagccggcatgaactgcggttggcactacgaaggagaataactttaacgcagggtgatagtcgaaaggttgcgttggaaatcgtatgcgatgacaaaccaggtaggaccaggactcgctaaacctgaatgtgcataggagctatgagctcgtgaagtgaatgaggagcgagtcagcggatttcatagtggcccgcagcggtagcatccgctgcaacaaggccgaatatagatctgcagccaatcctgtctgtcagaacacacgaaaacttccgcaaacgggacgcgttcatatag

SEQ ID NO: 4511 - DNA, 1451 bp, unidentified
  source 1..1451: mol_type = unassigned DNA; note = element_6dd3790
  misc_feature 1..2: note = core
  misc_feature 3..227: note = LE
  misc_feature 228..1436: note = CDS
  misc_feature 1437..1451: note = RE
  misc_feature 12..194: note = bridgeRNA
gccctacctttcttttgcgccctcggtcgtccggaaagatcggggtgtgcgggcggggccggtatggcctccatcacgctgctgctgaatggctcaggtggctctgccgccggtcccgccaccttgttctgaccgctgattaggcgctgcggaccatcgttgagtagggcgttgacggcggaacggggttgccgcgcaacgatctgcgacgacgaaccggaggacccgtgacgctggcggtgggcatcgacatcgcgaaggaattccattgggcggcagttgtcgtcgccgaaaccggccgagaactgatctcgcggcgggtcgacaacgaccccgaggcgatcgcaggattcctccaggagctggaccaggccgtcgccgaacacggcccactcaccgcggggatcgacgtgctcggcggcatcgccgggctggtcaccgtgatgctcctggaacaccgacatcgcctggtacacgtgcccggactgacggtgaaccgctcccgtcatggcacccgtggcggcgaacacaaatccgacccccgcgacgcacgggtcatcgccgatcagctgagattgcgtggcgactggcggccggtcaccctcggcgacgaactcaccaatgacctgagcctgctggtcggcagacgccgcgacctggtcactgagcagactcgccgcatcaaccggacccgcgacatgctcgccggcatctttcctggcctggaacgtgtcgtggacctgaccaccttgtgcggtcttcgcctgctggccaggtatgtcacccccggcgagatccgtcgcgcgggccgttcccggatcgtggcctacctgcgccgcaacggagttcgcagcgactatgccgagcgactggccaccgctgtggtcgaggctgcacatcatcagcgcgttgtcgtgcccagccaggagcgcatcgcccggttcgtgcgggaacaggccgctgacgcgctcaccgcccgagaacggctcgtcgcggtcgaggccgagatcggtgaggtgctcgcccgccaccctgacgcggcccccatccgcagcatgccggggatgggggccaccctcacagccgagttcctcgccgagatcggtgatctggcacggttcgccaacgctgacgccctggccgccgcgtccggactcgctccggtgctccaacaatccggcaagatgaactacacccgccgggccgttggcggtgccaagaacctcaaacggatcttcttccgatccgccttctgcgcaatccagctcgaccccgctagcaagacctactacctgcgcaaacgcggcgaaggcaagagacatacccaagcagtgatcgccctggcccggcgacgagtcaacgtcctctacgccatcctgcgaacccgccaaccctaccgggccaaccacgccgcgactacgaatactgctgcttgacaaaagcattagaca

SEQ ID NO: 4512 - DNA, 1283 bp, unidentified
  source 1..1283: mol_type = unassigned DNA; note = element_6dd407a
  misc_feature 1: note = core
  misc_feature 2..69: note = LE
  misc_feature 70..1098: note = CDS
  misc_feature 1099..1283: note = RE
  misc_feature 1059..1280: note = bridgeRNA
gaatgacatggattccccctcttgaagatctgccacacttaggtgcggcctttaataccggaggtaaccatgtctactccattcttttgtggcgttgatctcgccaagcaccacttttctcttcacgcggtggatgaccacggaaaagtcattctccataaatctgtttcacgcgctaaactactggctacattagcaaatatgcctacgatgtgcataggcattgaggcctgcagtggggcacattattgggccagagaattcaacaagctcggtcacgatacccgtatcatggccgcaaagtacgtcggtccttatcgcacaaaaggaaaaaatgacctgaacgatgccgttgccatttgtgacgctgttcagcgtccaaacagccggttcattcctgttaaatcacccgaacgccaagcgattctcgccatacatcgtgtacgtgaacattgggtcaatgaacgtaccgccctcattaatcgtattcgtgcattactgccagagttcggcattattattccaacaggacgggccgccgttcaccgtcaagtaccactcattctcgaggcagcagaaaatggcctgcctgatattgctcgtgctgtcgtggcagattgctttgaccacctacaaacacttaatcagcgtatcgccgataccgagcagtgtttcgatatggttaccaaggccagtcctaatgcccagcgtattcttaatgttcgcgccattggcccacaaacagcaacggcgattatcgccactatcggaaaaggcgagcagtttgattccggtagagactttgcggcttggcttggattagttcccaaacagtactcaaccggaggaaagccacgattgggtcgtattagtaaacgaggagataaatacctcagaacgctcttagtgcatggtgcgagagccatcatcacgaacctaggcgataagcaagatagactcagtgtttgggggcgaaacgtccttgagcgacgtggcatgaaccgcgccattgtctctctcgcggccaaaatcgtcgctgtcataaggagaaatacaccaaccgggtcattgcacacgcaagttgatgagtatcggtgaagaccatttgcagagagcctgttaatgcggcgggcaccttgatgccttctaacgaattaggcactgcaaccgcgcaatgtcatcagggccatgacgtgagtcagtaaaaggccgaatgtagagcggcagtccaaaccaaactcaatacgcttcgcggatgcttgacgaacgggggaatccatgta

SEQ ID NO: 4513 - DNA, 1476 bp, unidentified
  source 1..1476: mol_type = unassigned DNA; note = element_6dd6f88
  misc_feature 1..2: note = core
  misc_feature 3..234: note = LE
  misc_feature 235..1455: note = CDS
  misc_feature 1456..1476: note = RE
  misc_feature 7..228: note = bridgeRNA
ctaatgggagtcgaccacttcgcttcatgactgggtgaggctggttgccgagccaccatcaggtgagcactggagtggccagggcttcgagccttagttctagatcgtgcccctgatggtcggtgaggttcccgtgacggctggtgggatgtcgtgcctcgagcactgtccattaggaggctgctggggtcctcgggctcgtgttggtgccggtcaacgaggagaggagatccagtgatctttgtgggggtggattgggctgaggcccaccacgacgtttacgtggaggacgcggacggcacacgccttggcggcggtcgtcttcccgaaggagtggagggcattgcccgcttccacgatctggtcggtgaccacgtggaggagcccagtgaggtgatcgtcgggatcgagactgaccgggggctgttcgtgacggctttggtggcggccggctacgaagtgtttgccgtcaacccgatgtcgacgtcgcgctatcgggaccggcattcgacatcgggggcgaagtccgatcccggggacgccaaggtgctggccgacatggtccgcaccgaccgccacaaccaccggccggtggccgccgactcagagacggtgcaggtggtcaaggttctggcccgggcccatcagacgatggtttggtcgaggaggcgccagaccaacctgctgcgctcgacgttgcgggagttttacccggcggcgttggtcgcgttcgatgatctggccagcggcgatgcactcgaggtgctccgaatggcgccaaccccagagttgggccggaccctctccctgtcgaagatcgccgccgctttgcgtcgtggaggccgccaacggcgcatcgaggagcgggctgccgaggtccaaagcgctttgcgctccgagcagctcgccgcaccggcggcagtgtcgagcgccatgggggcatcggtggccgccggtgtggcggtgatcgccaccatggtcacccagacccgctccctggccgaggagcttgaagcgggttttgagcagcacccggatgccgaagtggtccgatccctgccaggactggggaccatcctcggcgcccgggtgctgggcgaattcggcgatgagccgaaccgctactgcaacgccaagtctcgcaagaactacgccggcacgtcgccgatcacccgggcttcgggcaccaagcgcgtcgtgctggcccgttacgcacgcaaccaccgcctggccgatgcgatctacctctgggccttcgccgctctcagcgcgtcacctggagcccggaccctctacgacacccgaagggctgccggtgacacccatcacgctgcactccgggccctcggcaatcgactggtcggcatcctccatggctgtctcgagcaccacagcatctacaacgagaccatcgcctggggtcaccggacgaccccgcttgccgacgttgcttgacagtttgtggccgtgggatgt

SEQ ID NO: 4514 - DNA, 1207 bp, unidentified
  source 1..1207: mol_type = unassigned DNA; note = element_6dd72fa
  misc_feature 1..2: note = core
  misc_feature 3..194: note = LE
  misc_feature 195..1178: note = CDS
  misc_feature 1179..1207: note = RE
  misc_feature 33..196: note = bridgeRNA
cttgtattataatacctaaaacaaaaccccattataagcaaccataatggggtttgtgagaaagtagcgttgtttcgccccttgtgcttaaaagcacgcagtgtagatgttagcctactttctcatccatcatcaccccgaatggtatcttaggcacgttgttgtagcctgtattcacaaggttggaggtttatatggatgatccattatactacattggtattgatgttgccaaacataagtttgatgttgctgttaaactgcccaatggcaaatacaagcacaaggtgttttgtaatcatcatcaaggctttgatgagtttatctgttggcttaatgcctttgatggtcgcttttgtgctgttatggaagccaccaacatttatcatgaagctttggcggattgtttggtggcacaaaacatcatggtcagtatcatcaatcctaagtgcagtgccagctttgccaaaagcgataacctacggtcaaagacagataagattgatgctaagctcttagcagactatgcttgtgaaaaaggacataagcttgtctgttatcagcccatgctacctgcccaaagacaactgcttcgtaaaagccgtcagcttgatcatttaaaggacaagcttgctcaagaaaaggtacgtcttagcatgctcattgatgaagattgtattgcttataccaaagcgatgatagacttcatcaaagggcaaatcaaagccttacaacaaagcattcgtcagtgcgttgccagtgatgacactttaaagaaaaatgtctcattactgcttagcattcctgccattggctttgacagtgcggttaaactcatctgctacttaggtgacggtagtcgttttaaaaatgcaaaagcagcagcagcttttgcagggcttacacccatgattaaatcatcgggtagtagcttacatcaagtaatgggcatttctaaaatcggacaagcagacattagaaaagccttatattgccctgccatgaactttgcctttggtcgttataaagacggtgcttatcgtttgtttgtagatagactaaacagccaaggcaaggcaaaaaaggttgtgattaccgcactcatgcgtaagcttgtcagtattgcccaagcggtactacaaacacaaaccccgtttaaattagagttacatcgttgagatggattgggggttgtggtttatggtat

SEQ ID NO: 4515 - DNA, 1452 bp, unidentified; identical to SEQ ID NO: 75
  source 1..1452: mol_type = unassigned DNA; note = element_6debf91
  misc_feature 1..3: note = core
  misc_feature 4..217: note = LE
  misc_feature 218..1438: note = CDS
  misc_feature 1439..1452: note = RE
  misc_feature 13..202: note = bridgeRNA

SEQ ID NO: 4516 - DNA, 1197 bp, unidentified
  source 1..1197: mol_type = unassigned DNA; note = element_6df9252
  misc_feature 1..2: note = core
  misc_feature 3..191: note = LE
  misc_feature 192..1184: note = CDS
  misc_feature 1185..1197: note = RE
  misc_feature 9..200: note = bridgeRNA
cttgtgtcttgcggttcacggatcgctaccatgaaccgtattgggctcgggtaacccgtcaggctcctgaggtcacgaacctgttctgtagattggccccgagtcctttctcatctcgaagtttgaacggtatccaagacccccctccgtgacggacgggtgaggctgtacggacaaggcgagaggacgagatggctcatattggcgttgatgttagcaagaacaagctcgactgcatgtgggtccgggatctggaggcgggcaaggtgaagcccaaggtgttcccgaaccgccaagaccagtaccgggagctgctgcactggctcgagcgcaacaccggcgagacccccgaggggctccatgtgtatctggaggccactggcatctaccacgagccgctggcgtactggcttcatgatcagggggtgcaggtccacgtgctgaacccggcccaggtgcgttcgcatgccaagggcatgggggtgcgcaacaagaccgaccgcaaggacagcatgatgctggcccgctacggcatcgaacgcgcaccacggcgctggcagcccgaaccgccggaggtgcgggaactcaagcgcctgctcagccgcctggaggctctggaacaggatatgcggcgcgaagagaaccgcctggagaaggcgcgtttcagtgaggacaccctcgctcaggcgtcgatcgacaacgtcctgcaggccctgcgtgaggaacaccgtcggctccagcagcagatcgacgatcacttcgacgcccatcaccacctgaagcgggatcggaccttgctggagagcatccccggcatcggccgcgtgctgtcggcctcgatgaccgcagcgctgcgcagccgcgcgttcacgagcgctcgacaagcggcggcgttccatgggctggcgccggtcctggaagaatcgggggccacggtccggcggccctcgcggttggcaaagatcggttccagccgactgcgcaaggcgctctacatggcggcggtggtggcgacccggtacaacccggacgtgcgacaccaacatcaacgtctgctgacacgcggcaaggccaagatgtcggcgatcggggcggccatgcgcaaactcctgcacatcgccttcggtgtgctcaaatcccaaaccccgtatcaagcccgccatgaaaccccttgcaccccgtagggcaagacggtat

SEQ ID NO: 4517 - DNA, 1393 bp, unidentified
  source 1..1393: mol_type = unassigned DNA; note = element_6dfb807
  misc_feature 1: note = core
  misc_feature 2..87: note = LE
  misc_feature 88..870: note = CDS
  misc_feature 871..1393: note = RE
  misc_feature 1162..1388: note = bridgeRNA
taatggaatggtcgcccccttccggaaacggcatcattgtgccaaagtggaactgcgacgtaccactaactgaaagaggcgaccaaaatgaagattactacattcgggattgatctggcaaaaaacgtatttcaagtacatggcgtgaatgaacaaggtaaagcgttagtcagaaaggctctgcgacgcgatcaagttttggaattttttattaaattaggtccttgcttaatcggtatggaagcttgcgctagcgcgtactactgggcgagaaaattgcaagcgcaagggcataccgtgaaattaatggcccctcaatatgtaaagccctatgttaaaacgaataagaatgatgcggcggatgctgaggcaatttgcgaagctgtaggtagaccaaatatgcggtttgtgccgatcaagaatgttgagcaacagtcagtactgtctttgcaccgagcacgccaaggtttcgttaaatcacgcacggctcaggctaatcagattcgaggtttattgtctgaatatggcattgttattcaacaaggaatttgcaatgttacgaaacgcctccctcatattctggaggaatatgcaaacgagcttccaggagctttttgtcagttaatccaacgacttggcgatcatttaaaagagcttgatcgtcaagttggcgaattggaagtacaaattaaaatttggcacaaacaaaacgaagcaagcaaaaaattagaagaaattccgggtgttggtccaattacagcaactgcgatagtggcctcaattggcgatgccaagtgcttcaaagatgggcggcaattggctgcatggttggggttggtaccacgtcagcattctagtggcggtaagtaaatgttattggggatcagtaagcgcggcgattcttatttaaggacattgttgatacacggcgcgagagctgttcttagggcggccgaacgcaaagtgcagcatgcgggaagttggttggctaatctgatggaacgcagaaatttcaatgttgccgtagtagcactggcgaataaaaatgctcgaataatctgggctctattggcgcatgaacgtaaatatcagaatagctttgtatcaggtcattaagaataaactgtacgctacagcattaaacaatagaaaggaaatgctccgcagattgcataggcaattatgaagtgatggcaagacaggttagaccgtggtaggtgaaacctatttgacacaaggagcgtaaagctcgagaggctgttgaggaacctaccagcaaattccatcagggacagaggcggcagccttgattaaaagtccggatctatggctgcaatctctaccttcttaacatcagtgaataaaagcttggcaaaatgggggcgaccatcta

SEQ ID NO: 4518 - DNA, 1481 bp, unidentified
  source 1..1481: mol_type = unassigned DNA; note = element_6dfc214
  misc_feature 1..4: note = core
  misc_feature 5..310: note = LE
  misc_feature 311..1132: note = CDS
  misc_feature 1133..1481: note = RE
  misc_feature 1248..1479: note = bridgeRNA
taatggtgtggacccactaagctgaagatgctaaaaacagattaactgtgtatagtatcgatagaaagtaaattaacaaccaagaaggtccacaagatgattgtaaatgaagttgcaaagaatgtcgaaaaaattatttctattgatacagctaagaattctttttaggtattggtggtaaaccagaagacaggtaaaaagaagaataccaaggtacagcgttcaaaatttgttgagtacattttaaagcaggggcgttgtctaatctttatggaatcatgttcagcaagtcagcactgggcaagactatttgtttgaaagttttggatttacggtaaagctcattgctgcacagcatgtaaaggcatttctcagaaacaggagagtcaagaatgatgagagagatgcagaagctatctatacatgtggcatacagcctgataccaagttcgtaagaataaaaacagttgaagagcagacagttgcattactgcatactttaagaaaagctgcagtttcacagagagttgaacttagcaacagaattagaggtatccttgctgaattcggaattgtagtcgccagaggcaaaggcagttttaattcagaaatagaagctatgtttaatgaatgcgaaaagatacatgatgttaatttaatagcagctataagctctctgtttgaggattaccattacctggaacaaagagaaaaagaactgtcagagaagattgagtctcttaataaagataatgagcttgttaagatagctttaacctgtcctggagtaggtcctcttacagccagtgccattgtagctgaggttggtgatgcatcgcagtttagaaatggtcgtgaaatggctgcatggaacggtgttgttccaagtcagcattctacaggaggtcgttctaccttaggtggcataaccaagactggaaacagatatctcagagcgctcttagcacaatgtgcctgtgcggttatacagaatgcatcaaggcatcttgaacagggaaaggatacacaccttgacagatttgctctgaggctaaaactaaatggcaaaccagcaaagaagatcatgattgctgttgccaataagataatcagaatattatggcaatgctaactcaaaggaaaacatttgaaaacaaagcaaatgagatatcagatacatctgctaaactacagcttgcttaaaaagatttgttataagaactcttaggagaaatagcaaaaaagttcccaccagggaaatgcacagagaaagataaatttggcataacaggtaaaaccggactgtatcaaacctgaggactataatggtatgaaataccgcatgtttaattaaggaatacagtcgcaaacaccatagaggtcagagtaggcatactcaacaagagaccggatatatagctgcatttactacgttatgaaaagttatcaaaatctcttgcaagtttaagtggggccatata

SEQ ID NO: 4519 - DNA, 1613 bp, unidentified
  source 1..1613: mol_type = unassigned DNA; note = element_6e011d9
  misc_feature 1..4: note = core
  misc_feature 5..292: note = LE
  misc_feature 293..1489: note = CDS
  misc_feature 1490..1613: note = RE
  misc_feature 27..312: note = bridgeRNA
gtttggtacaatataagcgtagccctatgtcaagtattttggtatagtcagctatgcttatttttgttataataaggaggtaacgggctgacggttctttggtgaacttcgtgttcgggcagtaaacagtcacccaccttcttgttatagagattcggttaagcaggttgttctgttttttcggggttggggtaccccaaccccgaaaaaatacgttcgcgtcacaagccaaagatgagtcgtaataagcttggtggaaacgttacgaaaaaacaaagagaaaggaaattttatgatcagtgttggaatcgatgtttcaaaaggaaaaagcacagtgtgctttttcaagccgggcggcgaggtgttgatcacgccatatgaagttacgcacacgaaagatgagctgggacaactcgcagaccgaatcaattcttacggagaggaggtacgtgtcgttcttgaaaacacgggatattaccattggtctgtggtaaaggtacttgttgatcacggcatttttgtttcggcagttaacccactgaaaatgaagaggttttgttcccaaaacatcagaaaagtaaaaaacgaccgcatagatgccatacatatcgcatcctacggtcttacctattggcatgagcttatcccaatacagagcagcgaggacacctacagagagctacttctgctatccagacaataccacaacgtaataagcctgttgatcaaggcaaaaatgaattttggaaacttgcttgatcaagtcatgccgggtattacttctatcatcagagacgatcgaggctctaaattaacagaattcgtaaagaaatacgtgcattttcagcatattgattctatgggtgaagctcgcttcgttcgggatttctgcaaatggtcacaaaaacagggataccgagtagatcacgaacgtcaggcaagaaagatcttcgcccttgttcaaaacggcatccctgtgcttcctcacacaccaaccactaaaattgttgttttggaagcattacggagagtcaacgagcttgaaaactcccgtgacattattttagcacacatgaacgagcttggcaagacccttcctgaatattctttaatttccgagatgaagtgtataggcgaggggttaacaccgaggatcattgcggagattggtgatgtcagaagatttcacaacaagcactctcttattgcctacgccggtattgacgcgccgcctttccaatcgggatcgtataccgcgatggagcgtcatattaccaagcgaggcaacaaatatctgcgcaaggtcatctatgaagtttgtctgagttacatacaacacaagcccgaaggcgaccctgtgtatgagttcatcgagaagaagcgttccgagggtaaatgcggaaaggaagccttagttgccggcattaacaaattccttcgcatttactatggtaaagtcaccgatctctaccgtgaattagaactctgattacatacaaccgaatatctctcgggcgaaaaaatttatcccttttcgcccttttggtgttgctcctgttttctcaaaatttttctcaattattttcgaaaaacctattgacttttcttagcag

SEQ ID NO: 4520 - DNA, 1352 bp, unidentified
  source 1..1352: mol_type = unassigned DNA; note = element_6e0de64
  misc_feature 1..5: note = core
  misc_feature 6..239: note = LE
  misc_feature 240..1304: note = CDS
  misc_feature 1305..1352: note = RE
  misc_feature 23..222: note = bridgeRNA
cttttatatttactgagaattttaaaaaggtcattatattgttgttatgcaaaatatattgactgttcgtgttaggccagagcaggcgaggtaagctaagctataccgtaaaaaaggtttgaccggcacgattttattctcaggagtctgaacagtacttaaggccatcagcacgagcgtgaataaaacaaaaggatagacgaaggaggattaagtcgatacgatttaaattcttgattatggctattattaaacaatcagttgggatagatatctcacaagcaacattcacgggatgcgtatgtcagcgttctgaggaaggtatattaacgttctcaaaggtcttaagctttagtaatgatagtaagggctttaatcagtttcttcgctgggtgaagggaattattattactggaccggaattggtatttctgatggaagcgacaggtgtgtattacgaaaatctggcacaccatctttatagaataaagaaaacagttcatgttatacttcccaacacctctaaacactatttttcgagtctgaatattaagactaagactgatgttgttgacgcaagaatcctaagtcaatttgggaccgagcgagctcacaaactgtggataccacctcctgcagcattgttacagcttagaaatctcaccagatactatgttcaattgcaggaacaaaaaactgcccttggcaatatcaagcatagtaaggattgttcgcatgatgtgcagacctttatcatcaagagtaatcaaaagttagtcctagagattgacaaagaaattgccaaatgtgtaaaggaaatcaaaaggctgattgaaagcgatagtattctgaaggaaagaataagaaaactctcaaccataaaggggatgggattgatcactattgccactattcttgctgaaaccatgggattcgagcaattcggcagcgcaaaacagctagtaagctatgcaggctatgatgtagttcaaagagaatctggcacctcgataaaaggcaagaccagaatttctaaaaagggcaatcgatacattagaaacgccttgttctttccagcaatggttgcttgcaggtttaatccgactctgaaagaaatctacaccagaattaatcaaaaaaaagcctcaaagatgattggacaagttgcaattcaaagaaagctattgatattgatctacactttatggaaaaatgataccgagttcattcagggctataaacaatgtagtcccagctcgaaagctgagactaccctagatagttcaataactgaacttctttgaaatacaaaaatacttttttgtctaaatatttggaatttaaaacagtac

SEQ ID NO: 4521 - DNA, 1611 bp, unidentified
  source 1..1611: mol_type = unassigned DNA; note = element_6e112c7
  misc_feature 1..2: note = core
  misc_feature 3..295: note = LE
  misc_feature 296..1465: note = CDS
  misc_feature 1466..1611: note = RE
  misc_feature 40..272: note = bridgeRNA
ctcgtattatatagtagtagtttttaaagaccctctccaaggtctttattactattaaagtcatagtctcttctttacctcttctgtaggtttgactatgatatataagatgctgtggattggttctcacctcctaccactcgatggttttaggaaggctccaaccacagtctctttgtacatttgttaatcagttagataccgcatgacggtttatttagaacgaggttacaatcgcaaggagtccctgtggttctaaaacagtatcaaatacattcaaaggagtttatatattatgatttacgcaggaattgatgttgcaaaaaataagcatgattgctttatcactaactctgatggagaagttcttttcagagccttcaccatcgcaaacaacctagatggtttcaatgagctttatcataagattgaatccgttatggaagatttgacaaaagtaaaagtaggacaagccactggacattatagttacaatcttagatatcccattgataaaggtttggccgcctatgttatcaacccgttacatacaaatctgtacagaaaaagtctaagccttagacagacgaaaacggataaagtagatgcccgcacgattgcttctatgctaatgtctgatgtgaacttaaagtcctactccgacacatcttatcacaatgaggagttaaagtcattaactcgttatcgttttgataaagtaaaagaacgtgcaaaacttaaaacgtccgtttcaagacttatctgtatcttattccctaaattagaaaagttggtgccaacacttcatatggcatctgtttacgctttgctatctgaatttcctagtgctaaacatgtagcaaatgcacatcttaccagactttcaaatcttctcatcgaagcatccaaaggtcgctatggtaaagatacagccattactttcagagaagctgccagaagttcaattggttccaatatgcctgcaaaatcgctcgaattaaagcataccattaaacttattcaggaactcaattcagagattgacgaaatcgaaaatgaaatagaaatcattatggatgaaatcacttctccaatcttaagtattcctgaaataaactatcgcatgggtgccacgacaattgcagaaatcggtgtttttaaccgttttggttctcctgataaaatactcgcttatgccggcttttcaccgtcaacataccaatccggacaactggatggtgcatactcacatatggaaaaacgaggttcccgttatcttagatatgcactatataatgcagctaaatatgtctgtcactgggatccagcctttgctgaataccttgccaagaaacgttcaaaagttaaacactaccatgtagctattccacatgctgtaaaaaaactggtgcgagttatctatcatttagaaaaaacaaaacagcactacatcaaagcatcttaaatcttttcaactcaatactccttttttgagcaccgataacgatgctctatttatcatgcaattttcaaggtcctgatatatctgaaatacatttctgtaattcattcaaaaaatcttcattttagacttgacatttaatagttagt

SEQ ID NO: 4522 - DNA, 1360 bp, unidentified
  source 1..1360: mol_type = unassigned DNA; note = element_6e114cd
  misc_feature 1: note = core
  misc_feature 2..77: note = LE
  misc_feature 78..1103: note = CDS
  misc_feature 1104..1360: note = RE
  misc_feature 1133..1352: note = bridgeRNA
taatggaatggtcgccccctacattcttgtgccactgtgggacgataaatcgtcactacttgaacggagcggccatcatgaacgttaaggctatcggcatcgatttggcaaaagaggttttcctggtccacggaattgacgaacacggcaagcggttgttcaacaagcaacttaaacgagtaaaaatactttccttttttgccaacatccctccatgtttgatcggtatgaaagcctgtgcttctgcccatttttgggccggcaaactaatgtcgatgggccataacgtcaagctgatggcccctcagttcgtcaagccctatgtcaaaaccaataagcatgatgctgcagacgcaaaggctatttgcgaagccgtcacacgacccaacatgcgattcgtgctggtcaagtcccctgagcagcaagctgtattggcacttcaccggagtcgtcagagtttcatcaagcaacggaccgctcaggcgaatcaaattcgggggctattggctgaatttggcatcgtcgtgccccgggggatccagcagctacaactgcagttacctgagatcctggaagatactgataactcgttgccatctctgttccgtgtacagctgagtctgttacagtaccatatggcatatctgttcgatgtcattgctacgctcgacaagcagattgagcagtgctaccgccaaaatgtgctatgtcagcgtatcagcaagatcccaggcattggctcgatcaccgccaccgcacttattgcgactatcggcaacgccagcaatttcgaaaatagccgacagttgtctgcgtggttaggactggttccacgtcagcattcaagtggtggtaaacaagtcttgctcaggataagcaaacgaggcgatatttatttacgaaccttactcattcacggtgccagagctgtgttacagtcggtcaaacgcaaacaggatgctgcatcgggatgggccagtcgactactggctcgtcggaataacaacattgtctcggtagcattggctaataagaatgcacggattgtgtgggcactattggcaaaggagcaggagtactgtgcaccagtgatgaaagtttaagtatctgagtcagtaagacagaaacaacaccaccgattgttcaggcaagcatgaagtgatggcaggacaggtcaaaccgtgatggggaaaacccggtttattcaaggctcctgaaagagcgctttgttgatagaggcctccatcagggacagaggtgtttcacatcacctcggcaaagtccggatctatggctgcaattgatgacctgcaaatgcaccacaacatatttagcctggcaaacaggaggcgaccatcta

SEQ ID NO: 4523 - DNA, 1449 bp, unidentified
  source 1..1449: mol_type = unassigned DNA; note = element_6e11f3c
  misc_feature 1..4: note = core
  misc_feature 5..238: note = LE
  misc_feature 239..1432: note = CDS
  misc_feature 1433..1449: note = RE
  misc_feature 1..242: note = bridgeRNA
ccccgttaccgtcttggtgagccttgaagcaaggctcctggtcgccggccccggcatgactgactgcccctgtcgtttgcatgatccggggggtgttgtcaccgggtgctggtggcgctggtggaccgctgatagggaccgggccgcccgaacgcctgggtaggtctcttcgtaacgtggatgtcggcttcctgcgcctgatctggtgaccagccgctcggacgcacgaggagggaccatgtctcgacctgactacgcggtgtacatcgggctcgatgtcggcaaacagacgcaccacgcctgcgcgctgaacgtcgatggcacacggctgcacgacaaaccgttgccccaagacgagtcgtcgctgcgtggcctgctgaccaaactcggcacgcacggtcgcctgctggtggtggtcgatcaacccgcaacgatcggcgcgctgccggtcgcggttgctcgtgccatgggcgtggacgtcgcctaccttcccgggctggcgatgcgccgtatcgccgacctgcaccccggcaacgccaagaccgacgcaagggacgcgtacgtcatcgccgaagccgcccggtcgatgccgcacgccctgcgacgggtcgacgtcggcgacgacaccctggccgacctggaagtcatcgtcggcttcgatgacgacctggccggacaggtcaccgcacaagcaaaccggatcagaggccttctgacacaagtgaacccagccctcgaacgtgtcctcggcccacgcatccaacacccagcagtcctcgaactcctgacccgcttcggtggcccgaccggcctgcgcgcggccggccggcgacggttgctcgccgtcgccaaaccccgcgcgccccgctcctaccaacgcctcgtcgacgacatccagacagcgctcaccgagcagaccgtcaccgtccctggcacccgcgccgccgagctcgtcctgcccaaactcgcgaccggactggctcgcctgctgcacgaccgcgccgatctgggaacccaactggaggacatgctcgatacccaccctcttgccgcggtcctgacctcgatgcccggcatcggcgtcaggaccggcgcacggatcctgctcgaagtcggcgacggctcgagcttccccacctccggccacctcgccgcgtacgccggcctcgcacccgtcacccgccgatccggcacctcgatccgcggtgagcaccccgcccgaggcggcaacaagcacctcaaacgagcgatgttcctcgccgcgttcgccgcactgcacgacccgacctcgcgggcctactacgaccgcaaacgcggccaaggcaagaagcacaacgccgccctcatctgcctcgcccgacgacgctgcgacgtgatgtacgcgatgcttcgcgacggaaccctctaccaacagaaaacccccgccgcttgacgaagaccatagggaca

SEQ ID NO: 4524 - DNA, 1477 bp, unidentified
  source 1..1477: mol_type = unassigned DNA; note = element_6e17e95
  misc_feature 1..3: note = core
  misc_feature 4..246: note = LE
  misc_feature 247..1176: note = CDS
  misc_feature 1177..1477: note = RE
  misc_feature 1..224: note = bridgeRNA
cccgttaccttcttcgtgtccccgatgatggggatgctggccgctaggcccggtatgactgactgcccctgtcgcacgcatgatccggggggtgttgtcgccgggcgctagtggcgtcggatgaccgctcatagggacacggcctcaagcatgaaggtctcttcgtaacgtggctgccggcacccctcgcccgccacgcggccagcacgggttgaacaccgtgcaccgcctcgaaggagggccctgatgaacggactacccgaccgcacctacgcggtctacctcggcctcgacgtcggcaaagaacaccaccacgcctgcgccctcgatccagcaggaaaacgactgcacgacaagacgctgccgcaagacgagcaacgcatccgtgacctactcactgacctcagtgtgcacggtgacgtcctcgtcgtcgtcgaccagcccgcctcgatcggtgcgctccccgtggccgtcgcccgttcgatgaatattcaggtcgcctacctgcccggccttgcgatgcgccgaatcgccgacctacaccccggcaacgcgaaaactgacgcccgcgacgcgtacgtcatcgctgatgccgcacgcaccctgccccacgcgctacgccgtgtcgacgtcggtgacgacgcgctggccgacctcgaagtgatcgtcgggttcgacgacgacctcgctgccgaaaccactcgcgtcaccaaccgcgtccacggcctgctgacccagatccaccccgccctggaacgcgcgatcggcgggagcctgcaccacccggcggtccttgagttgctgtcccgcttcggtgggcccagtggcttgcgcaccgccggacgccgacgcctgctcgcggtcgcgaagccccgcgcgccccgcaagtaccaagcgttcgtcgacgcgatcatgactgccttggacgagcaaacagtcacggtgccgggcacgcgggctgctgacctcgtcctaccgaaactcgccgatcaactcgccggcctgctcgcgcagcgcgcggaggcagcgacgcaggtggaggaaatgctcgatgcgcaccctcttgcccaggtcctgacgtccatgcccggcgtgggtgtcaggaccggtgcgcgcatcctgctcgaagtcggcgacgcctcctctttcgccacgccagggcacttggcggcctagccgggcttgcgcccgtcacgcgccgctcgggcacctcgatccgcggtgagcatcccagtaggtcgggcaacaagaacctcaaacgagcgttcttcctcgccgcgttcgcagcgctcaaagaccccgcctcacgcgcgtactacgaccgcaaacgagctgaaggtaaacgccacaacgccgccctgatctgcctcgcgcgccgccgctgcgacgtcttgtacgccatgctgcgcgacggcacgacctaccaaccaggccgccccgtcacaccgatcgccgcttgacgaagaccatagggaca

SEQ ID NO: 4525 - DNA, 1368 bp, unidentified
  source 1..1368: mol_type = unassigned DNA; note = element_6e1b3fc
  misc_feature 1: note = core
  misc_feature 2..77: note = LE
  misc_feature 78..1103: note = CDS
  misc_feature 1104..1368: note = RE
  misc_feature 1135..1365: note = bridgeRNA
taatgagatggtcagcctgaccgaagcagcccgatcggcttacgctgatcgggctgcttccttttcgggagatcgtcatggaccccatctcgttgatcggaatcgatcttggcaagcattgcttccacctgcacgcgcagtcggcctcgggccgcatggtgtggcgcaagaagctcacgcgcagccagatgttcaccctgcttggcaatgttccgagctgtacggtggtcatggaagcgtgtgcgggtgcgcactgggtggcgcggcgggtcgaggcactgggccatcaggccaagctgatctccccgcagttcgtcaaaccattcctgcagagcaacaagaacgatttcgccgatgcgcaggcgatctgcgaggcggcctcgcgcccgagcatgcgcttcgtcagtgcgcgcaacgaggcgcagcaaaccctctcggccttgcaccgcgtgcgcgaggggctggtgcgcgatcgcaccggcacggtcaatcagattcatgcctttttgctggaattcggcgtgagtttgcccacagggatggccgtcattcgccggctgccggccgtgctgggcgcgcatgatctgccgccgcggctgatcgcgctgctcgagcgtctgcaggcgcatttcaagtacctcgatgcacaaattggcgagatcgagggcgatctgatgcggcaactgcgggaggatgagcgcagccagcgtttgctggagattccgggcatcgggccgatcacggccagcgtgctggcgagcgaattgggcgacgcgcggcagttcgcgtcggcccggcagttcgcggcgtccgtcgggctggtgccgcgccaatacagcacgggcggcaagccgacgctgctggggatcagcaagcgcggcgacaagaatttaaggcggctgttggtgcaatgcgcgaaggccgtcatgcagcacatcgagcggcgcaccgatcgcttgggcgcctgggtgcgcggcctgctgagccgacggcatgcgaacgtggtggcgtgcgcgctggcgaacaagttggcgaggatcgcctgggccatcctcgccagaggcacgcactaccaaggtgctcaggctgtagccgcagcctgacactctgcgccgcttgcgttagcttttaccctagtcacttcctggttttgcgacgcgagatacgtgaagacataaacggctcaacggccgggcaagcaacctgaaagacaaaacagcgttcccatgctgagtcacttttgaggtttgcccggtgcggctctcatcatggggcggaaacctgtttccacagcgaccccggatagatttgcgcacgtccaatttacgtcaacaccacctcgcttgcaaaagtcaggctgaccataga

SEQ ID NO: 4526 - DNA, 1345 bp, unidentified
  source 1..1345: mol_type = unassigned DNA; note = element_6e29179
  misc_feature 1: note = core
  misc_feature 2..65: note = LE
  misc_feature 66..1115: note = CDS
  misc_feature 1116..1345: note = RE
  misc_feature 1128..1339: note = bridgeRNA
taatgggatggtccgccccgcatccaggcatagcctttgccgctataggagaaggaggataacggatgcgcatcaatcccaaaccggaagccgccgtctacggcatcgaccttggcaagaaagtattccacctcgtcgcactcgatgcagggggtcggcccatccagagagccaagttcacccgcgacacgctcctgcgcttctttgcatcagccaccgctgcacgggtgggcatggaggcttgtcccggctcccaatggcttgctcggaagcttatcgagctcggccacgacgcctgcatcatccccgcgaagttcgtgaagccctatgtgaagtcgaacaagacggatgtggtggatgccgaagccattgccgaagcggtgacccgtccaaccatgcgcttcgtccaagtgagaacgcccgagcagattgatctgcaagcattgcatcgtatccgcgatcggctgatccgcagccgaaccgcgctgatcaatcaagcccgcgctttctgccttgaatatggtttggcaatgcgaaccggcgccggcgtgttccatatcgacatccggcgccatctcgactgcacagagaacgatctgactgacaccatgcgcgccatgctgcgtgatctcctcgacgatctcgaccacctcgaggggcgcattgcggagatctcgaaggcaatcgaagcgacggcccataccgacgaggtcgctcgtcgtctcatgaccgtgcccggaattggaccgttgggcgccaccgctctcatggctgcggccgggaatgggttgcagttccgcaaggcgcgggacatggccgcctggctcggtctcgtgcccgccgagcattccactggcggcaagcagacccttcgcgggatcagcaagcgaggcaacggctatgtccgacgcctgctcattcacggagcgcgatcatgcttcctgcacctcgatcgcgagaagcacgcgctcggccggtggttgagggcactcgaggggcgcacgcatcgcaacaaggcggttgtggcgctggcgaacaagatcacacggattgcttgggcgatccttacgcggcccgggcaactctatctccgctcgaagggagctgctgcctgacgccgaccgcccaccgattgcaggaggcacgatgaccgaacggctgatcggccacgggtaaaccattcgcaaaaaagcgggacgcgatcccgtagcaactaatctggaacccgaggcgcggatctcatcaaggcctggccgccaaaagcggcccactgatcagaggccggatacatttacgcaagcctgaatggcatcgcgcagcttgcaagcgcggggcggaccataca

SEQ ID NO: 4527 - DNA, 1499 bp, unidentified
  source 1..1499: mol_type = unassigned DNA; note = element_6e30601
  misc_feature 1..2: note = core
  misc_feature 3..243: note = LE
  misc_feature 244..1479: note = CDS
  misc_feature 1480..1499: note = RE
  misc_feature 7..240: note = bridgeRNA
ctaataggagttaccgggtcgccggtgcggcagactcggtgcctggtggccgccggcaggtgagcactttgaccgcctgggcttcgagcccttccgctagatcgtgcccctgccggtgaccgggagagctgatcgctgctgggatgtcgtgcccgcctgctggcgtgagcacagttttattaggtcgctgattgttctcccgcgggctgctgccggttttcggcatcttggacgggagaacggatgcgcctgttcgtgggggatgactgggctgaggaccatcacgacgtggaggtgatgaacgaggccgggaaagtgctggcaaagcggcggctgcccgagggcgtggcggggatggcccggctgcacgagctgatcggggagcgcctgggcgaggacgctgacggtgcggaggtggtgatcgggatcgggaccgaccgcggcccgtgggtggccgcgctggtcgcggccgggtatgtggtgtacgcggtgaaccccttgcaggcatcgaggtaccgggagcggcacggcgtgtccggggccaagagcgacagcggcgacgcgcacatgctcacggacatggtgcgcaccgactcgcaccagctgcgggcggtggcgggcgacagcgcggacgcggagggcgtcaaggtgctggcccgcacgcacaagacgctgatctgggagcgcacccggcaggtgcagcggctgcggcaccagctgcgggagtacttcgccgccgcgctggaggccttcgaggacctggacgcccccgacacgctggagctgctgggcaaggccccggacccggcccgggccgcgaggctgacccgcgcgcaggtcagcgccgcgctcaagcgcgctcaccgccggaacatcacggacaaggcgacggcgatcctggcggcgctgcgcggcgagcagctgggccagccgccggccgtcaccgccgcctacgctgtcaccgtgcgggcgctcatcgcggtgatcaccaccctgaacgagcaggtcaagaccctgcaagggcaggtggaggcggattttggccgccacccggacgctgagatctacctgtcccagcccggcctgggacccatcctcggcgcccgggtcctcggcgagttcggcgacgacccggaccgctacgccagcggcaaggcccgcaagaactacgccgccacttccccgatcacccgcgcgtcgggaaagaagaaggtcgtggccgcccggttcatccgcaacgaccggctcaccgacgcgctgatggcccaggccttcgccgccctgaccgcctcgcccggcgcccgggccctctacgacgccgaacgcgaccgcggcgccgagcacaaccctgccctccgcaagctcgccaaccggctcgtcggcatcccgcacggatgcctcaagacccgcaccatctacgacgaggcaaccgcctggccgcacgaggaaaagatccctcaatccgacctcgcagcttgacatctaagctcctgggatgt

SEQ ID NO: 4528 - DNA, 1402 bp, unidentified
  source 1..1402: mol_type = unassigned DNA; note = element_6e30610
  misc_feature 1..2: note = core
  misc_feature 3..87: note = LE
  misc_feature 88..1128: note = CDS
  misc_feature 1129..1402: note = RE
  misc_feature 1147..1389: note = bridgeRNA
tgatggtgtggaacggccccgctcccgcggcatcatacgatcagctgcgtcgttcgtgcggcgcacgccatctgaggggagggtatcatgcaggcgatcagcactatcggcctcgatctggccaaacacgtcttccaagttcatgccgtcgctgcagacggcaccgtgctcctcaggcgacaactacgtcgctcgcagcttctgatcttctttgagaagctgcctacctgcctggtcggcatggaggcatgcggcggagcccatcattgggctcgggagattgccgcccttggtcatcacgtgcgcctcatgccgccagcctacgtcaaaccctacgtcaaacgcggtaagaccgatgccggcgatgcggaggccatttgcgaggctgtcacgcggccgacgatgcgcttcgttcccgtcaaaacggccgaacagcaggcaggcgcgatggtgctgaagagccgcgatctcctcgtgcgccagcgcagtcaagccattaacgcgctgcgggctcacctgtcagagctgggcatcgtcactggaatcggcgtggcgaaggtaacgaccctgatcgcgattgtgcgggacgaggacgatgctaggcttccggaggcggggcgcttggctttgagaatgctgggtgatcagatcgaagcgctgaccgaacggatcgaatgccttgagcgggccgtggtcgagcaggtacgccaagatcaggatctgcgacgactgacgaccataccgggtgtcggaccgatctcggccgcagcgctgagggcactcgcacccgaccctcgcgcctttgtctccgggcggcacttctcggcctggctcgggctgacgccgcgctcgcacgccagcggcggcaaggagcgactcggacgcatctcgaagatgggcaatgggacgatccgaaccttgctcatcctcggggcgacggctgtcttgcgccatgcccgtgcaggttcaccggcgccggcctgggtcaccgcactgctggcgcggcggcccttccgggtcgctgccgtagcgttggcaaacaagacggcgcggatcgtctgggcgctgctggtgcgtggtggaacataccgtaaaaccggtctgcaggccgcggcagtgatcggctgacccgctgcacagaccgtcagagctgcccggcacgaccgctgccggcaggggcaaggtgcaccagacacggatgaacccacgggacgtcacccgatccaggacaggccgacagaaccatcgcgctctcgagcgcgtcgacgtgatgtgccacctggatcgcggacttcatcgaggccggcggtcgttgaccgcgcatgcaggccgaacatatgagcgcaccgtcaccatgggggatcagcgtcagaaacacttgcccgcggggccgttccacata

SEQ ID NO: 4529 - DNA, 1375 bp, unidentified
  source 1..1375: mol_type = unassigned DNA; note = element_6e30a92
  misc_feature 1..2: note = core
  misc_feature 3..79: note = LE
  misc_feature 80..1117: note = CDS
  misc_feature 1118..1375: note = RE
  misc_feature 1130..1360: note = bridgeRNA
agataattggactcccccacatccgaaaatgtgggtaatataaaagttctcacacaaatatattaaaagagtccttagcatgtatcgtactagagttggtgttgatttagcaaaagaagttattcaagtttgtacttatcgaaacaaaaaagtgcagtcaaatattgaaataacaccgggtgagtttctttgttggcttatcaaaacgaaaccagcaacaataatatttgaagcatgtagcacctccaattactggaaacaaaaagcgatagaagctggccatgatgcccgtttgatatcagcaaaattggtttctacggtaaggcaaaaccaaaaaacagataaaaatgatgcattggcaatcgtccaggcggcttcattgcctgatgtcacgtttattggtggaaagacggttgagcagcaacagttgcaatcgataaagcggttaagagaattagcagtaaaacaacaaggagcctctcaaaaacagttggtatctttgttgttagagttaaatattcgtatttcgaatcgcaaaggcggaatcataagagcgatagaaggcgtattagaagatgcgacaaatggcctgtcggtagaatgtcgagcagctattcatacagcgaaagagcaattgagtatgttaattaaagcggcacatcgttatgacgattgtttagagaaatcagttgcggcacatcctgattgcaagaagttgttgaagttagaaggggttggctcggtgaacgccatcaatctttatcttgcactgggttgtgcagaaataggaacgtttagtaaaggtagagatgcatcagcctgcataggtgttactccgatacaatattcatcaggaggtacagtcaagttaggctcgatagggaaatatactaaaaatagcctattaaggagtcagcttatttgtggtgcgatggcaacaatacgccacgtagtaaagcgagaagcaaaaacccaaaaagatgtttggcttaaggcattagtggagcgccgaggtaaaaaatgtgcggctgtagcgttggcgaataaaacggtgagaacagctttttccatgctgacaaaaggtacagagtataaagcagtgctcatcactgcgtagaaaagttaacccgtaaagcagaattactcactgcttaaaaagagttcaaacaacaaaaaatgcaataaacgaagataaaaatcaacccgtttagtcagtagctagcagagagcctttgagctcgcttaatagatttgacaacgggttcgcgtaaatatcatagagccagagatcgcttctcaaatagagctcgtacataagcacgcattaatttttttgaataaagcgctttgttgttgacaagggggagtccacata

SEQ ID NO: 4530 - DNA, 1353 bp, unidentified
  source 1..1353: mol_type = unassigned DNA; note = element_6e3201d
  misc_feature 1..2: note = core
  misc_feature 3..83: note = LE
  misc_feature 84..1088: note = CDS
  misc_feature 1089..1353: note = RE
  misc_feature 1125..1340: note = bridgeRNA
tgatggagtggatggctcccgctcccggcatcacaatgtgccacattgggtgctgtcagagtgaccaatgaagggagccatccatgaaggagattaccacggtcgggctggatctggccaagaacttgttccaggttcatgccgttgatgagaacggcgctgttctcgtgcggcggcaggtcaggcgggcacaggtcctgctgttcttctcacgcttgcacccctgtctcattggcattgaagcctgcgcgggagctcgtcactgggcgcgggaactggcaaagcttggccatgacgtgcggctgatcccgccttcctatgtcaacccctttgttaagcggggcaagactgatgcggccgatgcagaggccatctgcgaagccgtcattcgccccaacatgcgctttgtgccgctgaagaccgagaagcagcaggcggtgctgatgcagcaccggacaggtgattttctggtccgtcagctgacacaacttgccaacgcgatccgggcacatctgggcgagttcggcattgtcgttccgaaaggcgtccataacatgggtcgcctcattgccgaggctgagacagctgatctgccgccagaggcacggatgccactcgacctgcttgccggccagttccgcgacaccaagcagcgcatcgatgtcatgacggctcagatcaaagccgatgcggaagtggacgagacagcccgtcggctccagacaatgcccggcatcgggcccattaccgccagcgttctggcggcaacgttgcccaatgtgtcgagcttccggtcagcccgtgatctgcctgcctggctggggctcacgcccaagccccattcaagtggcggcaaggaacggctgggctccatttccaagatgggcaaccggtatatccgacggctgctctctcttggcgccatgggcgtgatctccgcgcgcaggctttctgaacccagcgcagattggctgggccgcctggtcgcgacaaagccgctcaaggttgcagccatcgctttggccaatcgcatggcgcgggcgatctgggccatgccgaaaacgggcgaagcctggagaccggcttgagcagataggattgcaggccgctgctgctggcctgaacgaggtggcgagggcagagtgagatgatggcaaactgacggacatgaggaagggacaccccgttcggaccggagcgccttaagcgcgtgccgttgatagggacccgggcctcaggcggacgttcatcaaggcgcgcgggatcaccgcagatcagacgccgaatacatggccgcacccgaccagttgtcgaacataacaagcctcttgccacgcgggagccgtccataca

SEQ ID NO: 4531 - DNA, 1178 bp, unidentified
  source 1..1178: mol_type = unassigned DNA; note = element_6e3384b
  misc_feature 1..2: note = core
  misc_feature 3..207: note = LE
  misc_feature 208..1155: note = CDS
  misc_feature 1156..1178: note = RE
  misc_feature 3..181: note = bridgeRNA
cttgtatgctaggacttgaagggaggagaagggacaaagcccgattctgactgttgacgcagtacagaccgtgggagatttcgcccctcctcctttcacccaagcgccgataaagaatgcatctggctatgaccgacgataggaacaagcctgcgcctctgggtgagcccttcaagtgctcaaaaacatagcccggaggaagcccccatggcaatgccagtttctgtctcaaagccgatcgtaggcgttgatgtcgctaagaatgagctggtgatttatcacgctgaagccgatctactggaaacgatcgcaaacaacaaagctgctatcaaaaaatggctgaaaacgctgtcctgcaaagtggccatcgcaattgaagccaccaacatctaccacttggagttttccgatctagcccatgaagctggttgcgtggtttacatggttggaggttatgagctcaaacattaccgcgaaagcttgaagatccgggccaagaccgatgctttggatgcccaactgctcgcccgctatttgagaaaggaggcagacgaactgcgtccctggacaccgccatcgccgctgtatcgccaccttctaagcctgtttcgtcggcgtgcagccttggttcaggcgcgcgtcagcctgacgcaaagctgggcgaatgaaccgctgcttaaggcctcgtttgccgagcaggtcaagtcgatgcagagacttgaagggttaattgaaaagatgatcagtgattgcctgaaagaggcaggtatgctggggcagttgaagcgttgcttgaaggtcgaaggcatcggctttttgactggcgcgcgcttgattgccaccttccaacggggagaattcaggaattcagacgcgtttatcgcctttcttggtatggatttgcgcgtcaacaagtcaggacagaaagatggtcgtcgtagtttaagtaagcgcggcgactcagaggcccggcgcctgctgcataacgccgcgatggcggctagccgaacagagacatggaaagcgttttatcaagcacagagggcacgaggctatagcaccactcaggcgttggtaatattggctcgcaagcttgctcgagtggtgttcgctctactgaaagggcaaagcgaatatcagccaaaggttggttgagggttgcccctcaaccatagaat

SEQ ID NO: 4532 - DNA, 1711 bp, unidentified
  source 1..1711: mol_type = unassigned DNA; note = element_6e3ae4a
  misc_feature 1: note = core
  misc_feature 2..335: note = LE
  misc_feature 336..1568: note = CDS
  misc_feature 1569..1711: note = RE
  misc_feature 43..314: note = bridgeRNA
cctcgtataataagttttgttagtatatttcaagcatctaaaccgaaccaatcggcttgatgatacccatgatataattgacgcgcaagtcaatcaggtaaaagttcttatgcctcctgttgagccgaaaggctgcttcacaacaagtctgttcccctgggccggaagttaacttcaaaccgacggctgtttgcttcggtcgcggcttgccctttagcagtggggttcgcaataggccacccggagctggattctgatatgcgagggtgttgatgctccggcatcgtgggtattaccaagccgattgacttcaatccaccacgaaaagaggtgatatggtgaaccaattattcgttggcattgatgtgggaagccgtgataacgcggtatacatcatgcttccggacggctcgaagcacagctccttctcggttcaaaacaaccttggcggtgcaatgacactctcaatgcgggtcgtatcggcgctgcgtgagcaaggtgttaacgatgtcctgctcggtcttgaggctacctcggtctatggcgacaaccttgtttgcttcttacgggaagatggcgctctggctcagttcaaccgtaaaatccatgtcctcaatcctaaacaggtcaagaaatttaaggacacctattccgacctgcctaagaacgatgccgtggacgccttcgttatcgcggacaacctccgcttcgggcggatcagcacggcggtctacatggatgactatcgctacaaagccttgcaaaacctcaccagagcacgcttcttcgccgttcaaagcctaacccgtgagaaacagcgtttcatgaactacctcttcatgaaatgctcaggacttgcacaggagaagaccttttccaataactacggcgcagcggcgttagccctctttgaagagtttgaaacgccggatgatatcgccaatatggatttggacaagttgactgctttcatctcagagaaaggtaagaaccgttccccagacccagagaagattgccgaagcggttcaggccgcagcaagaggctcctatcgcctgcctaaaaccgtcaacgattctgtgaatcaagtgctgtccatttccgtttcctccatacgcgccatgcaagcgcaaattaaagctcttgataaggaaatcgagcgtcaggttgtaaatatcccaaatactctgacctctgtcccgggtatcggtgctgtcttctcagccggtattatcgctgaaatcggcgacatcaaccgtttccctgaccatcccgctttggcaaagtacgcgggcctcgtttggactcagcaccagtccggcacttttgaagcgcagcattcgcgtctcatcaaatccggcaatcgcttcctcaaatattacttatgtgaagctgccaactctctcgtgcgttgcgacacggagtacaggcgctactatgacctcaagtataaagaggtcaacaagtaccagcacaaacgcgcactcgcattaactgccagaaagctggtcaggttggtctttcgactgctgaaggacaaccgcctgtatataccgtcggccagctaattggctgacgcttgccgccccgattttttgaaatcatggtcggggctttggcgggaggtggcgtttttgcgcctttcgccgggattttggggcaattacatcgtttttactcgctattctccccttgacatattaccgccgga

SEQ ID NO: 4533 - DNA, 1461 bp, unidentified
  source 1..1461: mol_type = unassigned DNA; note = element_6e431b0
  misc_feature 1..3: note = core
  misc_feature 4..222: note = LE
  misc_feature 223..1440: note = CDS
  misc_feature 1441..1461: note = RE
  misc_feature 7..220: note = bridgeRNA
ctaatagggttggaacaagatccgccaatcggatactgttccaccgagccaccggtgggagagcactgcgaaagcctgggcagcgagccctatgcctagagggtgcccccatcggccggcgaggggatgagacggctggtgggatgacgtgcctcgagcactgaactattaggtcggcgcgagtctcctccggctcgagtcatctttgggtggaggtgcaggttggggatctacgtcggcattgattgggcggaggcgcacgacgacatcgcggtgttggacgagacgggcacggtgctggcgaagcgacggattgcggaaggcctcgagggcgtgggtcagctccacgcgctactggccgaccacgcggcggagcccagccaggtggcgatcggaatcgaaaccgatcgggggttgctggtgggcgcgctgctcgccgcgggctaccaggtctatgccatcaacccgctggcggccagtcggtaccgcgatcgtcacgggacgtccggggccaagtcggatcccggcgacgccaaggtactcgctgatttggtacgcaccgatcggcacaaccaccggcgcgtggccggcgactcggagctggccgcttcgctgcaagtgttggcccgggcccaccagaacctgatctggagccggcaacggctcgccaaccagttgcgcaacaacttgcgcgagtactacccggcggcactcgtcgcctttgggtcagacctagccaacccgcttccgctcggcgtgctcgacgccgccccaacgccggcgatgggccgcaccctctcgcagtccaagctggcggccattctgcgccgggcgggacgcgaacgtggggtggcggaaaaggccgcggcgatccaggctcagctccgcgcgccgcagctggcggcgcccgccctggtcggcgaggcctatggcaagagcgtggcatcgacggtccgcatcctgcgcgggatgaatgccgaactcgccagcctggaggcggagttggcccccagttttgagaagcacccggacgccgagatctaccgcagtcttcccggacttggcatcgtcctcggcgcccgggttttgtcggagttcggcgacgaccgaacccgctttgcccatcctaaagcgcggaagaattatgcgggcagctctccgatcacaaaggcatccggcacgcgccgggttgtcctagcccgcatggcccgcaatcggcgactcgccgatgcctgccacctttgggctttttgcgcgctgaccggctccgccggcgcgcgccactactatcgcgtgcttcgtcaacgaggaaagacgcatcatcaagccctacgcgccctcgccaatcgactcgtcggcatccttcatggctgcttggatcaccggcagacctatcgcgaagaaatcgcctggccgaggtcgttgaccgttgccgcttgacttcttacaggcgtgggatgt

SEQ ID NO: 4534 - DNA, 1425 bp, unidentified
  source 1..1425: mol_type = unassigned DNA; note = element_6e4aa44
  misc_feature 1: note = core
  misc_feature 2..92: note = LE
  misc_feature 93..1127: note = CDS
  misc_feature 1128..1425: note = RE
  misc_feature 1182..1423: note = bridgeRNA
taatggtatggactcctcctcttcccttcggcatcgcgatgtgccaaagtggaagaaagtaacaaccacttaatgaagaagaggaatccgccatgaatattacgacaatcggttttgacattgcaaaaaatgtttttcaagtacacggcgtagatacgaacggaaaaatcgcgtttcgcaaacaacttaagcgggttcaggtgttggcttttttcgccaacttatcgccttgcttgatcggcttggaagcctgcggcggggcgcactactgggcgcgagaattgctcaagttggggcatgatgcacgcttaatcagtccgcaatttgtcaaaccgtatgtcaaaggtaataaaaacgacgccaatgatgcggaagcgatttgcgaggctgtaggtcgtccgagtatgcgtttcgtgccgataaaaaacattgagcaacaagacatccagatgctgcaccgtgtccgtagtggtctagtgaaggagcgcacagcacaagccaatcgcttgcggggcttattgagcgaatacgggatagttattggtctagggttgacgcaactacgcaagcgcctgccggagatattggaagatgccgagaataacttgacgatggcggcacggcaaatctttgcagatctgcaacaacagctaatcgaactagataaacaagtatcgatttacggggagaagattctgatactgcaccggtcaagcgaggttagtaaaacactcggcgccgtccccggtattgggccgatcaccgccacggcgctactggcctcactgggtgacggcaaggcctttgacaaggcgcggcaagttccggcttggttaggcctagttcctaagcaagattccagcggaggcaagccgaagctactgggcatcagcaagcgcggcgacacttatttacgcaccttactaatccacggggccaggtcggtagtcaaagcagcggcaaagaaagatgacgcactaagctgttggatcaacagcttagtgaaacggcgcaatgccaacattgcagcggtggcagtagccaacaagaacgcacggattgtatgggcgctgttaactcggacggagagttaccaggcttcggcttcggcatcagccaacacctaaacaacggctgtgcaacaacccattttttaaacatttaaagagttttttaacagtcacacccccagttgtgaagcatttttcaaaatgatggcaaacaggtcggaccggtgttttcaagaatccgttcagcgcatgggccttcgaggccggtagaatgatagagatgaaaacacgcggaaatccatcagggtcggaggtagtaaagatctcattaacaggccggatatatggcagcaactgcgttgactgaccgtagcgatcaaagagaaaaagcttgcaaaacggaggagtccatata

SEQ ID NO: 4535 - DNA, 1478 bp, unidentified
  source 1..1478: mol_type = unassigned DNA; note = element_6e4dfbc
  misc_feature 1: note = core
  misc_feature 2..105: note = LE
  misc_feature 106..1122: note = CDS
  misc_feature 1123..1478: note = RE
  misc_feature 1167..1398: note = bridgeRNA
gaatgaaagggacttccccgtcccgagccggtcgccgtgcggcgggcggcaacgcgtgccaagatggggttgcgaatctcatcgactgactcgggaggggaaaccatggctattctgtacgtcgggatcgatctcgccaagaacgtgttcgcggtgcacggggtggacgagcacggcaagccggccctggtgtggccgaaggtcacgcgcgacaaactgcatgaacggattgccgcgctgccaccctgcacgattggcatggaagcctgctcgggcgcccaccactgggcgcggttgtttggggatctgggccacgcggtgcggctgatggcgccgaaattcgtcgcgccctaccggttgcgcggcaggcggggcaagaacgacgcggcggacgcggcggcgatttgcgaggcggtccagcgcccgaacatgcggttcgtgccggtcaagagcgtggaccagcaggcgcggctgaccttgcaccgcacgcgacaaggcttcgtcgagcagcgcacggccacgctcaaccgtatccgtggactgctgagcgagttcggcgtcgtgctgccgctcaaggcggccacggtgcgccgcgaggcggcggcgggcctggaggcgttgtccggctgggcgcggttagccatcggcgatctgttggaggaggtgcgccggctggacgagcgtgttgtggagtacgaccggcacctggcgcaaatggcccgccaggacgaacgggcgcggcggctgatgcggttgagcggcgtgggcgaaaccaccgccaccgccttgttggcgaccgtcggcaacggccacgatttccgctgtggccggcagttcgcggcctggctggggctggtgccgggccaatacagttccggcggcaagacgcgcctggggcgcatcaccaaaaccggcgatccctacctgcgaagcctgttggtcttgggcgcccgagccgttctggccctcgccaaaaccaaggccgacgccatcagtcgctgggcggcggcgctggagcaacgtcggggttactggaaagcggtcgtggccatcgccgccaaaaacgcgcgcttggcctgggccgtgctcgccaagggcgaggccttcaagatgccggcctgatcgctcgatacccaccaccacttggagaaccttctcgcctgtaatcccgccaccgcatgacgtcccgcgctgatgagtttgggttggacctgtgcggggagtgcctggttagctcttggaggccgctccagcggtcctcgactaacgaatgaggcccccgcgcgcgtctttcatcagggtccgctgccttcagacagcaccaatgaccggttgtagtttctccagtcctcacctgactcactgctcagcgctcaagaccccggctcggcggtttaacgtccgaataccctcaacgacgaatcaccccgtctttcgtcatggcccgtctttgcttgacatacggggaagcccttgta

SEQ ID NO: 4536 - DNA, 1612 bp, unidentified
  source 1..1612: mol_type = unassigned DNA; note = element_6e59b9e
  misc_feature 1..3: note = core
  misc_feature 4..290: note = LE
  misc_feature 291..1466: note = CDS
  misc_feature 1467..1612: note = RE
  misc_feature 48..270: note = bridgeRNA
actcgtattatatagtagtagtgtttatagaccctctccaaggtcttgatactatattttcataaccattctttaccttttctataggtacggttatgatatataagatgctgtggactggtgtcacctcgctaccacctgatggtttcagaaagtgtccagccacagtctctttgtttgattgttaatcagttagataccgcatgacggtttatttagaacgagttcacaactgcgaagagcacctgtggttctaaaacagcattcatttattgcaaaggagattttttatgatttacgtcggtattgatattgccaaagacaagcacgattgctttattactaattcggatggagaggcactttttaatgtctttaccattcctaacagccgggagggctataatgacctgtatcaaaagatttcttccctgacctcagatttttctgtaataaaagtaggactggaagccaccggacactacaattacaatcttctgggattccttattgataaaggtttgccgacctacgttatcaatccgcttcataccaatctgtacagaaaaagtctaagccttagacagaccaaaacggataaggttgatgcccgcaccattgcatttatgctgatgtctggagtaaacttacagtcctactcagacacatcataccataatgaagagctaaagtcattaacccgttaccgttttgacaaggtaaaggaacgtgcaaaattaaaaacttctgtttctcgcctcgtcaacattctcttccctgaattagaaaagctggttccgtcaattcacatggcttctgtatatgccatgctctccgagtttccatgtgcgtctaaaattgccgctgcacacctcacaaggctggcgaacctattagaaacctcctccagaggtcactatggcaaggaaacagccataacatttcgcaatgctgcaagagcctctgtcggttcaaatatgcccgcaaaatcgcttgaattaaaacataccatcaaacttattcaggaactggatgcagagattgaagaaatagaaaatgaaatcaaaaccatcatggacgaaatcaattctccaatcctttccattcccggaataaactatcgcatgggtgctatgataatagctgaaataggtgattttagccgttttgattcccctgacaagatacttgcctatgcaggaatgtcgccctctacttatcaatcaggacagcttgacagcagttattcccacatggaaaagcgaggctcccgttatctccgttatgctttgttcaatgccacaaagtttgtgtgccattgggattcaacctttgcagcctatcttgcaaaaaaacgtgcagagggaaagcattacaatgtcgccatttcgcatgctgcaaagaaactggtgcgagttatctatcagttggaaaaatccgggcaggaatatatcacagctacataagcctttctaacccatatctcctttttttgagcatctttaaagatgctctgtttgtcatgcagttttcaaggtactgatttatctgaaatgcatttctacaattcattcaaaaaatttcattttaggtcttgacttttaatagttag

SEQ ID NO: 4537 - DNA, 1198 bp, unidentified
  source 1..1198: mol_type = unassigned DNA; note = element_6e6f882
  misc_feature 1..2: note = core
  misc_feature 3..189: note = LE
  misc_feature 190..1167: note = CDS
  misc_feature 1168..1198: note = RE
  misc_feature 12..198: note = bridgeRNA
cttgtatctctctcgatattctgattagctgtcagcgtatcagggcgtgtgatgaacttgtgcccacccgaaggccttgagcctgacacgtagatcaagtcgcacacgccaactttctcaatagactgaatggtatccaagccccttcatcctgaaatgaggctgtatgtacaaggtgagtgaaaagagatgatgataattggtattgatgttggcaaagcaaagttggacgccttgtggttgaaagataccacaaccggcgccaacaagaccaaaatgttcgccaacaccgcgcaaggacacgcggccctgattgagtgggcgctgcatcagacccaaagcccgctcgaatcactgcatttcatcatggaggccacgggagtttatagtgatgcgattgcccatgcgctttatcaggccggtgcccaggtgtccgtgctcaatcccgcccacgtgcgtgactatgcaaaaagtatcggtgtacgcactaaaaccgataaaaaagacagcggggtattggcacgctatggcgctacccaacagccgcgcttatggcgaccagaaccgaccgaaattcgctatttaaaagcgcttttgagccgttatgaggcgatcaatgaggacattcagcgggaaaaaaatcgccgtgaaaaggccgaagtaatccaggcggttgatgtggtgacctccatcgatacggtactcgaacaattgattaaagagaaaaagcgactggagcagttaatcaatcaacacattgaccaacatccccgcttaaaacaggaccgggaatttcttgaaagtattccaggggtaggtccggttgtgtcgcgttacatgctctccgttttgcgcagccgcgcgtttgaatcaggcccgcagagcgcggcctttttgggtctcgtgcctgtgcaccacgaatccggttccagcgtgcggggtcgtgcgcggttatcgaaaaccggcaatgccaccgtccgcgccaagctctacatggcggccgtcgtggcgatacagcataacccggatattaaaaagcaatatgagcgacttttaaaaaatggcaaaacaaaaatgtcggcactcggtgcggcgatgcgtaagttagtacagatttgttttggtgtgttaaaacaccaaaaatcatatcgtgcgcaagccgtttaaagggcttgcgcaaggtggagggagatggtat

SEQ ID NO: 4538 - DNA, 1545 bp, unidentified
  source 1..1545: mol_type = unassigned DNA; note = element_6e790f1
  misc_feature 1: note = core
  misc_feature 2..522: note = LE
  misc_feature 523..1437: note = CDS
  misc_feature 1438..1545: note = RE
tgtatgataaatatataaaaatatttatctatacaacctccttccatattattttttatttaattttgttatataattttattaatgaaactgtggattttttattttttattgaactcttaagttactttttaaaggagagtattgccactgttttttctcaaatatttatagttggttagaatttttattcttaatgttttcaagaatgtattgattaaaactttgtagacgcacagtttctaatttttattttaaggatgtgattttatgttattactaggtattgatatcgctaaattaaaccatgtggcttctcttactgattctacttctgtggaacttatcttctctaattttaaattttaaaataactttattagtttttcttctctatttgaaaaaatctctaaatttcctgttactgaaattattattgagttagaatcaactggacgttatggagaaaattttattaattttttctttcaaaaaggttttaaaattgctattatcaatcctttgcacacttcacatctacgtaaagcaaatattagagattctaaaaatgacagattagattctattaatattgctaaagctttattatttggagaacatagatatgttactcaaaaaaatcttactaattttgtacttaaaaaattaactccttttaggagaaatttaattaagcaaaaaactaaatttaaaattcaacttgtttatctacttgatattatttttccagagttgcaatatttctttaaatctggtattcattcaaatgccgtttatactcttttaaaaaagtatccttctacagaaaaaatagctgccttaagagaaaaaacattattctctattttgaacaaagcttcaaaggggcactacaaagaagaacacgcttcgcaattaaaaagtctagctaaatcttctgtaggtattaaagatacttctgtctctatgcatatacctcaattgataaaattaattgagatgttggacagccaaattaattctattaaagaagaaatcgaatcttccattgataaagaatctgttgtactctctatttcaggcataaactttgtagctgctgcttctattcttggagaaattaatgatatcgataattttgatttaccatcaaaactattagccttttcaaggttggatccaaaggtaagacaatctggaaatttcaacgcttcatcctgtagaatgtctaaaaaaggttctccatatttacgttatgctttaataattactgcttggaatcttgttaggaatagtgaaactttcaataaatactatttaagtaaaagagcacaaggaaaatcacattatagcgcattaggacatacagcacataaattggtaagaataatttatactctattaaagaaaaatattttatatcaagagattaactaatctccaccaagaaaatacactttaaagagttttatgaactctaattttgtaatgcagaaaaatcaaagattaaatttttttaaatttatcttgacttttcatagttgg

SEQ ID NO: 4539 - DNA, 1388 bp, unidentified
  source 1..1388: mol_type = unassigned DNA; note = element_6e7ec61
  misc_feature 1..2: note = core
  misc_feature 3..89: note = LE
  misc_feature 90..1115: note = CDS
  misc_feature 1116..1388: note = RE
  misc_feature 1131..1375: note = bridgeRNA
tgatggagtggatgccccctgctctgcggcatcggagtgccatagcgtggctggcgctgaaaccaggtcacggaggagagggggcatccatggagaaggttaccacggttgggctcgacctggcgaagaacgtcttccaggtccacggggttgacgcgactggcagggtcgtgctgcgccgcaagctacggcgcgccgaggtgctggacttcttcgcggccatggagccggcgacgatcggtatggaggcctgtggcggggcacatttctgggcacgcgaactcggtcggcaggggcacgaggtgcggctcatgcctccggcctatgtcaggccctatgtgaaacgcggcaagacggacgccgctgatgccgaggcgatctgcgaggcggtgacgcggccgagcatgcgcttcgtgccggccaagacggaggcgcagcaggccacggcagtcgagcttaagacacgagagctcttggtccgtcagcggacgcaggcggtgaacgccctgcgggcccatctgtcggagtacggcatcatcgccgcgcagggcgcggcgaagctcgccgacctcgtggcggtggtgcgcgacgccgaggaccgacggctgccgcccatggctcgggaggtcctgcttgagttggtggagcaggttgaggacctggaaggccggatcgaacggctcgacaggcggatgatccgccgcgtccgcgaggacgagaccgcgcggcggctcgcgaccattcccggtatcggcgcgatcactgcggtcgcgctacaaggcttggtgcccgacgtgcgaggcttccggtcggcccgccacttcgccgcctggctgggcctcacaccgcggccacattcgagcgggggcaaggagcgcctgggtcacatctccaagcagggcaatcccatgctgcgccggctgctcgtcctcggtgccacggcacagctacgccacgccaagcttgccgctgaggaggcaagctgggtggctcagttgctggcgcgccgaccgttcaaggtcgtcgcagtggccctggcaaacaggatggcgcgcatcgcctgggcgctgctggcgaagggcgggacctaccgcacccctgcaactgccacctgagagttcccacccgagttcgtccgggggccgcgcccggcggaggccaaggtgcagaagcggtgatgacagcgagagaccggcaagccagtcgcgggagaggccgacacgacaatgcgccaccgagcgcgcgtagttgatccgccgcccgcgccgcgcagctcatcggggcccgcggccaagtcggccgcattacgaggccggacacatgaccgcacccgtgctctcggtggcagcgctgcagatccgccttgacccgcagggggcatccacaca

SEQ ID NO: 4540 - DNA, 1405 bp, unidentified
  source 1..1405: mol_type = unassigned DNA; note = element_6e87fc5
  misc_feature 1: note = core
  misc_feature 2..89: note = LE
  misc_feature 90..1124: note = CDS
  misc_feature 1125..1405: note = RE
  misc_feature 1175..1397: note = bridgeRNA
caatgggatggacgcccccacccgtaacggcatcgacgtgccaaagtggaagcgttgatcaaccacttgaaccgaaaggggcgtccaccatgaagattacgactgttggcatcgatttggcaaagagtgtgttccaggtccacggcatcgatcagcagggcaaggtgatgctgaagaagcaactcaagcgagcccagatggcaccgttctttgtcaacttgccgccgtgcctgatcggcatggaggcctgtggtagtgctcatcactgggcgcgcaaactgcagtcaatggggcataccgtgcgcttgatggctccgcagttcgtcaagccctacgtcaagaccaacaagaacgatgctgccgacgctgaagcgattgctgaggctgtcgcccggccgaacatgcgctttgtgcccatcaaggatgtcgagcagcaggccgtgctcgcgctgcaccgggtgcggcagggatttgtgaaggcacgcacggcgcaaggcaaccagatccgtggccttcttgccgaattcggaatcatcatcccgcaaggaatcagcaacattgctgcgcgtgtgccggaactggtcgaggatgccagcaacgagttgccgggcgcgtttcgagtgctcgtgcaacgtttgctggatcatctcaaagaactcgatcgccaagtcgatgagctcgaagttcagattcaggcatggcatcgcaacagtgttctcagcaccaagatcgcacaggttcctggcatcggccccatcagcgccagcgcgctgattgcctccatcggagacgcgaggaacttcgacaatggtcgtcaactggcagcatggctgggccttgttccaaagcagcattccaccggcggcagatccaatctgctgagcatcagcaagcgcggggatacctaccttcgaacactcctgatacacggtgcgagatcggtgatctatcacgccgcgaaaaaaccagagtcctgcagttgggtcagcgccgtggtgagccggcgaaacaagaacgtggcagcagttgcattggccaacaagaacgcacgcatcgtctgggcgttgttagcccatgaccggcgttacgaggtaggctacccacgaacggttgaggccacctgaatcacattgagacgacagcaaagcaagaacaaagacagggagaacaaacctccgattgctcaggcgatcatgaagtgatggcaagacaggtcagaccgtggttggcaaagcccgcagtttccgaagcacgcaaagtgcgcccgaccgatagaggcgtcaaccagcgaatcccatcagggaccgcggcgcaagccgcaatcaagtccgaatgtacgggtgcaatcttttccttcgagccgccatgaattgaaagcctggcaaattccggggccgtccatgta

SEQ ID NO: 4541 - DNA, 1587 bp, unidentified
  source 1..1587: mol_type = unassigned DNA; note = element_6e89c66
  misc_feature 1..3: note = core
  misc_feature 4..252: note = LE
  misc_feature 253..1458: note = CDS
  misc_feature 1459..1587: note = RE
  misc_feature 8..227: note = bridgeRNA
gttcgttttatgaggtcagccagttttttctggttgacctcttttgttttgagagatttagtaaacggtagccggggtcgaacgcaactgcccgtgggaccgtgatcccgtgaactaaactgttcaccccctacttgtagaaacatgtttgaggctggttgagacaacgatctcgaataacaagcgaagctatgacactgcaagaaggactaggggctgccggcaaatacgatcattggaaggtgatataagatgaatccagtagttgggctggatattgctaagggggaaagtcaaggtcaagccttcttagacaagggaaaaccttatggtaaaagctttactgtccatcatacccgtgagggattgggagcctttcttcacttattgaaagatattcaatccatgacaggacagctgccgatggtcattctggaagcgacaggtcattatcatacccctgttacacagttcctggacgaatacaactacctttacatcattgtaaatccacttctgtcttatgaagcgaaaaagtcttcaagcttaaggaaagtgaagacggatgcctttgatgcttatgctttatgcgaattcttttataaagaggatttcgaacctcataagaaaagaggtgttcaattattaaaccttcgcaaccttacaagacagcatgaatcggtaacgggtcagtttgttcagatcaaacttcaattccaagcagcattagatcaagtgtttccggagtttaagggtgtattcggggatttgtatgctgtggtgtctttacaaacattgttggaattcccgacgtccgaagccgtactgagcgccggtgagcctcaattaactgagaggatttccattttatgtacaagtcgttctgaaaaatgggctaaggaaaaggctcaagaacttatggcagctgcaacccgaaatccgtttcgtaaagcaccgtatcaaagccatttgtttagcatgagtatgtacattaacatgttacttcattacaaagagcatctaacagccctcgtaaaggaaatagatgccttcgcaaatgaagttgaagaatatgagattatccaatcgattcccggtattggagagaaaatcgctgcaacgattatttccgaaatcggtgagatccatcggtttaatcaccctaagaagctcgtagctttcgctggtgtagatccaagcgtgcatatctccggtaaatttactgcaaccattaatcggatcacaaaacgaggttccagcaggctgaggcgcgctttatatatggccgtactctgtgggctaaggcgtactggcagtaaaaagctcaaagccttttacgacaagaaaatgtccgagggaaaacctcataaattagtgatgaccgcctgtgtaaacaagttgctccattggatatttgccatgcttaaaaggaaagaaattttcctcgaattaacttagttgataaataaacgagatatatgaaataccttccatcacaataaggagggttatttgggatgctcgttttccagtataacatcaatcaatcgttcgttaattagaaaaatcttgacaagatattagctg

SEQ ID NO: 4542 - DNA, 1159 bp, unidentified
  source 1..1159: mol_type = unassigned DNA; note = element_6e8d180
  misc_feature 1..2: note = core
  misc_feature 3..148: note = LE
  misc_feature 149..1147: note = CDS
  misc_feature 1148..1159: note = RE
cttctgtatctgcgctttgctaatctcctcccaccaccgaccttggccgaggccggtggtgggacggtgtatggcgtctgagccttgtggcctgaccacgtttgctagcgagccagcaccgtctctcttcatcgtctcgaacagttgaatgtggccgatcaggaccacgaagcagaaggaagagagcatggaaacggtagcacacgaccggatcatcggcatagatgtctcgcgggattggctggacattcattgcctgccggatggcaagtggttgagattgccgaacgcggatgaggggcacgaacagctggtgcggttggctcgggacgtcaacggcctggtctgcttcgaggcaaccggaggccaggaatggcgtttatgggcggcgctggaggccgccagcgtggcgacgcgacaattgccgccagcgcaaatcaaggccttcgccgcaagccggggcacacgggccaaaacggatcggatagatgcggaactcatcgcccggttcatgatgttccggcccggtgccgggcgcagtctgccacatgaaaagctgcgggttctcagagccttgacgtcaaagcgcgggcagctcgttgagagcagaaaacgccttctggcacagataaaggcgcatgggaaactgggatctgccgagatgttcgcgagtatggacgaccagcggcgcacgcttctcgaccgccaaatcgcggatctggaggcgcggattgaacagaccatcgctgcagacgatgaactggccgcaactgccggtatcctgcggtccgtccccggggtcggcccggttgccagctcgatgttgatcgccgagatgccagaacttggtcagatcacaggcgagcaggccgccgcgctcgcgggcctcgcaccgattgcacacgacagcagagcgatgcgtggtaagcgcgctatcggcggagggcgacgactgctcaggcacgtaatattccaggcggccctcgttgccagccaccacaatcaggtcctgaaaaccttcgcggatcgtctgcgtgccgcaggtaaaccacacaaggtcgtcattgtcgccgtcgcccgaaagcttgtgaccatcgcaaatgccctcgtcaaatcagggcaaaaatggacgcctcatccagaatgaacaatacagttg

SEQ ID NO: 4543 - DNA, 1545 bp, unidentified
  source 1..1545: mol_type = unassigned DNA; note = element_6e9acd6
  misc_feature 1..2: note = core
  misc_feature 3..259: note = LE
  misc_feature 260..1435: note = CDS
  misc_feature 1436..1545: note = RE
  misc_feature 25..234: note = bridgeRNA
cttgtataattaatttgtattaaattaactatactttcctttctttaagattttatattaatctcctataatgaaattacaaacgttgtggagtgtgacatttgacacctactccttgagagtgatatggagggtacaaccacaactaatatgataaatgtgaattagctagtaacacttagagtgtgtatttacaaggttacatagtattagtcatgtgggttcataacgtttgaataaaataaggaggttttttattttgatttatattggaatcgatgtcgcatctttaaagcatgacatcatcattattgatgattatggagaaatcatcaaagatcattttacaattagcaacgatagagtaggttttaaaaaactccatacagagatcaagtcctgtatgaagtcagttaatgacatacatataggaatggaagaaaccgggatatatcacgaaaacttaagagattttttgatatcaaaaggtttcactgtgtatactataaatccattactaacatcttatagtcgcaaagcttcgtccccacgaatgactaagactgataagatagacgcaacggcaatatgccgttatataatgaataacattaagggtctccattcctatatgccttcattatatcatctagatgaattaaaacaaatatctagaaactaccactctaagaagcagcttctttccaggagtaaaacagaactaaaaagattacttcatatatcatttcctgaattcaaaatacattttgatccattctctaaatgggcgctagaaatacttaatgattatccattaccaatcaactatagtggtctacatacaactacgttagcaagccgtctaagaacaaagagtgatcgttataatcaagctatattacttaagcaattagcaaaagattctatcggtaaatccaatagttctcaagcattcctaattcgttctatcataagtgatatcattcactatgataaacaaatcaaggttcttaaaaagactattacaactaaattaaagctgtttcctaaaattacttcagtaccaggaatagggcctattaatggggcaacaatcttaggagaaacaggtgatatccatcgctttaataataagcatgcatatttcgcctattatggattagatcctattgtttatgagtcagggaaatataaacttaagaaatctaaaatatctaaacgtggtagtaggtttcttagaaccgcagcttttagtgcatcccgagtagcttgtgtaggaaagtctaaacagtctaataagttcagggaaaagtactatcgtatgaagaaatcagggaaacatcataacacaattatatgtgcagtttcaaaaaacataattcattcaatctacaaaatccttaaagacaatattttttatgatgattctaagtaagtaaatttctattcatatataaatttacggttctttgaacctcttttaaatatgtcttattactgaatttttgactatttttatcttttacttgttttttctatagctag

SEQ ID NO: 4544 - DNA, 1433 bp, unidentified
  source 1..1433: mol_type = unassigned DNA; note = element_6eaee76
  misc_feature 1: note = core
  misc_feature 2..68: note = LE
  misc_feature 69..1106: note = CDS
  misc_feature 1107..1433: note = RE
  misc_feature 1211..1427: note = bridgeRNA
taatggaatggtccgccgcctttacccagccagcgactgaggtataagaagcgtacggaggagcatccatggaactacacacgatcggcattgatctcggcaagacagtctttcatctcgttggtcttgatctgcgcggcgaagttgtggtgcgcaagaagttatctcgaaagcagttgctgcactacaccgcaaacctgcacgtcgggctgatcggcatggaagcctgtggcggcgcacacttcctcggtcgggcactgcgcgagcaaggacacgaagtgcggttgatgccagctcagtatgtgaagccctacgtgaaaacgaacaagagcgatttcatcgatgccgaagccatcgcagaagcagtcgcacgcccgagcatgcgcttcgtgccgatcaagaccgatgatcagttggatatgcaatcgctacatcgagtacgcgaacgctgggtgatgcgtcgcacggccatcgttaaccagattcgcggattattgctcgaacgtggcatcactctacggaaagggcggaagtatgtggatgcagctttgcctggcatcctggaagacgccgcggcaaagctatcaggcgcattgcgcatcctgctggctcagctaaaactggaactcgatcagatggcggtgcggatcgatgaggccgatgctgtactcaaccagaccgctcgtgagagtgctgcctgccaacgcctactcgcgattccaggcatcgggccagttacctcaactgcactcattgctgccatcggaaccggagcggccttccacaaagggcgggagtttgcagcctggatggggattgttccacgcgaacactctacgggaggaaagcaaaaactgctcggaatcagcaaacgagggaacacctacttgcgaacgttgttcatccatggggcacgcgctgtcctacaacaaagagccaagcagacctctggtctgagggcgtggctggcgcaactgacggcccgcacccaccccaacgtcgccgtcgttgcgctggccaataaactggctcgcatcgcctgggccgtgctggcaaagaacgaggtgtatcggccgctgatgttgatcggcccggccgcggcctgactggcctgcaaatgacgcctggcttgatgccaggcttggaaatcgcatccgcgattcccacattcgcaacccagcgacgacgactacggaattatgatttcctgccaggtctgctggcgaacaatgagatgactcaacggtcaaacccggcgctctccaaacctgtggagtaaaaaagtcttcacaagactgactatttaagaaggacgagagcgcagcgcattccatcatggccaggagagaactctccaacaaaggccgaatacatttgcgcagaccaacacgtcaccatcatttttcgcttgcaacatagcggcggaccataca

SEQ ID NO: 4545 - DNA, 1378 bp, unidentified
  source 1..1378: mol_type = unassigned DNA; note = element_6eb8afe
  misc_feature 1..3: note = core
  misc_feature 4..88: note = LE
  misc_feature 89..1111: note = CDS
  misc_feature 1112..1378: note = RE
  misc_feature 1149..1365: note = bridgeRNA
ggatggtgtggatggctcctgtccccggcgtttagcttcgccataatgcagttgttatcaataactgtgaaccataggagccacccaaatgcgtattaccacaataggattagacttagccaagaacatttttcaagtccacggtgtgacggaagatggaagtatcgccttcaataaacccctgcggcgagcacgcgtactgccgttctttgccaagcttgagccttgcctcataggtattgaagcttgcagtagcgcccattattggggccgcgagctgacagccctcggtcatcaggttaagttgatgccgccgagttatgtgaagccttatgtcaaacgtggcaagtctgatgctgctgatgcagaagccatatgcgaagcggtgacacgtccgaccatgcgctttgtcgagattaaatcagccgagcaacaagccttattgtctcaacaccgtgcgcgtgaagtcatggttgggcaaaggacacaactctcgaacacgacacgcggccttctcggcgagttcggtgtgattatcccgaagggcttggaccatatccgccgatttgcggaagatgttaagcgagatatttatccagacctgccagatgtggcgctaggtgttatccagtcattgtgtcagcagcttctgtctttgaacgttcgtatcatagagcttggcaaggccattgcagacgtcgcgaaagcagatgggcgtatcaaactcctccagaccataccaggtatcggcccgaacaatgcgtcagccattgttgcgaccatcggcagtgctcatcagtttaagagcgggcgtgaccttgcagcatggatcggactaacgccgctcaataaatccaacggcggtaaagaacgccttggcaaaatatcgcgtatgggagatcggtatctacgccagcttgtcgtcgtgggtatgtcctcgcgggtcagaatggcccgcagtcatcctgaacgcgttgacccatggaccctttcaatattggagcgcaaaccaataaggctcgcgacagtagcaatggcgaatagcacggcccatatcatctgggcggtgctgacgaagaatcaaccttacgcaccgagaacggcggcataaagcgtaataaaactagactaacaaaggagtaggtgcaatcagtttacaaggacgatgagagtgatggcgaaccggttagaccgggagcgaggataaaccgtctaatgtcccggacatcaatagtccgaattgcggaatggaaccttgttcgcggaaaccattagggccagcggtctaaaccgcgctaacaggccggacacagggccgtacctaacttaggtcaaaatcattcgaatgaacccttgcaaagtgggagccatccacaca

SEQ ID NO: 4546 - DNA, 1500 bp, unidentified
  source 1..1500: mol_type = unassigned DNA; note = element_6eba732
  misc_feature 1..2: note = core
  misc_feature 3..247: note = LE
  misc_feature 248..1480: note = CDS
  misc_feature 1481..1500: note = RE
  misc_feature 7..243: note = bridgeRNA
ctaatgggtctgtgccgggcttgtcggttgtggcaggttcggttgtggtagcggctggcgggtcagcactcatggcgactggagttcgtgagtccttcaatcagagcgtgcgcccgctggttcgcgagggacgagatcgctgctgggatgtcgtgccccggtgtgaagctggtgagcactcgatccattagtccgctgacatgtctctcggggctacctcgtgtgggtcgacgacgaggagagcgtgatgatgttgttcatcggtgatgactgggctgagggtcaccatgacatcgaggttcaggacgatcagggaaccaggctggttaaggctcggctgccggacagtgtcgaagggttggcacggttgcatgccgtggttgcggagtattccgcgctggctgatcacgaggacggggtcgtgcccgaggtcgtggtcggcatcgaaaccgagcgtggggcgtgggttcatcagctcgtggcttcggggtaccgggtgtatgcggtgaacccgatgtcggcggcgcggtaccgggagcggcattccacctcgcgggcgaagtccgatgccggggatgcgcatgtcctggccgaggttgtccggttggaccgtcagcatcatcgggagattgctggcgactccgagcaggtgacggcgttgaaggtcgccacgcgagctcatcagagcttgatctgggaccgaacccgccaccagctccggctgcggtcggcgttgatggagtacttcccggtgctcgtcaccgtcttcgctgacctcaccggatccgacgtgctggaactactcacccgtgccggtaccccacagcaggcagcgagtctgactcgaccgcaggtacgggccatactcaagcgagccggccgccgcaacctcgaccaccgcaccagcgtcgtcgtggacgcgctgcgggcgccggcgctgcgtcagccgccagcggtggaagcggcctacggcacagtggccgcgacgcaggccgcgctcatcaccacgctgaacgctcagatcagcgagctcgaaggggtgatcaccgagggttttggacgccacccggacgctgacatcctcagcagtcaaccgggcctgggcccggtcctgggcccccgggtgctcgccgagttcggggacgaccccgaccgtttcaccagcgccaaggcacgcaagaactatgccggaacctcacccatcactcgcgcctcgggcaaacgtcgaaccgtgctcgcccgccacgtgaggaacaagcacctcgccgacgccaccggcagctgggccttctccgccctgaacgcctcacccggcgcccgcgcctactacgacaccctccgagcccgcgacatcggacaccaagccgcgaaacgccagcttgccaaccgcctcgtcggcatcctccacggatgcctcaagacacacacgccctacgacgaaacacgcgcctggcccaccgccactcaccccgccgcttgacccctaacgtcctgggatgt

SEQ ID NO: 4547 - DNA, 1526 bp, unidentified
  source 1..1526: mol_type = unassigned DNA; note = element_6ebbfbe
  misc_feature 1..3: note = core
  misc_feature 4..240: note = LE
  misc_feature 241..1407: note = CDS
  misc_feature 1408..1526: note = RE
  misc_feature 8..221: note = bridgeRNA
tttcgtattatcaggtcagccagaatttctggttggccttttttcatggccgggttacgatggcggtagccgggagaacgtggctttttttggggtaagacctcgtaaaaaaaactgttctcccactacctccaatgaccatgtttgagctggttgaggcattagacctcgcatcacaagcgaagctgtgggattggaaccatcgtgggagtgccggcaaatcatttaaggggagatggtatgggaccggttgtcggattggatgtgtcgaaaggaacaagcatgcttcaagcctttacggagcggaacaagccgtatggtaagaccaagagcattgcgcatacgcctgaagggtttgaacagctgggcgatttactggtggaattaaaggagaccaccgagctcgaacctaccgttgtactggaagcgacgggtcattaccatcgcaacctggtcgcctatttggagcgtgagggctatcgccatttcatcgtgaaccctctgcaagccaagcgcgcaaaaggcacacacctgcgaaaagtgaagaccgatgcgacggatgcctggcacttggcagagatgttttaccgtggggatcttcaaccgcatcgaacatgggcggaggaattaacccagctgcagcatttggcgcgacagcatgagtttatgacttctctgcttgtccaaaccaaactgaacgccaggtccttgttggaccaagtctgtcctgcttacgaaaccgtgtttgacaacctgtattgcacaacatctttgcaggttttgctccaaatgctgagcggcatcccgatcacagcggcaacaattcgggaggcagcaggttcgtcacacggcaaagcgtggattcaggaaagactggatcggattcaggctttgccaccattaagccaatcgagcaaggcgcaacagatggctttgctgagcgtggtgaacatggtgctgaccggacaagaacaactgcgccagcttgagaaagctatggaagagctggcgatgatgttgccggaagtggaactgctgaagacgattccaggtgtgggggacaagcttgccgcagtgctggcagcagagattggagatgcgtcgcaatttgagactccgaaacagctcgtggcctatgccggattggatccgggtgtatacagctcggggaagtttacggccagcagcaaccgcatttcgaaaagaggctccaaacgtttgcgcagagcgctttaccttgccgttcaatgcgggcttaggaatggcgtaaataaacggctgaaagcatacttcgagaaaaaaagaaaggagggcaagccctacaaggtcgtcgtgatcgcttgcgccaacaagcttttacatcacatccacgccatccttgtgaaaggcgagccctacgaagtctaaatcccatatttacccagaaaagcatccgcaccatcggaggcttctttgggttgcctaaaaagagtataacagtatccttaccaaaatccaagcactgagggttgacaaacattagctgg

SEQ ID NO: 4548 - DNA, 1255 bp, unidentified
  source 1..1255: mol_type = unassigned DNA; note = element_6ec8205
  misc_feature 1..2: note = core
  misc_feature 3..80: note = LE
  misc_feature 81..1097: note = CDS
  misc_feature 1098..1255: note = RE
agatgtaatgaaaacaagaaaaggcgtgcctccaagggtagagtacgtgctcgaagcacaagccctgaaggaggcacgagatgatccacgttggcgtagatcttcaccagagattttgttacatgacggcgttggaagcaagaggcaagattctgcaggcggggacagtgaccaacgagaagctggcactgcggcggtattttcggcagtttcgggggaaggaagtacaggtggcggtggaggcgtgcggcttctggccggcgtttcgcgaagtggtggaaccggaagtgaagcggttggtgctggtgcatccgcagcgggtcaaggcgattgccagtgccaagctgaagaacgaccgagtggactcggccacgctggcgcacttgttgcgctgcgacttgttgccggagtcgtggaaggcggaccgggggacgcaggcgcggcgacagcaggtgcgtttgcgggcgacgttggtgcggcatcggacgcggctgaagaaccaggtgcacgcggtgctgcatcagcagggactgcgttcgccggtgacggatttattcggcaagcgcgggcgcctgtggctggcggaagtgaaactgccggtgcaggcacgggaatcggtaaatgtgtgtttgcggctgttggacgggtacagcgaagaaattcaaaaacaaaatctgcaactaagtgaaaaagcaaaacaggacaagcgggccgagtggttgatgacgattccagggattggggagtgttccgcgatgatgctgttggccgagatcggagacatcggacgatttcaggacaaagaagctctgtgcagttacgccggactggtgccgcgagtgcgggagtcggcgggcaaggcggcgcggggcggcatcacgcgccagggttctccctggatgcgctggatcctggtggaagcggcccaggtggcgacgcgttgttctccggcggcgaaacgttactatgaacggctggcgcgcaaaaagcacaagcacgtggcgcgggtggcgctggcgcgcaagctgctgatcgcggtctacgccctgctgcgcgacggcgtggtgtttgacgaacaaaagtttgcgacggtgtaaggggaatccgtcagctcgaagtcatccttgctcttcgagagcgacgctcagatggagcggcggagtccggacataccttatgtgcctcgagcacgaatagaagcctgtccgcatcgccgcaacaaatacctatggacaggtacgccctttttcataga

SEQ ID NO: 4549 - DNA, 1510 bp, unidentified
  source 1..1510: mol_type = unassigned DNA; note = element_6ecb6c4
  misc_feature 1..2: note = core
  misc_feature 3..250: note = LE
  misc_feature 251..1489: note = CDS
  misc_feature 1490..1510: note = RE
  misc_feature 16..233: note = bridgeRNA
ctaatggcagctgctgggtctgtttggcaggctcggtttctggtagcgaccggtgggtcagcactcttctcatctgacccttgcaggtctcgcggcagaccgtgcgcccgctggtcgtgaggaggcgtcaccgctgctgggatgacgtgccccgtgaggttgcggtgagcacttgaccattagatcgccggctgtctcctccacgctgctgacggtgtccgcaacgaggcgggcccgggagggaggcgcgatgttgttcgtgggagacgactgggccgaggaccatcacgacgtcgagatcgtcgacgaggccggccggttgctggcccgcagacggctgcccgagggcctgcagggggtgacccggctgcacgcgctgatcgcggagcagatgcctgatgactgggccgacctcgagcccggtgcggcgaccgggcgggtgaaggtcgggatcgagaccgaccgcgggccctgggtgggcgcgctggtcgcggccggctatgaggtattcgggatcaacccgctctcggtggcccgctaccgggagcggcactcgacgtcgggggcgaagtctgatgcggccgatgcgcacctgttggccgagatcgtccggctggaccgggcccatcaccggccggtggccgcggacagcgctgaagccgaggcgatcaagctgaccgcccgcacgcaccagtcactgatctgggaccgcacccggcacgtgctgcggctgcggtcgacgctgcgggagtactttcccgttgccttgcaggccttccccgacctggacgcccctgacgcgcttgagctgttgggtcgggcaccggaccccgaccaggccgccaggctgagccacaccaccatcaccgctgccctgaggaaggcccgtcggcgccacctcgaggaccgggcccacgaactgcagagactgctccggactcaggggctgcggcagccaccggtgttgcaggacgcctacgccgccgtcgttgcaagcgaggtcgccgtcatcgccaccctgaacatgcagatcgagcggctgggggcggtggtgggcgagtattttggccggcaccgggacgctgagatctacaccagcctgcccggcctcggtgtgatcctcgcggcccggatcctcggcgagttcggtgatgacccggaccgctacgccgatgcgaaggcgcgcaagaactacgccggcacctcaccgatcaccaaggcctcggggaccaaaaaggtcgtgctcgcccgctacgcccgcaaccgccgactcggtgacgcactccaacagtgggccttctgctcgctacgcggatcacccggagccgccgcctactaccaacagctccgcgcccgcaacatcggccaccaagccgccctgcgacagctcgccaaccgcctcgtcggcatcctccacggctgcctcaagacccacaccagctacgacgagaacaccgcctgggcacacatccagacctcggccgcttgacaccctaagaacctgggatgt

SEQ ID NO: 4550 - DNA, 1600 bp, unidentified
  source 1..1600: mol_type = unassigned DNA; note = element_6ecc40d
  misc_feature 1..3: note = core
  misc_feature 4..299: note = LE
  misc_feature 300..1475: note = CDS
  misc_feature 1476..1600: note = RE
  misc_feature 35..277: note = bridgeRNA
cacgtataatccaattatcctcttttgagggtaatggattattctcctttctccccaatctcttgggatttattgaatactccattataatacttaaagcactgtggatctgtttctattctatcacagctttgactgttccgaggtgactcaggccacagcttttcgtctattactggtaattagtttgttaacgcatagaactattcgttcattagacgtttctatttccgtgattacacagccgaattctctgtgggagacaacagtgctaaatattatttcaggaggtcctatctatgtctctgtactttgttggaattgatatttctaagtacaaacacgattgctgcattatttcagcagctgatcaaaaagttatttcaaagttcactatcaaaaatgataaagctggttttgaagaacttattactactttcaactctctctcaaatcctgaggatataaaaatagggtttgaatcaacagcccattattccctcaatcttgaactcttccttgaaaatgccaaccacagcttcgtggaagtgaatccagttttaatcaaggaatataaaaagtctacgactttaagacgaaccaaaaccgactctgttgactgcgaatcaatagctcgttggttaatgactgtcgagtacaaaccccattcaaaaggattttaccacgcttattccttaaagtcattaactcgtttacgtgaccgactaattcgccagcgttccttctatcttgtaaagattaccaacgtgttagaccatacatttccagagtttaatcctttctttaatgaacgattatccaaaacagctttatatctgcttgaaaactatggttctgctgaaaagatggctcgtatgaattctgcttcttatgataaacttcgctgcatttcaagaggtaaattctccatacagcagtttctccgtttaaaggagcttgcttccaatacagttggtgttaataattccatcttcgatattgaactcaacagtttattaactctacacaaatctctttgcacagaaatcaacactctggaaaatgagattataaaacttataggaaaagtgcatccacactatatgtccataccgggtatcggtcctatttcagcggctgtcatttacgctgaatacggagacatatcaaactttgataatcccggacagatgctcgcatttgccggcattgaacccggcattaacgaatcaggaacggaatctcacagaggcagaatggtaaaacatggttcttcacaactccgctatgttcttcttaatgcctgccttcctctaatccgctttgatttaacctttgcaacctattatgcaaagaaacgtgcagaaggtaaaaaacacagggtagccatgacacatgtagcaaagaaactgattagagtcatctatgcattggagaggcaagatatcgactttaacgctcagaaaattcgctagtcctctaccttacatatcctttatctgttccatctgaaatacgatgtattcagatggcttattaaggttaccctttttataatcaaaaatttttcttcaaaacctcttgactatttatagtttgt

SEQ ID NO: 4551 - DNA, 1424 bp, unidentified
  source 1..1424: mol_type = unassigned DNA; note = element_6ed1f38
  misc_feature 1..4: note = core
  misc_feature 5..204: note = LE
  misc_feature 205..1410: note = CDS
  misc_feature 1411..1424: note = RE
  misc_feature 1..174: note = bridgeRNA
ttccgtaagactgttggtggtccgggagggccgggtgtggctgaaatcgccttgcgctgtggtcgctgattgggaatgtccacccggtcctccgggacgcctcggctgctgattgagatctgcgctcggtcgctggttacggatgcgtcagcggggtgttccacgggaccgctgtcagcacccggtcgacggacggagacacgcatgacggtagttcgggacaaggcatggatcggcatcgatgtcggcaagacccaccactgggcgtgcgtcgtggacgctaacggtcggaccttgtcatcggtcaagctcgccaacgacgaaaccgacctcgtcgcgttcgtggaccgagcaggttcgctggcgcagcagctgatctgggccgtcgacatcatcggcgcgccgtcggcgctgctcctcggtgtgctggctcgggccggccactcggtgcactacgcatccggtcgagtggtggcggcgatgagcgctgcgtacaccggcgaaggaaaaaccgacgccaaagacgcgtacgtgatcgccgagaccgctcgcctgcgccgggacctgacggtcatcgatgccggcaccgatctggtgcgtaacctcgccgtgttgaccgggcaccggacggatctgatcgccgatcgcgtccggatgatcaaccgactgcgcgacctgttgaccagtgtgtttcccagcctggagcgggcattcgactactccgcccacaagggagcgctggtgctgctcacccgctacgccagtcccgatcggatccggcgcctcggccagacccggctgacgcagtggttgcggaaccggaaggtccgcggcgccgacgacgtggcggcccgggcgctcgccgcagccgaagcgcagtcgatcgtgctgcccggacaagagctcaccgcaacgatcgtctccgagctcgccggcgcgatccttgctctcgacgaacgagtcaaagccctggacgagaagatccgccacgagttcagccggcacccgcaggccgagatcatcgagtcgatgccgggattcgggcccttcctcggcgccgcactgctggtcggtgccggggatctgcgagcatttccgaccgccggtcatctcgccgcggccgccggactcgtgcccgtgccgaacgactccggtcggcgcaccggcaatctgcaccgaccgttgcgttacagccggccgctacgtcatgtgttctatctctcggcgcaaaccagcatgatgcgtgccggcccgaaccgcgactactacctcaaaaagcgtgcccgaggcgccacccacacccaggcagtcatcgcgttggctcgacgccgcatcgatgtgttgtgggcgttgttgcgtgagaaccggacgtggacagccacgcctccacccgccgctcaggcggcttgacatcatcattgaga

SEQ ID NO: 4552 - DNA, 1169 bp, unidentified
  source 1..1169: mol_type = unassigned DNA; note = element_6ed271d
  misc_feature 1..2: note = core
  misc_feature 3..209: note = LE
  misc_feature 210..1163: note = CDS
  misc_feature 1164..1169: note = RE
  misc_feature 41..215: note = bridgeRNA
cttgtattagcgcgaatcattacagtgcgatcgttccgtgaggaacgacccggcccaggtggccacctgggccgggtcgccggtcgtcggatcgatgcccatcatagcctttagggctgatggtcgtagcaagatcgcgatcggcacttcatcgggcccggatggttgaaggaaccgagggttcgcatcacaaggaagggtcgacgaagatgcaccagcataacatgatctgtgccgggatcgacaccggcaagcgcaagctcgatgtcgcactcacggatggtcggctgccgcttcaggccgacaacgattccgcgggccacacgaaggtgtcggcatggttgtgtaagcatcgcgtcaagcgggtcggcattgaagcgagcggcggatacgaacaggccgtcgtcgccaagttgcgccgcgatggtttcgtggtgattgtttttcagccggcacaggtgcgagcctatgcgaagtttcatctgcaacgggctaagaacgataagatcgacgccgctttgatcgcggtgtgcacagcagcgacgcaaaagatccatagcccgccagacccgcgtttggcgccatttgccgagcatttgacgctgatcgagcagatcaccgaagacatcacgcacgtcaaaacacggcgcgagtcttgccgcaacgatcgtatccggcgccattgggacggcgagattgcacgtctcaagaccctgctgaggacggagctcaaggcactcatcgcggcggttcgccaacaccgcgatctctcaatgcggctcgacctgattgccagcatcggcggcatcgggcttaaaactgccgtcgccatcctggtgcgcatgcccgagatcggccgcgtctcacgcgaacaggctgcggcgcttgccggtcttgcaccttatgacgacgacagcggtgatcaggtcggcatccggcacatcgccggcggtcgcgagcgcctgcgaaagagcccctacacggcagctctggcggcggcgttccactggaatccccagctcaatatcgtctatcgccgcttgatcgctgccggcaagccgcacaaagttgcgctcgtcgcttgcgccagaaagctcctgatctacgctaacaccgtcgtcgagcgaggaacgccctggaccgagcagcctgtcgcaatctaatggttg

SEQ ID NO: 4553 - DNA, 1157 bp, unidentified
  source 1..1157: mol_type = unassigned DNA; note = element_6ed46db
  misc_feature 1..2: note = core
  misc_feature 3..121: note = LE
  misc_feature 122..955: note = CDS
  misc_feature 956..1157: note = RE
  misc_feature 906..1101: note = bridgeRNA
agatggggtattggggctggcctatgcgacgggctggcaggacgggtggctgcgcttcaggctgatggtgagaacgaggtccgcacgaagcggcctcaagcatcagaggagaaacgcagccatggaacactatgtgggattggacgtgtcggtgaaagagaccagtatttgcgtcgtcgacggcgcgggccaggtggtgcgcgaggtcaaggtggcaagcgagccgggggcaatccttggggttctggcagatgaggccttcaccctcaagcgtatcggcctcgaggcggggccgttgtcgcaatggctctacggggcgcttgccgaagcggacttgccggtgatctgtgtcgagacgcggcacatgaaggcggcgctgtcggctcagatcaacaagagcgaccgcaatgatgcgcgcgggattacgcagatgatgcgggtcggcctgtaccggcgggtgcacgttaagaccctcgccagccagaaacggcggatgctgcttacgagccgccaactgctgcaagccaaggcgcacgacatcgagagcgacctgcggggcacgctgcgcaactttggcctcaaggtcgacccggtcagccgggggaagttcgaggcccggatccgcgagctggtcgtcgattgtccgggcctggccgcgatcaccgggccgttattgatcgcctggcgggccttgcgcgagcagttcgcggtgctacatcgccagctgctcgctgtcgtgcgcgacgacgcgatctgccatcgactgatgacggtgcccggtgtcggaccggtggtcgcgctgaccttccgcgcaacggtcgacgtgcccagccgcttcgcaaactccaaggcggtcggtgctgtcttcggcctgacgccgcgtcagcaccagtcgggcgaggtagagagttccgccggctggtggagcgatgtcgtccgcagggacgatgggtgaggcgagtccgtcctgtcccttgtcctgccgtcgatcctacggcaaggacgttcggtagattgttccgccccatcctcctgatcccctcatgggagggcctgcgtgccgatcccgaagagaagcgaggatcctgcgagcgacatcaacgccagatcgacggaagagccggaaagcgcttgacactaacccgccccaatagaga

SEQ ID NO: 4554 - DNA, 1426 bp, unidentified
  source 1..1426: mol_type = unassigned DNA; note = element_6edde7e
  misc_feature 1: note = core
  misc_feature 2..113: note = LE
  misc_feature 114..1142: note = CDS
  misc_feature 1143..1426: note = RE
  misc_feature 1151..1355: note = bridgeRNA
agttggtatgaagcggctggacctccacggtcacgtggtggcagtgttgcgccccacaggcgtaatgcgcggtcaagggatccatgccgcaccaaccaaccgggaggccagccgtggatagcatagggattgatctccacaagcgcgagagccagctgtgtacgatcacggaggacggggagttgatcgagcagcggatcgtcacgagccgggagcggttcaccgcggtgctcggcagtcgcccggccgcgcgcatcctggtcgaggcctcgacggaaagcgagtgggtggcgcggcatctggaatcgctgggccacacggtgatcgtggcggatccgggcttcgcggcgatgtacgcgacgcgcgccaagcgcgtgaagaccgacaagcgcgacgcgcgcacactctgcgaggcgctgcagctcggcgcctatcgcgccgtgcatcgggcgagcgacgcgcaacggcatgtccgcgcgcagctcgcggtgcgcgacgccctcgtgcgcacgcggacgcgctacatcgccctcatcaaggcggcggtccggcgtgaaggactgcggctgcccagcggtgaggcggagcagaccatcagcaagctcgccgcgcttgcgctaccgccgtcggtgcacgaagaactcgcgcccctcgtcgccctttgggcaccgttgcaggccgagctcacggcggccgatgcgcggctgaccgccatcgcacggacacatcctgtcgtcacgcgcctcgccacgatgccgtcggtgggaccggtcactgccctcgcgttcgtcgccgcgctcgatgacatcacgcggtttcacagcgcgcaccaagtacaagcctctctcggtctcgtgccgagcgagtacagctcgggcgaccgccgagcgcgcggacacatcaccaagcgcggcgacgcgcgcatgcgctggctcctggtcgagacggcgtggcgcattgtgcgctcgcccaacccgcagcgggcgggcctgaaggcgtgggcgatgcaaatcgcgcagcggcgcggcaagcgcatcgccacggtcgccctggcgcggcgagtggccgggattctcttcgcgatgtggcgcgacgacgcgccgtatcacgccgtgacctcccccacgcgcgccgctgcctagcgcccacgatccgagcagcgacgccgggtcgagattccgggatgattgacgaggggcgtggtgagcgcgatgcagctgatggccgctggtgagaccgaagctcagcttcggcgccgcccgctccgttccgcatgaccacctgcgccgacgagcgcttgttcgtcacccgagagcgcgaacagaagcctgagcagcatctcgagatcgcgacgccaccacgatggagcacaccacgtatcagctcatgcagagttgatgcttgacaccgtacgccgcttcacaga

SEQ ID NO: 4555 - DNA, 1424 bp, unidentified
  source 1..1424: mol_type = unassigned DNA; note = element_6ee7911
  misc_feature 1..4: note = core
  misc_feature 5..207: note = LE
  misc_feature 208..1410: note = CDS
  misc_feature 1411..1424: note = RE
  misc_feature 1..193: note = bridgeRNA
ctccgtaagttgttgggcggcccgggagggccgggtgtggctcaggtcgccttgcctgtagtggctcggaaggagtggccgtccggttctccggggcgccctggctgctgattgagatgtgcgcgccttgtgcggtcgctgattacggagatgacagcggggtgttcctcgggccgacggcatgctgttggtgacgaggaggggcgtgtgagcaaggaacgggaccgggtctgggtcggcatcgacgcgggcaaggcccatcactgggcggcagtggtcgacgagaccggagccaccttgcggtcgaagaagatcgacaacgacgaggcggccatcctggccgcgctcggcgagatcctggccctggccgacgaggtccgctgggcggtggacatctccggcacggcttccgcgctgctgctggccctgctcgcggctcacggccagcgagccgtttacgtacccggccgcacggtcaaccgtatgtccggcgcctaccggggcgaggccaagactgacgcccgcgacgcctatgtcatcgctgagaccgcccgccaccgcaacgacttcgccgcgatcgacgtgccggcccagctggccgccgacctcgcttggctgaccgcgcaccgctccgacctggtggccgatcgggtacgaatgatcaaccggctccgcgacgtgctgaccggcgtcttccccgcgctggagcgggctttcgactactcaacacacaagggtgcgctggtgctgctgaccggctaccagacccctgctgccatccggcgccgcggccggactcggctgacggcttggctggccaaccgcagcgtccggggcgccgatacggtcgccgccaccgccctggaagccgctcaggcccagcagaccgcgctgcccggcgaggacgtcgccgcccagatcgtcgccgacttggcagcgcagatcctggccttggacgaccggctcaatcggatcgacaaacagatccgcaagaccttccgcagtcacccgcaggccgagatcatcgagtctctgcccgggatggggccaatactcggtgcggagttcatcgtggccgcgggtgacatgtcggcctacgcggacgccgggcacctggcctcggcagccgggctcgtgcccgttccccgtgactccggccggcggaccggcaaccttcaccgacccaagcgctacagccgtcgcctgcgccgagtgttctacctgtcggcgcagaccagcatcatccgcgacggcccgaaccgggacttctacctcaagaagcgcggcgagggctgcaaacacgttcaggctgtcatcgcccttgctcgacgccgggtcggcgtgctttgggcgctcctccgtgacggacggctcttcacctccgtcccgccggtcgcgcaagcggcttgactcagtcattgaga

SEQ ID NO: 4556 - DNA, 1253 bp, unidentified
  source 1..1253: mol_type = unassigned DNA; note = element_6efb8e4
  misc_feature 1..3: note = core
  misc_feature 4..211: note = LE
  misc_feature 212..1216: note = CDS
  misc_feature 1217..1253: note = RE
  misc_feature 2..195: note = bridgeRNA
tgcctttagtttgtatttatataaaaatacaataaattaactgaataggaaacgggtgaacttaaacgttttgtaggtgagaagccctaatggtcgcattagtcccgtttccatattcagacttgctagaaccaattggaatgataggctttaaggcccgctaaaggcaatagtcaagcaagttttatttactaacgttaaaaacaaaagtatgaaaaaagagaaggaaattaaagagagtgttggtattgatgtatccaaactaaccttagatgtgtttattcacacaaagcgacttcacaagcagtttttaaataataagaaaggctttgaaggtttgcttaagtgggtaaaacaagaaacaaagaacacagagggggtgatctggtgctttgaacacacaggatggtattgcgttttgctgagccattttatgcacgaaaacaaacagcattactgttgtgttaatccaatagagataaaacgctcaatgggtttaaaaagaggaaaaacagataagcaagatgcagaagaaatagccaggtttgcgtggttaagaaaggaagaattagaaacttcaattcctatgccggttaaattaattgaactgcaaagactcatgagtttgagagaacagcttgtaaaacaaagcacggctttaaaaagcttaagtaaagggatgcaagtaaccttagaaaagaaaacaggagatctaggtattgggataataaagcaaagcttaaagcatatggaagttcaaataaagaaagttgaaaaagcaatgcaaactctgataaaaacagaagatcaaatgcagaaaaattataagatgagcaaaagcgtaaaaggtgtaggaaatgttttagcaactcaaatgttattacatacccacaactatactcgtttcgaaacatggcgagaattctcatcctattttggcttggtgccatttccatatcaatcaggaacgagcattcatcgcaaaccaagaaatcattccatcagtgataaaaaaatgaagagcttattatccatgtcagccataagtgcaattcagtcagataaagagttgaaaatttattttaagaaaagagtagaagaaggtaaaccaaaaatgcttgtgctaaatattattcgcaataaaattgtttcaagaatttttgcaacagttaaaagagggacaccgtttgttgagatgaataaatttgcagcgtaaaaaataattgttaaaagatttgttttttaccttggaa

SEQ ID NO: 4557 - DNA, 1318 bp, unidentified
  source 1..1318: mol_type = unassigned DNA; note = element_6f0520f
  misc_feature 1: note = core
  misc_feature 2..90: note = LE
  misc_feature 91..1095: note = CDS
  misc_feature 1096..1318: note = RE
  misc_feature 1094..1312: note = bridgeRNA
gaatgaaagggacttcccctggccggcgacggcatcgaggtgccaagattgaagtgtctgtgttcaatctaaatagccggaggggaagttatggaacagattactaccgtcgggatcgatctggcaaagaacgtgttctcgcttcatggtcgtgatgcatctggcaagacggtgtatcgccgtacggtgcgccgcgatcgactggttgagacagtggcgagtttatcgccgtgtctgatcgggatggaggcgtgctcaggtgcccatgaatggggacggcgcttcgagcagcacgggcatacggtcaagcttatggcgccgaagttcgtggcgccctatcgcaagagcgacaagaacgacggcaacgacgccgaggcggtatgcgaggcggtgacgcgacccaacatgcgctttgtgccggtcaagagcaccgagcagcaggcgctgctggcgctgcatcgggtacggcaggggttcgtggtggagaggacggcggtgatcaaccggctgcgtgggctgctctcggagttcggggtcgtgctaccgcttcgctcggtgacggtgcgccgccaggcggcgcaggcggccgaagcgctgcccgagatggcgcgaggtgcgatcagtgatctgctcgcgcaactgcgcctgctcgatgagcgggtcgatgcctatgacgcccagatccatgctcaagcgagactctccgagcctgcgcggcggctgatgcagatccgcggcatcggcgctaccaccgctgtggcaatcgtggccaccgtgggcaatgctcgggaattccagaacggccggcagttcgccgcctggatcggcttggtgcccagccaatattccaccggcggcaaacctcggctcggtcacatcagcaagcgcggcgacgcttatctgcgaaacctgctggttcagggtgcccgctccgttctacagagcgctcccatgcaccaggaccgtctttcacgctgggcgctcgagctccaggcgcgccgcggctactaccgcactctcgttgccatcgccaacaagaatgcccgcatcgtttgggcattgctcgcgcgcaacgacaccatacgcatgaactgacacatcgacgacgactgcaaccgaggatgacgaaatggtcagaccggcgcccggagaacctggtcaaacgcgacggcgcatctcaatgccgactaacgagagaggaccgggcgtgcggctttcatcatggccagggcactttcaatgcccacaaacaggccggttatagtgacgcagtcagaccttattacctcaccgttgcagagtcggggaagtccttata

SEQ ID NO: 4558 - DNA, 1155 bp, unidentified
  source 1..1155: mol_type = unassigned DNA; note = element_6f0a019
  misc_feature 1..2: note = core
  misc_feature 3..207: note = LE
  misc_feature 208..1143: note = CDS
  misc_feature 1144..1155: note = RE
  misc_feature 14..213: note = bridgeRNA
cttgtcttatgacatgtcccggttcccttgcgataagggagccgctgcccggcacctcacatatgccgggcagcggcggcggtcggatcgcgttacgcttggtcgacaaggaccgaaagtgagtatgatcggccgccgtcttcaccacaggcctgaacggatacacggggctttggtcccggatgacaagcataggatatggcgaagatgacgaagcatagcattggcgtggacatttccaaatcccacttcgacgcgttcgatctcgaaaccgaacgcgcagcgcagttcaagaacggcgagactgggtatcgggacttccggaaatggctggatgggcgcaacatcacccgaatcgtctatgaggcaaccggggcctatcaccggccattcgagttggcgctggagacgaattttcctctggtcaaagtgaatccattccaggcgcgccggttcgcagaagcccgcggcacgcgcgccaagaccgaccgggccgatgcccgttccctggcagagatgggaaaggcctttgacctcgaagcaccgccgccgaagtcaaaaagccagcgccttctcagggatttgcatacggcgcgctcgagaatgatgtgcgagcgcgtccgtcttctcggtcgcgcctcccaactcgacgtgccgctcttgcaacgccaaacacgggagttgatcgcgcatgtcgagcgccagatcgccgagctggatgctgagatcgcagcgctgatcgccgaggatcaggaagaaacccgcaaactggaaatcatccgctccattcccggcatcggcatggtgaccgcgtcggccatccttgccttcctgccagagatcggccagctcgagcgcaaacaagtggccagcctggctggcctggcaccgttcacgcgatcctccgggacatgggttggcaagtcgttcattaagggcgggcggacgcaactgcgtcaggcattgtacatgcccgcgctcatcgcgtcgcggttcaacccggatctgaaagccaaatacaccgctctccgcgccgctggaaaaccagccaaggtcgcactcgtagcgctgatgcgcaaactgatcgaactcgccaacgcactcgtcaaatccgaccggaaatgggccccaaaagcctgttgaccaaaacggata

SEQ ID NO: 4559 - DNA, 1411 bp, unidentified
  source 1..1411: mol_type = unassigned DNA; note = element_6f0f0c9
  misc_feature 1..3: note = core
  misc_feature 4..87: note = LE
  misc_feature 88..1137: note = CDS
  misc_feature 1138..1411: note = RE
  misc_feature 1154..1398: note = bridgeRNA
tgatgcggtggacggcgcccactctgcggcatcggagtgccatagggtagttgcgtcgaaacgcaaccacattgaggggagccgtccatgggtgaggttagcacgatcggtgtcgatattgcgaagtcggtgtttcagattcacggcgtcgatgcggatggcatggtggtgatccgcaggcgtgttggtcgagcgaaggttcttgagttctttgccggtctaccgccttgcctcgttggcatggaagcgtgtgcaacggcacaccagtgggcgcgcgagctcaagaagttcgggcacgacacccgtctcatgccgccgacctatgtcaaagcctacgtgaagcgcggcaagaacgatgcagccgatgcggcagcgatctgcgaggccgtcacgcggccatcgatgcgttttgtgccgatcaagagtgtcgagcagcagagcgcgttgatgctgcaccggacgcgggatctcctgatccgccagcggactcaactgatcaatgcacttcgtgcccatctggccgagctcgggctggtggcagcgaaggggcatgaaggattgcatcagctggttacggccgtggcggagagcagcgatgagcggctgccaagtaacgcacgctttgcctgccaggcgatcgttgcgcaactgagcgcggtgcagacccagatcaacgggatcgacacacgcatcactcaagcccatcgcgccaatgcggacagcaaacgactcgatgccattccagggttcggcgtgattctatctacggctgtcgtggcgacgatgaccgacccaaaggcattcaagacgggacgcgagtttgccgcctggatcggattggtgccgcggcagaactccacaggtggaaaggagcgcctcggctctatttccaagcagggcgatcgctatctgcgacgactattggtactcggtgcaatatccattgtcgggaccgcacgcacgcggccggacaagtatccctgggtaaccgaactgctaggtcgtcggccggccaaggtggtcgcggtggcgctggccaacaagatggcgcggaccgcctgggcggtgctggccaggggtgagacctatcgggcaccaacacgctcaagcagcgctgccatcgcagcggcggcctgaaaaggtttaacattcggaatgtgaggttacgtcgagagcgtacatgaacgtcgagggtgatgatggtttgatgcgaaccggttggaccggggatcgggagaacccgctaatgggtcaagcactcttgagtgcgggctaatgatagggacccgatctgcggattacatcaaggccagcggctatcaacgccgcaccaacaggccggacacatgacttgcacccgaccgcaagctgacaaccaaaaatcccttgacccgtgggcgccgtccacaca

SEQ ID NO: 4560 - DNA, 1359 bp, unidentified
  source 1..1359: mol_type = unassigned DNA; note = element_6f15fca
  misc_feature 1: note = core
  misc_feature 2..74: note = LE
  misc_feature 75..1100: note = CDS
  misc_feature 1101..1359: note = RE
  misc_feature 1124..1356: note = bridgeRNA
taatgagatggtcacccccacaccttgcgagggctacgctttagcagggtgttttattttcggagggcatcatcatgagcgagtcagcgctgataggcattgatctcggtaaacatacgttccatctgcacggccaggataaatcaggccgggagctgtttcgcaaaaaatgttcacgggcgcaaatgatgcagtttttcgccagctcgccgagctgtgtcgtggcaatggaggcctgtgcggggtcgaactatgttgctcgtcagttggcggcaattggacacactgccaagctgatttccccgcagttcgttaagcccttcgtcaagggcaacaaaaacgactttgtcgacgctgaggcgatttgcgaagccgcttctcgtccttcgatgcgtttcgttacacccaagactgaatcccagcaaaccctttctgtgctccatcgaatgcgcgaaacgttggtgcgtgatcgcaccagaaccgctaatcagatgcacggttttctattggaatttggcgtcagcctgcccaaaggtttggccatcatgaagcgtctggcggttgttttggctgagcatgaactgcctgttcggctgacggtgttgctgcagcgtttgcacgatcatttcgtctacctggatgagcagatcaaggagttggataaagaggtagcgggccaactggccgacgatgatctaggtcgccgtttgctgagcatcccgtgtgtggggccgatcaccgccagcctgctggctgtggaaatgggcgatggtcagcaatatggttgcagccgtgatttcgcagcgtctgtgggacttgtgccgaggcaatacagcacgggcggacgggcgaatttgctaggcatcagcaagcggggcgacaaaaatctcaggcgcctgctggtgcaatgcgcaagggtctacatgcaacatctggagcggcagaaaggggcgctggcggactgggtaagatctctgctaacacggaggcattccaacgtagttgcctgcgcgctggccaacaagctagcccgtatagcctgggcaatttctgcacaccacaccgaatacgaagcagggccagacgcgctgaacgcatgaccctgcggttgttgctttaccacgatttacctttcaggttttgcgatagctgaataatggatgacgtaaacggcctaccggcctgacgaagaacctgttttaaaaattggctcagcgagaagccgttagccttttcaggatcgtcaggcgcgactctcatcatggcgcgagtgaatcatccaatagacgccggatagatttaagcaagccaactacttcgcccatgaatcagcattgcaaaaaagggggtgaccataga

SEQ ID NO: 4561 - DNA, 1370 bp, unidentified
  source 1..1370: mol_type = unassigned DNA; note = element_6f208fd
  misc_feature 1..3: note = core
  misc_feature 4..83: note = LE
  misc_feature 84..1118: note = CDS
  misc_feature 1119..1370: note = RE
  misc_feature 1121..1313: note = bridgeRNA
agcatcggtaatcgggctgaccactgcgtagggtcgagctctccctagacttgcaggacaccccctgcagaggagagatcgcaatgaagtacttcaccggtatcgatgtgtcgctacgttccgtgtcgatctgcgtggtcgatgaggcaggtgcagtgcggtacgagacgaaagttgcggccgacgttgatctgatcgttgagtatctgcgccgctgcagtcccgcgatcaaacaggtcgggtttgaggccggcaccttgacccagtatctgacctacggcctgcaggcagctggttttgaggtgatctgcctggaggcgcgccaggtggcagcgacgctggctgcgatgcgcaacaagaccgatcgcaacgatgcacgcggtctggcgcagattctgcgcagcggctggtatcgccgcgtgcacgtcaagagcatcgagagccaccaggtgcgtgctctgctgtctagccgcaagacaatcctgaccaagtgcgtcgatctggagaatgaactgcgcgggctgctgaagatctttggcgtgcgcttggcgccacgggtgggccatggcagcttcgaccaggccgtgcgcaccaccgtcacggccgatccgctgctggcacgtgcgctggtaccgctgctcgatgcgcgcacggtgctctacaagacttacctaaagctcgataacgcggtcaaggcgatcgtgcgcagcgatcctatctgccagcgtctgatgagcgtgccgggcgttggccccgtcacctcgctcaccttcaaggtgggcgtggacgatcccggccgcttccgctcctcgcgcaccgtagcggcgcacttcggactcaccccgcgccgttatcagtcgggcgagacggacaaccccggtcgcatctccaaggcgggcgatgctgacgtacgtcgggcgctatacacggccgcgcatgcgttgatgacgcgctctgatgcatggtcaacgctcaaagcatggggcttgcggctggccaagatccgcggccatcgccgtgcggtggtggcggtggcccgcaagctggcggtgatcctgcatcgcatgtggctcgacagcacacgcttccgtgcctcacgcatcgaggtggccgtatgagctgacgcactgaccactaatagctagtctgcgttgactgtgtggacgatgatgatggatgaagccgcaaatgtctgctgcgcctcgagcgcgcccaaaagcgtggctctccgaaccgatccgaccaatgcctgcagcgcgccaacttgatcgcgcccgactgcgtaaagaagcgtgacccacacaacaaccagccatagacttcacttaaccaggagacctcgacccttgacaacaacgcccgattaaaga

SEQ ID NO: 4562 - DNA, 1167 bp, unidentified
  source 1..1167: mol_type = unassigned DNA; note = element_6f25595
  misc_feature 1..2: note = core
  misc_feature 3..354: note = LE
  misc_feature 355..1155: note = CDS
  misc_feature 1156..1167: note = RE
  misc_feature 36..223: note = bridgeRNA
cttgtcttatgacttttgctgccgaacaggcgagaatgtaccgctgcgagagggttgccgccctccctcagcggcgagggtcggatcgttgaaacgcagaccgccattcttgcgagtgccgggtcgagttagagtgtgatcgccctcgtctttctctttggtcctgaacggatacccggagtttagctccggacgacaagcagaggacaagcgaaagatgacggatattaccatcggcgcagacatctcgaaagaccatatcgacctgcacagcctgccggacggtcaaaccttgagggcgaccaacgaccgcaaaggtttgcggccatcatccgatggatcggagccaggagtgtggagcgcatcgtctatgagcccaccggtccctatcacaaggccttcgagcgcttcatggcagcaaacggactgccgctctccaaggtcaatccccgccttgcccggcgttttgcagaagcgaccggcaagcttgccaagacagacaggatcgatgccggactgctggcccgttacggcgcacttcttgagccgcgcctcctgcagaccgacacgcaaatccacaatgacttgaaagaactgcatgtggcgcggctggcgctcatcaaggacaggaccgccgccaagaacaggtccaagaacctttccagcccgctgctgaagaaacacaatgccgacaggctcaggcagatcgagcggcaggtcaaggcggtggatgaggccatcatggtgctgatcggccaagacgcgttcctcaaggccaggttcgacatcctcgtctcgatccccggtgtatcgcagatcacggcctttacgcttctcatcgaaatgcccgaactgggcgagctggatgagaaagcagtagccgctctatcgggtcttgcccccatgagccgccagtccggacgatggaccggccgcgcctcaatcgccggtggaagggccatcgtccggcaggcgctctacatgccagccctcgtcgcatgccgcttcaaccccgacctcaaggcgaaatatgaccagctgaccgccacaggaaaagcgccaaaggtcgccattacagccgtcatgcgaaagctcatcgtgcttgcaaacgcactgctgcgaaacaaccgaaaatggacgccaaaaccagcttgatcaaaacggata

SEQ ID NO: 4563 - DNA, 1513 bp, unidentified
  source 1..1513: mol_type = unassigned DNA; note = element_6f2e2da
  misc_feature 1..3: note = core
  misc_feature 4..491: note = LE
  misc_feature 492..1265: note = CDS
  misc_feature 1266..1513: note = RE
  misc_feature 3..220: note = bridgeRNA
cttatattatatttagcgcagttagctactgccaaagcccaagtggtatacttggaataagccactgtggattagttcatttcctccaatcgcttgacgatttccgaaagggtctaaccacagctttttgtttcaattggtaatgagtttgataacgcatagacgttttatctcgtctaaggtaacaaggcaaaaagttcgtggataaccaagtagacttgaaatactatatctggaggtactcccatgctttatgtgggcattgatgtcgctaaaaataaacacgatgttacagccttgaatgttcgaggaaaactgttcttaaaccactcactttttcaaataataaagctggttttgaactcttagatctgtctcttcgacaactcaaccaagactgtctcatcgctcttgaaaataccggacattatgcctttaatctactgaacttcctgcatgaacaaggatataaagtttacacctacactcctttgctcatcaaggaatttgccaaatcattatcacttcgcaagactaaaacggataagaaagacgctcatggcatcgctcttaaacttctttctgaccccaatcgtgaacaatttcaacacgataatcggcaagtagaactaaaaatactgactagacatattcatcgtctcaagaaaaaacagtctgattggaaagtacaatacactcgttgtcttgatatcatctttcctgagttggataaaatcgttggaaagcattcagaatatacctaccaactcttgacacgctaccctaatcctcagaaaaggattgaggcaggatttgataagctgatagaaattaagcgattgaccgcttctaaaattcaggatatcctctcagtcgcacctcgttctatcggaacaacatctcctgctcgtgaattcgaaatcatcaaacattacaagaggctcattgacaaggcggaaacatgtgtcaatgacttgatggctgagttcaactcggtcatcacgacggtcactgggattgagaatcgtttaggggcggtcattttagccgagattcgaaatattcatgcctttgataatcctgctcaattacaagctttcgctggactggattcttctatttatcagtcaggtcagattgatttagcagaaagaatggtcaaacggggttcccctcatctgcggtgggcactcatacaagctgccaaagcatgccctcgcttttcacctgcttttaaggcctatcttaagactaagttagaataaggaaaacattacaatgtagccatcatccaccttgcaaaaaaacttatccgaaccctgttttatatcctaaaaaagagctgccatttgacgaacaaaaagtgatgtaatttctgaaattaacacaggattacctttgaaaaaatggactttttcaagagctttttgccatgctctaaaatcatcgccaaatcatcaaattgaaataagaaatagtttagataaaactattgacttttcttatagtttgt

SEQ ID NO: 4564 - DNA, 1657 bp, unidentified
  source 1..1657: mol_type = unassigned DNA; note = element_6f2e833
  misc_feature 1: note = core
  misc_feature 2..269: note = LE
  misc_feature 270..1520: note = CDS
  misc_feature 1521..1657: note = RE
  misc_feature 13..289: note = bridgeRNA
cctgttactatatatttgccccttggtttatggcagccagccataggcatgggacatctcgttgcctaaactgttagaatagtggggtaatggtctgacctaagcctccaagggctaatacgtccgccagaaagtcagtcagccatcctcctattcgcagtgttcgatttgtgcaggtagagccaatgcgttcgtgtcagcaaacagatggaatcggcaatgggtaagatggcttttgtccattgcaaattctaaccgggagtgattgtatgaacgcagcaggcattgatgtttcaagcagaaagagtacggtggcagtgcttcgcccctttggcgaggtcgttcggctgccattcgatgtcgcccacaatacggaagggttggcttctctcgctgagcagttaaaggctcttgatagggaaacccgtgtcgtactggagcacacaggccgctattatgagccggtcgcaaaagcattgcatgaagccggtctttatgtcagtgcagtaaatccgctgctcattaaggaatacggtgctaattctctacgccgtgtgaaaaccgacaaggccgatgctgtgaagatcgcccgatacgctcttgacaactgggctgatctgcgagactatacccctatggataccattcgttatgatctgaaaacattgaaccgtcagtttcagcttgcttccaagcagcggacagcctctgcaaacaacctgatcgctcttttggaacagtccttccccggcatccgcaagtgctttgacagccctgtgcgaagcgatgggacgcagaaatgggttgactttgtccataccttctggcatgtggagtgcgtgcggaagcagagtctcaacgcattctctgagcgctaccgaaaatggtgcaagcgccatggctacatcttcaagcagggcaatgccgtggaagtgtattcccttgccaaaaacgctgtcgttctggtccctaaatctgaggtaacgaaagtcctcgtacaggaagcggcgaaccagctcaccagcatctcccgcagcgtggaaacctaccgtgcagaaatggaacgtcttgcctctacgctgccagaataccctgtggtcatggcgatgtacggtgttgggaagtccttcggcccgcagctcatggctgagatcggcgatgtgcgccgctttgaacgaaagcagtctctggttgcctttgcaggtattgatcccatgcccaatcagtccggtgacaagaacgtaaggagtaacaaatcctccaagcgtggctctccatatctccgcaaaacgctgttcaatatcatggggatatacctgaaatgctcacctcaggatgagccggtctaccagttccttgaccacaaacgttccgagggcaaacccttctatgtctacatgaccgctgcatccaacaagtttctgcggcgttattacgcacaggtgcgggactatctttctacattggacgatctgcctccggtagatatggattccaccgggctgaaaacaagcgactgacgtagtccctattttcacactttttattagaccagcactttgtggtggtctttttgtgttgcccttttgctctacctgctgcctgtaaatttttcttcgctcaagtcctgtttcggacttgactttttatttgcagg

SEQ ID NO: 4565 - DNA, 1402 bp, unidentified
  source 1..1402: mol_type = unassigned DNA; note = element_6f32523
  misc_feature 1..2: note = core
  misc_feature 3..124: note = LE
  misc_feature 125..1165: note = CDS
  misc_feature 1166..1402: note = RE
  misc_feature 1162..1400: note = bridgeRNA
agatgacatgaacgccgcccgttcctagcaaccgggtgagcagttgttggaccccctgttcctacggcatcgatgtgccagagtggaggtgtctagcaaccactcgcaaaacaggggatccgttatgaacgttacgacgtacggtgtggatttggcaaagctagtttttcaagtccactggcttgagccgcagaccggcgaggtgcaacgcaagaagctctcgcgcgcgcagtttgcggagttcttcgcgcgccgcgcagcgggtattgtggccgtcgaggcctgcgggtctgctcatcattggggccgcaggcttcgagagtggggacatgaggtgcgtctgatcccaactcagttcgtgcggccgtttgtgaagagcaacaagaccgattcggcagacgcccaggcgatctgggaagcagcgcagcgtccggagatgcgctttgcggcggtaaagagcgagcagcagcaggctgtattgggtttgcatcggctaagaacgcagctggtgaaggtgcgtacgatgcatgctaaccagattcgaggactcctctacgagttcggtgtggtgctgccccaaggctggcagaccctgctcaagcaggccggtccgatgctagccgatcagaagtttagcgatgtgccggagctgatccgtgagggattgcgggaacagctacaagggatgcgagagcttacagcgcgcatcgaccagctggagcgttcgatacggagctaccaccaacaagacgagcagtgtcgtcggattcaggcgattccaggggtgggtccgttgatctcgacagcggtgctggcgagtgtggcagatgcacgcacctttagatcgggtcgcgagtttgctgcctacttaggactggtgccacgtcagagcgggaccggaggacgtgtgaagctgctgggcattagcaagcgtggcgatggctacatacgtaacttgttagttttaggagcgcggtcggttctctatcacgccaatcggacgggtcgaactccacaaccctggctacaagctttgcgatcgcggcggcccaccaacgtggtggtcgtggcactagccaataaaatggcgcgaataatttgggcgttgttagcgcatggccgcagttacgacagcggctggcgacgcacgctgcctgggacatgatccaaccgaattgacgggtgcaatgactcgtgatgacgaataggtcggaccgggcgggagcaagcctgaccgtcgctttgggcttcgagccctttatgaagatgaggcctcccgcagcgaatgttcatcaaggccatgcggcgctcggagctgctcaagcaggccggatataagactgcatccgattctttgtctgaacgatcatttcactcgtgcaatacgggcggcgttcatata

SEQ ID NO: 4566 - DNA, 1383 bp, unidentified
  source 1..1383: mol_type = unassigned DNA; note = element_6f375b1
  misc_feature 1: note = core
  misc_feature 2..86: note = LE
  misc_feature 87..1127: note = CDS
  misc_feature 1128..1383: note = RE
  misc_feature 1157..1378: note = bridgeRNA
caatgggatggactcctcctcacctaccggcatcgatgtgccaaactgagattgagttttcagttaatgataaagaggagcccacaatgaagattaatcgagttggtgttgatttggcaaaaaatgtttttcaattacatggtgctgaccgtcaaggtaaaaccctctggaaacgacagctatccagggataaatggttaacggttttatttgccaccgtggaaccaaggactgtgattggtatggaagcgtgtactggcgcccatcactggtccaggcttctgcttgataaagggtatgaggtaaaaatcatcccgcctcaatttgttaagcccttcgtaaaaagtaacaagaacgacgccaatgatgcacaggcgatatgtgaggcaatggcccgtcccaacatgtacccagtcaaagtaaaaaccattgagcagcaagacatgcaggcgattcatcgcatcagaaatgaaataaagaatcatcgtattgccaaggccaatcagatacgcggcctggtcgctgaatacggcctggtggcaccgaaagaattaacctcattacgcagcgctatccccgagtggttagaagatgcttccaatggtctaacgatgtttttcaggcagctgctacaaggcttatatgaagacctgtattcaatggataaacgcatggccgagcttgataagcagatagctgtcattgcacagcaagatccgatagctaaacgcttgcagcaactgagaggtgtgggtccgttaattgcgactgcgcttgtcgctacaatgggtgatggcaagcagtatcgtaaaggcagagacatggccgcagccattggattaaccccaagacaacatagctctggcgggaaagaccggctacttggtataagtaaacgaggcgatgcttatctgcggtgtttactggtacacggtgcacgctctgcgatgcgcactgcaaaagataaagacgaccgcctaagtcgctggataacaaacctgcaagacaggcgacacgccaatgttgcggcgtgtgctatggcaaacaagatggcgagaatggcctgggccatgatgaccaaaggggttgattatgatccagactttagttctgtatcagcgagttaaaggcgttacaaggtgtaacgtattcaattgacgattgcgaagtaagctgagtgatggcaaacaggtcgaaccggcgcggataaaacccgagaatgtccgagtgtgtaaagacacgtcaaagcaatagggaatctgcgcgcgaacaacccattatggcccggcatcaacgtatgccaacttaagaggccggatatacgtatgcagtcgagccagcagccattaacagattacttgcaaacgaggaggagtccatata

SEQ ID NO: 4567 - DNA, 1379 bp, unidentified
  source 1..1379: mol_type = unassigned DNA; note = element_6f5304c
  misc_feature 1..2: note = core
  misc_feature 3..86: note = LE
  misc_feature 87..1109: note = CDS
  misc_feature 1110..1379: note = RE
  misc_feature 1144..1367: note = bridgeRNA
tgatggtgtggacggcctcacctcaacggcatcatagtgccaaggcgtggtcgccagagcgccacaaagaagggagaccgtccgagatgaagtttatcagaataggcgttgatctcgccaagaactattttcagattcatgcgctgtctagtgaggatgcaccagccgtaaagcgcaagctgacgcgccggacgatgcgcgagttcttctcgaagatcgagccgtgccgcgttggcatggaggcttgcggctcagcgcactattgggcgcgcgaactgaaggccatgggacacgatgtgtctctgatgccgccggcctacacaaagccctatgtcaaacgaggtaagaacgatgccgtcgatgcggaagccatctgtgaagcggtctcgcgtcctgccatgcgttttgtgccgatcaagagcgctgatcagcaagcgaccctgatgttgcacaagacgcgcgagctgctggtcaaacagcgaacgatgagcgtgaacgctctacgcggccacttggccgaattcggtcttgtcgtcgccaagggcaccggccgcgtcgacgagcttttaggcctcgcagaaggcgacgcgactcttcccgacgctgctgtcgtggccgcgaaggttctcggtcagcaaattgatgcgctcggaagcgcgctcgatgatttggagagagagatcgccaaggctcacgcgctcagcgagacgagccgttcgctcggagaaattcccggcgttggcaagcttgttgcctcggtaattacagccagtgtaccagacccaagcgtattcaattcgggacgggattttgctgcctggctgggtctgacacccaggcaaatttcgagcgggggtaaaccaactctcggaaccatcaccaaggcgggtaatcgatatataaggaagctactcgttctcggagcaacatcgcttctaaacgttgtggaaaaacgccgcggcggcttgcgcgactggattgtcgggcttttggctaaaaagctggcgcggcttgtgaccgtcgccctcgccaacaagcttgctcggatcatctgggcaatgatgaaaaccggagaatgcttccgcaccgagatgttcgccaaaccttgagtgtcggacagccgcatccgaatcaaagaattataagcttggtaagtgcaagaaaggcatgatgaaagacaacggtcgccaccgaaaaccaggaaaacccgaccagtcgtgtgagctttaaagctcgcatccttgatgtgaccccttggttgtcggacttcatcagggccagcggagatatgatccgcgctaaaggccggacatacgatcgcagccgtccaagtcgttcgcagtgccaaattgtgcttgccatcagaggccgtccacata

SEQ ID NO: 4568 - DNA, 1403 bp, unidentified
  source 1..1403: mol_type = unassigned DNA; note = element_6f59151
  misc_feature 1: note = core
  misc_feature 2..89: note = LE
  misc_feature 90..1124: note = CDS
  misc_feature 1125..1403: note = RE
  misc_feature 1171..1393: note = bridgeRNA
atgggatggacgctcccccctttaaacggcatcatgatgtgccaaaatgggagttcaatctcacccattgatagacaggagcattcgccatggagatcacaacagtaggcatcgatttagcaaagacatggttccgattgcacgccgtaggcaaatctggcaaaacagtacttaagaagaagttaaaccgtggtcagatgattgaattcttcgccaacctacccacttgtctgattggcatggaggcctgtggtagcgcacaccactgggcacggaagctacagagtttgggccacacggtaaagcttatggcacctcagttcgtcaagccctatgtcaagaccaacaagaatgatatggctgacgctgaggcaatctgcgaagccgtgagtcgacccaacatgcgatttgtaccaataaaaaatctggagcagcaagcagtactttcgctgcatcgagtgcgtcagggctttgtgaaggcacgtaccgctcaggcgaaccaaattcggggcctgcttggtgaattcggaataattctcccgcaaagcattggctacatcaagactcgcgtacctgagctgattgaagatgcgagtaatgagttgccaggcgcatttcgtctactcgtgcaacgattgctggatcattttaaggaacttgatcgccaggtcagtgaacttgagggacagattcaaagctggcatcgcaacaataccgtcagctgtaaacttgcacagattccggggattgggccgattactgccagcgctttggccgcctcaattggggatgctaaaaattttaagagtgggcggcaagttgcggcgtggctaggactcgtacccaaacagcattccagcggcggtaagcagaacctgctggggatcagcaagcgaggcgactcgtacctcaggtcgctacttatacatggcgcgcgttctgtgatttaccacgcgtcaaaaaaacctcagttgcacccttggattaacggcgtcgttaatcgacgaaacaacaatgtagccgccgtcgcactggccaacaaaaatgcgcgcattgtttgggcattgttagctcatgagcggcaatatgaagtaaattattcctccttgagagccgccgcataattcaagcaggttaaataaataaccctaatttaacgagaaacaccccaccgattgctcaagcgatcatgaagtgatggcaaaacaggtcagaccgtggttggcaaaacccgtggatttcgaagcacacaaagtgcatggactcgattgaggtgccgaccagcaattctcattaaggacagtgattctatttcacgctaacagtccggatgtacgggtgcaatctttgccttcatgccttcatgaattgaaaccttgacaaactgggagcgtccatgtatg

SEQ ID NO: 4569 - DNA, 1349 bp, unidentified
  source 1..1349: mol_type = unassigned DNA; note = element_6f5ad9a
  misc_feature 1..3: note = core
  misc_feature 4..194: note = LE
  misc_feature 195..1334: note = CDS
  misc_feature 1335..1349: note = RE
  misc_feature 3..150: note = bridgeRNA
cttgtatgttgtggaggagacgcggggaagccatcggcacctgaagccaagagcttgtggagaagatcggctccccgccctcgtcaccaaggccgaagagtatctgaggcgacgagagccagcatttacaaggtcggccggtgaagatacagggtcgggaagcccgcgtcttgatatcgcaaatggagatgaggatgcaatcgatcaagacatgggcaggagtggatgtcagcgccaggatgctggccgcacatcggctgcgtgagggcaagcaggaggggcgcgagttcgccaacgatgcagccggccatcgagacctactcaagtggctcggaaagagagcccgagtcggtgtggaggcgaccggggtgtatcaccttcagctcgcgctcacgctgcaagcggctggagtggagctgatggtggtaaatccgcgtgtggcgaaggactttgctcgggcgttgtcgaatcggagcaagaccgacaaggtcgatgcctggacgttgctcgagtacgtccaacgcatggccttcaccgcttggcaggggcccaggccgagcgtgctcgagctgcgagagcttgcccgccggctcagtgagctcgtgcacgctgcggtggacgaaaaaaaccggcttcacgccaggaatgtggcggccatcagttcgaccgtggtgggcgacgtgaaggcgcacgtggcccagatcgagcggagaatcattcagatcgagaaagccgcgatcaccgtcattgacgacgatgacgatctgcgcaaacagttccagatcctgagcggcatcaccgggatcggacgacggtccgcgattctgttgctgggtgaactggccgtgctcgatccggccatgacggtcaagcaactggtggcgcatgcagggctggatcctcgggtttatgagtcggggacgagtgtggagaagccggcgcggatcagcaaggttggaaacgcacggctgcgcgcgatcctgtacatgaacgcgctgtcggcggtgcgccatgaccgtggagcgcggctgttcttcgcccagttggtggcgcgcggcaagaaaccgatgcaagcgctggtcgccgtgatgcgtaagctgctgcatggcatttggatcgtcctgcagcgccgcgtggggttcgacagctctgtgctgttcgcggcctcgctggcgaaggccgaatccttcgattcggccgcagctgcaaaccagccggagccgagtcaggatcacccgcagggccgcagcgaagcggaggagctgcgtgagcagcttgatcctggctcggcggaggctacgcgctcgcgaaaacggaggtcaaaagccgcttgactcacaacagagtat

SEQ ID NO: 4570 - DNA, 1574 bp, unidentified
  source 1..1574: mol_type = unassigned DNA; note = element_6f6072c
  misc_feature 1..4: note = core
  misc_feature 5..286: note = LE
  misc_feature 287..1564: note = CDS
  misc_feature 1565..1574: note = RE
ctcactggtctaccttcctgaggtcatcgcttctggatgaagcgttgatgcacccgaggtgccaccaggtcactgccctgctcgcttgacgcggttgatgtccagcatgagatctgcagggcttggtggttgcccgggacgtgtcgaccgtcgatagggctgagcgccaacgccgagactggctgcgagcgccgatcagtgagcgaaccggcaaccacgtcccggcgcccgcggcaccggaaaagacgggtgcctccccactgggtctagcagcgaggaggctgacatgaagtctgccagcaacaccccgaacgacgccaccgcgactgacatcgctctgccaccagagccgcccggcggtgtgaccgccggcctggactgggaccgagatgatcacgccgtcagcgtggtcgatgaccgcggccgcgaactgacccgcaccaccgtggaccacactgcggccggtctgcgcgaactcatcgcgttcctgagccggcacggggccggtgaggtcgccatcgaacggcccgacggacctgtcgtcgacgcgctgctcgacgctggcctgacggtggtcgtgatctcccctaaccaggtcaagaacctgcgcggccgctacggctcggtcggcaacaaagacgaccgcttcgacgcctacgtcctggccgacaccttgcgcaccgaccgcccccgattgcgggccctggtccccgacaccgacgccaccattgcgctgcggcgcgcctgccgggcccgcaaagacctggtgaatcaccgtgtggccgttgccaatcagctccgcgcacacctgcgcaacgtgctgcccgccgccgtcggtctgttccaacacatcgattcgctgatcagcttggcgtttctgacccggttcgacacccaggacaagatcgactggctgagcgccaaacggctcggcgactggctgtccaagcagggctactccggcaaggccgaccccgccgtgctgcaccaacgcatcctggccgccccccacggagcctgcggcgcccacggcacggcccaggcccacatcaccgccagctacgtcgcactgctggacaccctggccgcacaaatcaaagcgctctcgacccagatcgaggcgcaactgtacgcccacgccgacgcccacatcttcacctcgctgccacgcgctggccgtgtccgcgccgcacgtctgctcgccgagatcggggactgccgtgcccgattcccgaaccccgaatcgctgacgtgtctggccggcgccgcgccttcgacccgccagtccggcaaatctcgcgtcgtcggatttcgctgggcttgcggcaaacagctccgcgacgccgtcaccgacttcgtcgccgacacccgtttggtcaacccctgggccgccgacctctacgacagagcccgcgcccgcggacacgaccacccccacgccgtgcgcatcctcgcccgcgcctggctgcacgtcatctggcactgctggcaagaccacctcgcctacaaccccgacaaacaccgagcgctccagaaaaccctcgcccaaaaaggggcggcttgacatagggctt

SEQ ID NO: 4571 - DNA, 1516 bp, unidentified
  source 1..1516: mol_type = unassigned DNA; note = element_6f656a5
  misc_feature 1..2: note = core
  misc_feature 3..237: note = LE
  misc_feature 238..1299: note = CDS
  misc_feature 1300..1516: note = RE
  misc_feature 14..183: note = bridgeRNA
cttgtatgttgcgaaatgaggcgtgaagatagggtcacgctttggcggagaggccgaccacagacgaggccagcgcgagttgagcctgattccaagatcggccgccgtccctctctttccatgccgtggagaatcgaaggccttttgagcctgcatgttcagggttggcactaagagcgcgtccgtgacagcggacagggacggctgccgaggccatcctagcgcccgcggaggcccatgagcaagcaaatcgtttctaccggtagtccggtcgtgtctttcgacaatttatccaatccacagcaggcaagcgtgttttgcggcatcgacgtcagcgccgagacgctggccgtggccattatcgagccgggtcgatccttggagcagggggagttcgccaactcgacgggcgggcacaaggccctggttggctggctgcataagatgaatgccctggtacgggtctcgctggaagccactggcatttactcattggacttagccttggccctggatgaggcggatcgcgtcgaggtggcggtgctgaatcccaagctggtcaatcgctttgcacagacgctgcgtcgctcaaagaccgacgcggcggatgcgcaagtgttgtccgaattcagtatgcgcatgcccttcgagccgtggcagaggcccagcctgaacgcgctcgcgctccgcgccatcagtcgccacatcgaggcgctaggcgtggaacgtacgcgggccgccaaccgcctgcacgccgcgcagggatcgatggtcgcgccgcgttgcgtggtcgaggacttaaagcgctcactgaccgggatggagcggcgcatcctgaaattgcggctcgaggccagggaagtgatcgacggcgacgagcgactgcgggataaattccggctgttgaccggcgtgccaggaatcgccgagatcagcgcattgcaactgctgggcgagctggtattactggctccggacatgaaagtgcggcagtgggtggcgagcagcgggttggatccggtgcatcaggactcgggcacctcggtgcataagcccgcgcacatcagccgcgccggcagccgccacttgcgccgtgccctctacatgccggcactggcggcagtacgttgggacccgcacctgaaagccttttacgaggcactgctggcgcggcacaagagcaagctgcaagccctgatcgcggtagcgaggaaactgctgcacgccatctacggcatcctcaaaagccgcacgccctacgacggacggaagctgttcccgcatttgaagaccgcataaacgctacaatcgcctcaccaggtgaaacggaagcgggctctgctgggaagcaaccatgccgagggataatctggtgggctcatcctgacgatgaaccaaaggttgggcggggatatcctcgcccgacccaagcagacatcggagggatagacccgccatgccttgaaaaatccaacgcttcgactcagagaaaaatgcttgacttgcaacagagaat

SEQ ID NO: 4572 - DNA, 1584 bp, unidentified
  source 1..1584: mol_type = unassigned DNA; note = element_6f6589c
  misc_feature 1..3: note = core
  misc_feature 4..249: note = LE
  misc_feature 250..1419: note = CDS
  misc_feature 1420..1584: note = RE
  misc_feature 4..235: note = bridgeRNA
tcttgtatgatacaaatgtaccttgtcgtagcattcatatcacttttcctttccaaccttttatataatgtagatagaaccttagtactcttatatatttatgtggtttatctactcaaaggagagtgaatctataggatcttattacatctgtttatagctggataggttttgatatcttcatgtcacgcaagtttacactagtaagaccactatagaatgacaaggttctagaaaggtggtctttttatgtctaaactgttttgtggtatcgacgttgctaaatttgaacacgtcgcaagtatctatgatccttctactggtgaaatgattcttgattcacttcattttgataataacgataaaggttttaaaacattattatcttctctttctaaattgaacaaacgttgcgaaatactgattggttttgaatcaaccggtcactatcatcaggtcttattcaattttctaacttccaagaaatataagtgttttttaatcaacccttatatgaccagtaagtttagatctatttctttgcgtgatgccaagaatgacgatatcgattccagagccatcgcaaagttcttatcgtttgaatataaatctttgattgaacaagaattcttaagcagcgaattgaaagagctggttaatcaaagacatttcttaataatcgagtcttcaaaaatgaaaatcaagctaaaatcatatctcgatagaacatttcctgaacttgaatccattgttgatatcaacacagctgctattcgagctattttaaaggagtatccaaccgctaattctatatctgaagctagaatagataaactaaagaatctagctaaaaaggcttctaaaggtaaatattctctatcaaaagttgaagctgttaaagaagcagctaagacttcaatcggaattcactctttaagcattggtttgaatatcattcaatgtattgaaactttagaactaaaagaaaggcagattgatagaatcgaaaaagaaatcaaagaacatcctactgtgcttgattctcctttacatcagttaattgggattaacgatatagaaatcggttatatcatgtctgccattattagtataactcgttttagctctccagaaaagatagtagcttatgcaggtttagatccaaaggttagacaatccggtacatggaaggcaaatacgactagaatgtccaaaagaggaaacaaactattaagatatgctttgatatggacagctttcaatatgaccagaagacctggacctatgaaaaactattttgcgctaaagaagtctcaaggaaagtctcactacaacgccttaggacactgtgcaacaaaactttgtcgttacattttctggatacttaatcatcctgattcaaactttgaataccaataatttcaaacaatattttcataaaacaaacttttttatataaatatatcatttatagctattcgttatttaagactacttatataactgagctttcgtataccctaaatatactttattgaattttgacaattcttatctttttttacttgacagattcatagctgg

SEQ ID NO: 4573 - DNA, 1606 bp, unidentified
  source 1..1606: mol_type = unassigned DNA; note = element_6f688e6
  misc_feature 1..3: note = core
  misc_feature 4..268: note = LE
  misc_feature 269..1486: note = CDS
  misc_feature 1487..1606: note = RE
  misc_feature 14..291: note = bridgeRNA
actactactataaaagaagggttatattcctagcagccagttaggatattatccttcttattgcttaagttgtagaatgagaatgctattggtctggccaagaaaaactagaacctagcgttcgcatttcagtcagccaaccggcttctcattcgcaacattcgttttatgcaggttgaaccaagcgttcgtgtaaaataccagtagattgaataggcaatgagtaaaaccggtattgaccattgctattttatctaaggaggtttttatgatgaatgccgttggtatcgatgtttccaaaaacaaaagcactgtcacaatccgcagacctggagatgaagtagttctaactccacgtgatatcattcacaccagatcagccattgacgatctaattaaaacaatcaacgatcttgatggcgaaacaaaggtatgtatggaatgtacaggacgttactatgaacctatggcatcatggttatcagatgctggtatattcgtaagcactgtaaacccattacttatcaaatcctttggtggcgattcaattcgtccagtaaaaactgacaaagccgattctcaaaaaatagctcgtttcacacttgaccattgggctaatttgaagcagtatggtcttatggatgaaacacgtaatcaacttaaaacaatgaatcgacagtttgctttttacatggtccaaaagacagctatgaagaataatctcatctctcttttggatcagacatttcccggtgcaaacaacttattctcaagtgcagttcgccccgatggaagtcagaaatgggtagacttcgcttatacttactggcacgtggattgtgtggcaggaaaatcgctcgacacctttacggaacactatcgtaattggtgtcatcgcaaggattatgattttagtgctgccaaagccaaagcaatctatgatatctccaaagatcttatcgctgtattgcccaaagatgatatgactaaaatgctcattcatcaagcagtcgatcagcttaatgttgcttccaaaacagtagaatcattgcgaatcaaaatgaacgaggtcgcatctactcttcctgagtatcctgttgttatggcaatgaacggcgttggacccactctcggtccacaattaatggcagaaatcggtgatgtaactcgttttgaaaaacgaggctcattaaccgctttcgcaggagttgatcccgggaaaaacgattccggagatcattgtcaaaaaagtgtacccacatctaagaaaggatccccgcatcttagaagagctctcttccagatcatggacggtcttatcaagcgttctcaagttggcgacgaagtctatgactttatggataagaaacgctctcaaggtaagccttattacgtctatatgaccgcaggagcaaacaagttcctacgcatttattatggacgtgtaaaagagtaccttgcttctctcgaagaacaagaacaataatcaagagcatcaatactccgattccaatcgtcctcgtgacgatgttatttttgtacccaaaattcaacctgtatatatttttcaaagttcatcaatttattgttgacaatttatttgcag

SEQ ID NO: 4574 - DNA, 1361 bp, unidentified
  source 1..1361: mol_type = unassigned DNA; note = element_6f6c762
  misc_feature 1..3: note = core
  misc_feature 4..107: note = LE
  misc_feature 108..1118: note = CDS
  misc_feature 1119..1361: note = RE
  misc_feature 1139..1359: note = bridgeRNA
agatggaatggtcgcctcccgccttaacgggccgtccggcgccgcggtctcgcgtccaaagcatgccacattgctggttcggcagtcctgccgtcaaggagaaccagatggaacccacgaccattgccatcgacctggccaagcgcgttttccagattcactacgtcgaacccgagaccggcgcgattcacagcaaggtactcaaacgcgcccagctcgtgccgttcttcgccaaccggcctgcgagccgtgtcgtcatggaggcctgcggcagcgcccatcactgggcgcgtgtgctggcgcgccttggccacgacgtgcggctcatcgcagcccagttcgtgcggccgttcgtgaagtcgaacaagaacgacgcggccgacgctgcggcgatctgggaagccgcacagcgtcccggcatgcggttcgtggccgtcaagaccgaagaccagcaggccatgctggcgatgcaccggatacgccggcaactggtccggattcgcgtcatgcaggtcaaccagcttcgcgggctgctctacgagttcggcgtcgtgttgccgcaaggccgccgggcatcgatagaagccgccaaagcggcactggcgtcactggccgaccagttgccatgcatgctcgcagacagcctgcaggatcagttctcgcgacttcgcacgctcgacgaacagatcgcgcggatcgagcaacgtattctcgagtggcgccgcaacgacgatgcatgccgccgcatctccgagattccaggcgtgggcgtgctcacggcgaccgctggtgtatcggtcatcggacaggcaaagacgtttcgctccggacgggaatttgccgcctatctgggcctcgtgccgcgacagaacagttccggcggcaaggtaaagctcggcggtataagtaaacgcggtgacgtgtatctgcgaacgctgctgatccacggcgcccgatcggtcatcgtcagctcaaggcacttgccggagcgtttgcgccagatgctgtcccggcgtccaacgaacgtcgttgctgtagcactcgcaaacaagatggcacgaacaatatgggccttgctggcgtacggccgaacgtatgaggccgcaccatcgcggtaatcaagcgtcaaagccttcccatccacggttgcacaggtgtactgagtgatggcaagacaggttggaccgcgcaaaggccagcctgagacatttctcggaccttgagtccgtcgtttagattaggacctttgcggcgaaatccatcggggccggcgggcatgcctgcgatcgagtccggatataagtccgtaaccaccctcctcgccacacacaatcaccttgcaaatgggaggcgaccatata

SEQ ID NO: 4575 - DNA, 1349 bp, unidentified
  source 1..1349: mol_type = unassigned DNA; note = element_6f7863a
  misc_feature 1: note = core
  misc_feature 2..67: note = LE
  misc_feature 68..1102: note = CDS
  misc_feature 1103..1349: note = RE
  misc_feature 1102..1339: note = bridgeRNA
tatggaatggcccgcccctctccccagcggtgtatagttgctggagtatcaactggaggaacaggttatgagaattgcagttctaggaattgacctcggtaagaatgtctgcagccttgttggcttcgatgagaatggcgccgttgtgatgcgtcggcgggccaggcgagacctgctggtggattttgtagtcaaattgcccccttgcactatcggcatggaggcttgttgcggcgcccatcatcttggcaggctgttcaccgccacgggacacgacgttcgtttgatgtcgccggaatatgtccgtccctacgtaaaagcacagaagaacgacgatcgagacgccgagggcatcgcggaagcagcaacccggccgaccatgcggttcgtcgagatcaagaccgaggcgcaacttgacatgcagacgctgcaccggtccagagaacgcctggtgggtgaacggacggctctgatcaaccagttgcgcgcagtgcttctggagcgcggcattgtcgtcccccagggcaagcgcaagctcgagcaatatctcgtcgatcttatgcaagagccggaagggcggaaactgagtgcgcgaatgcggatgttggtcaccgacctgcaggcgcaatggcaagaactcgatcggcgaatcgcggcatttgagaccgagttcgttgcctatgccaaggaaagtgaagatgccaggcggctgattacaattcctggtgttggcgtcatcaccgcgacggcgctcattgccgcgatcggcaaggctgagaccttcaagcacggtcgtgacctggctgcctggcttggtctggttccgcgccagtcgactacaggtggtaaaccccggttgatggggatcagcaaacgcggcaacagatatctccgaaagctgctgatccatggcgcccgtgcggcattgccgcatgtcgccgagcgcgacacacctcttggaaaatgggttaaggagctgcttacacgcgttcatccgaatgtcgccgtcgtggcgcttgccaacaaactggcgcgtgtcagctgggcggtccttcggaccggacaacagtttaacgccaaggcaagacacctggcggcatagccaatagccgagtagtagacctaaatcggctcacgaagttcgcgagtggtggaaacgagatggcctgactgtcgaacggcgttctggaaacctggtttaaaaaacggcgcatgacgccgggaaatttatgaggaccggagcgcgcgtatctccatcttggccgggttctatgcccgagaccggatacgttgaagcagactgctcacggcgctctcgataaatcgcttgcaacggggcgggccatacg

SEQ ID NO: 4576 - DNA, 1167 bp, unidentified
  source 1..1167: mol_type = unassigned DNA; note = element_6f7d07a
  misc_feature 1..2: note = core
  misc_feature 3..207: note = LE
  misc_feature 208..1155: note = CDS
  misc_feature 1156..1167: note = RE
  misc_feature 37..213: note = bridgeRNA
cttgtcttatgacttttgctgccgaacaggcgaagaatgagccgctgagagagggtagccgccctcccacagcggcgagggtcggatcgttgaaacgcagaccgtttgacgggtcgagctagagtcggatcgccctcgtctttctctttggtcctgaacggatacccggagtttggctccggacgacaagcagaggacaagcgaaagatgacaaaggataccattggcgtcgatatctcgaaagatcatctcgatgcccaccggatgagcgacggcgcgatccgccgcttcgccaacgacagtgtcggccacggagctttcatgagctggctcggccagcttgagaccattcatgacacacgcatcgtctatgaaccgacaggcccttatcaccgggccttcgagcgtcggctggctgcggcaggcgcggccctcgtcaaggttaatccacgccaggcacggcgttttgccgaagccacgggcaagctcgccaagaccgatcggctggacgccgctatgctggcgcgcatgggggcactccttgaactcgaagcacggccggcacgcagcccgatcctcaacgacctcaaggacttgcacatggcccgcgaggcgctggtcaagaaccgcaccgccgccaagaacagggcaaagaacctgactttgaccgtgctcaagcgtcacaacgccgagcaactcaggcagatcgaacgccagatggccgcgatcgaaagggagatcatgatgctcatcaaggacaatctcgtcctcgcaagacgcttcgaaagcctcatttcgatccccggcatctcagcaaccaccgccttcgcgcttctcatcgacatgcccgaactcggcacgctcgcccacggccaagcagcctcgcttgctggcctggctcccgtcgcacggcagtccgggacatggaccggccgtgccttcatccgcggcggccgggcaaagctgcgacaggcactctacatgccggcgcttgtcgctatgcgcttcaatcccgacctcaaggcaaaatacgaccagctcaaagctgccggaaaagcaccgaaggttgccatcacagccatcatgcgaaagctcatcgtgctcgcaaacgcattgctcagggacggccgagaatggacggcaacccctacttgaccaacacggata

SEQ ID NO: 4577 - DNA, 1220 bp, unidentified
  source 1..1220: mol_type = unassigned DNA; note = element_6f965de
  misc_feature 1..2: note = core
  misc_feature 3..218: note = LE
  misc_feature 219..1205: note = CDS
  misc_feature 1206..1220: note = RE
  misc_feature 12..192: note = bridgeRNA
cttgtatcttacttgtcgccatggttagctaccttggcactgagacagaaagagcttgtgcgtacccttaaggttcgaccttggcatgtagattaagccttctgtctcgcttctgatgccaacgaagacactgaacggtagccaagggcaatgaccctgtatgcacaaggcaagtgggctcggttggtttattttgtttcttcatgctgaatcactctatgttttttatcggtatcgatgtttctaaagccaaacttgattgcagtctgttattggatgttgccactgccaaacgccgtgcgaaatccgttaccaattccaaagcgggcgtcgacgatctgttagcttggtgtgtaaaacaacaggccacgcctgacacgctacacgctatcctggaaggaaccggcgtttatcacgaacaggctacactcgccttgagcgatgcaggcgtcacggtctcgattgtaaatcccgctcaagtcaaagactttggccgcagcctgggtgtgcgcaccaagaccgacggcgtcgatagtctggtgttggctcgttacggcgcgttgttgaaccccaggccttggacacctccaactccagaagctcgcaccttgcaagccctgttatcccgccgtgaagcgatcgcccaggatttgcaacgcgagcgcaaccgcctggaaaaagcccaggccaccgatactccggtactgattcaccaatccctactcgactctattactttcctggaaactcaactcgctaaactccagatcgacatcgacgaccatatcgatcagcaccctgaactgaaggcggaccggacgctgttaatcagtattcccggcgtcggtccccaggttagcaatcacttgttagcggtgatgcacaatcatcactttcaatccgccgaacaactggccgcttacctgggtttggtgcccgtggagcgacagtccggttcgtcgattcaagggcggccccgactatccaaagctggccccgcccgtatacgcgccatcctttacatggccaccgtggtcggcgttcaatacaaccctcatctcaaagcactctatctgcgtttgcaggcacgtggaaaaaccaaaatgtctgctctcggtggtgctatgcgtaaactcgtacatttgtgctttggtgtcctgaaaactcgcgagccttaccggggcgattacgcttttcaaagttgacttttaagacggtat

SEQ ID NO: 4578 - DNA, 1432 bp, unidentified
  source 1..1432: mol_type = unassigned DNA; note = element_6f96615
  misc_feature 1..2: note = core
  misc_feature 3..133: note = LE
  misc_feature 134..1153: note = CDS
  misc_feature 1154..1432: note = RE
  misc_feature 1194..1432: note = bridgeRNA
gaatgatatgaacgtcccccgcccatgagtcaggtgaggaagtcagaaagggtggatcctcacgggccgacggcatcagagtgcccaaggtgggagatcatggcgatttcccaaggcaaaccggaggatccgaatgaactatacgacagtgggcgtggatatcgcaaagtccgtgatgcaactgcattggatagagccagcgaccggtgaaatcatgaacaagccggtcaagcgggcggtgtttctcgagcactttgcgaatcgcgcgccgtgcctgatcggtatggagtcctgcggtggatcgcaacactgggcgcgacggctgatcgaaatgggccatcaggtgaagctgatgccggcgaagttcgtgaaagcgttcaacacgggtaacaagaatgatgctgccgatgcacgtgccatctggatggcgacgcagatgcccgccaaggcgattgcagtgaagagcgaagcccagcaggccgtgctggcactgcaccggatacgagaacagaaggtcaaattccgcacggcacagatcaattgcctacgtggactgttaaccgaatatggcgaagtgatgggcaagagccgggcagcgctggacaaggcgataccgggcgtgctggaaagactggccgatcgtttgccagccatgctgatcgagtcgctgcgggagcagtggaatgggctggatggtctggaccaggagatcgccggcatcgaacggcgtttgcacacctggatgaaagaggacaaggcgtgcaaggccatcgcggcgattcccggtgtcgggctgttgacggcgactgctgcggtcgcgaccatgggagatccgaaagcgttcacgtccgggcgcgagttcgcggcctggctcgggttggtgccaaagcagacgggttccggtgggaaggtacaactgctcgggataagccggcgaggcgacacgtatttgaggacactgctgatccacggcgcgcgaagtgtcctgtatcacgcgaaggaacccggcgcgtgggtcgagcagcttggcaagcgccggccgaagaatgtcgtgatcgtggcgctggctaacagaatggctcggacgatctgggcaatgctcgcgcacgaccggccgtacgacaaagcgtatgtgagcgtcaagccggcctaagcagctggtgccgcggaaaagatcaacttttttacacagggtgaactgtcgaaggttgcgctggcaatcgtacgtgatgacaaaacaggtaggaccgtgactcgcaaaacctgaaggaccatccgagccttgagctcgccgttcgaatgaggtgcgagtcggcggatttcatcgggacccgcagcgcctcaggctgcaacaaggtcgaatatagatgcgcaacctaccctgtccgtcagaacgaacgaaaaactcgcgcaaatgggggacgttcatata

SEQ ID NO: 4579 - DNA, 1409 bp, unidentified
  source 1..1409: mol_type = unassigned DNA; note = element_6f9cf35
  misc_feature 1: note = core
  misc_feature 2..90: note = LE
  misc_feature 91..1119: note = CDS
  misc_feature 1120..1409: note = RE
  misc_feature 1174..1404: note = bridgeRNA
taatggaatggtcgccccgccttttcgcgaacccccgccagaagtaacaaactggtaacgttgaaccatccaacgacaggagcaaccaagatgaacgctacacggattggaatcgacttggctaagaattcgtttcaactccacggtgttggatcgaacggaaaggttgcactcaggaagaaactgacacgcacgaaattactgccattcatcgccaacctgccagcctgcgaaatcggcatggaggcatgtggcagcgcacactactgggcgcgcgagttcgcaaagtttggtcattcagtcaaactgatcgcgcctcaattcgtaaagccgtatgtcaaatcgaataagaatgattcggcagatgccgaggcgatctgtgaagccatgagccggccgaacatgcgtttcgtccccatcaaaacacaagagcaacaggcctctttgagcatgcatcgcgtacgcgaggggcttgtgcaggagcgcacggcagtggccaaccgaatccgagggctactttttgagttcggcctggtgataccagcgggcatccgccacttacgctttggattacaagacgttatcgaggcaaacgagcatgcgcttccaaacacctttcgattgttggttcaacgtttactggatcatttcgcataccttgatcagcagctgaaagagctggagcaggacatccaccgtgagtaccgtgctagcgaagcctgtagacgtctcggtgccattcccggcatcggccctatcacggctactgcgttagtagcgacaataggtgacgcccggagtttccagagtgggcggcagttagcagcatggcttggactcgtccctcggcaacattcgacaggcggtaaaccaacgttattgggcatcagcaagcgtggcgacggttatttgcgccggaatttgatccacggtgcccgggcagtcatgcgctttgccacagacaaagacgaaccagttccgtggctggtgcatcttcttcaacggcgtcacaagaatgtcgtcatcacggccttggccaataaaaatgtgcgagtcgcctgggcgctgctgacccatgagtgcgactatcaaataggctacaggggcagtgctgcttgatcaatcagggacgattcaggcaggcactgaaaaagaaaaaccgtcaacgagagtcgaccaattgcaaaggcaattatgacgtgatggcaaggcaggtcagaccgtgaccgggtgaacccgaaccagactaggcacccttgagtgcgattttttgatagtgccccggtcagcgcattccatcagggacaaaggcgacggccttaatgaaagtccggatatatggctgcaactctcaacctcgccaaaccagaaccgattgtaggccattgcaaaccaggggcgaccatata

SEQ ID NO: 4580 - DNA, 1458 bp, unidentified
  source 1..1458: mol_type = unassigned DNA; note = element_6fa7fc1
  misc_feature 1..2: note = core
  misc_feature 3..261: note = LE
  misc_feature 262..1437: note = CDS
  misc_feature 1438..1458: note = RE
  misc_feature 29..241: note = bridgeRNA
ctcatatctttgacatagattaaaaatatgaatacttatctttgaaatatgaacaattaataagcaaaacgaattggcaaaattctatcggggcgaaatacatcagttgatgatattgtgcacttagggcaatccacttcgtttttattacatttcgagtcacaatagtacttaaagaccatattttgaatttggatcttgtataaaaaatgagcaaagattgatgtgatattttgtttattgatataaaatcaaagagttatgaatttaaagtattctgtgggtcttgatgtttcaagtaaaaaaattaatgcttgtattagtattattgatcaaaaacaaaaggttgtttgtaaatccagcactgtaattgcaaatactttaaaaggatttgcaactttagaagattggattttaaagcaaaaaaaggaagttcttccagttgtagtttgtatggaagccacaggtatttatcatgagaattgtgcttattatttgtatggaaaaggatttgatgtttccataattttacccaataaggctaaaaaatatttagaagctattgggctaaaatcaaaaaatgatagtattgatgccaagggattgtctcaaatgggagcggaacaatgtttggaattatggcagcctatgggaccctttttttatgagttacgtttgttgactaggcaacatcaaaacgtaacagaattaaaaacggttttaaaaaaccaattagacgccttgagttttgcaatgcatcatttagatgcagtaactaatcaattagagcaaaccataactttatttgaaacccaactcaaagagttggacaaggaaataaaagcacatttaaaatcgaataaagaggttcattgtaaggctgaaaatatattaaagatgaaaggattaggtgttttaactttgagtactgttttggcagaaaccaacggctttacattgtttaacaactacaaacaattagtttcttatgctggatatgatgtagttgaagcccaatcaggagcacgtgttggtaaaacaaaaatatctaaaagaggaaattcaagattaagacgtgccttacatatgccttctttagttgtcattcaatgtcaagtaaaaccttttaaagatttatttgatagaacctatgaaaaacatggtataaagatgaaaagttatgttgcagttcaaaagaaactattgacaatgatctatcatttatggaagaaaaatgaagcttatgatgtcaattatcagtcaaatatccaagaggaggagcaaaagttatcctctcgggcaattggcttcgaagaagacacaatagaaaaaaatagccccaatatagaaattgaggctacacaaggtaaacatccagtgagttatcgcaagaagtttcctctcggtcatacaaatatagaaaaattagcaaaataaattaggaattaaagatagtac

SEQ ID NO: 4581 - DNA, 1398 bp, unidentified
  source 1..1398: mol_type = unassigned DNA; note = element_6fac22c
  misc_feature 1: note = core
  misc_feature 2..98: note = LE
  misc_feature 99..1145: note = CDS
  misc_feature 1146..1398: note = RE
  misc_feature 1158..1396: note = bridgeRNA
taatgggatggtccgtcccgctcccatacggcatcacgatgtgccagaatagaggaagtccagtacggataatctattcacaaagaggaggacgaaccatgagaaattatagcagtagtaaaaggattaagacaataggtatagatttggcaaagagcgtatttcacctgcatggagtagatgctttgggtaaagttgttgttcgcaagcggttaagccgcagcaaactcatagagtttatgacacaaattagctcctgtttagtcggcatggaagcatgtggcggttcacattattgggcgcgtaagtttagctcgatgggtcatgatacacgtttgatcagcccgcagtttgtgaagccatttgtaaaaggtaacaagaatgatgcggccgatgcggaagcgatttgtgatgcagtgcaacgacccaacatgcgctttgtaccaatcaagaatattgaacaacaggatattcaaagtattcaccgagcaagggagcaggtggtatgcaggcgtacagcacaaggcaatcaaatacgaggtttgttgatggagtacggtctggttatttcccagggtcgaaaggttttatgtgctcatatccctgatattcttgctgatgcggataatggtttatcagccatatttcgagagttgttgtcaggtttgtgggaagagatgattcatttggaggaacgtgttgccgaatatgatctgcaaattgatctattgagtaagcaaagcgatgtttgccaacggttgatgacagttccaggtattgggccgatggtggcgacggcacttgttgcctctgtttctgatggaaaagcctttaaaagtgggcgtgaaatggcggcatggttagggcttgtgccaaggcagcattccacaggtggcaagccgaggttgatgggtataagcaaacgtggtgatacatatcttcgtaagctgctgattcatggtgcaagggcagccctgcgctggacggataaaaaacatgataagcgaagtgtttgggcaacaagtttgaaagagcgaagaggtcagaatattgcagcagttgctttagcaaataagaccgttcggacagcttgggtgttaatcactcggcatgaagagtaccaaatgagcacagtaagcatgtaaggagatatttagaatttcaacagattgcgtggattgagtaagataatggcaacaaaggcagcagccacattcctgaaaacctgacggggacttagaccagaaaaggtcgttattgtgataaggtcagaaatgtgcagcgaattccattagggctagaagcatcccagcttcaactaaaagccggatatatgtatgcaactttccttaacttgccaatcaaactttttccttgcaacgcgggacggaccatata

SEQ ID NO: 4582 - DNA, 1332 bp, unidentified
  source 1..1332: mol_type = unassigned DNA; note = element_6fad233
  misc_feature 1..2: note = core
  misc_feature 3..269: note = LE
  misc_feature 270..1109: note = CDS
  misc_feature 1110..1332: note = RE
  misc_feature 1087..1314: note = bridgeRNA
agatgtatggactccctctccctgaggaggtacggtcttaatccgacaaaagattaaccaaaggagtccatacatgaaagatactaatatattggctattgatttagcaaagaatgtttttcaagtctgtaaacgagatccaaaaggtaaagtcctcttcaaccgagaacttagccgagcaaaactaaaagagatgcttgttaagcagccacgctcattggtggcgatggaagcatgtggtagtgcgcaatattgggctaggctagcacgtgctctttggtcacgaagtcaaagtcatttccgcaagaacagttaagcctttccaaactaagcaaaaaacggatcgtaatgatgctttagccatcgcaatcgccgcttctcaagagcatatccatggtgctcgtgtgcaatctgccgaagagcaggctttgcaatcattggagcgagctcgtcatttagcaaaaacacatcaaatagcacagagtaatcaaattaggggcttacttggagagtttggtattattgtgccaccaagcttatcccaacttcgtaagcacattccttttattctggaagacgctgaaaatagcttgcctcagtcttttcgtgaaacactgaattatttatggcagcacttactacagcaaatcgaacatgttgccattttggaacgccagctcgaaggcgctgtaaaatatgatacgacctgccaaaagttgatgaagttagagggcgtcggccccatcggtgctttagggctagcggtgcgtttaggtcaaggtgagaattttaccaacggtcgtgaagcatcagcaaatatagggttaacgccaaagcaacatagttcaggtggtaaagagcgtattgggcatatttcaaagcgtcatgcagataagcgacttcgttccactcttttccaaggagcgctttctgttatcacgcaagtgagtaaacgtccagccagaacaagcaaagagcgttggctacaagccttagtcgagagaagaggcaaaaaaatcgcagcggttgctttcgcaaacaaaacggtaagaacagcttatgcgatattaaagaatgacacggaatatcagccaatctcattggcttgatattccatgttgaatcagcaaagagcgatgtaaaacaggtaagaccgaccaatagaagcaagttaggttctaaggcactttagatgccgcttcctagaatttgcctattggtgcgagtacattttagggcgaggtagctcctcaataaagcccgtatataagcacgcatctatacttgtttttaaagacagttttttgttgatttacttagggagtccatata

SEQ ID NO: 4583 - DNA, 1579 bp, unidentified
  source 1..1579: mol_type = unassigned DNA; note = element_6fb237c
  misc_feature 1..2: note = core
  misc_feature 3..282: note = LE
  misc_feature 283..1347: note = CDS
  misc_feature 1348..1579: note = RE
acgtataatccaattatctcagatggtaattggatttttcctttcgcccagaaatctctgggtattctgctctatctctgatatattttggaaaggcactgtggatctgtacctatatttctacagctttgactgttccgaggtgactcagaccacagcttttcggctattactgttaatcagtttgttaacgcctgacgtttctatttacgtgattacacaaccgaattccctgtggaagacaacaatgctctaaatatttttatcaggaggtttttctctatggccatgtactttgtcggaattgatatttccaagtacaaacacgattgctgtattatatcggcagatgtgcaaaaggttgttgcaaagctcaccattaaaaatgataaggctggctttgaacagttgctttctgtttttaattccctctccattccagaaaatataaaaatagggtttaaatcaacagcacactatgccctcaatcttgaactcttccttgaaaacgcccactacagcttcatggaaattaatccacttcttatcaaggaatacaagaaatccacatctctcaggtgtaccaaaaccgactctgttgactgcgaatcaatagcccggtggttaatgagtgttgaatacaaaccccattcaaaaggattttaccactcttactccttaaagtcactaacacgtttaagagatcggctcattcgacagcgctctttttatcttgtgaaaatcacaaatgtcctggatcacacattccctgaattcaagccgttttttcatgagcacttatccaagactgccctctatcttcttgagaactatggttcttctgaaaaaacggcaagaatgaattctgcatcctatgagaaactccgctccctatcaagaggaaaattttctccccagcagttcattcagttaaaagagcttgctgccaatacggtcggcgtaaacaactccatctttgatgtggaactgaacagcctgcttatcctatataagtctctcttaaaagagattgacacacttaaaaaggaaatcaaccggctgatcgaggaagtgcatcctcactatatgtctgttcccggcatcgggtctatatctgccgccgtcatttattcggaatacggagatatatcaagcttttcaacaccggcccagatgctcgcatttgcaggtattgaacccggtataaacgattctggaacagaatcacacggagggcggatggtgaaacacggctcgtctcagctccggtatgtccttattaattgctgccttccactaatccgtttcgatatgacatttgctgcttactatgaaaaaaaaacgtagagaaggcaagccacacagggttgctgcacccatgtggcgaagaaacttgttagagtcatctatgcattggagaggcagggagtagactttaacgcgcagaaactcagataattacttacataaatgaaccttttcccatctgaaatacaatgtattcagatggtctgttaaagttacccatttttactaaagtaatttttttcaaaaacctcttgactatttatagtttgtc

SEQ ID NO: 4584 - DNA, 1398 bp, unidentified
  source 1..1398: mol_type = unassigned DNA; note = element_6fb2a32
  misc_feature 1..2: note = core
  misc_feature 3..78: note = LE
  misc_feature 79..960: note = CDS
  misc_feature 961..1398: note = RE
  misc_feature 1118..1386: note = bridgeRNA
tgttggtgtggacggtccccgccctggcggtaagatgccggaacgtggatcattatgccgttaagaaggagacctttagtggaaagcattattcgtatcggtatggatacatcaaagcacgtttttcagcttcacggagtgaatgaaagtgaacagccaattcttcgtagaaagttgcgaaaaaaggaaatgatcaccttcttcgagaagcttcctcctacgatagtggcaatcgaggcgtgcggcggatctcatcactgggcccgtcttctgcaatccttcgggcacgtggtaaagctgatagctcctcaactcgccaagccctatgtaaagcggggtaagaacgatgccgctgatgctgaagcgttatgcgaggcgatgagccggccaaccatgcggttcgtacccgtcaaaagccaagatcagcaagccgcgcttatgcttgtgggaattcgtgatcggctcatccgaactcgcacccagatcgtcaatgcgatacgggggtatgcgaccgagttcggccttgccgcagccaagggtctcggcaaggtcgaaccgcttctcgagcggattgcggttgatgaatccctcccggagcttgcacgcgaactgttcgctctgcaggcgcaggaatatgctcgattacgggctgaaattcgagacatagaggaaaagctgatggcttggcatcgcaccgatgaatgcagccagcgtctacgccaaataccaggtgtcgggccaatcgttgcatcgctcctcgtcatgaagacgccatctgccacgctcttccggtctggacgcgacttcgccgcgtggatcgggctgacgcccaaagatcattctgcggctggcaaggtgaaattgggcatcatcacgcgggcaggtgacgaggcattgcgtagcgcgctggttgttggcgcaacagcgatgctgcgcgttgttcgagcaagggcgcagtaagcgcgcctcgccgtggcttgtcgcgttgcttaagcgtaagccgcccaagctcgttgcgatcgcactcgccaatataattgcgcggatcgcatggaaactgatgacgaccggagaaaagtacaaagccatcgcctctccggtaagcgtggctgcggcatagattttcctcaggcgcggagagcactatcacgcaaccgccctgagccaagacggaacttgcaagagaagagtagatggtgtgatcgatcgatccgagacacgtgacactccgaagatcccattggccctcagtggtcgaccccatgtttggaacacgcgtcgcggaaaccatcttggccagcgttcatgtgcgacgcaccaacaggccggacatatgatcgcaaacgatccgatcaacttttccgctcaagtcccttgcaataggggaccgtccacata

SEQ ID NO: 4585 - DNA, 1371 bp, unidentified
  source 1..1371: mol_type = unassigned DNA; note = element_6fc1859
  misc_feature 1..2: note = core
  misc_feature 3..77: note = LE
  misc_feature 78..1112: note = CDS
  misc_feature 1113..1371: note = RE
  misc_feature 1083..1358: note = bridgeRNA
tgatggggtggatgcccctccccgcagctccagtctgctaccgttgccatcatcgcaattttgaaatggagaccaatatgaataacgtcacaatcatcgggatcgatctggccaaatcagtatttcaggtacatggggctgggtcagacggttcggttgtctatcgcaagaagctgtcgcgcccacagttttcaaagttcatggctgaccaacccgcctgcattgtcgcgatggaggcatgtggcagtgcctatttttgggcgcgaatgatggaagatcttggccatgaggtcaggctggtcccaccgatctacgtgaaaccgtttgtgaagcgccagaagaacgactcagccgacgcggaggcgattgcagaggcagcgtcgcggtccaacatgcgctttgtaccaatcaagagcgtgcaacaacaatctagaagcatcatgttccgcacacgagaaatgttgattggtcagcgaacacaaaccgtaaatgcgctgagatcgcaccttgctgagtttggcgtgatcttccccaaggggttgcataatctcaaacgtctcgcggcgtatgttgagagcgccgatgagagcattcctattgaagttgtccagatcggagaagtctatctcgagcagatcacgcagcataccgaccgtatcaaagtactagagaaaacgatcaaggggctggcagaaaccagcgaaacgccgagacggttgcgcactgttcctggtgttggtcccatcacagctatggccatcgaagcttttgcacctgagatggagcgatttgagaaaggccggaatttctcggcttggctcggtttggtccctcgtcaacattcaacgggtggcaaacaggttttgggtcgaacatcaaaaatgggccaaaaagacattcggaatctgctgatagttggtgccatgtctgtcatcaaagctgcgatttacaaaaaagacgagagcaatccatcgtggctggggcaactcttggaaagaaagcccagaatggtggtggccgtcgcgctggccaacaagatggcgcgaaccatttgggctatgctgaccaaaggtgaagattataggaatccggcgactgtggcagttgcatagcaacgtacattcgtcggtcgttgggcgtgtgaggaggttttgaacagaatgggcaattgatcgtcagatcgggaacaggaaaaccagttcaccacaaagcgcttacagcgcgcttccttgatttggacctgatccgcgaacttaccataccggcccgcggcatgtgaaaagccgcacaatgaggcctgacacatgaccgcacccgatcacatgctcaagacgttgaaaatttacttgcacgaaacggggcatccacaca

SEQ ID NO: 4586 - DNA, 1365 bp, unidentified
  source 1..1365: mol_type = unassigned DNA; note = element_6fc2501
  misc_feature 1..2: note = core
  misc_feature 3..77: note = LE
  misc_feature 78..1103: note = CDS
  misc_feature 1104..1365: note = RE
  misc_feature 1079..1352: note = bridgeRNA
tgatggggtggacgcctccccgacggccttggtgtgccagagtgatggtgttggtcaccactgaacaggaggcgtccgtgtcggaagttagcacgatcggtttggacttagcgaagcgagtgtttcaggcacacggagcagatgcatccggcaaggtggtattccgcaagcggctgcggcgcgagcaggtggttgcgtttttcgccggccggccggcgtgtgtggtggcgatggaagcctgcagcagcgcccactattgggcgcgtgagatcggcgagctcggccatacggtccgcctgatcccgccggcttacgtgaagccgtttgtcaagcgacagaagaacgataccacggacgccgaggcgatctgcgaggcggcgcaaaggccgacgatgcgctttgtgtcggtgaagagcaaagcagcccaagccaatgcagttgtattccgagttcgggatcttctggtacggcagcggacacaggcgatcaacgccttgcgtggccatctcggggaatatggggtggttgtggccaaaggtcccagtcacgttgcgaagctcatcgcacacgtagaggatccggccgccgatctacccgaggccgcccggacagtgcttcgcgcgctaactgcctcgctgcaattcttgtccgaacggattgaccttctcgatcgcgaggtcgctcgtcgggcccgcgaagacaaggaggtgcgtcgtctaacgaccattcctggagtgggtccagtgattgctacggcattggcagcattagcaccgcccgcggatgctttcagaaggggccgcgacttcgcggcctgggtgggactcacgccgtcgcagcactctagcgggggcaagcaaaagctcggtgcgacctcgaaaatgggcgagcgaacgctgcggcgcctgctgatcattggagcgagttccgtcgttcagaaggcgatcaaacacggcacccgatcggggtcctggctagggcggatgttggcacgcaagccgcggatgctcgtcatcgttgctctcgccaacaagatggcgcgcaccgtttgggccctacaggcgacaggggagatctatcgagctccggtcgtggcggcttaaagccgcccgcgatcaggaggcgtcggaggcgtaggagggtcgaaaggaaagtatggcgcacagtcaatgagagacgggatcgggaagccagtttttcacacgcgcctcgagcgcgtgggtgtgatttggacccggtctgcgaactcccataccggcccgcggcaactgaacggccgcagcacaggccgaacagatgtcagcacctgactacgcgcgatacagtcccgaagattcttcttgcgttcagggaggcgtccacaga

SEQ ID NO: 4587 - DNA, 1557 bp, unidentified
  source 1..1557: mol_type = unassigned DNA; note = element_6fc4b8f
  misc_feature 1..3: note = core
  misc_feature 4..240: note = LE
  misc_feature 241..1434: note = CDS
  misc_feature 1435..1557: note = RE
  misc_feature 7..260: note = bridgeRNA
attcgtaatatataagtgaaggtttaaacagccttcactcttttattttataatgaaggtgattggcctacgaaatttggaattgggacaatacgcccgaagttaaatgtgttagccagccttcattatcctgcattcgattcagcaagttgggacatagctcccgtttaaccaacgaatatgaatggattttaaagagctgtataccaatcaatacgtattaaacaaaggaggttttctatgattgctgttggaattgatgtatcaaaatccaaaagtactgtcgccattcttaatgcagatggctcaaaacgcatcgcaccctttgatgtgaagcataatcttcccgaattaaatgcattagttaaatatttaaatgaccttaatgataacattgtaattctaatggaacatactggtcattatcattatccgattctaaaaaaattgaatgacgaaggttttcaagtatgccttgtaaatccatatcaaatgaaaaagtatggagacacagaacttcgtcgcactaaaactgataagaaagatgctattcgaattgctacctatgctcttgaaaaatcttatctacttgtcccttatagctccatggaacaaaagtatgaagatctacgccttctttccagacaatatagtcagcgaatggctacacttacttttaacaaagtacatctgggaaatctacttgatgaaacaatgcctggaataacctcgattctatccttaaatactcgtgatccagacaccagtctcagcatgctttttatcaagaaatataaatcctatgattatatccgaaaaatgggaaagacaaggtttctcgaaagctattctaaacttactaaaaaggctcgtaatcgtcgtgttgaccatttaggtctctcaatttacgaattagctacccaaagcatcactactcatggcgaaaacacttatactattatggctcaaacacaatgcttaaaccttgttgccgaatcacaaaaggctgctgacgctattatcactcaaatgcaagcgattgctgtcactattcctgaatacccaatacttcgcagcatgaatggtgtaggtgacagattaggtcctttaattcttgcagaaatcggtgatgtccgtcgcttccatagtggaaaagcactaaatgcttacgctgggaatgacgcgcctccgtatcagtctggaaatttcgaaagccacaatcgacacatatcaaaacgtgggaatgcggctctcagaaaatactgttttgaggttatgcaggctctcaaactgttaaaaccccaagatgatcctgtttatctttttctggtcaaaaaagaacaggaaggaaaaccttataacgtagccaaaatggctggtgtaaataagtttctccgaatttactatgcacgagtgatggaactcgaacagtaaatctatatttattattatatattttcttcaaatccacaacctgtgggtttattaagtttacccttttttagagatttgacctttaatatttttatctgaaactacttgacatacattagcaag

SEQ ID NO: 4588 - DNA, 1458 bp, unidentified
  source 1..1458: mol_type = unassigned DNA; note = element_6fc639e
  misc_feature 1..2: note = core
  misc_feature 3..238: note = LE
  misc_feature 239..1441: note = CDS
  misc_feature 1442..1458: note = RE
  misc_feature 10..237: note = bridgeRNA
ccattaccttcttgatcagccccgcaatgggttcccggcctccgggacggcatgactgctcccccctgttgatcatgatctgggggggggtggtgtcaccgctcccggaggcactggtagaccgctgatgaggggcatgaccaccaactccttcgggagacagggaggttcttcgtaatgtggatgctggcagctggtgccgcaggtgaggccgggaccgtacgaccggagagtgcttgtgatcgacaccagtgacatcggcgccttcctgggcctggacgtcggcaagggcgaacaccacgccaccgcgctgaccccggccgggaagaaggccttcgacaagcggctgcccaacagcgagcccaagctccgcaaggtcttcgccaagctgatcgcgaagcacggcaccgtactggtcgtcgtcgaccagcccgcatccatcggggccctgccgctggccgtggcccgggacgcgggctgcaaggtcgcctacctgcccgggctgacgatgcggcggatcgccgatctctacccgggcgaggccaagaccgatgcccgcgacgcgttcatcatcgcggacgcagcccgggcaatgccgcacacactgcggtctatcgagctcaccgacgagacggtcgccgagctggagatgatcgtgggcttcgccgacgacctcgcaggtgaggtcacccgagtcgctaaccggctgcgtgggctgctgacccagatccacccgcacctggagcgagttgtcggcccgcgcatccagcatccggccgtcctgacgctgctggaacgcttcggttccccggcccagatccgcaaggccggacgccgacggctggtcactctcatacgtccgaaggcccccaggatggccgagcgcctggtcgacgagatcttcaccgccttggatgaacagaccgtggtcgttccgggcaccgatgccgcagcactgatcgtccccagcctcgccgcctccctccaggcagtgcttgaccagcgcaaaatcctcgccaccaggatcgaggaactgctagccaaccaccctctttcgaaggtcctgacgtctatgccggggatcggcgtcaggaccggagcccgcatcctcatcgacatcggcgacggcagcagcttcccgtccgccgcccacctcgcctcctatgccggtctcgccccggccacccgcagctccggctcctccatccgcggcgaacaaccctcccgaggcggcaacaaacagctcaagagagcgttcttcctctccgcgttcgccgccctcgccgacccggcctcccgcacctactacgacaagaagatcaagcaaggcaagcaccacacccaggccatcctctgcctcgcccgccgccgagcagacgtcctcttcgccatgctccgcgacggcaccttctaccagccccaacccgccccatcagcttgacgaaacctataggggca

SEQ ID NO: 4589 - DNA, 1387 bp, unidentified
  source 1..1387: mol_type = unassigned DNA; note = element_6fdab1e
  misc_feature 1: note = core
  misc_feature 2..85: note = LE
  misc_feature 86..1102: note = CDS
  misc_feature 1103..1387: note = RE
  misc_feature 1138..1377: note = bridgeRNA
atggaatggacacctcctacctaaacggcatcgtaatgtgccagactgaagattccaaccaatcagtcgaaggaggaggtgtgaaatggatgttacctgtattggcatagacttggcaaagcaagtatttcagattcacggtgttgatcatcacggcaaggcagtagtaaagaaacagctacggcgcggtcagatgctgtcgtacttccgcaagctggcgccgactttgatcggcatggaagcctgcggcagtgcccactactgggcacgtgagttgggcgagatgggacacgacgcacgcctgatgtcgccgcaattcgtcaagccctacgtcaagagcggcaagaacgacgcgcatgatgccgaagcgatctgtgaagccgtaagccgtcccagcatgcgctttgttcaggtcaagagcgtggaacaacaagtaatgcaagcggaacaccgaattcgcgcccggctcatcaaggcacgcacggcactcagcaatgagatacgcggcttgctcggtgaattcggcattgtacttcccgcctccctgacgagattgcgccgagccatacccgaactgctggaagatggcgagaatggcctgctgagtgatttccgccgactgctctgcctgctgggggaagaattgcgcaagctggatgacaacatcaaagaatacgatgcccgcattgcccagagggcgcgggaagacgaacgcatccaacggctcctgcgcgtagaaggaattggtccggtcgtcgccagcgccctggtgtctgcggtaggtaacggaaaacagttttgcaaaggccgggacatggcagcctggctgggattgacgccaagccagcattccagtggcggcaagagccaattggggcgcatcagcaaacgcggcgataaatacgtacgcatgttgctgatacacggcgcacgagcggcgctcaaggcggcggagaacaaggaagacgcccgtagccgctgggtgacggggctggcgaaacgacgcaacaaaaacatcgcgacggtggcactggcgaacaagaacgcccgtattgcatggtcaatcctgagccgtgaggaaacgtatcgaacagcggtataacagcaggcagttccaggaaagtttagcaggagacatcaaacaacgattgcgtagcaaaacgaattgatggcaaacaggtcagaccggcgtaagtgactcagcttattgtgttggctcactggcgaagcaacaatcgacaaagccgctagggcgatttgagacttacgcgcgaattccatcatggctcaggtacctcgctacccaacaggaagccggatatacggaagcagttgaaccaaaaccatcaacacgggttgcttgcaaaacgggaggtgtccatatacg

SEQ ID NO: 4590 - DNA, 1187 bp, unidentified
  source 1..1187: mol_type = unassigned DNA; note = element_6fdbb6d
  misc_feature 1..2: note = core
  misc_feature 3..218: note = LE
  misc_feature 219..1172: note = CDS
  misc_feature 1173..1187: note = RE
  misc_feature 3..197: note = bridgeRNA
cttgtatgttgtggtcgtcggggtggagggactctgcgatgcatcggccgctcatgcggaccgacactgtgagatttctcccgccccacccgccagcgtcgatcaggaactgagcggcgcagtgccctgggtggccgcgaccgccgatctctaggcaagccaacgtggtggatgggctgcaccccgactcggcacattgtccaatcggaggtgtactcatgcaagcgtctaccttgtgtatcggagtcgacgtagccaaggccgaactggtggtggccgtggccggtcagcggccgtacagcgtacccaacgaggccgccagcatcagccggtggctgcgcacggtgccggcgcatgcgctcatcgcgatggaatcgacggggcgctaccacggtctgctggccggtctggccaaccagatgggcttgaacgtgtacgtgctcaatgctcgcgacgtcttcttctacgcccgcgccctggggacacgggccaagaccgatggcgtggatgccacggtcattgcacgctacctgagcgagcgccatctgcagttgcatccctggcggccagccgactcgacacatcggcaagtgcaagagctgctcacccgccgcgcgcaggtggtcatgcaccgttcggccctgtgccaggcgttcaaggcgaccgatctgcaagacagcatcgacaccagcgccctgcatggggcattcgatgccttgctgcgatcgatcgatgcgcaggtgcagcgcctgatcgccagcgacacgcagttggccgagggataccatcgcttgtgcaccatcaccggcatcggggcacaaacgggtgccctgctggccacgctgctgagccggattccatttgccaatgccgatgcgctggtggcctacagcgggctggatccacgccccaacgattctggcgccaggcgtggacggcgtcgcctgagcaagaagggcccggcattcctgcgcaggcaaatgtacctggcgggcttggcggccagtcacagcaaggccctcgggcccttgtaccgggcgatccgcgccaagggctttgcctccacagaggccatcgtgattctcgggcgcaagctcttgcgggtggcgttcgcggtctggaagggcagcgaggggttcgatgcagccaggttcgcaccaaggacgacttgacgcaaaacatagaac

SEQ ID NO: 4591 - DNA, 1800 bp, unidentified
  source 1..1800: mol_type = unassigned DNA; note = element_6fde59e
  misc_feature 1..5: note = core
  misc_feature 6..432: note = LE
  misc_feature 433..1410: note = CDS
  misc_feature 1411..1800: note = RE
  misc_feature 1459..1700: note = bridgeRNA
aggagcattcctgtaatgaaggaaatttgaggtttgcacaaaaaagagcccccctggtatgatacgaggtgtccagagcttcaaaagcaagaatggacccttaattgatatccagggaggactcaccatgaattatacccagaatcacaagatttcgcaaatcacgacatcaacgctcattatcggcattgatgtagcgaaggacaaacatgtcgcacgagcgcaggatgacagaggcattgagtttggcaaacgtctgatctttgaaaatcgatttcatggctttcaaaccctgttggattggatggaaagactaagaaaacagaaccataaagaccatgtgattttcgggttgaaccaacagggcatttttggctgagccttgcctattttcttaaggctaagggttatgattttgttttggtcaacccgatgcacgtcaagaaaagcaaagagctggatgacaattcgccaacgaaaaatgatacgaaagatgccaaagtgattgcacagctgattaaggacgggcgatactccgtacccaatctcctggacggcatttatgccgaactgagagaaggcgccaaattaagagatcagctcgttaaacagcttatgatcacagatggccgtattcaaaacgttattcagcgctactttccggagttttttgacgtatttaaagactgggaaggcaaagcggccctttgtaccttaaaaagttttccatttccttcacaaatcaaggaaatgactcctgaagaagtgcttgagaaatggaagacacaggttaaaagaggtgtcggcatcaaaaaggcaacaaagcttgtggaagcagccagaaagagtattggcattcaagttggcatgaagtttgccaaacgggaaatagactgcctgcttgagcagtatgagctttacaatcaacaaatccaacagttggatcaagaactggaaagcctggtagaagatctaccgggagccaggcaaatgatggctatcccaggcctgggaaagaccacagtcgctttatttttcgctgaggtgggtgacattacaaagtatagccacccccaacagcttgtaaatttagcagggctctcattgaaagaacatagttcagggaagtttaaagggcaaacaaccatcaccaaacggggaagaaagaggcttcgaagagccttgtatctggcaattcgcccgctggttgtgcacaatccggcgtttaaagccctgcaccaatattatacaaagcgccctaaacacccgttgaagaaacagcagtcactcatagccttgtgttgtaagttattgcgtgtcctatttgccattggcaacaagcaatgcgattttgatggggcaaaattattgcaaggattgcctcaaatagaaacattacaggtagcttaaaaaagcaaggtagctcttaaatacagctttattccgaataaaacaccaatagtgcagagccggagtttatttattccattcgggcattatgacccagtcgaggagcatatccggcctccacctcatggatacgcaggacgaaggaatgtgtggaccccgatcctgggagacataggagggtgagcgaccgtgagttgtgtggagattttatgcacggttataccttttcgtttaccaaatatatccaatttggttgttaggatggaccttaccctgcaagaaaattctgcttatatctatttagaggtgtgacaacgattaggtgtaaatcaaatacctatgaaatttggagaatatgcgagtaaatgagagataattgaactttattga

SEQ ID NO: 4592 - DNA, 1537 bp, unidentified
  source 1..1537: mol_type = unassigned DNA; note = element_6fe18c5
  misc_feature 1..2: note = core
  misc_feature 3..241: note = LE
  misc_feature 242..1420: note = CDS
  misc_feature 1421..1537: note = RE
  misc_feature 3..218: note = bridgeRNA
ctcgtattataaaagagtagtatttatatccccctctccaggggtgtgctacactgtaaaggatgctgtggattggtatttaaatcctaccgcaatgacggtttgaaggaggctccgaccacagccctttgcagttttgttgatcagttagataccgccagacggtttatttggaacgaggctacaaggcaaagtgttctgtggatgcagcatcataaatctttactctggaggtatcatcatggtttgcgttggaattgatgttgcgaaggacaagcacgactgctttatcctcagctcagaaggtgaggtgctggccaatgcgtttaccattgcaaacaaccgggaaggctttgagacgctcctgcgaacgatccgatcttgcagcggccccacagacaacataaaagtagggcttgaggctaccggacactacagctacaacatcctcgggtttttgcttgagaaagggatgccgcccttcctcatcaacccgttgcataccaacctctaccggaaaagtctcagccttcgtcagactaagaccgaccggatcgacgcacggacgattgcatctatgctcatgtctgatgtggacctcaagtcctacacagacacagcataccacaacgaagagctaaagtcacttacaagatacagatttgacaaggtaaaggagagagcaaagctcaagcaatccatttcccgtctggtcaacatcctgttcccagagctggaaacgttggtgccgacactgcacatggcgtctgtttatgccatgctcagcgagtttcccggcgccaggcggattgctgaggctcatttgacccacttcaaggctatcctatccgacgcctcaaaaggccgctatgatcgggacaaggctcttgagatccgtgaggctgctaggcgctccatcggctccactatgcctgccaagtctcttgagcttcagcacaccatccgtttgatccgcgaactggataaggagattgacgagatcgaagctgccatcaagggaatcattgacgagatggctccgccgatcctcaccatcccgggcatcagctaccgcatgggcgctatgatcctggctgagatcggtgacttctctcgtttcgactctccggacaagctgctggcctacgccggcctttctccctcaacttacgaatctgggaaattcgtagccaccggcggttatgcccacatggaaaagcgaggctcgcgctatctacgctacgccctattcaacgccgcaaaatacgtctgtatctgggaaccatcctttgctgcataccttgctaaaaaacgagccgagggcaagcactacaatgttgccatctctcatgcttccaagaagctcgtgcgtcttatctttgcactacagacttcaggcagggctttccagcctgcctaacatctcactccatactgttcagagcgcctgccggacgctccggtttttataccctttttgcagctattaccaattcacaactttcttcattttggggattgacttttaatagttagt

SEQ ID NO: 4593 - DNA, 1428 bp, unidentified
  source 1..1428: mol_type = unassigned DNA; note = element_6feebac
  misc_feature 1: note = core
  misc_feature 2..62: note = LE
  misc_feature 63..1100: note = CDS
  misc_feature 1101..1428: note = RE
  misc_feature 1205..1422: note = bridgeRNA
tactgggatggtccgccgcctaggcccctagagggtgtaaaggtggacaaaggaggtgttccatggaaattcgcaccatcggtatcgatcttggaaagactgtctttcaccttataggtgtcaacgcacgcggtgaagttgtggttcgcaagaagtgctcgcgtcttcaactgcttcgtttcacatcgaacgttcctgcgtgcctgatcggcatggaggcctgtggagggtcgcacttcctgggcagagctctgcgggaacaggggcacgatgcgcggctaatgccggcccagtacgtgaagccgtatgtgaagaccaacaagaacgacttcatcgatgccgaagcttgtgctgaggcggtgacccgtcccacgatgcgctttgtacccattaagaccgatgaccagctcgatctgcagtcgctgcaccgggtgcgcgagcggtggatggtgcgccgtaccgcagtcatcaaccagatccgggggatgctgctcgagcgcggaatcacggtgccgaaagggcgccgccacatcgaagaatcgctgcccgggatcctggaagatcccgacaacaagctgtccggcgcattgcgggtactgctgcgcgagctgcgggcggagatgcagtatctgcacggacagatcggggagtgcgataagttgatcgtgcgcatcgcgggagagcttgaagactgcaatcgccttctggcggtccctggaatcggaccgaccatcgctacggctacgatcgcagccatcggcaacggggcagccttcaagaagggccgagggtttgccgcatggcttggcgtggttccaggagaacattccaccggaggcaagcaaaagctcaccgggaccagcagacgtggaaacaagtacttgcgaaaacttttcgtgcaaggagcgcatgcggtgctgcaattcaagacccagcaagaccctggcctcagcgcctggctggaacgactggcggcgcgcaaacgtcctcaagtaactgccgtcgctctggccaacaaaatggcgcggatggcctgggcggttctgtataaaggagaagcttaccggccgccgctggccgcacaaagagtggcagcctaatggcctgcacatgacgcctggcacaaagcgccaggctcggaaatcgctgaagcgattcccacatctgcaggccaacgacgaatatctgagttttgagattcctgccaggtttgctggcaagcatgagatggcaaaaacggtcgatcccggcgctcccaaaacctgtatctccaaccagccttccaaggccgcgatggtaaataggatgagggcgcatcgcattccattcaggccaggagttcgatactccaattaaggccggatacattcgcgcagaccaattctgtctccctcatttttcgcttgcaaaacggcggcggaccataca

SEQ ID NO: 4594 - DNA, 1372 bp, unidentified
  source 1..1372: mol_type = unassigned DNA; note = element_6ff5fc4
  misc_feature 1..2: note = core
  misc_feature 3..1127: note = CDS
  misc_feature 1128..1372: note = RE
  misc_feature 1161..1360: note = bridgeRNA
agatgtatggactcctccccctcgcgggagttttgcggtataaagtgaaaagtattcactcaaatcaacttttaccaggagtccacacaatgacacaatgtaacgtaatagctatcgatttagcaaaagatatttttcaagtttgtattatgacaaccaatggaaaaatcactttcaataaagcaatgagccgagcaaaattaaaagaatggctcgttaagcaacagctatctcttgtagctatggaaagttgtggtggggctcattactgggcaaggtttgctaaatctctaggccataaagttatgcctataccgcccaaacaagtcaaaccgtttagaacggggcaaaaaactgatgctaatgatgccatcgctattgctgttgcatcgcgcgcgcctaatatcaaaccagcaagagtcttaaccaatgaagagcaaggtctacagtctgttagtaaaatgagagatttacttgataaacaaaagcttcagttatccaatcaagtacgtggcttattactcgagtttggcatcatcatcagtaaaagtataaaaagctttaaagcacggatacctgaaatattagaagacggtgaaaaccagttacctatgccaatgcgtcatagtataagtaaaatgtgggcgttatattcccgtctagaagatgattttaaaaccctaaataatgaattaatgcacttaaccgaacaagatgatgattgtaaaaaactcatgaaacttgaaggtgtgggtcctataacgtcgatgagactaaaaatacaactaggctgtggcgaacatttcaaaagtagtagacaagtatctgcttgtattgggcttacccccaagcagcatagtagtggtggaaaggtacaactcggctcggtaggaaaaagctcatgcgataaccccctacgaagttgtctttttttgggggcaagagccgtggtgtccaaacttaaaaacagacctgcaaaaactgaaaaagagcgctggcttaaagccttaatagagcgtagaggtgctaactgtgcatcaatggcgttagcgaataaaaacgcacgaaccgcctatgcattattgaaaaataatacagattacaacccagtattaatagctgcttaataattactagaaattaattacacattaacaattaaaattgctacaaaaaagatcttaaaaaaggttagaccaaccttcaacagcctgagttttgctctgaacatatagaatgtcgtgaaggagaataggcatgaaggtgcgaatacatcaaagtggccgggatagcttcccattatgagtcctaatataagcacgcatctaaaattttaaaagttttttcttgtacaatacgaggagtccatata

SEQ ID NO: 4595 - DNA, 1492 bp, unidentified
  source 1..1492: mol_type = unassigned DNA; note = element_7007676
  misc_feature 1..2: note = core
  misc_feature 3..247: note = LE
  misc_feature 248..1471: note = CDS
  misc_feature 1472..1492: note = RE
  misc_feature 7..238: note = bridgeRNA
ctaatgggactcgaccggaaccctggagcgatctgggagactggtccggggcccgctggccggtgagcactgccttgcccagagacaccgcgatctccagggagagaccgtgccccggccggtgcgtccgggtggtccgcagcactcatggggtgtcgtgcccgagagcactgttccatgaggccgtcgcaggacctacccggcagggtcgcagccagcagcacgcagcgggaaggaaccgaacacgatgaccctgtacctgggcgacgactggtccgaggaccaccacgacgtccatctcatggacgatgcgggcgagcggctcgccgcggggcggctgcgcgaaggggtggagggcgtcaccgagctgcacgaactcgtcgcgcagcacgcctcggggccgggcgaggtcgtggtcggcatcgagaccgaccgcggcccctgggtgggggccctgctcgcgtccggctaccgcgtctacgccgtcaacccgcgctcggcggcgcgctaccgcgagcgccaccatgtgggcggggccaagtccgacgccggcgacgcgaagctgctcgccgacctcgtgcggaccgaccgccataaccaccgcgaggtcgccggcgacagcgacgaggccggcgccgtgcgtatcctcgcccgcgcccaccagcaactcgtctgggaccgcacccggcagacgaaccggctgcgcaacggcctcagggagtactttcccggtgccctgcgagcgttttccagcctcgcacacggcgacgccgtgggcgtgctggcgaccgcacccggcccgcgcgaggcggcgcggctgaccatgcctcagctgcgggccgcgctgcgccgcggcggtcgcaagcgcaacgtcgaggagcgcgccgccgaactccgtgaggccttcggcgccgagcagctcgcggtgcctgccacggtcagccgggcgttcgccgcgaccacccgcgcagccgtgacacagatcgacgcgatcaacgggcagatcgccgcgctcgaggcccaactggaatcctcttttgagcagcacccggacgccgccatctaccgctccatgccggggctcggcgtcgtgctcggcgcccgggtgctcggcgagttcggggacgaccccgaacgctacgagtcggcgaagtcccgcaggaactacgccgacacctcgccgctgaccgtagcatcgggacgcaagcgcaccgtgaaagcacgcttcatccgcaaccggcggctctccgacgccgccaacctctgggcgctgtgctcactgcaggcgagcccgggctgccgcgacttctacgataggcggcgtgccgccggcgacctccactaccaggccctgcgcgccctggcgaaccgcctcgtcggttacctgcacggctgcctccgcacccgcaccccctacgacgaggccactgcctgggcgcaccgccacgaccgcgagcagctcgccgcttgacctcttagcaccatggggtgt

SEQ ID NO: 4596 - DNA, 1377 bp, unidentified
  source 1..1377: mol_type = unassigned DNA; note = element_7012020
  misc_feature 1..2: note = core
  misc_feature 3..238: note = LE
  misc_feature 239..1117: note = CDS
  misc_feature 1118..1377: note = RE
  misc_feature 1147..1365: note = bridgeRNA
tgatgctgtggacggctcctccaccggcactgaagtgccatggatgtgggtgctgttaaggcccccacgattcggaggagccaaatatgcaagcggtcacgacaatcggtctcgatatcgctaagtcggtttttcaaatccacggagttgacgcggcaggtaatgtaatcgttcgccgtcagctcaagcgccggtacgttttgccattctttcagaaatgccggcgtgcctcatcggcatggaagcctgcgcttcgtcgcatcattggtcacgcgagctcacagcactggggcatacggtgcgcctgatgccggcggcctacgtgaagccctacgtcaagcggcagaagaacgatgctgccgacgctgaggccatttgcgaagcggtcaccagagcaaacatgcggttcgtggcgaccaagacactcgagcagcagagctgcctgatgctccaccgcacgcgccatctgttcatccgccagcagaccgcagtgatcaatgcgatccgcgcccatcttgccgagtacgggatcgtcgctgcggtcgggcgcaatggtgtcgaggaactgctcggggtcgtcgccgacccaggtgacaaacgggtgccggagattgcgcgcgcgtgtcttgccgctctcggcgcccagctgcgaatgctcaaggcgcagatcttggagttcgaccgtatgatcaccgcctggcaccgatctaacgagacgagcaagcggctcgatgcgatacctggtgtcggtccggcgctcgccaccgctctggttgccagcgtccctgatccgaaggctttccgatcagggcggaatttctcggcctggattgggctcgtgccgaagcaacactcgagcggcggcaaagacaagctcggcagcatcagcaagcaaggtgatcgctacctgcgcagccttttcacggtcggtgcgctcgccgtgatccgctatgccaaaatccatggcaccaagcaccggccctggctcacaccattgttggcgcggcggccagcgaaggtcgccgcggtcgcactcgccaataagatcgcgaggatggcttgggcgatgatggccaaaggcgagcgctacaaggaacccgtcgcactggcggtgtaaacgagatcgcgccggccatcggcgtgatgtgaaggttgggaaggcgaacagcacgtaatgcagagccggtcgatcccggcgatcaggacaacccactagtgccagcgcattgtcaaatgcgagcttttgaccgggacctgatccgcggagggcattatggccagcggcctgtgtgccgcgctaacaggccgaacacatggctgcaccgaccagcctgcaaacgtgaagaaaacccttgccaactcggagccgtccacaca

SEQ ID NO: 4597 - DNA, 1620 bp, unidentified
  source 1..1620: mol_type = unassigned DNA; note = element_7013da5
  misc_feature 1..2: note = core
  misc_feature 3..238: note = LE
  misc_feature 239..1486: note = CDS
  misc_feature 1487..1620: note = RE
  misc_feature 17..303: note = bridgeRNA
ttgctacaatgtcaacaggccggataaagcgtgtcagccagtcatgcttttcttggactcacacttaagctacaatggaagggaaattggcctgacgagacttttgatggactaaccatgtccggctgctaaacagtcagccatccttccactgtagcgttcggttggggcaggttgaaccactgggaacccagggtgttcgtgtgaccaagcaatttgaatcggcagtgggaaaacgatggtcgccaatttgaaaatgatcgaacggaggaaaacaagagaaatgaacgcagtggggatcgacgtttctaaggggaaaagcacggtagtcgttatgcggcccttcggcgaggtggtcgcggaaccgtttgaggtatcccacacggatgcagaactgagcaaactggcttgctttctgggagaactgcccggagaaacacggatcgttatggagtacaccgggaactactggcaacccatagccaaggcattgcacgatgtgggcctttttgtctgcgtcgtgaatgcgctgttaatctacaaatacggcaacaactccattcggaagggcaagacggacaaactggacgctgtgaaaattgcaaattactgtcttgaccgttgggctaatctcgaacgctacactcctgctgatcaaatccggcagattctcaaaacgtgtcgccgccagtacgatcagtacataaagctgaaagtcaatctcaaaaacaatctgatctctctgctggacgggacgtttcccggcgtcaacacacttttcaaaagtgctcccagggatacggatggacacgagaaatgggtggatttcgccgaaaacttctggcaccgcgagtgtgtctgcatgaaatctgagaaagcgttcacaaatcaataccgaaagtggtgcgccaaaaccgggtacagattcagcgtggaaaaggctgtggccatctatgcccacgcctcctcacaggtgaacacgcttccgatgtccgatgcgatcaaactccttgttacccatgcggcagttcaactcaacacaatcataaaaactatttccacgattcaacatcagatgctcacactggcttcacagcttccagagtatccaatcgtcatgcggatgttcggtgtcggtcctgtactcggtccacaactcatggcggagatcggtgacgtgcgccgctttgaccgcaagcaatccttagtggcctttgccggtgtagatgcaccaccctgccagtccggcacctttgactcgaagaaccggcacatttccaagcgcggatctcccagattgcgcaagacgcttttccaagtcatgtctacccttattcaacatgcgcctgctgacgatcctgtattccagttccttgaccgcaaaaggcaggagggcaagcactactatgtctacatgaccgctgcggcgaacaagttcctaaggatctattacggcactgtcacggcttatttggagacgctgtaacctcatcataatcgcctatttccaccccaattccacggccgccgattcacgacggcctgctttgctgtgccctttcccctgggttgtttttttgaaatttttctgcttttaggtcttgacatctcttggcaggt

SEQ ID NO: 4598 - DNA, 1797 bp, unidentified
  source 1..1797: mol_type = unassigned DNA; note = element_701b617
  misc_feature 1: note = core
  misc_feature 2..357: note = LE
  misc_feature 358..1674: note = CDS
  misc_feature 1675..1797: note = RE
  misc_feature 118..288: note = bridgeRNA
tagtataataatggtgtagtcaataagactactcggttaataagtttctatgattagataacagaagaaggtgttcttccttcatcagatgttatcctaaaataattatcatgtctgacggttcctgatagacaccagataaaacataaggtattatcccttaggatgggataaagaatgtattcccccctgggaagctgaactctcagctgatacctacaagaaagtcaattagtccattcgacagggttttatgttttagctggtcgggagccggaaggctatacctgtataacacgctaggttatgtacctgccagattggaaatggattcctatcagaaaggagcttttgctcatgtcaaacaaagttatttttaatctggatgagttattcatctctgttggtattgatgtcggcgctgacttctcatggatgtctattgctctgcctaaccaacaattcgtaggcaaaccttataaaatcctacataataaaatgagttcccttacaaccgctgtttctaaaataaaagaagcagaagagttgtattccttggaaagtcgcattttcctggaatccacgggaatttatcattacccactcttctgctatcttcgtgataagggttttaactgctcggttattaatcctatcatcactaagaatagcacaaatatcaacatacgaaaagtacataatgaccgttttgattccaaaaaagctgctttggttggtttgaaaccagatttaaaggtttcccttatgccatctgaccttgccctcaactgccgtaacctttgtcgtgaatactacgatttaatggataaccgcagcgcttatgtaaataagcttcaaggtgaattacgaatggcttttcctcaatatcttggcattttttccaaagttactaccaatacatctcttacattattggaaacttatacgtctccatctgcctttatcgcagcagacaggcaggagattattgacaccattaaatctactgctcgctttgggcttgcatatgcccagaacaagtataatgccattatccaggctgcaaatgaagcgaatgacttcggttacatcattgacagtaatatcagacgtatccgtctgtatattcgttttattcgcaaatacgacgaagaaatcgccagcatacttgatgccttacatgaactggttgatacaaacgagggtactgattttgtaaggcagatccatttgattgaaacttttaaaggttcagggttcttatctgccgtatccctcatgggagagattggcgatttctctgctttttcaaagccaaagcagctttttgcttactttggtcttgatccggccgtaaaacaatccggcaaatttgaaggcaccaaaatccaaatgtccaaaagaggatctgctattgccagacgagtaatccacacactggctttacaaagtatcagtacatcccgtacaggagaagccaaaaatccggtactccgtaattactatctcaaaaaatgtgaatccaaaccaaaacttgtagcaatgggtgctgtttcacataaagtatgcaacatcatatttgcaatactcagagataacaagccttttgaaatcattactcctcaagagcatatcaaacaatacaatgctgataaatgcaacatagctgcataaaatactgcaaatccaacgaatcaatatctttttaaaaatgatattatcaccaaggggaaagtctgcccttttttctgatgaaaaatatttttcatttatctattgacatttattagctggact

SEQ ID NO: 4599 - DNA, 1601 bp, unidentified
  source 1..1601: mol_type = unassigned DNA; note = element_702afc3
  misc_feature 1..3: note = core
  misc_feature 4..288: note = LE
  misc_feature 289..1470: note = CDS
  misc_feature 1471..1601: note = RE
cttatattattattcgtaggtagctcctacatgctctgagtataaaatttatacttagatggatgatgcgccgtgaattagtttttattttccaacagcacctttaccatcggtgactggttcagaaaggctctaatcacggctttttgtcgtattggtaataagtttgatacggcttggttctgctttgaattttgactgtttatttcgcgtaaggttacattggcaattagcccgtgtttatcatgtcgcatcatcgattactttattccctaggaggattcttttatgcttttcgttggtattgatgtcgctaaatcacatcatgatgtcgctgttcttgacgacaatggtctggttgtcttacggcatctccgtattcttaatagtcgtcaaggttttgcaacactgcaccaatctttgattcagttatcagccgatactaacgatgatatccgcatcgcaatggaagccactggccattaccatttgaatttgctcttattcctgcaagccaatgcttatcccactttcgcttataatccatttttgattaaagaatttgctagaacattgactcttcgtaagacaaaaacggataaagctgatgcactaacaattgctaaaaagttagctactgatttatcatcggatcgttttaagcccgatttcaacatgcaagaactcaagtttttaacgcatcatcgcaatcggttaactgatagtcgttctaagctcaagacgcaatacattcgtctactcgatatcttgttccctgaactagctggtttcattggcaaaacaaatttacactatcagtatgtctatgatttgttaacaaaatatccttcacctgctaaattgagtcgcgctcatactaatgcgcttgttaagctattgcataatcatggtaatcgacttgatatggctcagcaacttaaagttctagccaaacaatctattgggttgtcctcaccagctaacgcgttagaacttgttcagaccatatccgtgattcgtttatatgatgaacaaatcaatgccatcgaccaagagattgcacaaataatgaacagcttagacgaagcagctattgtcacttccattactggtatttctaatcgtttgggtagcgttattctagccgaaatcaatcacattaataattttcagtcacctgatcagctattagcttttgccggcttagaaccttctgtttatcaatctggccagatgaatgccacgggtaaaatagttaaacgtggttcgacatcattgcgttgggcgttgtgccaagcagctgaatatgcttctcattggtcgccgactttacgtcaataccgtcaaaagaaacttgacgagggcaagcactattatgttgtcatgactcatgtcgctaaaaaactggtacgtatcatctattacctgttaaaacatcatcaatactatgacgaatctaagctcatataactcataatttcacctcttaattaacaaaccatgggaacgttttaaaatagtaatttaaaacgtttatttgtcgttcaaccaaattattattctacatttagttgtttttcttgacttttaacatagtttgt

SEQ ID NO: 4600 - DNA, 1425 bp, unidentified
  source 1..1425: mol_type = unassigned DNA; note = element_70385d0
  misc_feature 1..4: note = core
  misc_feature 5..201: note = LE
  misc_feature 202..1365: note = CDS
  misc_feature 1366..1425: note = RE
  misc_feature 1..189: note = bridgeRNA
ctccgtaagatgtttcctggcccgggagggccgggtgtggctcaagagcttctgccttcagtggctcgccaggagtggccgcccggcccttcggggcaccctggctgctgattgagatgtgcgcttcggtcgctttttacggagatgacagcggggtgttcctcgggccgacagtgatgcggttcggaccggggagggcgagtgagcgatcggaagactgtggcctgggtcggtattgacgcgggcaagggacaccactgggcggcagcggtcgatgagaccggcgcgacgctgtggtcgaagaaggtcgagaacgacgaggcagcgatcctggccgcgctcggcgagctcctggacctggcggacaaggttcactgggcggtggacatctccggcacggcgtctgcgctgctgctggcgctcctcgcagctcacggccagtcggcggtctatgtgcctggccgcacggtcaactgcatgtcgggcgcctaccgaggtgaagcgaagaccgacgcccgtgatgcctacgtgattgcggagacatcccgtcaccgcagggacttcgcaacgatcgatgttcctgcccaactcgccgccgatctcgcactgttgaccgctcaccggtccgacctgatggccgaccgggtcaggatgatcaatcgactgcgcgacatcctgaccggcgtcttcccggcactggagcgggctttcgactacagcagtcacaagggcgcgctggttctgctgaccggctaccagctcccggccgcgatccgccgccgcggtcaagcaaggatgacggcgtggctggccaaccgcggcgtccgaggcgccgacgcggtggccgcgggcgccttggaagctgctcaagcccagcagaccgcgctgcccggagaggaagccgcggcccagatcgtggctgacctggccgcacagatcttgaacctggatgaccgactgaagcggatcgacaagcagatcagcgagacgttccgcagccacccgcaggcggggatcatcgagtctatgcccggcatcggctcgatactcggggccgagttcgtcgtcgccgccggtgaccttgcggcctacgccgacgccggccatctagcatcggcggccggactcgttcccgttccccgcgactccggccgacgcaccggcaacatgcaccgacccaagcgctacagccgccgcctgcgacgcgtgttctacatgtccgcgcagaccagcatcgtccgtgagggacccaaccggcaaccgggacttctaccccaagaagcgcgccgaaggttgcaagcacgtccaagccgtcatcgccctggctcgtcgacgcgtgagtgtgctctgggcgctgctgcgtgacggacggacgttcacctctatggccccagtcgcgcaggcggcttgattcggtcattgaga

SEQ ID NO: 4601 - DNA, 1457 bp, unidentified
  source 1..1457: mol_type = unassigned DNA; note = element_7039632
  misc_feature 1..5: note = core
  misc_feature 6..219: note = LE
  misc_feature 220..1179: note = CDS
  misc_feature 1180..1457: note = RE
  misc_feature 1..232: note = bridgeRNA
cacccgttacctttttgatcgtccccagccggggaccctcggtcgcccggcccggtatgacttcctgcccctgtcgtttgcatgatccggggggtgttgtcgccgggtcgggtggcgtcggtggaccgctgatagggacacggccacccgtgttggggtaggtctcttcgtaacgtggttgccggcagtccgacgctcagaccagcggccgaggccacgatgagatgcgtggaggcgggtgcggtgaacgacggatacggcgtctacctcggcttggacgtcggcaaagagggtcaccacgcggtcgggttggccccggacggcaaacggctgcacgatgcggcgttgccgaacgcggaggcccggctgcggcagttgttcgacaagctggctcgtcacggccgggttctggtggtggttgaccagcccgcctcgatcggtgccctgccggtcgcggtggctcgggcgtgtggtcatcaggtggcctacctgcccggcctggccatgcgccgcatcgccgatctgcatccgggcactgcgaagaccgacgcccgcgatgcctacgtcatcgccgacgccgcccgaaccctgccccacacgttgcggcgggtcgacgtcggcgacgaagccctggccgagctggaggtgctggtcggcttcgatgacgacctcgcgggcgaggccacccgggtgtccaaccggatccgtggcttgctgacgcagatccatcccgctctggaacgggtcctcggccccagggtccaccacaaggcggtcctggaactgctgtcccgctgcggtggccccgttgggctgcgcaaggccggccgacgcaaactgctctcgatcgccgccgtccacgcgccgcgcatgggcgaacgcctggtcgagcagatcatgaccgccctcgacgagcagaccgtcaccgttcccggcacccaggctgcggagacgatcctgcctcgcctggccgacagcctccgcgacatcctgcggcaacgtgaccaggtcgccggcgaggtcgaaaggatccttgatgcgcaccctcttgccccggtcctgacctcgatgcccggcatcggcgtcaggaccgccgcccggatcctgctcgaagtcggcgacggcaccgccttccccaccccggacacctcgccgcctacgcaggcctcgcaccggtgacccgacgctccggcagcagcatccgcggcgaacacccaccccgaggcggcaacaagaacctcaaacgagcgttcttcctcgccgcgttcgcgtccctagccgaccccaccagccgcgcctactacgaccgcaaacgcgccgaaggcaaacgccacaacgccgccctcatctgcctcgcccgacgccgctgcgacgtcctatacgccatgctccgcgacaagatcccctaccaaccacgcccaaccagccccgtccccgcttgacgaaacccataggga

SEQ ID NO: 4602 - DNA, 1402 bp, unidentified
  source 1..1402: mol_type = unassigned DNA; note = element_7043e11
  misc_feature 1..2: note = core
  misc_feature 3..83: note = LE
  misc_feature 84..1115: note = CDS
  misc_feature 1116..1402: note = RE
  misc_feature 1189..1390: note = bridgeRNA
agatgtatggactcctcccccttaacgggagagtacggtataaagatattgcaaaacacttttaccaaataaggagtccatacatgacacagtctaatttaattgctatcgacttggcaaaaaacattttccaggtggcgcagctgaaaggcaataaactcaagtttaataagccaatgaaacgcgaacctatgtttgagttgctagcaaaagccgagggttcaaaggtcgtgatggaagcttgtggtagcgcccagcttattgctcgcaaagcgctgtcgctggggcatgatgtcatgttgcttccccctaagttcgttaaagcgtttaggcaaggccaaaaaaccgatgcaaacgatgttctcgccattgccagtgcaagccaagcatataacgtaaagccctgtaaaatcatgacagttgaagagcaaacgttgcagtcattgagccaagcgagaaccttagtagataaacaaaagactcagctttcaaatcaaatacgtggattgctattagagtttggtattgttattaatcaaggcgatgctgcgttaacacaagtcgttccagatattttagaagatgctgaaaatgcgctccccatcgcattaaaacaagcactcgcggtgagttatgacctatataaaacacaatgcgacgctaaagcacagctacataaacaagttgaagcgataaccaagcaaaatgagagctgccagcgtttaatggcattagaaggtgttggcccaattaccgcgatagagctgttatcctttttaggcaatacctcacaatttagtaatgccagaggggcggcggcatgtgctggtgtaacaccgacacagcactcatcaggcggaaaagccaagataggccatatccccaaaagacgaggcaatacattaaggaaaaacctgtttctcggtgcaagaacggtagtcagtaggctaaaacataaagaagcgaccacagagaaagaacgctggataaaaaatctactcaccaagaaaagcgtgaaatgtgttgccattgcattggccaacaaaacggttagaacagcctatgccttacttaaaaacggctcaacatacgagccaaaaatcttagcggtgtagcactgagtaacagaagaacaaatcaagataaatagaacgtaaaagcagaaagcatactgagattacccccagtattgaacaagccaagatagagcattaagcggtgagacccacccttgagagcctgttaaaccgcaggtgtatacaaataccgcgtgggagagaaggcacaagggcgcgaatacatcaaagaggccgaggtagcacctcatcaagagcccggatataagcacgcaatcacaccaataatgctaaaaatggcttgtacaattggagcagtccatata

SEQ ID NO: 4603 - DNA, 1216 bp, unidentified
  source 1..1216: mol_type = unassigned DNA; note = element_7043e9e
  misc_feature 1..2: note = core
  misc_feature 3..218: note = LE
  misc_feature 219..1193: note = CDS
  misc_feature 1194..1216: note = RE
  misc_feature 12..192: note = bridgeRNA
cttgtatctttgtctctgtggtgatcagctatcaccaccgcggattcgacgagtttgctctgacaccgaaagcttagactttgcgataaagattaaacctcgatccgctcttctgagccagctggacactggacggtagccaagggcattgagaccctgcatgtacaaggcaagtgggcgcagcgggcatcatgagtatcatgacgggagctaagtctatgttctttctcggaatagatgtgtcgaaggccaagctcgattgcttgcttctcgtagacggcgccacaacacgcaaaacaaaggttgtacccaacaccgccgtcggcgtgcaaacgctattggactggtgcatcaagcacggcgctcaacccgagcagattcacgctgtacttgaacccacgggccaatatcacgaacaggccgccactgtgctgcacgatgcgtcgatgaatgtctcgctggttaacccagcacaggcacgagacttcgctggagccttggccgtacgttctaagaccgatgggatcgatagctatgtgctagcccgttacggccaggcgctcaagccgccgctgtggcatccagcgcccgtgcacgctcgacaattgcgtgcactgctggcgcgacgtgaatccttggtcaaggacctattgcgagaactcaaccgccaagagaagacgcaattcagccgcccgccagcgttggttgaaagctctatcgataaagcaatcgcgttcctgcgtgaggagatcaagcgactggatcgcgccatcgacgaacacattgatcgacatccagacctgagagcggaccgggatttgcttaccagcatccctgccatcggaccgcaagcagcgaacgcgatcctatcgatcatgcacaacaggcgaatcaactcagctgagggcctggcggcatatctgggtctgattcccgtgcagcggcaatccggaaccagtctcaacggccgaccttgtctgtccaaggccgggtcgccaagagtgagggcaacgatgtacatggccgcgatcgtggccacgcgctataacccgcatgtccaagccctctacgcccgactgctggacgccggcaaaagcaagatgtccgcgctcggcgccgcaatgagaaagctcgcccatctgtgcttcggcgtgctcaaaacgcgttcgccctatcgcccggattacgcctaatctcttgacgggtaagacggtat

SEQ ID NO: 4604 - DNA, 1474 bp, unidentified
  source 1..1474: mol_type = unassigned DNA; note = element_7046113
  misc_feature 1..2: note = core
  misc_feature 3..229: note = LE
  misc_feature 230..1453: note = CDS
  misc_feature 1454..1474: note = RE
  misc_feature 7..230: note = bridgeRNA
ctaatggggatcgaccgcctcgctgtgggcgaggattggttggctgagccgccagcaggtgagcactgcgctgcccagggcttcgagctctatgcatagatcgtgcccctgctggtcggtgaggttcccgtgacggctggtgggatgtcgtgcctcgagcactgatccattaggtggctgctgggatcctcgggctcggtgaggtgctgagcgcgacgagaggagccagatgatcttcgtaggagtcgattgggcggaagcccaccacgatgtgttcgtggaagacgaggatggcaagcgcctcggtgctggccggttgcccgagggcgtggagggcattgcccgcttccacgatctcgtcggtgcccacgtggaggatccggccgaggtggtggtcggcatcgagaccgaccgaggtctgttcgtcgccgcgctggtggcggccggctacctcgtgttcgcggtgaacccgatgtcgacgtcacgctatcgggaccgccactcgacctcgggggccaagtccgatcccggggacgccaaggtgctggccgacatggtccgcaccgaccggcataaccaccggcccgttgcctctgacagcgacgaggtgcaggccatcaaggtgctggcccgagcccaccagtcgatgatctggtcgcgggtccgtcagaccaacctcttgcggtccacgctgcgagagttctatccggctgcgctggtcgccttctcggaccttgccagcggggacgccctcgaggtgctcggggccgctcccactcctgagctcggccgggcgctgtcgcgggccaagatcgctgcctgcttgcgccggggtgggcggtcccgacgcatcgacgagcaggcggtagagatccaggcggccttgcgctccgaccagctcgccgcaccggctgtgatctcggccgccatgggtgcctcggtctcggcaaacgtggcggtgatcgccaccatggccgcccagatcgcccggctggccaaggagctcgacgcgggttttgaacagcacccagacgccgtggtggtccgttccctgccaggactggggaccatcctcggcgcccgggtgctcggcgagttcggcgacgagccgaaccgctatgtgagcgccaagtctcgcaagaactacgccggcacgtcacctgtcacccgggcgtcgggcaccaagcgggtggtgctggcccgccatgcccgcaatcaccgcctggctgacgccatccaccagtgggcgttcgccactcttactgcctcccctggggcacgggccttctacgacgcccaccgagcggccggcgacagtcaccaccaagccctacgggctctcgggaaccggctggttggcatcctccacggctgcctcacgcaccactgtctctacgacgagaacaccgcctggggacaccgcgaagagcagaaacttcccactgcagcttgacaagtttcgcccgtgggatgt

SEQ ID NO: 4605 - DNA, 1469 bp, unidentified
  source 1..1469: mol_type = unassigned DNA; note = element_704875d
  misc_feature 1: note = core
  misc_feature 2..100: note = LE
  misc_feature 101..1174: note = CDS
  misc_feature 1175..1469: note = RE
  misc_feature 1212..1407: note = bridgeRNA
gaataagaagggacttcccacttccgggtaacggtatcaaagtacccagcttggaagatgtgacagtcaagctcaaacccatgttggaaggagaagtcccatgcgcaagattatccgagttggtgttgacctggcaaagaatgtcatccaggttcacgcggtcgatgagcacggcacagtggtggtggcacgggccctcaggcgggaaaaattcataacctggtgcgtccaattgcccgcaggttgtctgattgcgatggaggcctgctcgggtgcacaccactggtgccgcaagctgcaagcgctgggctttgatgcccgcatgatcccggcgcagttcgttgccccctatcgcatccagggcaacagcggcaagaacgacgccaacgacgcggcagccgtgtgcgaagctgcctcgcgtgcccacatgcacttcgtcacccccaagacagtagagcagcaaggcatgctcagcgtgcatcgcctgcgcgaaggcatcaaggaggagcgcactgcactgatcaaccgcattcgcggcctgctggccgaattcggtattgtcgtgccgcaaagtccggatgtattacgtagccagctgcaagaactgttggaagatgccagcaatgagatcgccagtctggcgcgcttggtgctgcaaagagcgcagcagcactggcaggaactggacgaacacatgcgctggtgcgatgagcgtattgctgcacaccatcaaagcgacgagcgggtgcagcgtgccgcccagctgatgggcgtggggcctgtgacggcatcggcactgattgccaccgttggtgacttcaatcaattcaagaatggggcgcaactgggcgcctggctggggctggtgcccaaacaaaactccagcggtggcgtggcacgtctgggcgggattaccaaacggggcgacatctacttgcgtaccttgctgattcagggcgccaaggcggtggtgctcacgggcaagcaatgcacgaacaaccccattggtcaatgggcgcagagcttgcgccagcgcagcaactggtacaaggcggtcgttgccctggccaacaagaatgcccgcatcctttgggccatcatgacccgcggggagaacttcgatgcgtgccatgtcagcaccaagcacgtacgcatgcccaggcctgcaatctgatcgccagcagcttgagaatttgaaggttccctgccagccagacgtgtagccaaagatgccatgaacaggtcagaccggcagcaggcaagctcggtaaaaacgctgtgacccaaagtcacgacaactgaattgagccctgctgagcggttcgtatctggggccgcacccaatgacacgaggtgcaacaagcccggctgtagatgagcagtctgtcccttgtttcaggtgccaaggcaagcgttaaggtggagcagaaattttgagaaaactattgactacgtgggaagtccctgta

SEQ ID NO: 4606 - DNA, 1194 bp, unidentified
  source 1..1194: mol_type = unassigned DNA; note = element_70527cc
  misc_feature 1..2: note = core
  misc_feature 3..188: note = LE
  misc_feature 189..1172: note = CDS
  misc_feature 1173..1194: note = RE
  misc_feature 9..197: note = bridgeRNA
cttgtgtcttgcggctgatgactagctaccatgagtcgcatcggttccggggcaacccgaatgcaccctgaggccatgagcctgtcgcgtagatgggtccccggggccgtctcatctcgaagtttgaacggtatccaagccccctgccgtgggcgggtgaggctgtacggacaaggcgagaggacgagatggcacatatcgggattgatgtcagcaagcgaaaactcgactgcatgtgggtccgcgatctggaaacggccaaggtcaagcccaaggtcttcaccaacgatccagcgcgctatccggacctgctgcattggctggagcgcaacaccggtgagccggctgacgcgctgcatgtgtatctggaggcgaccggcatttaccacgaaccgctggcgtactggctgcatgagcacggcgtgcaggtctatgtactgaacccggcccaggtgcgctatcacgctcagggcatgggcgtgcgcaacaagaccgatcgcaaggacagcatgatgctggcccgttatggcatcgagcgcgcgccagcgccctggcagcccgagccgccggaggtgcgcgagctcaagcgccggctcaaccggctcgaagccctggagcgggacatccggcgcgaggagaaccggcgggagaaggcgcagttcaatggtgatgccctggcccaggagtcgatcagcaatgtgctcggtgcgctgcacgaggaacatcgccggctgcagcgccagatcgacgatcacttcgacgcgaacgcacacctgaagcaggaccgggcgctgctcgagagtatcccgggcgttggtcgcgtcttatcggcgtcgatgactgccaccctgcgcagccgtgccttccgcactgcacggcaagcggccgcgttccatggcctggtgccggtgcaccgggagtccggcagctcggtccacgcacaaccccggctgtccaaggccggctcggcacgcttccgtcaaacgctctacatggccgccgtagtggccacccggcgcaatccggacgtccgccatcagtaccagcgtctgctcaatcgcggcaaggccaagatggccgccatcggcgcggccatgcgaaagctcctgcatatcgcctttggtgtactcaagtcgcagacgccctatcagccactgcaccagagcgcttgaaccggatggatcaagacggtat

SEQ ID NO: 4607 - DNA, 1558 bp, unidentified
  source 1..1558: mol_type = unassigned DNA; note = element_7057e54
  misc_feature 1..2: note = core
  misc_feature 3..230: note = LE
  misc_feature 231..1481: note = CDS
  misc_feature 1482..1558: note = RE
aactatcacgctttgcggcgccactgtgaacgaaaacggatttctgctatcattagggtggagacgacgacatagttcgttccccattgggcgcttaagcccgctctccaaactgttctggtctcctttattgaaccacattttatctagggcatatgccccataaaggatgtatagtaaagtaagcttactatgggagacccgtcgtactttttacccggaggtatatcatggatacaatgtacgaacgttgctgtgggttggatattcacaaaaagactattgaggcctgctttcgtagtggcaagaagaagacccatatgtcttttggcaccacaagtgcggagcttcgtaagctgactatgtggcttgtggagaacgactgccagagtgttgcgatggaaagtaccggctcttactggaagccaatctttaacattctggagctatctggcactgacatggaaattattgttgttaatgcaagacacatgaagaatgttcctggtcgtaaaacagatgtacatgatgcagagtggattgctgaattacttcagtatgggctgctccgtcccagctttatcccagaccgtgaacagagagagttgcgtgaactatccaggtatagaaaaagtctcgtagaggagcgtgcccgtgaaattaaccgtcttcagaaaatgctcgaaggtggcaacatcaagttgaccagcgtggtttcagaagtcactggttatagttccagaagattgctggatcgactgcttcgcagcgatgaacctatgacggaagaagtaatttctgaacttgttcatacaagtctagtcggtaaatcgaaagaactggaaattgctctggatggcctgctgtctgaactccagaaagaacttctgatcaaagtattggatcacatcgacgatatgagcagacgtatcgccgatctggacgacttttgccgaaagcagatgaaaaagtatgaagatgctcttgacaagctggatgaaattccaggtattgcgcgccgcaccgctgaaacaatcctcattgaaaccggattagatatgtcgaggtttcccactgcaaagcatttcgctcgctgggcaggactggcaccgggaaataatgagagcgcaggcaagagaagcagcggcagaacaacgaagggaaatccaacacttaagagtacgctgatacaaagtgcgaaggtggctgctcgcaaaaaggactcattctttaaagcccggtatcaaaagatagcggcgaggcgaggtgccaaccgggctagtgtggctgtagctcattccatgcttattgcaatctatcatattctcaagtccggtgaaaggtttaaagaccttggagaagattattacaaccagttcaataaagaaaagaagaaaaaatactacttgaaaaaactgacaaagctgggagtgaatttgaaggaagccacactttcgatttcgattcaggcagctacatagcgctcataagtttttaatgggaagttatagaggggagctttttgcgccatttttcaatcacgagatgttttcatagt

SEQ ID NO: 4608 - DNA, 1543 bp, unidentified
  source 1..1543: mol_type = unassigned DNA; note = element_705b3b9
  misc_feature 1..2: note = core
  misc_feature 3..240: note = LE
  misc_feature 241..1422: note = CDS
  misc_feature 1423..1543: note = RE
  misc_feature 3..218: note = bridgeRNA
cttgtattatagagtagtagtttttagagcccctttcccggggctgtgctacactgtaagggatgctgtggattggttcacccctcctaccgcaagacggttttgtgaaggctccaaccacagccctttacagtattgttaatcagttagataccgtcagacggtttatgtagaacaaggttacaagagtaaagtgtcctgtggaaccagcatcaaataaacataccggaggtattcatcatgatctgcgtgggtatcgatgtcgccaagaacaagcacgactgtttcatcctcaactcagaaggcgaagttctggctgatgtattcaccatcccaaacaacgcagagggctttggcacgctgctgcaaacgattcgccgctgtgctcgcccggaggacaaaataaaagtagggcttgaggctaccggacactacagctacaacatcctcggatttctgcttgacaacggcctggacacctacgtcatcaatccgctgcacaccaacctctaccgaaaaagcctgagccttcgcaaaaccaagactgaccgtgtcgatgtgcgaactattgcagctatgctcatgtctgatgtggacctcaagtcctacacagacacagcataccacaacgaggagctgaaatcactcacaagataccggtttgacaaagttcgtgaacgagcgaagctgaaacaatcggtttcccggttggtcacgatcctgtttcctgaactggaaaagctggttccaacactgcacatggcatctgtttacgcacttctcagcgagtttcccggtgccaggcaggttgccggagcgcacctgacgcatttaaaagccgtcttacacgactcctccaaaggccgctacgggcgagacatggcaacaacgcttcgggatgccgccagatgctctgtcggctctgttatgccggccaaatctctggaattacagcatacgatccgcctgatccgcgaactggataccgaaattgaggacattgaggctactatccagtccatgatggaggaaatacactcccccattacaacgattccgggcattggcgttcgtatgggtgcgatgatccttgccgagattggtgacttctcccgcttcggctcgccggataagatccttgcgtatgccggaatgtcaccttctacttaccagtccgggcagctttctctgtctggagcctactcacacatggaaaagcgaggctctcgctatctgcgctacgcgctttacaatgccaccaaatatgtctgcctttgggatccgaccttcgccgcttatctctccaagaagcgggctgagggcaagcactacaatgttgcgctctcccatgcgacaaagaagttggttcggctgatctacgctttggagaaatcccagcagccatataatacagccgtataactctgctctttcatatactcagccgggcgtccaaccagacgtctgttttgctgtgcctttttgagccgtctacattttctcaccattccatacatttcagacttgacatctaatagttagt

SEQ ID NO: 4609 - DNA, 1198 bp, unidentified
  source 1..1198: mol_type = unassigned DNA; note = element_705d5df
  misc_feature 1..2: note = core
  misc_feature 3..355: note = LE
  misc_feature 356..1186: note = CDS
  misc_feature 1187..1198: note = RE
  misc_feature 38..212: note = bridgeRNA
cttgtcttatgacttttgccgtcgcccctgtgcgatgaaggaccgttgccgcgggacggccgtcccgcggcaacggggagggaacgggtcgatactaagtaggctgtgatgagccgggatacagtatgaccgccccttcttttccttgtgccctgaacggatacccgaggttcggtctcgaatgacaagcataggacatggaaaagatgaagaatctagtcaccgctgcagaacctgaattgccaccagcgtcgatcacgatcgggatcgacgtgtcaaaggaccatctcgacgcagcgcgccatccgggcggggaaaccattcgtgtcgacaacacccgcaaaggcagacggccttgctacgctggatcggcgacgtcaaaactgtagcaagggccgtgttcgagccgaccggcccgtatcaccgcacgctggaagaacgcctcgcgtccctcggcatcccgttggtcaaggtcaacccacgacaggcgcggcgtttcgccgaagcaaccggcagactcgccaagaccgatcgcgtcgatgccctgatgctggcgcgatatggtgctctgctggagccggtcgcgcatccggttcgctctgagattcagatccgcctggcagagctggtcgcagcccgccgcagtctgatgcgcgatcgaacggcgaccctcaatcgcctcaagaccctgaccatcgggctgctgcagcgtcacgcccgtcatcgcctacggcagatcgaggcgcaggtcgcatctctcgatgcagcgatcgacgcgcttgtggtggaagacgcgcatctgtctcggcgccgcgacgtgctggcaagcatccctggacttgggatcgtcaccgcccatgcgttgctggccgacatgcccgaactcggcacaatggaggaaggccaagccgcggctctggccgggctggcgcccatcacacgccagtccggcacatggcgaggccgcagcttcatccaaggcggccgcgccaccttgcggcaagcgctctacatgccggctatcgtcgccatgcggttcaaccctgacctcaaaggtgtctatgaccgccttatcgccaaaggcaaacacgccaagatcgccatcaccgcgatcatgcgaaagctcgtcgtcctcgccaatgccctgcttcgaaaggatcgtctctggcccccaaaaaccgcttgatcacaacggata

SEQ ID NO: 4610 - DNA, 1534 bp, unidentified
  source 1..1534: mol_type = unassigned DNA; note = element_706216d
  misc_feature 1..2: note = core
  misc_feature 3..84: note = LE
  misc_feature 85..1113: note = CDS
  misc_feature 1114..1534: note = RE
  misc_feature 1130..1342: note = bridgeRNA
cgatggaatggactcctcctgccgtgcggcatcatcgtgccaacggtgtacggcctcttgaggccaaggcaaggaggagtccacatggagcatacgaccatcgctgtggatctcgcaaaatcggtgtttcaagttgcggtctcgcatcggccgggtcatctcgacaaagaacgcaggctttcgcgcgatcggttcttagcgttcttcgcacagcggccaccggcgacgatcgtgctcgaggcctgcgggtccgctcactacggggcccgacaactccaaccattgggacacgcggtgcggctgctcccggtgcatgatgtgcgaccgtacgtgcggcgcaacgcgaccgaccgcaccgacgcgaaagggcttctcgaggccaatcgaaacgaggagattcatccggtgcccgtcaaatcgatcgagcaccaagccattgcctccttgcatcgccttcggtcgacctgggtcgccaccagaaccgcgcgagtgaacacgctccgcggtctccgacgcgaattcgggatcttcatcccgaccgggtcgcggcgggtcgtccctcgcgtgcgggcgctacacgaggaccccgcggtgccctcgctgctgcacgcgacgctcgccgcggcctgcgacgagattgagatgctcgaggtcaacaggcgtgctgtggaacggcagctcacggcgctcgcagacgacatgccggatgtgcagctattgcaaactattcccggcgtgggtctcattaccgcgaccgcgctcgtcgccctcgtgaccgacatccgacgctttccctcggggcggcacgttgcgagctttctcggcctgacgccccgcgaagactccagcgcgctgcggcggcgactcggggccatcagcaaacagggcgacgtctatgtgcgcatgctcctgacccacggcgcccgctcactcgtctggcacgcgaaggcggcgggacggcccacgtcgctgcaacagtgggcgatgcagaccgagttgcggcggggacggaatgtcgccgccgtggccatggcgaacaaactcgctcgaatcgtctgggcggtgtgggtgcagcaacgccccttcgcggccgatcaccggctcgggtcataacgtcgactgtcgctcacccgaggactgcaccgagcgcaccgcatcagggcgcaccggtcggaccggcgcgggggttacgccgataactcggctcgccatgaagggtcgtgcaagcgattggcacccgcgcgcggatgtccatgatggcccggagtcgaacgactcctcgtacgaggccgaagatacgactgccgtccgaccctcgtggacagctctgggacgacaacagccacggcgctccacgcgcgtcaaggccttgcggccgccttcggcggtgcgctgcgcgcagccttgacccgtctcccgccgtgacgtgagtacaaactacgcgacgcaggaagaccttcgtcgctatcctcgacgggaggacttagcggatcgccttactcgacgctttctacttgacggaggagtccagata

SEQ ID NO: 4611 - DNA, 1358 bp, unidentified
  source 1..1358: mol_type = unassigned DNA; note = element_7070905
  misc_feature 1..2: note = core
  misc_feature 3..74: note = LE
  misc_feature 75..1100: note = CDS
  misc_feature 1101..1358: note = RE
  misc_feature 1123..1354: note = bridgeRNA
ttaatgagatggtcacccccacaccctgcgagggctacgctttcgcagggtgttttattttggagaccatcaccatgagcgatttagcgctggtcggtattgacctcggcaaacataccttccacctgcacggccaggaaaagtcggggcgagagctgtttcgcaagaagtgttcacgtcagcagatgatgtgcttcttcggcaacctgccagcctgcacggtggtgatggaggcctgcgccggggcgcatttcgttgctcgcgagctgatggccatggggcatcaagccaggctgatttccccgcagttcgttaagcccttcgtcaaaggcaacaaaaacgatttcgtcgatgccgaagccatttgtgaagccgcttcgcggccatcgatgcgctttgtttcgccaaagactgaggctcagcaaaccctttccgttttgcatcgcctgcgcgaatcgctgattcatgatcgcaccaaggccgttaatcaaatgcatggttttctgctggagttcggcatcagcctgccaccaggactggtcatgatgaaacgcttggccagcatcctggcggaatatgaattacccgttcggctgacagttctgttgcagcgcctgcacgatcacttcgtctacctggatgaacaaatcaaggcattggataaagagctggcaggccaactggctgacgatgatctgggcactcgcttactgagcctgccgtgtgtcggtccgatcaccgccagcctgctggctgtggaaatgggcgacggtaagcaatacggctgtagccgtgactttgcggcctccgttggcttggtgcccagacaatacagtaccggtggcaaggccaatttgctggggatcagcaagcgcggcgacaagaacttgcgacgcctactggtgcagtgcgccagggtttacctgcagcatctggagtaccagaaaggccccctggcggactgggtacgctcgctgctgatgcgacgccactccaatgtagtggcctgcgccttggccaacaagctggcccgtatcgcttgggcgatagcggccaaccataccgagtttgaagcagggccaatcagcatggctgcttgaccctgcggttgttgcagtaccacgactcacccttcaggttttgcgatagctgaacaacagatgacgtgaacggccgaccggcctgacgaagatcctgacgaaaaatttggcttaacaaagccgtgggctttttcaaggatcgtcaggcgcgactctcatcgtggcgcggggtttgccccaacagacgccggatagatttaagcaagccaaccacttcacccgttaatcagtattgcaaaaaatggggtgaccatagat

SEQ ID NO: 4612 - DNA, 1356 bp, unidentified
  source 1..1356: mol_type = unassigned DNA; note = element_7073cb4
  misc_feature 1..2: note = core
  misc_feature 3..79: note = LE
  misc_feature 80..1105: note = CDS
  misc_feature 1106..1356: note = RE
  misc_feature 1124..1343: note = bridgeRNA
tgatgaggtggacgacctccgctcccggcaccgctgtgccatactgtggccgtcaaaagtcactcacggagagccgtccatggaaaaggttagcacgatcggtctggatatcgccaagcaagtgtttcaggttcacggcatcgacacgaatggcgcaatcgtcttccgccggaagctgcgtcggaatgacgtcatggcatttttcaccgctttgcctccgtgcctaattggcatcgaagcatgcgcaacaggtcatcactggggccgtgttcttgtggcgctaggccatgaggttcggctaatgccagcctcttacgtaaagccttatgtaaaacggcaaaagaacgacgctaccgacgcggaggcaatctgcgaggcagttacgaggccgaccatgcggttcgttccggtaaaaagcgaggaacagcaaagcgttctgatggcgcatcgagtgcgcgagcttttgatacgtcagcggacgatgctggtgaatgccttgcgagggcatctggcggaattcgggatcgtaacgcgacagggcacggccggtgtcggcaccctcattgagctggtcgaagacaagaattgcgagctcatcccgccaactgcgcggaccgcgattttgccattagtggcacagctacgggaggcgcatcaaaaaatcagcgaaatggatcggcaaatccaagcctggcacagatccaatgaattgagccgacgattggagacaatccccggaattggcccaattaccgccagcgcgatcgctacaaccgtgacagacccaacgctgttcaaatctggtcggcaattggcggcttggttgggtctggtaccgcgccaaaactcatcaggtgggaaggatcgtctcggtcgaatcagcaagcaaggcgatccttatcttcgccgtctactcgtcgtcggggcacatgctgttttgcggttctgtcggaagggaaaaacaaagcccacccagtgggctgcagagcttctgacgaggaaaccgtacaacgtcgttgccgtagcactcgccaacaaaatggcgaggatcgtctgggcgttaatgatcaccggcaaacagttcgatcctccgactgccgcctgaccaagttgaggaagatacaaagattggtgaggtgctgatggtgtgatgacggacggtcgagccggggtcggaaaaacccgctcagtgggtgtcgctaaaaagcgcgttgacctgtctgggatccgatctgcggacttcatcaaggccagcggcatgaatcggccgcctcaaaaggccgaatacatgcctgcacccgaccaacccgacaaaaatgccatattgccccttgccacgcggaggtcgtccataca

SEQ ID NO: 4613 - DNA, 1650 bp, unidentified
  source 1..1650: mol_type = unassigned DNA; note = element_707c465
  misc_feature 1: note = core
  misc_feature 2..294: note = LE
  misc_feature 295..1566: note = CDS
  misc_feature 1567..1650: note = RE
ttttaccattcctttcgcttcgctcaaggcacaaacaagttatgaaaaaatgttgtgcctctcctcgctttgtcttataatatctatataggatagcaatatactacagagcacgggaggaggagtggcgaatttattttcgaccccgtatatttatatgtgccgtcatccttacaagcacaaacaagtgggacattgagcccggactcttatcattggtaataaaccatgtttattcagtcgcaggatgacagtcaatgttgctatcctttttttataaaggtggtgatacttatgatgaagttaaaatactccatctgctgtgggcttgatgtccacaaaaatgttatcgttgcaaccatcgtaatcacaaatgctgatggaatctctgagtacaagcaaaaatcattttctactttcaactcagatattagaaaatttcacagctggctaatcgagaataattgttatcatgtatgtatggaatccactgggaaatattggattcctatttttaattatctcgagaatgacatagaagtctgccttacccatcctaaatatgtcaaagccatcaagggaaagaaaactgataaaaaagactccaaatggattgctgacctctacaaattcgaccttgtcagatgctcgttcattccccctaaagacttcagacagctgcgtgaaatcgcaagataccgtttcaaactggtatgtatgaaatcttctgagaaaaaccgcatacaaaactgcatgactgtttccaatgtcggcattgccagtgtactgtctgatccttttggcaaaacagccacagaaatcatgtcgtatcttcttacacatacttctgattccattgatgaaaaagctgtccgcagactcattaaaaaaggggcaaaagctaaatccgatgaaatcattgaggcaatcagggggtataacatagaatctgatcaggctaaaaagcttgaacttgcccgaagccatctggagtatcttgatagcatgattactcaatctgaagttgagctttatgtaaggatgaagccttactacaagttcgttgaacttgtttctacaatgcctgggatgaccgaactaagttcaacaatcgttcttgccgaaacaggcgtagatatgagcatctttgatgacgcaaagcatctgtgctcatggtgtgggctttcacctactaacaatgagtcagccggtaaaaagaagtctgtgcggatttcaaaagcaggagattacttaaagcctatgatggtacaatgtgcgcttgcagcaatcaagagcaaaaagcagacctattttgcaatcaaatatggtcgagttaaaaaacgccgtggtcataagaaagcaatcattgccatagcacgaatgatgatagtatgcatttatcacatggtttcagaagaaaaaccgtttaatcctattgattatgaagaacttatgtctccgaaaaatcaaatagagcgtgtgattctaaatgaaaacaatgtctttgcttatcttgaaagccttggttatgatagctcaaagttagtaaaacgcaacgataactaacatttatttatatagttaccaattttagggatcttgcgaccccttatataagtgcgcccaaaaatataagttatttttcactct

SEQ ID NO: 4614 - DNA, 1520 bp, unidentified
  source 1..1520: mol_type = unassigned DNA; note = element_707fc7e
  misc_feature 1..2: note = core
  misc_feature 3..258: note = LE
  misc_feature 259..1500: note = CDS
  misc_feature 1501..1520: note = RE
  misc_feature 21..238: note = bridgeRNA
ctaatgagaactaccgggtcggcttcgagctttgggcagactcggtaacggtagccgtcgacaggtgagcactcgtgcggccgggaccctttagggagttctacccccagatcatgcccctgtcggtggtcgggaggattgatcgctgatgggatgtcgtgccaggcagtcggccttgagcactagatcattaggttgtggaaatgcctcccgcgagctgctgaaccaggttgccgtcactggctaggaggaactgaggtgctgttcgtcggggacgactgggctgaggagcaccatgatgtcgagctgcaagacgagacgggacgacggctaggcaaagcgcggctggaggaaggcgtcgccgggatcgcgaaactgcatgagttgatcggccggcatttgaccgagggcatcgaggcggatcaggtggtgatcggcattgagaccgatcgaggtccgtgggtgcaggcattgatcgcggcgggctaccaggtgtatgcggtgaatccgttgtcggtggcacggtaccgcgagcggcacagcgtctcgggggccaagagcgatgccgcggacgcgcgcacactggccgacatggtgcgaaccgatcggcatcaacatcgggtaatcgccggtgacacgcctcagggtgaggcgatcaaggtggtggcccgggcgcataagacgctggtctgggagcgtacccgtcacgtgcagcggctacgccatgcgttacgcgagtacttccccgcggctctggccgcttttgatgacctgaccagggcagacactctggacttgctggcaatggcgccagatccggcttccgcggccaaactgactcttgagcagatcagcgcggtactcaggcgagcccggcgccgtaacgtcgccgacaaggcgtcagcgatccaggtggctttgcgggctcatcatctgggccagcctgaggtcgtcagtgccgcatacgccgcctcggtgcgcgcccaagcagcgatcctgactaccttgaatgagcagatcaaggtcatggaaggtcaggtcgaggcacattttggccggcacccggacgctgagatctacctcagccaacccggcctggcacacatactcggtgcccgggtgctgggtgagttcggcgacgaccccaaccgctacgacaacgccaaatcccgcaggaactatgcaggtaccagcccgatcaccagggcctccggcaggaagaaagtcgtgctggcacgattcgtgcacaacgaccggctcatcgacgccctgggcgctcaggcattcgccgctttgagcgcctcacccggcgcccgggcctactacgacgagctgcgagcacgcgaggtggctcatcacgcggctctccaccaactcgccaaccggctggtgggaatcctccacgggtgcctgaaaacacgcaccaaatatgacgaagcaaccgcttgggcacatcgcgcagggggcgaatcgaagaagacatccgagatcgcagcttgacgcgtaagcgcatgggatgt

SEQ ID NO: 4615 - DNA, 1581 bp, unidentified
  source 1..1581: mol_type = unassigned DNA; note = element_7080f4a
  misc_feature 1..4: note = core
  misc_feature 5..255: note = LE
  misc_feature 256..1458: note = CDS
  misc_feature 1459..1581: note = RE
  misc_feature 34..275: note = bridgeRNA
ttttagtaccataaaagtgtagttgttagagagtaattaactctgacatctgcacttattttattataataaggggagtaattggtctaacgtcggcttttttggattgccacatccgtcacaaaaaccgttaaccaacctcttattataagcattcgattaagcaggtagggattcgctcccgcgtaaccaactaaactgaatggtaataagtgtagctgggacaattactaaaacagttagaggaggttctggatgataagcgtaggaattgatgtatccaaggaaaaaagtacagtctgcatactgaagccgtatggagagattatgtgtagtccttttgagatgctgcatggggagaaggagctgaatgctctcgatgatctgctaaataagctagatggggagataaggatcgtgatggaggctacaggaatttatcatttgcctatattgacattctttcacgaaaaaggatatttcgtatctgttataaatccattcgcaatgaagaaatatgcaaaggacagcagtattcgaggtgcaaaaacagacaaacttgattcaataatgattgcaaattacggaatcgagaaatggttcaaattacaaagatataaaggtgatgaagaaatttatgcagagcttaaacttttaggtcgcaggtatcgacactatatggaacttcacgtgaaggcattgcaggaattgacgcatatcctggattatgtgatgcctggtattaaaaagatgtttaacagttggaatgaagctaatggcaaggacaagctcagcgactttgtggagcaattttggcattttgatctaatcacagccatgagccttgaaaaatttacagaggagtatcttgactgggcaaaagaaaagaaataccaccgaagcagatccaaggctgaagcagtctatgaattagcttccaatggtatttccacactgtcttccggtaccccatcgaccaaaatgttagtacaggaagcgatatcggtattgagaactgtagatagttctctgtttctcattttaacacgaatgcaagaacttgcgaagaccctgccggaatattcaacggtcagagaaatgggcggagtaggtgatgtccttgcagttaaactgattgcagagattggcgatataagaagactgcacagcgcaaaggcactcatagcatgggctggaatcgacccgccgccgtatgaatcgggacagtttattggttcaaaacgcaagataacgaaacgaggttcttcaacgctcaggaaggtcggatatgaggtgatgagagtccttaagagtcatcctgctccaaaagatgatgctgtatacaactatattttgaaaaaggaaagtgaaggtaaaagcaagaaacatgcaaagattgcaggattgaataaatttctgcggatttattatgcaagagtaatggctatttatcaatagaacataaaatccgcgagttcgtacaggctggagcacagagccagcctttttgtcatacccaaaaatagattagttaaataatttaaaaaacctgcaaaaaaatacttgacttttgttagcagg

SEQ ID NO: 4616 - DNA, 1379 bp, unidentified
  source 1..1379: mol_type = unassigned DNA; note = element_7082a06
  misc_feature 1..2: note = core
  misc_feature 3..90: note = LE
  misc_feature 91..1107: note = CDS
  misc_feature 1108..1379: note = RE
  misc_feature 1149..1378: note = bridgeRNA
ataatggaatggacccatccacttttaatcggcctcgcaatgggccacgatgtagttgctaaaactcatcagaaagaggacgggtccaccatgaagattactacagttggtttagatatcgcaaagtctgtttttcattttgtgggtgtgaacagagccggaaagctagtcagaaagaagatgattaagcgcaccgagttaattcacttcttttctcaagtagagccttgccttgtcgtaatggaagcctgtggcggtgctaattattgggctagagagtttcaaaaaatgggtcatgaggtcaagctaatcgctcctcaatacgttgtcccgtacagacagggaaataaaaacgactacaacgatgcgtttgccattgctgaagcagcccaacggcctaacatgcgatttgtacagcctaagcctgtcgagcaacaggatgtccagatgctacatcgtatgagagaaagactaaacaagcagtctacagcgctagtcaaccaagtaagaggaatgctcgctgagtacggtattgtaatagcaaaaggcaaagcatcttttaggtcaaaactgcctgatcttttagaaaacgctgataatgcactaacagtaaaaggtcgcagcatattttatcagctgtatgaagagtttacggacatagatacaaggcttaaaaattgtgatacgcaagtactacaagaaaccaaaagtaaccatgtatgcctacgtttagaagctgtaccatgtataggtcctgtgacggctaccgctttttatgcagcagcaggtaacggcaaagattttactaatggcaggcatttttccgcttggtgtgggctcgtaccaaagcagcgcagcagtggcggtaaagataatttgcttggcattagcaaacgcggcaatgcttatcttcgcactttatttatccacggagcaagagctgtactgcgccatagtaatggtaaagtggatagattcagtcgctgggcagtcgcactggtggaaaggcgaggatttaacagagcctgtgttgcagtggctaacaagcttgctcgaatagcgtgggtcatcgctgcgagagaggaagaataccaaatggtcgactaaaaaatcaaagtcgccgttagcgttataaagataagatttaacccaccaccaagttgcttaggcaattgatttgatgatgagacagtcagactgatctacttaaaacctgttccctccataggctctaaagaagccgtaaggatgataaggaaagtagaagcagatatccatcagggccagaggataacctcaacaacaggccgaatatatgggtgcaatgaacttttctcagaattgatatcgaatgtcttgcaaaccggatgggtccatat

SEQ ID NO: 4617 - DNA, 1373 bp, unidentified
  source 1..1373: mol_type = unassigned DNA; note = element_708d3f6
  misc_feature 1..2: note = core
  misc_feature 3..79: note = LE
  misc_feature 80..1108: note = CDS
  misc_feature 1109..1373: note = RE
  misc_feature 1082..1360: note = bridgeRNA
cgatggggtggacgcccccggcggcatcgaatgtgccaaggtagtgggtgttgaagcaccgctacaagggagagcgtccatgaacgaggttagcatcatcggcctggatttggccaagaatgtatttcaggcgcatggcgccggaaccgatgggtcagttgtcttccggcgcaagctgtcgcgtgcgcagctgttgaagttcattggccagcagccgccttgtatcgtggcgatggaagcctgcgccagcgcccatcactggggccgggcgatcggcgatctcggccacgaggtcaagctgatcccaccggcctacgtcaagccgttcgtgaagcggcaaaagaatgacatggctgatgcggaggcgatcgctgaggcggcatcgcggcccaccatgcggttcgtggcggtgaagagcgaggaacagcagggggcggcgatggtgtatcgaacacgcgacctactggtccggcagcgcacgcagacgatcaacgcgctgcgggcccatctggccgagcaaggcatcgtcgcgccgaccggccccgcccatgtcgggcgcctcgccacggtcatcgacagcgaccacggggtgctgccttcgacggtcaaagacctagcgagactgcttctgggtcaaatcgcaacgctgagcaggaaagttgcagatctggatgccgaattgcgccgacgtgccagcgtcgacgacaccgcgcgtcgcctggcgacgatcccgggagtgggtccgatcactgctgcggcgatcaccacctttgcgccgccgatggagaccttcttaaagggccgcgacttcgcggcctgggtcggccttacgcccagacaacattcgagcggcggcaaggagcggctcggccgaacctcaaagatgggtcagcgagacatcagaaggttgctgatcgtcggtgccgtggcagtggtgcgttgggcagcacgcaagggtgctccagacggctcgtggctcgcacggatgctggcgcgcaaaccgaatatgctggtcgcggtggcattggccaatcgcatggcccgtaccgcttgggcgctgatgtgcagaggagaggattacagggatccggcgatggcaaccgcataggtcaggatcgtcggagtgtcgccgcggatgtgagcaggacggaggaacgtaagggcaaacggtcaagagaccggatcgggagaaccatcattccggacgatgcgccatcgagcgcgggtaagcgaactggacccgatctgcatatctccatacaggcccgcggcgattgaaaggccgcatcttcgaggccggacacacgaccgcacctgatcacatgcccgatcgtgccaaaataattgcttgcattcatgggggcgtccacaca

SEQ ID NO: 4618 - DNA, 1166 bp, unidentified
  source 1..1166: mol_type = unassigned DNA; note = element_70956b0
  misc_feature 1..2: note = core
  misc_feature 3..197: note = LE
  misc_feature 198..1160: note = CDS
  misc_feature 1161..1166: note = RE
  misc_feature 41..212: note = bridgeRNA
cttgtattagcgcgagatgataagctgcgattgttccgtaaggaacgacctgccctggacggccatccagggcaggccgccggtcgtcggatcgtaggctcctgagccacaagggctgttcctgagcgagatcgcgatcggttcttcatcaggcccggagagttgaaggaaccttgggttcgcataacaaggaagggatgacgaagatgagccagactaccatgatttcggccggaatcgatatagccaaagaaaaacttgatgttgccgtcgatggcaacaaacagcgctgggtgatgtccaatgaccccgccggcttcctccaactcgccagactcttgcggacccacaaggtcactcgcgttggcctggaggcgactggcggctacgaacgtcatgtcacccaataccttcgcaaggccggcttcaccgtcctcgtgctgcagcccagacaggtgcgcgcctacgccgaagccttgctgcgtcacgccaagaacgaccgcatcgatgccggcacgatcgcctcgttcacggccttgctcaagatcgcccgcgatgcgccggatccacgataccagccactggccgatcttctcaccttcatcgagcagatcgaagaagacaccgcccgtatcaaggtccgcctcgaacacgtcgaggatgccgcgtatcgtcgcatcatggaagccgacatcaagcgcctcaaattgcggcgtaccaggatggtcaaaaagctcgataccgcgttgcgctgccacgacgacatcgccaagcgtctcgatctcgtcatcaccatcgatggtgttggccatcgtaccgcactggccttcatcatccggatgccagaactgggctgcctcacccgcgaacaagccgcagctcttgccggcgtcgccccgttcgacgacgacaccggcaaacatcgcggcgaacgtcacatctggggtggccgcgcgcgcctgcgctccagcgtctacgccgccacattgccagccgctttccaatggaacagccaattgatcgccctctacaagcggctcatcgccgccggaaagccccacaaggtcgccctcgtcgcctgtaccagaaagctcgttatcttcgcaaataccgtgctcgctcgcggcactccatggacaaaatcagcccccacaatctaatagttg

SEQ ID NO: 4619 - DNA, 1553 bp, unidentified
  source 1..1553: mol_type = unassigned DNA; note = element_7096a0e
  misc_feature 1..3: note = core
  misc_feature 4..280: note = LE
  misc_feature 281..1444: note = CDS
  misc_feature 1445..1553: note = RE
  misc_feature 19..268: note = bridgeRNA
cccattacagtttgagtcgcagttaatctgatactcgggacgacagtccaggatgtcggattacgattagagcaagtccacagggactgccgatcgggtgcccgcggacggccttctgcccctgccccgaagagagcccggggggtgttgccgacgcgggcgtcgccgtttctgacgactgataggaagctgccgggcccctgagaaagcgccacggccaagtaatgtgggtgtcgcgcgagacggcttccgatcgaccgacgattggaaggataccaccatgatcgaagaagcgagggcctacgacgccgtgctggggctggacgtcgggaagaggtcgcactgggcctgcctggcgagcagggacggcgaggtgctgatgagcggcccggtctggaactccgaggcggatctcgacggcctgttctcccaggtgggagccgatgtcctggtcgtggtcgaccaggtccgcaacatcggggccctggccatatcgcgcgccagggccgccggcctgcccgtagcctacctgcccggcctcgcggcccacggcgcgtcgaagctgttcgcgggggacgccaagaccgacgagcgcgacgcgacggtgatcgcgaagacggccctgggcatccccgacgcacttcttcccgtgccgcgcgacgacgagaggctggaggccgcgcgctcgcttgccgcccagagaaaccacatggtcacctgctccaccagggacaagaacaggctccgcagcatactgctggagtcgtgcccggcgttcgagtcgctggcggacctggccgacccgcattggatagcgatgatggagaggctggggggaccctgggggatcctggacgcggggaaggcgtcgctgggagccgtcaccagaggggccgacaggaagaagattgactccgcctgggatgccgcgtccaactcgacgaggccctcggatctcagggtcaacgctgagaacccgcaggtcatgatgctggcaaggcgaatcagagaggcaagcgaggaggccgacaggctcgatgcggcaatcgccgagctgctagccggggacggcacctacggctgcctcatgacggttcccggcataggcccgaggaccgcctccgagctcgtcatctccatcaggatcgaggactttcccgatcacgaccacctcgcatcctactgcggcgtggccccgaggaaccgccagtcgggcacgtccatatcgtcggtctgtgcgttcaggcagggcaacaagaggctgaagaacctgctcatcttctcgtgcaactcgctagtaaggagcgacaaccgcttcggcgagtactaccgccgttgctgcgaccgcgggatgtgccacggtgaggccctgaaggcggtcgcgagaaagaggctgaaggtgatatatgcgatcatgagggacagggtcccgtactcggcctagcgagccgcaggcaacacgtaagaaagcaggcccccgtgtggggcctgcgcaagcatgccctgctccatctggagaaccaaaattaggggttgacgaaactataggaaca

SEQ ID NO: 4620 - DNA, 1389 bp, unidentified
  source 1..1389: mol_type = unassigned DNA; note = element_70a0a48
  misc_feature 1..2: note = core
  misc_feature 3..89: note = LE
  misc_feature 90..1127: note = CDS
  misc_feature 1128..1389: note = RE
  misc_feature 1159..1375: note = bridgeRNA
gatggtgtggatggctcccgctcccggcatcgcaatgtgccaaagttgtggtttccatcaagaaccacgagcaagaggagccacccgttatgaagactaccactgtcggcctggatctggcgaagaacgttttccaagtgcataccattgatgaagcgggtgctgttatcgtccgcaaggcgctgcgccggcgccagatgatgcccttctttgagggccttgagccctgcctgatcggtatggaggcttgcggcacgagccattactgggcacgcgagttgtccggactgggccacgaggtcaagttaatgccaccggcatacgtgaagccttacgtcaagcgcggcaagaccgacgccggcgacgcggcggcgatctgcgaggccgtcacgcggccgacgatgcggtttgttgcgatcaaatcgcccgaacagcaatcgctgttggcgctgcaccgggcgcgcgatctgctgatccgtcagcgcacccaattggtgaacctgatccgtggccagctggccgagttcggtattgtgttggccaaaggcattcagcatgtgctccggcttgtggctcggcttgtcgatggcgagacactggacattcctgagcaggcgagcaaggtcgtcatcattctggcggagcagctgcgcgatctgcaggtccggatcggaggtctcgagaaggatttgaagaattggtgccgcggcaatcaagcagtgaaacgcctcaagaccatcccggggatcggcacgatcacggcgtcggctctggtggcgtcggttaccgatccgcaccagttcacgtcggggcggcaatttgccgcctggctggggctgaccccgagggccaactccagcggcggcaaggcgcgttcgggacggatctccaagatgggcgatcagtatctgcggcgtctgctggtgagcgggatgacgtcgcaacttcgatcggttcgccgtcatcccgacaggcatccctggaccaccagcctgttgcacaagaagccggccaagctggtcgccgtcgcgatggccaacaagacggcccggatcgcctgggttgtcatgacccgtgaagagacttaccgcgcgccacaacctttaaaccaggaggcggcagaatgatcaattgatcgctcataaccaccgaaacgatcaacgaatgcgaggacgatgaggagtgatggcgaaccggtcgaaccggggatggggacaacccgatttatgtccagggcgtaagagcccgcaaagcagactgggacccgatccgcggaaaccatcaaggccagcggttctaaacaccgcatcaacaggccggacacaggactgcacccgaccaaaacgccacaccaacaaaatccttgcaatcagggagccatccacacag

SEQ ID NO: 4621 - DNA, 1375 bp, unidentified
  source 1..1375: mol_type = unassigned DNA; note = element_70a1396
  misc_feature 1: note = core
  misc_feature 2..308: note = LE
  misc_feature 309..1133: note = CDS
  misc_feature 1134..1375: note = RE
  misc_feature 1135..1365: note = bridgeRNA
tatgggatggcccgcccttccgagaacatcgagtatgatgtctcgtcattgaaggaagaggagccagatcatgacgatttcgatatttggcatcgacataggaaagaacagctgcagcgttgtcggagttgatgacaaaggttcggtgattgtccgccgaacgatgcggcgtcagacgctcattgagtttgtaggcaagatgccggcgtgcatcattgctatggaagcgtgctgcggcgctcaccaccttgggcgacttttcgcagcacgtgtcaatgccgggtgaattttcctcctaaggacacgaagtgcgactgatgtcgcccgagtatgttcgcccgtatattaaagcgcagaagaatgacgacagggatgcggagggcatcgcggaagccgcgtcgcgtcccacaatgcgattcgtcgacctcaagagtgaggagcagctcgatattcagtcgctgcacagggttcgatcgcgcctcgttgcgcagagaaccacgttgatcaatcaaatccgggcgctcctccttgagcgcggtctcatttttgctgccggtcgtcgtaagcttgaggttgccctggatgtccttccgggtgatcaagaggcgaacttgtctccgcgcatgcatcaattgattgtcgaattgcgaaacgagtggaaagttctggatacgaagatcgcagcactgaatgctgagttcgtgtcgctcgcgcggcataatcttgcgatgcatcgtttaacgactatccccggtataggtgtacttaacgccacggccctggttgccgcgatcggcgacgccagcagcttcaagcatgcgcgagatctcggcgcgtggctaggacttgttccacgacaattcacgaccggtggcaagccacggctgctcggaataacgaaacgcggcaacaactaccttcgaactttgcttgtgcacggtgcacgagcggcgatgcccgtactcagtcaaagcgatacgcctgtcggccaatggcttcgagcgctggtttcccgcggtattcaccggaatgtcgcgatcgtggcccttgcaaacaagcttgcgcgtattgcctgggctattttgcgtaaggagcgaccgtatgagaaaactttcggcgtagcgccagcgtaacggggttggttgcgcttatgcgcagcccatgatgtttgcgagaaggaatatagatggcctgacagtcaatcggcgttcagaaagcccaggcgtggaaatggttcattgaaaccgtgttggttatcgtggctctggacgtgcggatatccatcttggctacggcgtgaccgtaagaccgaatacgttgaagcagactgcacagagcatctaaaaaactacttgcaaacagggcgggccatacg

SEQ ID NO: 4622 - DNA, 1252 bp, unidentified
  source 1..1252: mol_type = unassigned DNA; note = element_70a951d
  misc_feature 1..2: note = core
  misc_feature 3..244: note = LE
  misc_feature 245..1237: note = CDS
  misc_feature 1238..1252: note = RE
  misc_feature 16..189: note = bridgeRNA
cttgtatgtttaacttcgatgaattggtaggctatttcaacggttaccggggaggccgtccgctcctagaggcagcattatctgacctcgtctgtagagaggccccccgcctcattgcctacctcgaagagtatccggaagccggtcagaccggacttcgcatcacaaggttgaggcggcatcaagtgcgaggtcggggaaccggtgactattgtgccgtattgatgcaagggaggaaaagcggatgagcgtatttgtcgggatagatattgccgccaactcgtttgagatggtgagccgcaagaatggcaaggtgtctaaggtggagtcgtatcgccaaactagtcaggggcatgctcaggcgcttaagcgcctcacagagctcaagccagcgctaattgtcatggaggccactgggatctactacttcgacctagcggtagccctagcacaggctgacttgccagtggcggtcatcaacccgaagagcttccaccacttcgcctctctaaagcttgccaacagtaagactgacggcgtggatgcggccttgctggcggaatacggcgaacgtatgcagccccggcgctggatgccgcccgatgagactcggcttgccctgcgtgatatcgggcggcagatcaatcgcttaaccggtacacggagccaagccaagaaccggctacatgcattgcagtccaagcgcagcactctgcccttgctgattgaggacgagcaggccggtattgccttgttggatcagcgcatagaacggttaagcgaggccgcgctgtcactcattgctgagtcgcccgcactgtctagagacttctcgaacctatgtgccgcgaaaggcgttggtaaggctactgccttaagcgttttgggagagttgtgtgtattgccttgcgagctaaaagccccgcaggtgagtcgtttcgcggggctggatgtgcgcctgacgcaatcaggcagtagcgttaaccgaccggctcgactcagcaaagcgggcaatgcctacctgcgttcgacactgtacatgcctgcaatgagcgctgtacggtacgaccctagggcgaaggccttttacgagaacctggtggcccgaggtaaaaagaaaattcaggctctgtgcgccgtaatgaggaaatacctcaccggattgtgggcctgcctgaagaccaaaaccgcctttgattcaacgctgctcttcagtgagcagcacttacaaacttgacggcaaacagagtat

SEQ ID NO: 4623 - DNA, 1561 bp, unidentified
  source 1..1561: mol_type = unassigned DNA; note = element_70b5582
  misc_feature 1..2: note = core
  misc_feature 3..248: note = LE
  misc_feature 249..1421: note = CDS
  misc_feature 1422..1561: note = RE
  misc_feature 3..227: note = bridgeRNA
ctcgtattatatagtagtagtgttttagagtccctctccaaggactatatgctataatctaacaggcactgtggattagtattttgctcctaacgcttagacgttttacgaaaggctataaccacagtagtttgtcagaatggtaattagttggataacgcatgacgtttcatttagcacgaggttacatgtgacaaataagtctgtggaataaagcagtgtcaaatataacactaaggagtaataccatgatttacgcaggaattgatgttgccaaagatgaacacgattgtcttatcaccgatgctgatggcaaccgacttttcgatccatttgtcattcaaaacaatgctattggatttgataaactttttgaaagattaattgcttgttcggaagatttaagcaaagtaaaagtaggactggaagctaccggtcacttcagcgacaatctgctagagtttataatgactaaagattttcccacctacgtcattaatccgttacatacaaatctttacagaaaaagtctaagccttagaaagacgaaaacggataaggtcgatgcccgctctattgtgactatgctgagaactgaaagcttaaagccctactcacataaagcttaccacattcgggaattaaagtcactcacaagatatcgccattctctcgttcaagactgtgcaatggttaaaacttcattcgcaagacttctagttattctttttcctgagcttgaaaaaattgtttcatcgcttcacacggtagctgtttatgctttgcttaaggaatttcctaatgtaagtgccatcgctaattgtcatcttactcgcttaaccaatctgctttatgaagcatctaaagggcattatggcaaagacaaagctatagaaatacgtaagagcgccagagtgtctattggcactaatagcacagtcaagtctttagagttacaacaaactatcgctcgtattgaaatgatggaatcgcagattaagcaagtagaagaaatgataaatcccatcgttgattcatttaacagccccataatgagcatacccggtatcagctatagaatggctgcgataattatcgccgaaacagataatttccaagactttgataaagcggaacaagtacttgctttcgctggcttagaaccgtctgtttatcaatcggggcaactaacatccactcacgcaaagatggttaagcgaggttctaaatacctacgttacgccttattcaacgccgccaaatttgtgtgtatgcatgatgatacatttaaaacttatcttgctaaaaaacgagcagagggtaagccatataatgttgcagtttctcatgcggcaaaaaagcttaccagagttattcatcatcttgtgaaaaccaatcaagcctttgtaaagcaatcgtagtttctgcttataaaaataattttagcagctcctagaggtgctttgattgtcatgcaattatcaaggtacgattatttcaaatatacactttagcatttcttaaaaaaattcattttaggtattgacttttaatagttggt

SEQ ID NO: 4624 - DNA, 1389 bp, unidentified
  source 1..1389: mol_type = unassigned DNA; note = element_70b6d8c
  misc_feature 1..3: note = core
  misc_feature 4..236: note = LE
  misc_feature 237..1115: note = CDS
  misc_feature 1116..1389: note = RE
  misc_feature 1086..1376: note = bridgeRNA
agatggggtggttgccgccctccccagacggcatcgcaatgtgccaaagttgtggtgcgttaacccactaagcggagaaggcggcaacatgaaggattgatgattggcgtggatctggcaaagagtgttttcgtgctccacggggcgtcgatgacgggccaggtaagttccgcaagaagttatcacggtcccagttcctgaagttcatggcagatcaatcacctgcggtcgtggtaatggaatcctgcggcagcgcgcactactgggctcgtcagatgatggagctcggccataaggtgagactgattgcgccacaatatgtccggcccttcgtgaagcggcagaaaaatgatgcggccgacgccgaggcgatcgtgatcgcggcccagcgaccagagatgcgctttgtggaacccaagtcggaattgcaacaagccaaggcggtgctcttccgagcccgtgagcgtctcgtccatcagcgcaccgagctcgtgaatgctctgcgtgcggtgctctatgagtacggtcatacgatcccgcagggcatggtccatctcaagcggatcgaggcgcttctcgatgagtcaaatagcgacctgccgagtctggtccgcgaggaatgccgggatcttctggcgcaaatcggcgagaagacagttcggatcgaagccaaaatgaagaagatcaaggaggtggcggccgaaacggatgcgacacgacggttgcagacgatgccaggggtcggcccgataacagcgcttgccgtcgaggccttcgcccctgccatggccagcatcaaacgtggccgagacttcgctgcctggcttgggctcgtcccacgacagcattccacaggcggaaaggagcggctggggcgcgtctcgaaagccgggcaggtcgacatccgccagttgctgatcatcggcgcaatgtcgcggttgacctggctcgggcgcaaggccatccctgagggatcgtggctggcgcggatgctgggcagaaaaccgaaaatgctggtcgcaatcgccttggctaacaagatggcgcgggcgatctgggccatgctgacgaaaaaggaagattatcgagatccggcgttggctacggctgcatgacccagatgcggcacccaactatccgacgctgagaaggggtgagaagtcgacgacctgaatggggcagaatgatcgaaacgatctggatggggaaaaccagcttacgtctccgagcccccagtgctcgtcattgagatttggacccgatccgcagatcaccataccggcccgcggcttctgcaatggtcgcaaacaaaggcctcacagaagaccgcactcgatcacaatgttcacgggttcacaaacttcttgcatcccgggcggcaaccacaga

SEQ ID NO: 4625 - DNA, 1226 bp, unidentified
  source 1..1226: mol_type = unassigned DNA; note = element_70bbf27
  misc_feature 1: note = core
  misc_feature 2..224: note = LE
  misc_feature 225..1097: note = CDS
  misc_feature 1098..1226: note = RE
  misc_feature 45..214: note = bridgeRNA
tcttaagttagcattttaataaaaacactaaattaagatctataaattagaaagaacaaaagagaggaataaggttattatatacggagagactagagatctcgtcaacattgaaaatcccctctcttttactacccagatttcgtacagttctatgaggcttttagacctcgattttaagtcgttgaaactcgcgtagtcgtcctttcaaaaatcattttcttatgaataaagatattaaatattttggaattgatattagccatttagtttttgatgtgacagattcagatggcaattactaccaatttaaaaacacaatttctggctttaaaaaatttacaaaactcttagatttggatagtcattgtgttatggaagccacgggatactaccactatcaattggcctattatttacttgaatctggggtacaagtttctgtagaaaatcctttagctgtcaaacgttttatccaaatgaagttgtctaaggtcaagacggataaaagtgactctaaacttatttgtgaatatgcaaaacaagtagaattaaagctttgggaaggtcaatccaaacatcaaacagaatgtcttcaaatgaccagactccttgctgtatatacaaaacagagcactatgcttaaaaataaattacacggagaggctgttttaggaaaccctagcaaagcagttgtaagttctataaagcggagtttaaaacacgtacaaaaagagatagaaatcttggagaataagctattggtgttagtaaaagaagttcaccaagatgtattaactcgcttaaaaagtataccagggattggaaataaaacagcattgatgcttgtggttcttaccgatggatttgagcgctttacaagtggtagtgaactctgtagctatgccggcttgactcctgtggttagaaagagcggtagcagtgtaaatggacgcagtagaataagtaaaataggaaatcaaaagcttcgtaatttattatttatgtgcagttttaatgcctgtaaatacaacaaagcatgcagagatatttatgaacgaattgtagcaaaagggaagagtaaaaactggctttaattgctgtgtgtaataagcttctaaaacaggcttttgccatcgccaaatcaggtttaatatatgatgattcttatagaagtactttagtgaaaagttaatgcttttttacttgttttttaccacagtact

SEQ ID NO: 4626 - DNA, 1367 bp, unidentified
  source 1..1367: mol_type = unassigned DNA; note = element_70c0ddd
  misc_feature 1..3: note = core
  misc_feature 4..396: note = LE
  misc_feature 397..1284: note = CDS
  misc_feature 1285..1367: note = RE
  misc_feature 8..218: note = bridgeRNA
tctcctatgtttgatgtattatttaaatttgggataaaagtggaaaggaatgagagcataataacgtctaaataactctagaagtatattgtcataaagatattgcctcattccttattatctcttagagtttgaacagaatgtaaggaactatgcagctgcataatatccaggataaccaaacaggagaaaaaacgcagggagattcatcactttgattttataacaaacttaaatttaaagtatgaaaaaggtattaaaacaagtagtgggtgtagatgtagcgcaaaaagaattagtaacatctttaggcaggatgtacgatgatttttcgattgagttatactctcacagggtatttaaaaacacagagaagggaatgttaactcttttagattgggtgaaaaagcaaacaaccgaagaagccaaaattcactatgtgatggaatcgacagagtctatcaccagaaatttgcatattatctagatgaaagttttcttgacttatctgttgttttacccaataaaatcgctaattacattcgtacgctggaggtcaagactataacagataagacttgctcagaagctattgcccaatttggtttggaaagaaagttaaatctatggcacgctccgaacaaagtatatatggagctacaacaactaaccagggaaagagatcagatagttgctgaaagaagtgcgataaaaaaccagcttcatgcagaaacaatacaggccaaaccaaatacaaatagtgtgcggcgtctaaaggaaaggatagcttttttaaaccggcaggaaaaggaaattaaaggcgaaattgatgtgataatcgataataatgaagatgtcaaaaaggagatcaaaaacataatatcgatccctggaattggtaaattaacagctgtaatagtattggcagaaacaaatggatttgagcttataagaaacaaaaagcagttaactagttatgccggtttggatgttaaggaaaaacaatcaggcacatctgttagaggaaaacctagaatatccaaaaagggaaatagaagtttgcgtaaagcaatgtatctgccatccttgtcagcagtaaaatatgatgaaaacttcaaaggacaatatgtaagaatagtgtcaaaacacggaataaagaaaaaaggattgatagcagtgcagagaaaaatgctggaactgatttataccttatttaaaaataagacagtatatgacaaaaactatgaatcaaaaaaaagtagcgcaaaaatacttgtggcataattacgctacactgactagctctaggccgtcttaagtataaaagtaaaaaaaattatcaataaaatttggaaagtaacacagaa

SEQ ID NO: 4627 - DNA, 1315 bp, unidentified
  source 1..1315: mol_type = unassigned DNA; note = element_70c1701
  misc_feature 1..2: note = core
  misc_feature 3..68: note = LE
  misc_feature 69..1085: note = CDS
  misc_feature 1086..1315: note = RE
  misc_feature 1087..1309: note = bridgeRNA
ttaatcagatggtacgccccacacctaactacactcagcttagtcgctgaacttcaggaggtgccatcatgtcagtagttaaaataatcggtatagatcttggtaagtcgacattccatttaattggtcatgattattcaggtcgtgagcagtataggcacaagctttctcgaagcaaaatgatccagtttatatcaacacatgaaccagtcacgattgctatggaggcatgctgtggtgctcactggttagctcgcaaatgccaagagtttggccatgaggtcaaactaataccagcccagtatgtaaagccttatgttaagtcacacaaaaatgacttcattgatgctgatgctatagcagaagctgccactagacctaacatgagattcgtatctccaaagagtgaaaatgcccaagtaggtgtagtgatacgaagaatcaggtctgggtatattcgagaaagaacatcatgtatgaatagaataggttcaattctattagagttcggagttagtttccctagaggtcatgcaaatatgaaaaacttattccaatggttggctgatagacaaatattagttccaccactcttgattcttgagttacgtgaccaacttgaatactacaaccagttgaacgagcacatttcagctcaagatcaaaagctagttcaacttaataaagacaatgaattgtttactctgcttcaaacggtgcctggcattggtccaatgacagcctcttgctgtttgtctgcggtaggcaatgttaacgacttcgcgaacggtcgaaattttgccgcatggattggactagtgccatttcagcattcaacaggaggcaaacctcgacttttagggatatctaagcgaggaaacaaagaactaagggaattgtttgttcatgctgctagagcggtaatgtggagagactcttctgctgaaaggtattttggctcttggttaattgaactaaaacgcagaaagtcattcaatgttgctgttgtcgcattagctaataagctagcccgtattgcatggtcggtaatgaaatcccataaagcatttgaagtaaaagcataattaagatttgcatatgataaatctagatgacacaacggttagaccaccagattgaaaacctgcggggcataacagcaagtaaatgctttctcgtttttgaggacaatctggcgcggatctcatcgtagagctgggactaatgacagtctcaaatagactctgaatacattagcgcaaaccaactccgttactttgggttatatcacttgcaaaacggggcgtaccataca

SEQ ID NO: 4628 - DNA, 1353 bp, unidentified
  source 1..1353: mol_type = unassigned DNA; note = element_70d066f
  misc_feature 1..2: note = core
  misc_feature 3..80: note = LE
  misc_feature 81..1115: note = CDS
  misc_feature 1116..1353: note = RE
  misc_feature 1149..1348: note = bridgeRNA
tgatgtgatggacgccccctttttcagtggaaaatagggccatcttttatccgatgcactgaatttcgggaaaacatctcatgagtacgatcaaagtggtgggtattgacctcgctaaaaatatctttcaagtttgtgtctggatggaagacggaactgttgcttcgaaccgaaaaatcccacgacaaaaattgcttgataccctacgggtttttccgcctaaaaccctcatcgccatggaagcctgtgcgacttctcattattggggccggacattgcagtctatgggctatcatgtccggcttattcccacccagcatgtaaaagctttcagtcatcatcaaaaaaatgatgccaatgatgcgctggctatttgtgaaacagcctgccgacccggtatccattttgttcccatcaaaaccgtagaacagcaagatatcaaggcactgcgcaatgcccggcagctcatggtggaacagcgtaccgcccttgctaatcaaatcagggccttcctcgctgagcagggaatcattgtgcctgtagggattcagacactccaacagcacctgcctgatattctggaagaaggcgataatgacctgtcttgtgtgctgcgccgtttattgcataggctgtgggaagatctgcggaatttgaacgtcagcattcatgaaatggataacgaaattatggcactttcccgtcaacaagcagggtatgggcacttgctgactattcccggtgttggtcccctgattgcggcggctttcgtcagtgacgtcagcgcctcccaatttgctaatggtcggcaactgtcagcctggtgtggcctagttccccgacaacacagttcaggcgggaaaagccgtctctcttccctaagcaaacatggcaaccgtcatctccgaacgttaattattcatggtgcccgcgcgatgatgcagggcgtacaaaaacgggatgaccctttaggcgagtggctaagaacacggattacccgatgtggccccataaaagccatcgttgctttagctaacaagctgacccgaattatctggcgtattctgacagatgaggttgattatgatatgaaaaaagcttttgctatccattaattaaattaagtgaattgaaacagacgctttaactgagtttgcaaacactgatgaaaaaacggctatcggccctgcaataacctgagtaaaacctaggtagtcacataccgatgacggctgagaaggaaacagggtgcggatgacatcatggcgcgggcaaataagtcctttatgacgccggatatatggtagcaaaccgtatcgactcaatgcttgcacaaccgggggcgtccatata

SEQ ID NO: 4629 - DNA, 1808 bp, unidentified
  source 1..1808: mol_type = unassigned DNA; note = element_70d67b2
  misc_feature 1..2: note = core
  misc_feature 3..109: note = LE
  misc_feature 110..1384: note = CDS
  misc_feature 1385..1808: note = RE
  misc_feature 1480..1729: note = bridgeRNA
agcattcctgtagatcgctatttttcaactttgaaaaaaatagagctcctcagtaagatatgagtatagagaccaatctaactcaaaaccttaaggaggaacccctactatgaagtttaaaatgcaaaacaaacaaaatcaactaattgaaaaaatttccgttaaacatctcgttgttggtgtggacattgctcaacaattacacgttgctagagctgttaatttccgtggaattgtggtgggagatccacttacgtttaaaaataatgaagagggctttgcctgtttactaacttggattaaaaatcttcagagattaaataacttagatgaagctatagttgggatggaacctactggacattattggatcaatctttcaaaatggcttttaaaaaaagatattgacgttgtaacagtaaacccacatttagttaaaaggaataaagaaaatcgtgataatactcagtcaaaaagcgataaaaaggatgccttagttatagctgatatggtaaagaacggttactactccgaggttcgatactcatcagaaacatttgaaaaactaagggttcttatgtctaaccgtgatgtagttgttaaacgacttgtcagttctattaatcaattaaaccgttgggtagatattgtctttcctgaactccgacaggtatttaaagatattacggctaaaggggcaatagcaactcttcgtttattcccgtcccctatggacttagaaattatgcagacccacgaggttattactggttggaaatctgtaatgaagaggcagcctggattaaaaaaggccctattactcctccagctagctaagaaatctataggtacaagacaagcacttgatgcttataaatttcatttgacacaattattggaggaatatgatttagcagtattacaactcgacagagttgaagaacaagttaaaagtgcattgaatgaaattcctttcgcaaagaaattacttaccattaaaggaattagcgaaatatctttagcaggtatattaggtgaggcaggagatcttagtggtttttcgcatggtaattccctacttcgccatgcaggattacacctagctgaagcaagttctggtaagtggaaaggtcaaattgtcatttctaaacgtggaagatctagactacggcgattcctttacttagcaacaatgagtcttgtgatgaacaatccagaattccaagcaatacacgctcacaatgttaaagtaaaaaaaataaagaaaatgaaatcaattatgaaattaattggtaagttagctagggtttttgtaggcatagcccgacgtaacgagtcttattgccctgacaaactccaaactttctcacccctagcagcataaattagtagaatcgttgaactttattcaaatgtgacatcgttatatataattggcaatgagtacaaaccgaatgttggcttattcgtaggatttcaaatatgtacggagtaccaggtttattgaacataagggcacagacccattccgttagcataactggcctccaccccttggataggcatgacgaaggaatgatagggcaattgacccgttgagacatgggagggaaagcctccaggggcggcgtggagcgtgtacatcatatggtaaaatatggagttacattatactcctttatttaactatgctttcacgaagccataatgatctgaactcatttcatataaccgttatacctaaataaagggtaatgaaatcctgcgaataagcgagtattcgggagaaaatcgtattaaactgaggg

SEQ ID NO: 4630 - DNA, 1411 bp, unidentified
  source 1..1411: mol_type = unassigned DNA; note = element_70d9ed7
  misc_feature 1: note = core
  misc_feature 2..92: note = LE
  misc_feature 93..1130: note = CDS
  misc_feature 1131..1411: note = RE
  misc_feature 1181..1406: note = bridgeRNA
taatgggatggacgcccccttcctgcaacggcatcaaagtgccaaagtggaaagttgtattcaaaccactgaaaaggaaaggagcgtccgagatgaagattacgacaattgggattgatttggcaaaggctgtgtttggtgtgcatggagtcgatgagcgcggcaaggcggtgttgcgcaagccgcttaagcgcaaggaggtggtgagcttctttgcgaatctggagccctgcctgattggcatggaagcctgcggtagtgcgcattactgggcgaggaagctcacgcagctgggccacacggtgcgtctgatggccccgcagtttgtgaagccgtacgtgaagacgaacaagagcgaccgcaatgatgccgaggcgatctgtgaggcggtggcgcggccgaacatgcgctttgtgccggtgaagacggccgagcagcaggcggtgttggcgctgcaccgagggcgccagggattcgtaaaagcacgcactgcgcaggcgaaccggattcgaggattgctcgctgagttcgggatcgttatccctcaaggcatcgggcacattgccaagcgcttgccggaaatcctggaggacgctgagaacgcactgccggggatgatgcgcgagttgctcgagcggctcggtgagaacctgaagcagatggacaagcaagtcggggaaatggagcgccagatcaagctttggcatcgtgagaacgaggcaagccgcaagctcgaggcgattgacgggttcgggccgatcaccgcgagtgcttttgtggccacggtgggggatgcgaggagcttcaagaacgctcggcaagtaccggcctggctgggcatggtgccgcgccacgagggcaccgggggcaaagtgtcgctgggcaggatcagcaagcgcggggaggcgtatcttcgtacgctgctcatccacggggcgcgctcggtgatcgcgcagattgagcgcaagcccaatcaggccgatgagtggttgaagaagttgctcgcccggcgcaacaagaacgttgccgcggtggcgctggcggcgaaaaatgcgcgcatcgcctgggcgctgctcgcgcacgagcgcagctacgagcgtgaatacgttgcgacacgcccagccgcgtaatcgcagcgggttgaatttgaacgagcgaaccgtttagccaaggaggacttccaccgattgctcaggcaatcatgacgtgatggcaagataggtcagaccgtgacggggtgaacctgctatccccaccgcacctcgagtgcgctgaagtgatgagagctccgtcagccgattccatcagggaccgaggcgaacgcctcaaacaaagtccggatctatggctgcaatctttaccttctcgccgtcatcgagtgatcgcttgacaaactaggggcgtccatcta

SEQ ID NO: 4631 - DNA, 1492 bp, unidentified
  source 1..1492: mol_type = unassigned DNA; note = element_70e1d9f
  misc_feature 1..2: note = core
  misc_feature 3..236: note = LE
  misc_feature 237..1472: note = CDS
  misc_feature 1473..1492: note = RE
  misc_feature 6..232: note = bridgeRNA
ctaatgggttttgtcagcctgctgcggcaggatgactccggtagcggctggcgggtcagcactcttctcatctggccttcgaggtcttgcggcagaccgtgcgcccgctggtcgtgaggaggctggacagctgatgggatgacgtggccccgccttggtggtgagcacttgaccgttagatcgctgggtctcctccgcgctgccatggaccgtaccgtccataagggagggacccgatggtgtatgtcggcgacgactgggctgaggactgccatgatgtcgaactcgtcgatgagtccggacgaagactggcccggacgcggctacctgaaggcttggagggcatgacccgcctgcatgcgctgatcgctcagcacctgccagccgactacgacgagctcgatccagacgaagcggccagacgggtgaaggtgggcatcgagaccgaccggggcccgtgggtgcaggcactcgtcacggccggttaccaggtctacgcgatcaacccgatgtcggtggcccgctaccgcgaacggcactccacctccggcgcaaaatccgatcccggcgacgcgcatgtgctggctgagatcgtgcggttggaccacgcccatcaccgtctcatcgccggtgacagcgacctggccgaagcgacgaagctggtcgcccgcacccaccagaccctcatctgggaccgctccagacaggtgctccgcctgcgcagcgcgttacgggagttctaccccgccgccctgcacgccttcgacgacctgaccgcacccgacgcgctggaactgctgggccgcgccccggatccggaccgggccgcggcattgagccgcgcccagatcgtcgcggcgctgcgccgcgcgaaccgtcgcgacatcgacgccaaagccgttcgcctacaacaactcctccgtgaagcacagttgcgccaacccggcccggtgcagaccgcctatgcggcgatcgtgacggctcaggtgcgtctgatcaccgcgctcaacaccgagatcgctcaactcggggaggtggtggccgaccattttggccggcacccggacgctgagggctacctgagcctgcccggtcttggcgtggttctcggcgcccgggtcctcggcgagttcggtgatgccccgaagcggttcgccgacgccaaagcacgcaagaactacgccggcacgtcgcccatcacccgggcttccggcagccggcgggtcgtgctggcccgctacgcccgtaaccgccgtctgggcgacgccgtgcaccagtgggccttctgcgccatgagaggctcacccggcgcccgcgcctactacgccgcgatgcgtgaacgcggcatcgggcaccaggccgcgctccgccaactcggcaaccgcctcgtcggcatcctccacggctgcctcaagaccaacaccacctacaacgaagacaccgcctgggcgcatctccagccgaccccttgacaccaaagaacatgggatgt

SEQ ID NO: 4632 - DNA, 1442 bp, unidentified
  source 1..1442: mol_type = unassigned DNA; note = element_70e8a99
  misc_feature 1..2: note = core
  misc_feature 3..151: note = LE
  misc_feature 152..1171: note = CDS
  misc_feature 1172..1442: note = RE
  misc_feature 1211..1442: note = bridgeRNA
agaatgagatgaacgcatcccccaacattaaatccggagcacagtgatgaataaagggggaaatcagagaggtgtggagcctcgcagatttccggcatcattgtgcccaatacgggatgcataaagctccctcagactggagactccacaaatgaaatatacaccggttggcgttgatatcgcaaaacatctgattcaggttcacttcattgatgagaacacaggtgaagtggtggataagcaacttcgcggcagagattttcttgaatatttcagcaaccgggaaccctgcctgattggtatggaggcctgtggaggctctcagcactgggcacgggagctgacaaagctggggcataaagtccgcttgttacaggcccgcttcgttaaggcattcgtcatgggaaacaagaacgacgtgatggatgcccgggctatctggatggcggttcagcagcccggtaaagaaattgccgtcaaaacagaagaacagcagtcggtcctggttctgcaccgtacccgcatgcaactggtgaagttccggaccgcacaaattaacgccctacacgggacgttactggagtttggtgaaaccatccacaaaggtcgggcagcgatggagcgggagttccctgaagcactggaacgaatgaaagagagactgccaccgtatctcatcacggtactggaaaaccagtataaacggttgaatgagctggactccctgatagaagacatcgaaaaacagcttgccagcgtggcgaaacagaatgagacctgtaagcggttgctggatattcccggcgttgggccacttattgcgacggcagcggtggccaccatgggggaagcatcagcgtttaaatcagggcgagagttcgcggcttatgttggtctggtgcccaaacagactggctcaggagggaaaatccgcctgctggggataagcaaacgtggtgatacatatctgcgaaccctgtttattcatggcgcaagggcggcagcattactgaccaaagaacctggtccgtggataaccgaactgaaaaaacgtcgtccggccagtgtggctatcgtcgccatggcaaacaagctggcacgaacagtatgggcgatagctgcccatgaccgtaagtatgtcaggaaccacgtcagtatcagaccatattaatcgctgataccgataaacaatgaactcttaacaaaagggtgaatgctgaaaggttgctcaggcggcccgagtgatgacaacgacaggtaagaccgtgacctgataaacctgaataacagccgggatataaagtccgtaaggagaataaggctcaggtcagcgaatctcatagtggcccgcagctctggctgcaataaggccggatacagagctgcaactaatcgtcgatgtcagaacaacggatgccttgcaaacggggatgcgttcatac

SEQ ID NO: 4633 - DNA, 1508 bp, unidentified
  source 1..1508: mol_type = unassigned DNA; note = element_70f05e8
  misc_feature 1..2: note = core
  misc_feature 3..246: note = LE
  misc_feature 247..1488: note = CDS
  misc_feature 1489..1508: note = RE
  misc_feature 15..242: note = bridgeRNA
ctaatgagtgttagcgagtcggccatccggcagactcggggctggtagccgccggcaggtgagcacttgttggtcccggacgttgagtcctgctgaaagaccgtgcccctgccggctggccgggagagttgatcgctgatgggatgtcgtgcccgccgctgtgtggcgtgagcactgagtcattaggtcgctgatagttctcccgcaggctgctggccgtgtccgatcacgacgacgggagagaccttgcggcttttcgtgggggatgactgggccgaggaccatcacgacgtcgagctgatggacgagggcggccggcggctggcgaaggcccggctgcccgagggcgtggcgggcatcgccaggctgcacgcgatggtcggcgggcagctgggtgaggatgccgatgaggaggatgccgggcaggtcgcggtcgggatcgagacggaccggggcccatgggtggccgcgctgatcgcggctgggtacacggtgtatgcgatcaacccgctgcaggcggcgcggtaccgggagcgccacggtgtttccggcgcgaaaagcgacgccggcgatgctcatgtcctggcggacatggtgcgtaccgactcccaccagctgcgcaccgtggccggggacagcgcgcaggccgcggcggtcaaggtggtgacccggacgcacaagacgctgatctgggaacgcacccggcacacccagcggctccggcacgcgctgcgggactacttccccgccgcgctggaggccttcgaggacctggacgccccggacaccctggaactgctggccagggcaccggacccggcgtcggcggccaggctgaccaccgcgcagatcagcgccgccctcaagcgcgcccgccgccgcggcatcgctgggaaagccgggcagatccaggccgtgctgcgcgccgcgcacctgggccagcccgccatcgtgacggccgcctacgccgcgtccgtccgggccctgatcgcggtcctgggcaccctgaacgagcaggtcaccaccctgcaagggcaggtcgaggcctattttggccagcacccggacgctgagatcatcacctcccagcccggcctgggcccgatcctcggcgcccgggtgctcgccgaatcgggcgatgcccccgcccggtacgcctctgcgaaggcccgcaagaactacgccgccaccagccccatcacccgcgcctccgggaagaagaaagccgtgctggcccggcacgtgcacaacgaccggctcctcgatgccctgatgagccaggcattctccgctctgcaggcatcgcccggagcccgcgcctactacgaccgccagcgcacccgcggatccgggcacaaccccgccctgcgccagctcgccaaccgcctcacaggcatcctccacggctgcctcaagacccgcaccctctacgacgaagcgaccgcctggccgcaacacgcagcgaagcccgagaaggctgcagcttgacatctaagctcctgggatgt

SEQ ID NO: 4634 - DNA, 1469 bp, unidentified
  source 1..1469: mol_type = unassigned DNA; note = element_70f090c
  misc_feature 1..2: note = core
  misc_feature 3..509: note = LE
  misc_feature 510..1451: note = CDS
  misc_feature 1452..1469: note = RE
  misc_feature 44..215: note = bridgeRNA
ccgttacctttttcgtagcccgtttctgatgcaggatatgggtgtgttggccggtcggttccggcatggtttttgcccccagtcatccatgatccgggggggggtgttgccaccggaaccgacatggcggccggggaatcgctaatagaggcacggccaacgaagccattcgtaacgtggatgcgactcctgccgcccagaccagccaacagtctcagcacgattagacgggggtaatcatgattctgcagcacgagagcatcgacgttttcctcggcctggacgtcggcaagaccggccaccacgccgttgccctgagccgggctggcaaaaagctgtacgacaaagcccttcctcaggacgaaaccaaaatccgggacatcatcagcgccctctcttctcacgggaaggtcctggtcgtcgtggatcagccagcgactatcggtgcgctgcccgtcgcggtcgcccaagccgctggagcaaccgttggttagctgcctgggttggcgatgcgccggatcgccgacctgcacccgggccaggcaaaaaccgatgcccgcgacgcggccatcatcgccgaagccgcccggtccatgccgcatacgctgcggtcggtggaactggacgatgaatccctggccgggctcggcgtgctctgcggtttcgatgatgacctcgccgctcagatcaccgccacctcaaaccggatccgcggactgctcacccagatccatcccgccctggagcgggcactgggcccgcacctggaccacccggcggtggcagacctgatcacccggtatccaaccccacaggcgttgaagaccgcaggccgcggacacgtcagagcccggttgaagaaacacgcaccaagggctgccgatcgcctcaccgaagctattttcaacgcactcggtgaacagacggtcgtggtcgtgggcaccggtgcggccgggatcgtgctgcccaagcttgccgagcagctcctggcgctgcgccggcaacgcgacgagatcgcctcccaggtcgaggctctcgtggaggcccaccctctttacgaggtcctgacctcgatgccgggcatcggcgtcaggacctgcgcacgaatcctcaccgaagtcaccggcaaacacttcgcctccgccgcccatttggcctcctacgccggaatcgcaccggtcacccgccgctccggaacctccatacgcggtgagcatccgagccggcgcggtaacaagaaactcaaacgagccctgttcctctcagccttcgccgctctgcatcatccaccgtccagggcgtactacgaccgcaaacgtgcggaaggtaaacgccacaaccaagccattattgccctggcccggcgccgttctgatgccctgttcgccatgctccgcgacggcaccctttatgaagacccggcacttaagaacctgccctcagccgcttgaccaaaaccatagaggcac

SEQ ID NO: 4635 - DNA, 1453 bp, unidentified
  source 1..1453: mol_type = unassigned DNA; note = element_70f53b7
  misc_feature 1..2: note = core
  misc_feature 3..230: note = LE
  misc_feature 231..1436: note = CDS
  misc_feature 1437..1453: note = RE
  misc_feature 1..234: note = bridgeRNA
ccgttacctttttcgtggctcctgatcaagggagttgtggtcgccaggttcggcatgactaacgtccccagtcgttcgcatgatccggggggtggtgtcaccgagcctggtggcatcgagggaccgctgatagggacacggccgccgtcgggtaggtctcgtcgtaacgtgggtgccggccgtcgatgcctgactggcgaccgcctgcgacgcgacgaaagacacggtggatgaacagcgaatatggcgtgttcctcggcttggacgtcggcaaaggagaacaccacgccgttggtctggacccggctggtaagcggctgcacgatgcgccgctgcccaacagtgaacccaagctgcgggcggtgttcgacaaactcgcccgacatggccggttgctggtcgtggtggatcagcccgccaccatcggcgccctgccggtggcggtcgcccgcgcctgcgggcaccaggtggcgtatctgcccggcctggccatgcgccgtatcgcggatctgtatcccggccacgccaagaccgacgcccgcgacgcgttcatcatcgccgacgccgcccgatccctgccgcacacgctgcgacaggtcgacgtcggcgacgacacgctggccgaactggaagtcctggtcggattcgatgacgatctggccggcgaggccacccgcatcggcaaccgcatccgcggcctgctgaccggcatccaccccgccctggaaggcgcgatcggaccgaagatcgcgcacccggcggtcctggaaatcctgtcccggtgcggcggccccaccggcattcgcagggccggacgacgcacgctgaccgcgatcgccaccacccacgcgccccgcatcggcgagaaactcgtcaccgcgatctgggccgcgctggacgaacagaccgtcattgttcccggcaccaccgccgccgacaccgtgctgccccgcctggctgacagcctgaaaaccgttctggcgcaacgcgaacaggtcaaacacgaggtcgaggagattctcgatgcacaccctcttgccgcggtcctgacctcgatgcctggcatcgcggtcaggaccgccgcccgcatcctcctggaaatcggtgacgcctcggcgttcgcctcctccgcgcacctggccgcctacgccggcatcgccccagtcacccgcgcctcgggctcctctatcaagggcgaacaccccgctcgaagcggtaaccgcaagctcaagcgcgcgttcttcctttccgcgttcgccgccctgcacgaccccatcagccgcgcctactacgaccgcaaacgcgccgaaggcaagaaacacaacgccgccctcatctgcctcgcccgccgacgctgcgacgtcctctacgccatgctccgcaacaaaacccagttccggcacccccaaccagccacagtcgctacggcggcttgacaaattcatagggacac

SEQ ID NO: 4636 - DNA, 1629 bp, unidentified
  source 1..1629: mol_type = unassigned DNA; note = element_70f94b9
  misc_feature 1..2: note = core
  misc_feature 3..281: note = LE
  misc_feature 282..1505: note = CDS
  misc_feature 1506..1629: note = RE
  misc_feature 13..304: note = bridgeRNA
ctcctacaatataaattacggtacaggcacggcaaccagccgtgctcgtttcgtttttgttgccaaggctgtacaatgggagagcgtcggtctgacctaaatcatcaaggactcatcacgtccgaaaaggagtccgtcagccgtctctctcattgacagcagttcgctttgagcaggtagtcccgcccatgttattgggtgtgttcgcgtaacctaggagattgaatcggcaatggaagaacggcagaaccgcgtgcaaatccgatcatcaggaggtattcatgaacacagtcgttggaattgatgtgtctaaagggaaaagcgttgtcgctgccatgcgtacgtttggcgaggtcgccctgccgccgcgtgaatttcttcacacaaacaagggcctttccatgttgacggaatcgctgcgcttgattgatggggatacccgtgttatccttgaagcaacagggcgttaccatgagccggtcgttatggcgcttcaagagtccggattctttgtcagcacggtcaatcccaagctcatcaaggacttcggcaacaattcgcttcgaaaggttaagaccgacaaggccgatgcggtgaagatcgcgcggtatggtcttgaatattgggaagagatgcgcgagtatacccaaacagataccgcacggcagcagcttaagctattttcacggcagtacaatctgcacatgaaaacggtggtatcgctgcaaaacaaccttatttcactgttggattctgtgtttccgggcatcaacgagcttttcaaaagcccggtgcgtgaggatggacgccagaaatgggtggatttcgtctgcaccttttaccaccgcgactgcgtatccggcgtgagcgctgccgctttctcccagcgttattacaaatggtgcaagcggaaggactacaatttcagcacggctaaagccgctgaaatctataccaccagcagtgagatggtcgtgacgatgccaaaaaacgcactcatcaagacgctcattacctccgccgccggacaactcaccgccgccacagcgacgcttgccacgctcaaggccgagtttatccgccttgccgccacgctgcccgaatatgaagtggttcgttccatgtacggtgtgggtgatgtcaccggcgcacagctcatggccgagattggcgatgtccgccgctttcagagccgtggtgcgctcatcgcattcgccggcgttgaccccggcgtaaacgaatctggaaagcacagtgcacagagcgtccgtaccaccaagcgcggctctccgcacttgcgaaagacgctgttccagattatcagtacgcacctgaaacgctccccgctggacgagcctgtgtaccaattccttgaccgtaaacgtgtcgagggcaagccctatctcgtctacatgaccgccgccgcgaacaaattccttcgcatctaccacgccaaggtcagagactatttgaacactttggagtcagtggatttgaatacatagccagctcttggattcccattgatcaggtgggcgcgtattgcggccgcttctttgtcatgctcgtttttacgttccaaatccttcttgtttttttcgcttttcctattgacttttgttagcagga

SEQ ID NO: 4637 - DNA, 1363 bp, unidentified
  source 1..1363: mol_type = unassigned DNA; note = element_70fba03
  misc_feature 1..3: note = core
  misc_feature 4..214: note = LE
  misc_feature 215..1084: note = CDS
  misc_feature 1085..1363: note = RE
  misc_feature 1130..1361: note = bridgeRNA
aaatggtatggacgcctccgccgcagcaataatggtgcgtcaccacctttccagggagagcggaaatggaaccgaccatcattggcgttgacattgcgaagcaggtctttcagttgcactggattgaccgcgagacggggaagtggttgaccggcaactcaagcgaggtgccttcttggaacatttcgcaaatcgtgaaccctgtctgattggcatggaagcgtgtggcagctcacaacactgggcacggcggttaagcgaacttggacatcaggtcaaactgatgccgggcaagctggtcaaggcgtttgtgacaggcaacaagaacgacgttgctgacgcgcgcgccatctgggctgcaacgagtcaacctggcatcaagacagtggcaatcaagaccgaagcgcagcaggccgttctagcgctgcatcgcatgcgccagcagctagtgatattccggcgctctcaatcgaattgcttgcgtggactgctgagcgagtacggcgaagtcatggcattggggcgggccgcgatgagccgagcgatgcccgacgtgctcgcacggctggagtcgcgattgccggcagtcctgatagattccctcagagagcaatggcaacgtctgagcaacatggacgaggagattgcccgtatcgagcggcgcttgagggcatggctacaggaaagcgatgcgtgcaaggcaattgcggatattccaggcgtcggcttcttgactgcgactgcggcagttgccgcaatgggcaatgcgaaggccttcaaatctggtcgtgagtttgcagcttggctcggcttggtgccagcgcagattgggacgggagggaaggtgcgcctacttggaatcagcaaacgaggcgaccgctacttgcgcaccttgctcattcacggggcgcgctcggtcatgaagcacgtgaaagatgcagagtcgtgggcagcaaagctcaggcagcggcgaccgctcaacattgtgatagtggccttagcaaacaagatggcgcggacgatttgggcattgcttgcgcaccgatgctcataccgagctgactatacggcggcaattgcatgacggcaccatgtatggcatccggatgcccttgatgttgcactgaacgcgaacttcccaggttgcgcaaggtatcgattgtgatggcaaacaggttagaccggggctcaccaaacctgcatcgtcttctggacatcatggtccgtggcaaaaatgaggcgtgagtcagcggattccataggggccagcggggttcgtcctgtataggccggatataaaaccgcagccttcttacttgttcgacaactcatcgacatcttgccaaacaggaggcgtccatat

SEQ ID NO: 4638 - DNA, 1272 bp, unidentified
  source 1..1272: mol_type = unassigned DNA; note = element_7103cb0
  misc_feature 1..10: note = core
  misc_feature 11..272: note = LE
  misc_feature 273..1220: note = CDS
  misc_feature 1221..1272: note = RE
  misc_feature 85..253: note = bridgeRNA
tcattgcgagtgattttagtcgtcatcgtaagtttgtagggaagttataggaattaaagaaacagaatataattttgtatttcatttaggatacagcgagagagggagtaagatttttaatcgtcattggtccttgagagacccttcgcaatgttaatccccctctcttattcctatcataaacttggacagttcattaggccaggagcctgtttttacgattgataagttatgataagagctgctgtaatccacaaatatgatatacaaatatggtaacaggtattgattgttcaaaggattattttgacatttctgtccaatcgggacagaaagaggtttttaagggtcgtttcagtaacgacgaagcgggttttgtggaggccctgggccacatgcacggcagccatatagcgatggaggccaccggtccctattacttccggctggcaaagttcctctgggagagggatgaacgggtctcggtcatcaacccccttgtcatcaggcgtttttcccagatgaccctggccaggaccaagaccgacaggaaggatgcccagctcatcgccaagttcaccagcatgacggaacctgcccaatggaggctgccggaggaacatgtgctgaggatcaggaacctggaaggctatatcaagggacagaaggaatgcaggaccatgctaacgaacaggctccatgcatatgaacatgcgggaacactggaacccacgctcaggaagaccatagaggaagggatcaaacgttatgatcaggacatcaatgaacatgaaaggcaggtccagcagatcatcatggagaattacggggaactcaatgaaaacctgcggagcatcccgggcatcggcccgcgcagcgcagcactgcttatcatcctgacggacggtttcagtcggttcgaggggtacaggcagctgatatcctatttcggactggcgcccaggatattcgagtccggcagcagtgtaaggggaaagggacatatctgcaagatggggatgggccaggtcagaaaggtgctgtacatggcggcaatatccgccatcaggagcaacaccgcctgcagcgggctttatgggaggttgatggaaaagggaaaaccctacaaggtcgcaatcatagcagtggtgaacaaactgatcaaacaggcattcgccatcgcaaaatctggaaagggctacatcgcaaaagcggcctaatcagaatattatttggagaaaatttaatttattatttggatatatacacagt

SEQ ID NO: 4639 - DNA, 1313 bp, unidentified
  source 1..1313: mol_type = unassigned DNA; note = element_7106135
  misc_feature 1..2: note = core
  misc_feature 3..188: note = LE
  misc_feature 189..1151: note = CDS
  misc_feature 1152..1313: note = RE
  misc_feature 28..201: note = bridgeRNA
cttgtgtccagagattctgccagaatgtgcaaacgggcggttctcaccaaccgcccgttgctggatctgagcccgtacgcgctcaaaggctatgagcctgtcggggagcgtgggacaggtccggtattcttcctcaacccgaacagttgcatgggcttcgagcccgaaccgagcaaggaagggagtggatgatggcacaaaacagtcgcgttgtcgtcgggattgatgtggccaaggacaaggtggatgggtgcattcgctcgctgtcgcaacggcaaacgttcccgagcagtgcggaggggcgacgcaagctgatcgcctggctgcgcaagcacaaggtcgacagggcggtgatggaggcgtccggcggctacgagcaggactgggccaaggcgctacgcgaagcctgcttcgaggtacggatcgtcgatccaaagagagtgcgcaacttcgcccgatcggcggggcggctcgccaagaacgacgtcatcgatgcagagatgatcgcctggttcgccgagacgtttgaagatgcgccgagccaaacccacgatgtggcgcgcgaggagctggcggcactggtcaaagcacggaaagccgtgatcgatctgaagacccgcttgcaaagccagaacgagcatgccgtgccgggagcggtgcagaaagcccacgcccgcgtcttgaagggcctggatgctgagattgccaagctcgaggatgcaatcgtcgtcacggtcaaggccacaccggcgtttgccgcgcgcgccgagatcatcgagagcgtgccgggcctcgccgaaacggtctctgcggtcctcattgcggggctcccggagctcgggacggtccgcgaggagatcgccgtcgcgttgttgggagctgcgccttatgatgacgacagtggcaagcgacgcggcgagcgccacatcaagggcggccgtcgctgggttcgtaacgccctctatatgccctgtctcggcgcagccacccagcacaacccggtgctcaaggccttctatcagcggctgattgccaaaggaaaggagccgaaagttgcgctgatcgcctgcatgcgcaagctgatcgtcatcctcaatacgatgatcgcccgcggcgagaaatgggatcgaagccgctacgcgttgcggtgagctgatcgagcgcgccctaccgcgttcggtcctcgaccgagcgcatgcaaagccgacagaccggcgagcggacggggtcaaggccgtcagccgccgaaggcggtggcgcgtccagcgccagccttgaggccgaccgatcggcggtctacttcagcacagttg

SEQ ID NO: 4640 - DNA, 1735 bp, unidentified
  source 1..1735: mol_type = unassigned DNA; note = element_710f947
  misc_feature 1..3: note = core
  misc_feature 4..260: note = LE
  misc_feature 261..1580: note = CDS
  misc_feature 1581..1735: note = RE
ctcgtataataagatttgcaggtaatttttaagtgtatctgcttcattcactccatataatcagcaggcttagagatgcccgtgatacaatagctgtaggacggcagggacaagttctccatcaccttgttggactgaaaagtcacttcaaaaggagttagttcccctgagccggaagttagctgcaaactcattggctgtttgctggatgcaaggctgcccttttagcagtaagggatatcgcattagccttctccggaatgattctgatacgcgaggttgcagatgctccggttatcatgggtatctcaaagcctgctggccttaaatctccatacagggaggtgaaaattgtgaatccattatttgttggcattgatgtgagcagcagaagcaatgtagtctatctgatgaatcctgacggcagcaagtattccagtttttccgtacagaataacttaggtggtgccaagctattgtcagagaaaatcgtgtcagcactcagctccatgcagctcagtgatgtggtgattggtctggaggccacctccatttacggggacagcctggtttatgccctccgggaggatggcagtcttggccggttccagcggaagattcatattcttaatccgaagcaggttaaaaaattcaaggaggcctatccagatctacctaaaaacgactgggtggacgcctttgtaattgccgaccatctccgttttggcaggatcgccaaggaggtctatctagatgattatcgttaccatgcacctaaaacccttaccagagccagatttgacgtgattcaaaacctgacccgagagaagcagcggtttgcaaactatttattcttaaaatgttccggtatggctcaagacaaggatatcccaaataccagtgccaccaccattgcactcatggaacactttgaaagcgtggatgaactggcaaatacagacttgaacgaactgactgcttttatttccgaaacaggacatggcagatttgctgacccagcagctactgccaaggcagttcgcgctgcggccagcggctcttaccggttgcccaaaacggtgaacgacaccgtaaaccaggctatggcgatatctattgcctccatgcgggctttggaaaaacaggtcaaagttttggataaggctattgatcagcagtttgagatcatcccaaataccttgacatctatccctggcattggcaggatctactctgccggtatcattgctgagcttggtgatatacaccgctttgattctcaagcttctgtcgccaagtttgctggccttgtctggcataagaaccagtccggtgactttgaggccgagcattctcggatgattaaatctggcaaccgttatctccgctactacctgctggaagccgccaactctgtgagaagatgcgactccgagttccgacgttattacgaccttaaatttaaagaggtcaacaagtaccagcataaacgcgcactcgctttcactgccagaaaacttgttcggttgatctttcgactgctgaaggacaatcgcttgtatatcccgccagagggctgagcgtatcgctcgccgctttgctgcgcaggccctgttttaaaatttttcaggggcagggcttaggtttgtgtcgcctttttgcaacctacatcgtgcttcctgctctatttttctcattttttcttgcattatctacttgacttcacaccattgga

SEQ ID NO: 4641 - DNA, 1487 bp, unidentified
  source 1..1487: mol_type = unassigned DNA; note = element_7117dc2
  misc_feature 1: note = core
  misc_feature 2..109: note = LE
  misc_feature 110..1126: note = CDS
  misc_feature 1127..1487: note = RE
  misc_feature 1174..1402: note = bridgeRNA
gaatgaaagggacttccccgtcccgaactagccgcgttgcggcaaccggcaacagagtgccacgatgggaagtgcgaaatctcatcaactcatccggaaggggaagtccatggctattctgaccgtaggtatcgatctcgccaagaacgtctttgcagtgcatggtgtgaacgagacgggccgcaccgagctgatgcgcccggcggtgccgcgcgacaagctgctggcactggtggcgagcctgccgccctgcaccatcggcatggaagcctgctcgggcgcgcaccactgggcgcggcagttccaggcgcagggccacacggtgcgcctggtggccccgaagttcgtcacgccgtatcgcatgagcggcaagcgcggcaagaacgacgcggccgacgccgcagcgatctgcgagacggtgcagcgcccgcacatgcgctttgtgccggccaagagcctggagcagcaatctcagctgatggtgcaccgggcccggcaggggttcgtcgagcagcgtacggccacgatcaaccgcatccgtggcctgctcagcgagttcggcatcgtgctgccgctgaaggccagcaccgtgcggcagcgcgcgcgcgagggtctggaggacttgccgggttacgccaatgtggtgatcggcgacctgctcagcgagctgacgcatctggatgagcgcatcgcgcagtacgacctgcatctcaaggccatggcccgggctgacgcacgcgccaggcggctgatgcagctcagcggcatcggcgagaccaccgcgacctgcctgctggcgatgatcggcaacgggcatgactttgactgcggccgccagttcgccgcgtggctgggtctggcaccgggccaatacagctcgggcggcaaggcccgcttgggccgcatcaccaaggccggtgatccgtacctgcgcagcctgctggtgctgggcgcccgggcggtgctggctgcagccaggaacaagaccgacagcgtcagccgatgggcgatggcgctggctgagcgacgcggctactggaaagccgtggtggccatcgcggcgaagaacgcgcgtatggcctgggcggtgttgcaccgtggcgaggcctttgcgctgcccgcctgaggcccgcgccaggcagccctccaacccacatcaagcggagcaccgaatgcgaccgccgcgtgacggcaggcgttgatgcgcacaggtttggacctgcgcggggcgtgaccgattaactccagggcggccaatggcttgccggctaacgaatgggtcccccgtgtgcgtccttcatcagggtccgtggccttgaacacgccacaccaatgaccgtttgtagtttggccagtccgcacctcgtgtcatccatagcgcctgaaccgcacaccggtcagtggcttgaacagcgatacaaaacaaacaggcccgctgtgcgggcctgtgggtgatctgttgcttgacggacggggaagcccttgta

SEQ ID NO: 4642 - DNA, 1439 bp, unidentified
  source 1..1439: mol_type = unassigned DNA; note = element_711b6f2
  misc_feature 1..2: note = core
  misc_feature 3..121: note = LE
  misc_feature 122..1156: note = CDS
  misc_feature 1157..1439: note = RE
  misc_feature 1189..1392: note = bridgeRNA
agatggggtaatcggccgggcgttgttgtggatagctgaaagattttgggtgctgcgcttcaggctgatggtgaaacgaggtcaccgttacgggccccagcatcagaaggagaagcgcagcatggagcattttgccggactggacgtgtcagtcaatgagacgagcatctgcattgtggatgatacgggcaggattattcgggaaaccaaggtcgcaagcgagccagatgcgttgctggcagtgctgaagagtccgacccaccacttcaagcgcattgggctggaagccggaccgctgtcgcagtggctctacagcgctcttgctgaagtgaacttaccggtcatttgtgtcgagacacggcacatgcgggcagtcttgaaggcgcagatcaacaagaccgaccgcaacgatgcccgcggcatcgcgcagatgatgcgggcgggactttatcgtccggtgcatgtgaagacgctgcgcagccagaagctgcggatgttgctgacccatcgcaagctgctgcagtcgaaggcgatcgccatcgagaacgatctgcgcggaaccttgcgcaacttcggcctcaaggtgggcacagttggagcagccaagttcgaggcgcgcatcagggagctggtcgagaagcttcccgacatagccgcactagtcgaaccgctactgatcgttcgcagagtactgcgcgaacaggtcgccattctgcaccgccgcttgctggcgattgtccgggacgacgaggtctgccggcggctgatgacgattcccggggtcggaccgacggtggcgctgacctaccgcgccaccatcgatgtgccggcgcgctttcgcaactccagggcagtcggggccgggctgggactgacgccctgcaagtatcaatccggcgagagcgagtacaccggcgccatatcaaaatgcggcgacgcgatgatgcgggtcatgctctacgaggcggcccagatcctgctgatgcgcgcaacaaaatggtcctggctcaaggcctgggcgatgcagatcgccaggcgccgcggcgtgaagaaagcgatcgtggcgctggcgcgccggctggcggtgatcatgcatcgcatctgggttgacggcactgagttccgctggacccggcaacaggttgcagcagcatgacaacgcaagatcaaacacaataggagaaaacgcgagctccaccgcgccgcggtggcatgatgtcctttgcgggacgacgaatgaggtgagatcgcatgtccgcttggacctgccatcagcttgatggcaaggccgcccgaaagattgttccacctcgttctcgaaccccatgatggaagggccctggtgccgattccgaagagaagcacgagcccgtgagcgacatcgacactgcagcggtggacagtctgaaagcgcttgacccaaaccggccgattagaga

SEQ ID NO: 4643 - DNA, 1617 bp, unidentified
  source 1..1617: mol_type = unassigned DNA; note = element_711f43d
  misc_feature 1..3: note = core
  misc_feature 4..189: note = LE
  misc_feature 190..1485: note = CDS
  misc_feature 1486..1617: note = RE
  misc_feature 8..224: note = bridgeRNA
gttcgtaatataaggttaaccagatttttctggttgaccattttttatatggttttattataacagtagccggggtagaacgtaactgcccgtggggcattgaccccgtcagctaaacagttcaccccctacttgtaaaaacatgattgagctggttgggaccctggatcccgtttaacaagcgaagctatgatattacaagaaggattaggggcaccggcaaatatattttcgaggaggagattttgtatgaatccagtcgttggtctggatgtttctaaaggggaaagtcaggtccaagcatttttggacaagaaaaagccatatcgtaagagttttaaagtggaacacactagtgatggattagcaattcttcatgaatttttaaagtacttgaaggaaattacgggacagaatccagcaattgttttagaagctacgggacattatcatgcttctgttgttcaatttttggaggatcatcattatttattgattatagttaatccattgatctcatatagagcgaaaagttctagtttacgaaaggttaaaactgatgcagtagatgcttatcttctttgcgagctttactataaggaagacctagagccatataaaagacgcggggttcgactcttaaaccttcgtaatctaacacggcaacatgagaacattacagggaattttattcaaacaaagctacagtttcaggctgtgttggaacaagtatttcctgagtatagaggggtttttggagagttatattcttatgtttctttacggattctccaagaatataaggcatcggaagatatcttgaagactagcgaagataaactaacaaatcgtatagctgatttatgtacgagtcgttctaaaaaatgggcttatgaaaaagcacaaaaacttaaaacagctgcagctcgtaatccatttaaaaagacgttgtaccaaagtcacctgttaagcatgggaatgtatattgatatgcttcttcaatttaaagagcatctatcaaagttggaagctgagatagataccctagctaaaggaattgaagaatataagattatcaaatctatccctggcattggagaaaagatcgctgccacgatcctttctgagattggggaaatagatcgattcaatcacccaaaaaagcttgtggcttttgccggagttgatcctagcgtttttgaatcaggtagattcacagctagtatcaaccggatcactaaaagaggctctagtcgtctacgccatgccttatatctagctatacgttgtgccatccgtgacaaacgtaaaaagaaaactagtgataaaataatccctcgaaataagaaaatgagagagttttacgacaaaaagcgtagcgaagggaaaccctttagagtagcagttattgcttgtgtaaataagctcttacattggatttatgctttattaaaaaacaaaacgactttccaagatatagcttaaaaactatatctaactaaataatacaaaaccttccattacggtaatgaaggaaggttatttggcatgcgcaaatttagtataacacattaatttttagtttttcattgaaaaatgttgacaaactattagctg

SEQ ID NO: 4644 - DNA, 1476 bp, unidentified
  source 1..1476: mol_type = unassigned DNA; note = element_7126ded
  misc_feature 1..2: note = core
  misc_feature 3..92: note = LE
  misc_feature 93..1124: note = CDS
  misc_feature 1125..1476: note = RE
  misc_feature 1245..1468: note = bridgeRNA
actaatgggatggtcgccccttcccgaaacggcatctgcgtgccaaagtggagatgcgatatttccaccaccaaacaggagaggcgaccgagatgaagattacgacagttggtatcgatctggcaaagaacgtgttccaggtacatggcgtggatgaacgaggaaaggccgtgctcaagaagccgctcaagcgcgagcaggtggcgccgttcttcgccaacctgccgccctgtctgatcggcatggaagcgtgcggcagcgcgcatcattgggcgaggaagctggaagcgttcgggcataccgtaaagctgatggccccgcagttcgtgaagccttacgtcaagacgaacaagaacgacgccgcagatgccgaagcgatctgcgaggcggtgggccgccccaatatgcgcttcgtacccatcaagaacggcgagcaacaggcgatcttggcgatgcatcgtgcccgccagggcttcgtcaaggcgcgcacggcgcaggccaaccagatccgcggtctgttggccgaatacgggatcatcatcccgcagggcattagccatatcgccaagcgcctgcctgatatcctggaggacggggagaacggactgccgggcgccttccgccaattgctgcatcgactcggggatcacctgaaggaactcgaccgccaagtgggcgaactggaggtgcagatccaggtctggcaccgcgaaaacgaggcgagcaagaagctcgcgcagattcccggtatcggtccgatcacggcaagcgcgctggtggcctcgatcggggatgcgaagagtttcgagagcggacggcagctggcggcctggctgggattggtccccaagcagcactccagtggcggcaagcagttgctgctgggcatcagcaagcacggcgatacctatttgcgcacgctgctgatccacggcgctcgggcggtgatacgggtagccgagcgcaaggcgggttatgcgcaaacctggctggcgcagctgatcggccggcgcaacaaaaacatcgcggcagtggccttggcgaacaagaacgctcgcatctcctgggcgctactggcccaggagcgggactatcagcccggctatgaaccgtcggcggcatgaacacgggttgcccacaggcgctcgctcgccagcgtatggggcgcgctcgcgagcgcctatggacaaccctgcgatatcgcagcaccaccaccgctttttgtagttgtagaggagtaacccccaccgattgctcaggcgatcatgacgtgatggcaaggcaggtaagaccgtggtcgattcaacctgatagcagcctcgcgcttcaagcgcgtccgactgatgaggcatcgatcagcgaattccatcagggacagaggcatcgcctcgatcaaagtccgaatgtatggctgcaatctttacccttcgaaccgtcaccaattgaatgcttggcaaacccaggggcgaccatgta

SEQ ID NO: 4645 - DNA, 1461 bp, unidentified
  source 1..1461: mol_type = unassigned DNA; note = element_71302bd
  misc_feature 1..2: note = core
  misc_feature 3..228: note = LE
  misc_feature 229..1440: note = CDS
  misc_feature 1441..1461: note = RE
  misc_feature 6..225: note = bridgeRNA
ctaatgggactggaaggtctgtctcgaatggggcaggcttgccaccgagccgctgactggtgagcactgcttgagactgagcaagaagctctattactagatcgtgccccagccagttggtgaggttgacggagaaggctggaggggtgtcgtgcctggagcactaatccattagttcgctgccgttgccctcgaggctcgtttccatcgaccaacggaggtgatcacatgattttcgtcggagtggattgggccgaggcccaccacgacatctgcattctcgacgaggcgggagaggttctcgcgcgaaagagaatccctgacacgctgcccggcgttcggacgttgcacgagttgctgggtgagcacgccgaggaaccccatgaagtcatcgttggcatcgagaaggaccagggactcatcgtcgaggcaatgctgggcgccaactaccgcgtctacgcgatcaaccccatgtcggccgctcgctaccgcgaacgccacgtcacctcggggtccaagtccgaccccggtgacgcgaaggtcttggccgacctggtgcgaaccgaccggcataaccaccgcgaggcggccggcgactcggcgaacgttgcggcgatcaagatcctcgcgcgggcccaccagagcgccatctgggcccgccagcgagaggtgaacgcgctgcgcaacgccctgaaggattactacccgggagctcttcgcgccttcggcaccgacctcgatgaccgcggcgcggtggcgattctcgagatcgcccccacgccgccgctcgggcgtcagctgtccaagtccaagatcatcgccgcgctgaagcgcgcgggccggatgcgcaacctcgagcgacgagcgagcgagatccaaggtgcactgcgcgaagaacaactcgcccagggtccgatcgtggaggtcgcctacggacgcaccacgaaggcccacgtcgcgatgatccgcgctgacaacgcagagatcgccgaactcgaagaagcgctgacgtcgggttttaaagagcacccggacgctgggatcgtcctgtccctaccaggaatggggacggtcctcggcgcccgggtgctgggcgagttcggggatgacccgaaccgctactgcaacgccaagtctcgcaggaattacgccggcacgtcaccgatcacgagagcctcgggcaaaagccacgtggtcctcgcccgccacatgcgcaaccggcgcctcgccgacgccctcgaccagtgggccttctgttcgatcacccgttcaccgggtgcgcgcacctacgacgaactgcgagggcgaggcaagacccatcgtcaggccattcgacaactcgctaatcgctgggtcggcattctgcacgcatgcctcgaacagcgtgttacctacgacgaaaatattgcctggaagcatcgagtcgacctcgcggcttgacaagttaggcactaggggtgt

SEQ ID NO: 4646 - DNA, 1493 bp, unidentified
  source 1..1493: mol_type = unassigned DNA; note = element_7130489
  misc_feature 1..2: note = core
  misc_feature 3..202: note = LE
  misc_feature 203..1471: note = CDS
  misc_feature 1472..1493: note = RE
  misc_feature 5..202: note = bridgeRNA
ctgatggctctaccctcctgagtcatggggtcgccccctgggaacgcttgggacgcttgtcctgtgaggactgaggtgagacggcgtcccagggggcgagccccggaggcccgacgcccacaagggtgtcgtccccagaggactggtccatcagcacggcggcgtgcctccaactaccccgtccacgatgcaaggaggcacagtgcttggtgttgggatcgactgggccgaggagttccacctcgtggccctgggacaccccgatgagggagtgatcgagctcagccgggtggaacacaccccggccgcggtcgaggcgctgatcgaacggatcgccaggttggaacccgacccggccgcggtccgcgtcgtgattgagacgcgccacgggctgctcgtagaacgcctcaccgacgccggctacacggtcctgccggtcaaccccgacctgatcgcgcggcgccgtgggcccgcccgcaagaaagacgacgccgaggacgcccgtatcgcctgcctgctcgccctggaccgccacgccggcctgcgccccctggtcccgcacggggagctggccggggagctgcgcgccatcgcccgcgacgacgagcgcgccgcccgtgaccagcgccgcctgctcaaccggctgcgccaagacctcatctcgacgttcccggccgcgctcgagctcgccggcgacgacctgggcgccccaaccgtgctcaggctgctggaacgctggccgacccgcacccagctcgcccaggcctcccacgacgagctggtcgccttcgcccgcgccgcccgccacggctggcccgaccgcttcgccgaccgtatccagcaggccctggccgccgaccatctcatcccacgcgactacctggtccgcgccaaggccgccaccatccgcctgaccgccatccagctgctcgcgatcggcacccagcggcgcgcatgggagcggcgcatggccgagttgctgctcggcgcccgcccaaccggcaaatccggccggcggcgagaggagcggccggggaacgcggtccctggcggcaaggtctacctcagcttcccagggctcggtgaccgcctcgccgccagggtcgcgggtgagatcggcgaccatgtcgaccagttcgagtcgccgaacgccctgcaatgctacgcgggcaaggcgcccgtcacccgccgctcgggcaagtccgagctggtcgtggcgacccggctggcgtgcaaccgccacctggccgacgccgtccagcagtgggcgttttgcagcctgcgggcctccggttgggcgcgggagttctacgacgcccaacgcgcccgcggcaagcaccaccacgccgccctgcgcgcgctgggcaaccgctggctggaggtcctgtggcactgcctgatccgcggcgtctgctacgacgaggccacccacgttgccaaccgcaaccgcgccctcgccaaggccgcctgagccagaggttgacaaagggtgt

SEQ ID NO: 4647 - DNA, 1385 bp, unidentified
  source 1..1385: mol_type = unassigned DNA; note = element_71342bb
  misc_feature 1: note = core
  misc_feature 2..88: note = LE
  misc_feature 89..1120: note = CDS
  misc_feature 1121..1385: note = RE
  misc_feature 1164..1380: note = bridgeRNA
caatggtatggactcctcctcccctcaacggcatctaagtgccaaactggtaagcgataccaccagcaaacggaaaggaggagtcaccatgaagcttagtagagttggagttgatttggcaaagaatgtttatcagttgcacggcgttgattgttttggcgagacgattttgacgcggcggctgaaacggcgtcagtggctcaaagtgttgctggataaagccgatacggattgtgtgattggtatggaggcctgcggtggcgcgcatcattgggctcgagaacttcagttacgtggctacacggtccggttactaccaccgcagttcgtcaagccgtacgtgaagagcaacaaaaacgacgctaacgatgccgaggcgatctgcgaagcaatgagccgacccaacatgcgctttgtcgccatcaagaccgtcgaacagcaagatatccaggcaactcaccgcatccgggcagaatgcatagcgcatcgaacggccaaaggaaaccagctccgtggattggttagcgagtatagcctagtggcgccacagcaaacggcggcgctgcgagctgcgattccatgctggcttgaggacgcagaaaacgggttaacgagtcgcttccgtgctctgttacacggactatgggaagacctgatccggttagatgagcgggttgccacgctggacgctgacattgcgttgatcgcaaagacggacccggtcgcgaagcgcctgcaacagttgcgcggtgtcggtccgttaatcgcaacggcgctgatcgccagcgtcggcaccggtgaacagtacgccaagggtcgacagatggcagcggcacttgggctaacgcccaaacaacacagttcaggcgggaaagaccgattgctgggcatcagcaaacgaggtgatgcctatctgcgcagtctgttaatccacggcgctcgctcaaccctttggcatgccaagcataaggaggatcgattgagccgatggatgactgatttgtccgcacgtcgacatccgaatgttgccgctgtcgccctggccaacaaaaccgtccgtatggcttgggcgatgatgagaaacgagtcagattacgatcccgaattcgctactgcgtaacacaaaacaaacaacagaattgaaactaatataggaaccaacatacgattgcaaagcagctgaatgatggcaaacaggtcgaaccggcgtcagtcaaacccgcgaatgaccgcgtgttaacaacacgaaagagcaattgggaactgatgcgcgaaaaaccattatggcccggcatcaacgtatgccacctcgaaggccggatatacgtatgcagtcgtgcctacgccatcaaacagagtgcttgcattgaggaggagtccatata

SEQ ID NO: 4648 - DNA, 1160 bp, unidentified
  source 1..1160: mol_type = unassigned DNA; note = element_7138fb5
  misc_feature 1..2: note = core
  misc_feature 3..206: note = LE
  misc_feature 207..1154: note = CDS
  misc_feature 1155..1160: note = RE
  misc_feature 12..212: note = bridgeRNA
cttgtcttatgacttttgcgcttgctggggcatcatgaaatgcccgatccggggtggccaccccggatcgggcggaaggggatggatcgaagtcgtctcggtcgtggaggaccgtcgattagtgtgatcacccctttcttttccaacaggcctggacggaaaccagggcttcgggcccggatgacaagaataggacagcggaaaagatggataattctctagcacagacagtcggtatcgacatctcaaaatctagccttgatgcttacgcccatcctgccggtagcgcgcagcaatttgccaacacagtcaaggggcacaaggaattgatagcctggctcggccaatggccaatcgatcggatcgcttatgaagccactggcgcttatcatcgccaattggagcaggcgttggcggatctgccatgcgtcaagctcaacccggcccgcgcgcgccggtttgcacaagcagtaggcacacttgccaagacggacaaaatcgatgcggcggtcctggctcgcatggccatgacgttacaacctccggtccgcccggccactacgccgcggcaagcgaagcttgccgaactgatcagtgcccgcgatagcttagtccgcgataagattgccatccagaaccaggcgaagaacctgacaatcccgcttctcaaacggcagcataaacttcgtctggatcagatagaccgccatatcgcacaggtcgatgcggagattgcggcaactatttctgccgacccaatattggcgcgacggcaccagattatctccagcatcgccggaataggcgtacgtaccgcagaccaactcgtcgctaccatgccagagttaggagcacttgatcccaaacagaccgcctccctcgcaggacttgcgcctgttgctcgtcaatctggacaatggaaaggacgcagcttcattcagggcggaagggccaatgtccgacgagcgctgtacatgccagctcttgtcgctgcccgctataaccctgacttcaaagccaaatatcaaagcctcatcgaagctggaaaaccggcaaaggttgctgtcgttaccttgatgcgaaaaatcatcgtgatggcaaacgcgctcgtgaaggccgacagactatgggtcgtagaccgcccttgcacataacggaaa

SEQ ID NO: 4649 - DNA, 1468 bp, unidentified
  source 1..1468: mol_type = unassigned DNA; note = element_713ae99
  misc_feature 1..2: note = core
  misc_feature 3..235: note = LE
  misc_feature 236..1255: note = CDS
  misc_feature 1256..1468: note = RE
  misc_feature 14..180: note = bridgeRNA
cttgtatcttgcgaactgaggcgtaacgataggttacgtttcggcggagaggccgttcccacccgaggccagagcgatctgagcttgttcgaaagatcggccaccgcccctctctttttacgccgtggagaatcggaggccgttgagcctgcatgttcaaggtcggcgcgtagagcaagtccgtaggcgcggacaggggcggttgccgagatcaatcgtaccctcaaggagcgccatgagcaagccgatccagtcccaaaaatcgatggtgtattgcggcatcgatgtcagtgcggcgaccctggccgtagccgttcaacaacaagatcaacgatttgaagagcgtatttttgacaacactgccagtgggcacaaaaccctgatccgttggttgcacaagcggaaggcgcgggtgcgggtctcgctggaggcaactggcatctattccctggatcttgcgctggcgctggacaaggccgagggcatcgaagtcgcggtgctgaatccgaagctgattcaccgttttgcgcagacgctgcgccggtcaaagaccgactcggccgatgcccaggtactggccgaatacagcgctcggatgccctttactccgtggtctgcgccggggctgagtgggctgcaattgcgctctatcagccgtcatatccaaagcttggtcgtagaatacgcgcggcagaacaatcgccttcacgccgcagaaaaatcagccttgacgccccgttgcgtggtgcaggacttgaagcgctccatggcttcgcttcaactgcgcctcgcacggctgcgcagtgcggcaatcgagctggtcagaagggataaggcgatgcaggagagcttcgagttattgatcggcatgccggggatcgccgccatcagtgcgctgcaactgcttggggaactggctccgctgtcgccggagatgagtgcgcgacagtgggtggcgcacagcggcctggacccatcgcaccgggagtcgggaacctcggtgcacaagccatcgcgcatcagccgggcgggaaatcgccatctgcgccgcgcacttcatatgccggctctggttgcggtgcgccacgacccgcacttgaaggcgttctatgaatcgctgctcgggcggcacaaggcaaagatgcaggcactcatcgcggtggagcggaagctgctgcacgccatctatggcatcttcaaaacccgaatgccctacgacggcaacaagctcttcccgcatatgcagatcgcataagcgctaccatcgcctcatccagtgaaacggaagcgggctctgctgggaagcaaccatgccgagggataactggatgggctcatcctgacgatgaaccaggggccgggcggggagatcctcgcttggccccgacagacatcggagggatagaccctccatgccttgaaaatccaaaccttccccaccgaaaatgcttgacgtgcaagagagaat

SEQ ID NO: 4650 - DNA, 1365 bp, unidentified
  source 1..1365: mol_type = unassigned DNA; note = element_713bbac
  misc_feature 1..2: note = core
  misc_feature 3..76: note = LE
  misc_feature 77..1102: note = CDS
  misc_feature 1103..1365: note = RE
  misc_feature 1078..1352: note = bridgeRNA
tgatggggtagacgccccccaacggcctcggtgtgccaaagtggaggtgttgaaacaccacttgagggaggcgtccatgggagaggttagcacaatcggtttggacttggcgaagaacgtgttccaggttcacggagccgatgcatcgggagcggtcctgttccgcaagaagctgcggcgacaccaggttttgacattctttgcagcccagcggccctgcaccgtggccatggaggcctgcgccagctcgcaccactgggcgcgcgagatcggccggctcggtcacgccgtccgtctgatcccacccgcttacgtgaagcctttcgtcaagcgccagaagaacgacgcggcggatgccgaggcgatctgtgaagcagcccagcgcccgaccatgcgctttgtggctcccaagagcgagcaggcccaagccgcagccatcgtgttccgggcgcgcgatcttctcgtgaagcagcggacccagatcatcaatgctctacgcggtcatttggcggagttcgggctcgtcagggccaaagggccggctcacgttccacaactcgtgcaggttatcgaggatggggccgagtcggtcccggaactcgcccgaccgattctgaagatgctgatcgagacgctccatagcttggacgagcagatcgcccgtctggatcgcgaggtcgccgaaagggccaagagagatgagacggcgcggcggctgatgaccattcctgggattggcccggtcaccgcggtggctctgacggcccttgctccgccggccgaggctttcagtcgtggacgggactttgccgcttgggtcggactcacgcccttgcagcattcaaccggcggcaagcagaagctgggagcgacctcgaagatgggtgagcgaacgctgcgccgtctgctgatcatcggcgcgaacagtgtcttgctccgggtcgcccgcaacggtgctcccgcagggtcgtggatcggccgcatgctggcgcgcaagccgccgatgctggtgcgggtggccctcgccaacaagatggctcgcatcgtctgggcgctgctgacgagcggggaagtgtatcgggctccggctgtgagtgcatgagcgttcacaggtgtgaggctgttggggcgtaggaaggtcgaaggagaggaatggcgcaacggtcaccgagacggggtcagacaaaccagcttaggcacaagcgctacgagcgcggagatctgattgggacctgatccgcgtactcccattcgggcccgcggcatgggaacggccgcagacaaggccgaacacatgtccgcatccgacctacgcgctgtaccaaacccgaagattcttcttgcgttaccaggggcgtctacaca

SEQ ID NO: 4651 - DNA, 1665 bp, unidentified
  source 1..1665: mol_type = unassigned DNA; note = element_713c393
  misc_feature 1..4: note = core
  misc_feature 5..383: note = LE
  misc_feature 384..1547: note = CDS
  misc_feature 1548..1665: note = RE
tcacgtataatcaatcttatagaaatattaatctatttgattgattcctttctatttatattttgatatgtttattaatttttattttattaccatggtaataaaacaaaaattttcgcaacgactaaactatatcaatatttttattattatacttctagaagtataataatttcgcactgtggatttgtttctatattattacagccatttttggactggtcgaggtgactcaaaccacagatttttaatttaattgttaattagttagttaacacgaatgttttaccatttgatgttttattattttacgtgattacatgattagaaagactgtggcaaactatcagtgcaattatactaattttaggaggtgcttataaatgatatatttcgttggtattgatatatctaagtacaaacacgatttctgtattatctcaaatacaggtgaaataattgtagaaaattcttcttttgagaacaatcaaaaaggattccaatcacttgttgatctattggaaccctacgataagcaatgtgtccgtattgcttttgaagcaactggacactattctttgaatttggaattgttcttaaccaatcaaggatattcatttatgaaaatgaatccgcttgtcgtacataactatttgaaagctcgaagcttacgtagaactaagactgataaagccgatagtaaaactattgctagttatctaatgtctgttcagtacatcccaaattcaactttattataccacacttatactttaaagcaactttgtaggtctagagaaactttggttaaagaaagaagtaaaatagcagtattattaactaatcaactagattttgcttttccagaattaaaaccattctttcaaaataaaatttccgctactttattatatattttggaaaaatataaaaatgcttcccatattgctttaatgaaagattatgaatctcttagaaaagtatcacacggtaaatttagttatgcaaagtttgctaaactaaaagaacttgctaaaagcacagttggttatcatgacgaaaactcagacttacttatttctacttatgtttctctatataatgaactttcaaataaaattgatccaatagataaacaaatttctacaattatcaaagaactaaatccaagaatcttatcaattcctggtataggagtaatatctgcagcttcaattatttctgaatatggagatattaataatttttcatctccagctaaaatgttagcttatgctggacttgaaccaagtattaacgaatcaggaacattacaaagtaatggtaaaatggttaaacatggttcgggccatctaagatatgcattaatgaatattgcaatgattatcttaagacattctccttgtttctatgattattaccttaagaaacgttctgaaggtaaatgtcatagagttgcattatctcatgtgtgtaaaaaacttataagagttatatattcacttgagaaatacaatcatatttttgatccgtctttattgaaataatcgatattgccaattatttcaaaaatttcacactgtgaaatatttttggcatgggataatttccaatttataacaaactatcaaaatatcaatttttatattgacttctaatagttag

SEQ ID NO: 4652 - DNA, 1408 bp, unidentified
  source 1..1408: mol_type = unassigned DNA; note = element_7143580
  misc_feature 1..3: note = core
  misc_feature 4..269: note = LE
  misc_feature 270..1388: note = CDS
  misc_feature 1389..1408: note = RE
  misc_feature 7..267: note = bridgeRNA
ctaatagggttggaacaaggtccgttcatcggatagtgttccaccgagccaccggtgggtgagcactgttagcgcccgggcagcgagccctagctctagaacgtgcccccatcggccggcgaggggatggacggctagtagctctagaacgtgcccccatcggccggcgaggggatggacggctagtgggatgacgtgcctcgagcactgaactattaggtcgacgcgagtctcctccggctcgattaccgatgtgagggaggtgcaggttggaaatcttcgtcggcattgattgggcggaggcgcaccacgacatcagcgtgctggacgaggcaggcgcggtcctggccaagcgacggattgcggaaggcctcgagggtttgggtcagcttcactcgctgctggccgagcacgcggcggagcccaacgaggtcgtcattgggatcgagaccgaccgggggttgctggtgggaacgctgctggccgccggctaccaggtctatgcgatcaacccgctggcagccagtcgctaccgcgaacgccacgtgacctcgggagccaaatcggattctggcgacgccaaggtgctcgccgacctggtgcgaaccgatcggcacaaccaccggccggtggcgggcgactcggagctggccgcctcactgcaggtgctggcccgcgctcaccagaacctgatctggagccggcaacggctcgtcaaccagctgcgcaacaatctgcgcgagctctcggagtccaagctggcggccattctgcgtcgggctgggcgcgaacgcggggtggaggaaaaggccgcggcgatccaggctcagctccgcgcgccgcagctggcggcgccggcgctggtcagcgaagcctacggcaagagcgtggccgcgaccgtccgcatcctgcgggacatcaatacggagctggccagcctggaggcggagttggctcccagttttgagaagcacccggacgccgagatctaccgcagtcttcccggacttggcatcgtgctcggcgcccgggttttgtcggagttcggcgacgaccgaacccgcttcgcccatcctaaagcgcgaaagaattacgcgggcagctcgcccatcaccaagacctccggcaagagccgcgtcgtcctggctcgcctggcccgcaaccggcggctcgccgacgcctgccaccagtgggccttttgcgccctgaccggctccgccggcgcgcgcgactactaccatcggctccgtcagcgaggcaacacccatcaccaagcccttcgcgcactggctaatcgactcgtcggcatcctccatggttgcttggatcaccgtcagccctaccgcgaagacatcgcctggccgagccggctgcctgttgccgcttgacttttacaaccgtgggatgt

SEQ ID NO: 4653 - DNA, 1374 bp, unidentified
  source 1..1374: mol_type = unassigned DNA; note = element_7148b97
  misc_feature 1..4: note = core
  misc_feature 5..78: note = LE
  misc_feature 79..1110: note = CDS
  misc_feature 1111..1374: note = RE
  misc_feature 1119..1361: note = bridgeRNA
atgatggggtggacggcccccgacggcatcaatgtgccagactggtgatgtcgattcgaccagacgagggagccgtccatgagggagattagcatgattggtttggatttggcgaagaacgtgttccaggttcacgggattgatgcgtcgggaggggtggtgttgcgacgccagcttcggcgaagcgcagtggagaagttttttgcgcagcttccgccgtgcacggtaggcatggaagcctgcggcagcgcgcaccattgggcgcgggtgatcggtcgctatggtcaccaggtgcggctgatgccgccggcctatgtgaagccttacgtgaagcgcaacaagaacgacggtcgggatgcggaggcgatctgcgaggcggtttgccgaccgacgatgcggttcgtaccggtgaagagcgtggaacagcaggcgacgttggccgtgcacagcacgcggtcgctgttggtgcggcaacgcacgatggttgcgaacgcgctgcgggcggcgctgagtgagctcgggatcgtggcggcggcgggccttgaggggctgcatgagttgatggccaggctcgaagcgccgagcacagagatcccagagatgatgcggggggcgctgttggtgctggcccggcactggcaggggctcgataccgacgagcgcgcacttgaacgacagatcgcgagggccgcccgcgccgatcgagaggcccgtcgactgatggaggtgccgggcgtcggcccgatcatcgccagtacggttttggccaaggtgcctgatgcccaggtgttccgctcgggacgcgattttgcggcctggataggactgacgggccgcgatcacggcactggcggcaagcatcgtcccggacgcatctccaagcagggggatcgcatgctccgagctctgctgatcagcggggcaagcgctcatctgcggcaacagaaaaggcgcggcatcagcgatccgtggctgcgcgagctgctggcgcgaaggccctacaaggtcgcgatggtggcattcgccgccaagaccgcacgcatcatctgggccatgctggtcaagggagaacaataccgggctcgcgcgagcgcgccggctgctgtctaattgaggggcgacagccgccgcgctcgcgctcatctgtcggaaagggcaattatggtgtgatgggcaaatggtcaggaaaccgggatcgaaacactccgtctcgtcatcgcgcgtcacagcgcgccgcaatgattggaattcgatccgcgatctccatcagggcccgcggtcaaaggccgcattcagaggccgtatacatgaccgctccccgatccgtttgccgaaacaccaaaaaagcccttgccgagagggggccgtccatac

SEQ ID NO: 4654 - DNA, 1167 bp, unidentified
  source 1..1167: mol_type = unassigned DNA; note = element_716b11c
  misc_feature 1..2: note = core
  misc_feature 3..207: note = LE
  misc_feature 208..1161: note = CDS
  misc_feature 1162..1167: note = RE
  misc_feature 22..213: note = bridgeRNA
cttgtaatagcgcgatcagatattgttggggcgttccgagaggaatggcctgccgcgattgcacccgcggcaggccgctggcgatcggatcgcacccatcctgagcagtttgtggctgccctgtagcaggatcgcgccagcaccttcatcggacccggatggttgccggaacaatcaggttcgcttcacaaggcagggtcgacgaagatgacgcagactatcacgatgacggcgggtatcgatacgtccaaaagcaagctcgatattgcgatccacggccgccccgagcggtggcaggtcgccaatacgccggctggctggcggatgctgacgaataaattgacgaaagccggcgttggccgtgtcggcattgaggccactggcggctatgaacgtggcgtggtgcagcatttacgcgctgcaggcttcaccgtgcaggtgctgcagccggttcaggtcaaggcgttcggccgggtgcatttgcggcgcgccaagaacgatgtgctggatgcggtgatgatcgcagcctgcatggcaacgctcgatcaggtcagggatgcgcccgatccccgattggccgagttggcagaacacctgaccttcctcgagcagctcgaggaggacatcaaacgcttcaagacccggcttgaacatatcgacgacccacgcttgcgacgtatggttcttggcgatatcgcgcagcgcaaggcgcggcggctaacccagatccgttacattgccaagcaattgcgcgctcaccgtaatctcgccgcccgcctggacctggtgctcagcatccccggcatcggcgaacgcaccgcccttgcgctcctgatccgcatgcccgaactcggccgcatcagtcgcgaggaagctgccgcccttgccggattggctcccttcgacaacgacagtggacaacacaagggccagcgccacatcgctggcggcagagctcgcttgcggcgctccctgttcgccgccaccctcccggccgccttccgctggaacacagccctcattgccctctacaagcgcctgaccgccgccggaaaggcccacaacgcagccctcatcgcctgcgcgcgaaagctgctgatctatgccaacaccgtcgtccaacgcggcacgccatggaccgaaagggccctcgccgtttaatggttg

SEQ ID NO: 4655 - DNA, 1392 bp, unidentified
  source 1..1392: mol_type = unassigned DNA; note = element_716bacf
  misc_feature 1: note = core
  misc_feature 2..88: note = LE
  misc_feature 89..1126: note = CDS
  misc_feature 1127..1392: note = RE
  misc_feature 1163..1384: note = bridgeRNA
caatgggatggacgcccccacccgtaacggcatgaaagtgccaaagtggaagtgtcgtcaaccacttgaaccgagaggggcgtccaccatgaagattacgactgttggcatcgacctggcaaagaatgtgttccaggttcacgcagtggatgaacgcggcaaggttgccctgcgcaagcaactgcgtcgcgaccaggtggcagccttctttgcgaacctgccgccttgcctcatcggtatggaggcctgcggcagcgctcatcactgggcacgcacgctgcaagggtttggccacacggtgcggttgatgtcgcctcagttcgtcaagccgtacgtgaagagcaacaagaacgatgtcgcggatgctgaggcgatctgcgaggccgtcgccagaccgaacatgcggttcgtacccgtgaagagcatcgagcagcaggctgtgctgtcgctgcatcgagcgcggcagggcttcgtcattgcccgcacggcgcaggccaatcagattcgtggcctgctcggagagctggggctcgtcattcccaggggtatctgccatatcgccaaacaggtgcccgcgctgctcgacgatgagagcaatcagttgccggcgacgttccgtcaaatgattgctcgtctgatcgagcacctcaacgaactggacaaactggtcaaggggttcgaggaccaaatcaaggcgtggcatcgcagtagcgagctcagtcagcggctcgagaagattccaggcatcggcccgctgggcgccagcgcgctggtggcctccatcgccgacgcgaacagcttcgagaacggtcgccagctctcggcctggctcgggctggtgcccaggcagcattcgagtggaggcaagccaacgctcttgggcatcagcaaacgcggtgacgtgtacctgcgaacgttgctgatccatggggctcgctccgctatcgtcgcggcccagatgaaggcggtgaacaccaacgtgtggctggcggggcttctcaatcgacgacatccgaatgtggcagctgttgcactggccaacaagaacgcgcggacggtttgggcactactggctcacgggcgcgagttcaagcctggctatgtaccccagcggcttgccgcctagcaaagaccgaacaaccagtaccaaggagaccgaaccaccgattgctcaggcgatcacacaatgatggcaagacaggttagaccgtggttggcaaagcccagaacgaccgcagcaccttgagtgcgagagagcgatagaggagccgaccagcaaatcccatcagggacagcggcgacaagccgcagcgaaagtccgaatgtacgggtgcaatcgaaccttcatgtcttcatcaactgattgcctggcaaaccgggggcgtccatgta

SEQ ID NO: 4656 - DNA, 1380 bp, unidentified
  source 1..1380: mol_type = unassigned DNA; note = element_716cd09
  misc_feature 1..3: note = core
  misc_feature 4..239: note = LE
  misc_feature 240..1118: note = CDS
  misc_feature 1119..1380: note = RE
  misc_feature 1148..1368: note = bridgeRNA
tgatgctgtggacggctcctccaccggcacagcggtgccatggatgtgggcgctgttaaggctcccgcgaatcagaggagtgagccatgcagtcgatcacgacaatcggtttagacatcgccaagtcggttttccaagcccatggagttggtgccggcggccaagtggtcgttcgccgctagttgaagcgtcgctatgtcctggcgttcttccagaagctaacgccatgtctggtcggtatggaagcctgtgcctcgtcgcaccactggtcacgcgagctgcaggcactgggtcacaccgtgcggttgatcccgccggcctatgtgaagccctacgtcaagcggcagaagaacgatgcggctgacgcggaggccatttgcgaggcagtcaccagggccaatatgcggtttgtaccaaccaagaccctcgagcagcagagcggcctggtgctccaccgcgcccgccatctgttcatccgtcagcagaccgtggtgatcaatgcaattcgggcccatcttgccgagttcgggattgttgcaacggtcgggcgtcacggtgtcgaggaactgctcaatgtcgtagccgatccaaacgacaagcgaattccggagatagctcgcgcgtgtctctcggcactcggggctcaattgcgggggatcaaggagcagatactggagttcgaccggctgatcagggcctggcaccgatccaacgagataagcatgaggctcgatgaagctcccggcgtcggtccggtgctggccactgctgtggtcgctgccgtagctgatccaaagtcattccgatcagggcgcaacttctcggcgtggatcggtatcgtgccgagacagcactcgagtggaggcaaaaacaggctcggcaatatcagcaaacaaggtgaccgctatctgcgtggcctgtttgtggccggcgcgctttctgtcatccgttacgccaagatccatggcaccaaacatcggccctggctcacggccttgctggcgaggcggccgacaaaagttgccgcaatagcgcttgccaataagatcgcgcgaatggtctgggccatgatggctaggggcgagcgatacaaggaaccggtcgcgattgcgcgataaacgagatcgcgccgaacaccggcgtgatgtgaaggttgggagggcgaacagcacgtaatgcagagccggtcgatctggcgatcaggacaacccacttgggtcgaagcattgtcaaatgcgggagtttgatcgggacctgatccgcggagggcattatggccagcggtcacatgaaccgcgtcaaaaggccggacacatggctgcaccgaccaatgctgcaaaacgtgaagaaagctcttgccaacccggagccgtccacaca

SEQ ID NO: 4657 - DNA, 1363 bp, unidentified
  source 1..1363: mol_type = unassigned DNA; note = element_717a9cf
  misc_feature 1: note = core
  misc_feature 2..90: note = LE
  misc_feature 91..1110: note = CDS
  misc_feature 1111..1363: note = RE
  misc_feature 1133..1357: note = bridgeRNA
gaatgagatggactcctcctaatctagccggcatcgtaatgtgccaaagtggagttgctgtacaaccacttaacgataggagaagtccgcatgaatattacaacgattggtatcgatttggcgaagactagtttcagtctggtagggacagataagcacagcaagatcgtgcttcggaagaccgtgaatcgcggtaaactgctatccgtcattgcccaatgtcctccttgtctgatcggcctggaagcctgtagcggcgcacactattgggcccgtgaattcgaaaagctcggtcaccaggtccggattattgcggccaagttcatcgaaccataccgtaaaggcggcaagaatgacaacaacgatgccgaggcgatctgcgaagccgtccgacgcccgaatatctggtacgtgccggtgaaatcggcggatcaacaggcggctctttgcgtccatcgagtgcgccagggcgtggttcgtgaacgcactgcctggatcaatcgcctgcgtggcctactcacggagttcggtatcgtgataccgaaggggcgctacgcggcccagtcggcagtccccgttattcttgccaacctcgagaacggtttacctgaactcgcgcggcagatgattcacgacctctggctgagtatccagcaagcgaatgatcagattctgagttacgaccaggcacttgctcgactggcccgggaagacgaaacggcaaagcggttgctgaccattccgggtgtgggcgaacagattgccaccggtgtggtggcgagtgtgccggatccgagactattcaaaaacagtcgacagtttgcggcctggcttgggttagtgccacgccaatatacgacgggtaacaagatacggctcgggcgaatcaccaagcgcggggataaatatctgcgaatgtgcctggtccatggcgcgagggccgtggtcgctaatctgggtgataaacaagaccacgtcagttgctgggtcagggatttgatcgagcgtcgtggttacttgcgagctgtcgtggcattggcagcccgcaatgcacgattgatctggaccttgatgatgaagcgagaagattatcgcgccatcgatgcctgatccgaaacagtttaactaaacgaggtgcccaccgagtctgcgaagatgtaaagatgaccaatcggtcagaccgaggaaacgaaagcctgctgatgcgggggatcgaaaagatcgtctaacgaatgaggccgtttccagcgaatactcatcttggtccgggcaatgaaagcccaacagtagaccgaatgtagagttgcagtctaatgccgttgatctacaacgtctttgcttgacagtagggggagtccatgta

SEQ ID NO: 4658 - DNA, 1718 bp, unidentified
  source 1..1718: mol_type = unassigned DNA; note = element_717b27e
  misc_feature 1..2: note = core
  misc_feature 3..275: note = LE
  misc_feature 276..1382: note = CDS
  misc_feature 1383..1718: note = RE
  misc_feature 54..332: note = bridgeRNA
ctcgtataatatcttttagatacataataaatgtatccaaattaataagttactaattgttcaataggcttagttaaacccatgatataattgtcctagtgtcaatcaggtaatagttcttttttctcctgtcgaaccagtaatggttgcttcatatagagtctgttcgcctgacatggaagttagcttcaaaccgactggctgtttgcttaagtacatggacgaccatctagcagtgtggtttcgcatcagtccatcttaagctggattcttatatgcgagggtgtcgatgctccatgatcatgagttttaccaagccgattgaacacgcaaatcttattacgaaagaaggtaatcttatgaacccactttacgttggaattgatgtaagtatcgttcactttatgcttccaaatggtgataagcacagtaacttttctgttgctaattcacatgatggttctacacagttagtaaaaagaatctgttctgctttaacttctgaatcccttgatacagtttccataggtcttgaagcaacatccgtctatggtgacaaccttgtatattttctcagggaagatgcctctcttgcatcctttaacagaaagattcatgtcctcaatcctaagcaggtcaataagttcaaagaatcttataacgaccttccaaagaatgattggattgactcctttgtcattgctgactgcctgcgctttggaagaatcaacaaagaggtatacataggggactatcactccaaagccctccagaacctcacacgagcacgttactttgccgtctgcaacctcaccaaggaagaacaacggtttatgaatgtgctgttcaagaagtattcaaccatgacacaggagaaggtattttccgataccttcagtaccaccgtccttgctgtctacgatgaatttgaatccacagaagcactggcatatatggacttacaagaactgaccgcttttatcatcaaaaaaggaaagaaccgctttcctgatccagatgcggtagccaaagccattcagaaagctgcccgaagttcttaccgcttacctaagacggtaaatgactctgtgaatcaggtgctctctatatccataacctcgatgaaggcattggaatcgcaaatcaaagagttcgataaggcaatcgctacccagatggaactcctgtcaaacgtattgatatccattccgggtattggtcccgtttattcagccggaatcatggcagaaatcggagatatcaaccgttttaacaatcaggctgcacttgcaaaatatgcaggtcttgcctggactcagcaccagtctggtggttttgaagctcaaaacacaaggctcatccattctggtaaccgattttaaagtattatttgtgtgaagctgcattctctcttgtaagatgcgacaaggagtactctgacttctaccacctcaaatacaaagaggtgaacaaatatcaacacaaacgtgcactcgcattaactgcccgtaaatttgtgcggttagtctttacacggcttaaagacaatcgcctatatcgtccagcagaatagagaaatatgtctgctgttaagtcgccctgctcatttttcaaaaacttggtcgacagggcttaggcaggtgttttgcgttttttgagaaacaggtcaaatatatatgatttttatctcatttctcacttgacatcacaccgctgga

SEQ ID NO: 4659 - DNA, 1407 bp, unidentified
  source 1..1407: mol_type = unassigned DNA; note = element_717e67e
  misc_feature 1..2: note = core
  misc_feature 3..118: note = LE
  misc_feature 119..1156: note = CDS
  misc_feature 1157..1407: note = RE
  misc_feature 1172..1402: note = bridgeRNA
agatggggtcacgggccagcaaccgaccgtggttgtggcagtggccgtccctcaggatgatggagttgggaaacggagtcaggctgggcctgctccaagcatcaatcgagggacgaccatggagtactatgccggtatcgacgtgtcgttggaaagcgcgagcctgtgcgttgtcgacgcgacagggcagatcgtgtgcgaggccaagctggctagcgagcctgaggttctgatcggatggttccgcgatctcggtcttgcggtgacccggatcggcctggaggccggaccgctgtcgcagtggctgtatgcgggcatgcgggatgcgggattggcggtcgaattgctcgagacccggcacgtccgcaatgcattcaaggcaatgccggtgaagaccgatcggaaggacgcgcgtggcatcgcgcagctgatgcggctcggctggttccgtccagtgcattgcaagtcgttgccggcgcaggaagtccgagcgctactgaccgctcgcaagctgttgcagacgaaaaaccatgacgtcgagatgagcctgcgcggagtgctgcgcggcttcgggctgaaggtcggccggacgacaccgcggacttttgccggccggattcgcgaactggtcaccggtcatgccacgctgtcaacggtggccgaagcactactctcggcacgtggcaccctttttgagcaatgtcaaaagctggaaaagcgcctgcgatccctggctcgcgaggatggccgcgctcggctgttgatgacagcacccggcgtcggcacgatcgtcgcactcacctatgccgcggcgattgacgatcccagtcggttcaggtcatcgaaagcggtgggtgcacatttcgggttgacccccaagaagtatcagtcgggcgagaccgacgtcaccggccgcatttccaagatcggagacggcggtgtgcgcaccgcactctacgaggcggccaacgtcattctgactagaccggtgaagggctctaccctgaggagctgggcgatgcgcgtggctacccgtgccggcatgcgcaaggcaaaagtcgcgctcgcccgcaagctcgccgtggttctgcaccgcatgctggccgacggggcgagcttcctcgccgataaagctgcggtcgctgcagcccgctaacagaaggagattgcaggttcgggcggtcgggagaccggccgcccagagcaaggtcccgtcgtcgggacgatggatcaggccaggccgatgtcatctcagcagggcttcgctactgcgcaatattagattggccgacctgctcctcatccgaccccatcaggtggcggccgagcgccgaccccggacagaagcgagacaccggcgacaggatcatggctcagagggattgaccgacaggggcccgtgacaga

SEQ ID NO: 4660 - DNA, 1569 bp, unidentified
  source 1..1569: mol_type = unassigned DNA; note = element_7184fb4
  misc_feature 1..2: note = core
  misc_feature 3..275: note = LE
  misc_feature 276..1445: note = CDS
  misc_feature 1446..1569: note = RE
  misc_feature 30..255: note = bridgeRNA
cacgtataatccaattacctcattttgagggttggattttcctttctcccaacttagttgggctgtttaaaaatctaatatatactcattgcaagcactgtggatttgtttctatttttatatggctttgaccattatgaggtgactcaaaccacagttttttcgtctttattggtgatcagctagtcagcgctttgacgctttcatttacgtgaaaacatggcgaagtacctgtggacaaacccagtgcaaattcattttcaggaggtgcatttatgtactatgtaggaatcgatgtttccaagtacaagcacgattgcttcattgttaccagcgatggtgagatcattcgtgatgctttttcgtttggtaacaaccataatggctttcagactctcttatccgccttatcctctttaggtgatccggcaaacataagaatagggtttgaagccaccgctcattacacgctgaacctgaaattgttccttgaaaacgcccactacagcttcatggaattcaatccggttctgctctcaaagttcaacaagtcgcaaactctcagacgtaccaagacggacgcaatagactgtgcagctattgcccgctggttaatgacggtagaatacaaaccctatcctattggattctaccatgcgtattcgctcaagtcattaacccgtctaagagactctcttgtaagacagcgcagtttctatctggtcaagataaccaatgttcttgatcatactttccctgagttcaagccgttcttcggtaacagattcagcaaaactgctctctttttacttgaaacctatggctccgctgacaaaatatctcgtatgaattctcagtcctatgagaatctacgtcgtatttctcgtggcaagttttccccaaagaagttcatcgagcttaaggcccttgctactggtactgtcggtgagtcaaatgagatgttcgagtctcagctgtccagcctgctttctctttacaagttgtctgtaaaagagattgattcacttgagcagcagatcacagatctgatctgtcagatcaatccacactcactttctatcccaggcgtcggccctctttcagcagctgtcatttatgctgaatttggagacatctcccgcttcgcatcaccgcagaaaatgctggcttttgctggtctggatcccggatactatcagtccggtatatctgcacatgccgggcatatggtaaaacgtggttcttcgcatcttaggttcacccttatgaacctttgtatgcctctcatgcaatacaacgtcgtatttgctgaatactatgcgaagaaacgtgctgagggaaaacctcatcgtgtcgcttgcacacacatggtcaaaaagctgattcgtatcatttacacgcttgaaacaagagacatcgactttgaccctgaaaaacttcgctgattgagtagtggtaatcagtaataattggctttcctttcaagagccatcttgaaaggcttgtttgctatgcgctctttcacaaatggctttttctaagaaattgccttgacatctaatagctagt

SEQ ID NO: 4661 - DNA, 1222 bp, unidentified
  source 1..1222: mol_type = unassigned DNA; note = element_71865a0
  misc_feature 1..3: note = core
  misc_feature 4..223: note = LE
  misc_feature 224..1207: note = CDS
  misc_feature 1208..1222: note = RE
  misc_feature 21..208: note = bridgeRNA
cttgtatcttggttttggtcgttcacaatacggccggtagtgtgggcgcgacagaccgatttctccttggtccaggctcttcgctggagaccgtagataagcactcgtcgtcgcgccctagttctggaggagcccgaacggttgccggagcctctgctcttgtggtgagcaagctcgtatccgcaaggccgggcctacacgaagatgagggagaaaccaagtgatgagtccatcccagcaagaaatccacgtcggcatcgacgtctccaagaggaccctcgacgtgtgcatcctgcccggcgaagaaaaaggcgaaccccgcggggagtccttcgtggtcgcaaacgaccaggagggtgtaagcgagatcctctcccgcttggccgagccgggcttgagtccgaagctcgtagttctggaggccaccggacgatacgagcgcctcgccgcaacctccatcgcctcccgcgggatcgccgtggccgtcgtcaaccctcgacaggcccgcgacttcgccaaagcgatgggacacctcgccaagaccgacaagatagacgccttcgtcctcgcccgcttcgccggggcggtcgaacccagagccagctctatccccgacgagcaggcccagcacttgcagcacatactcgccagaaggcgccagctcatcgagatgctcgtctcggagagcaaccgcctggggacggccccgaaggccctccaaaagcgaatccgggcgcacatcgagtggctcagaaaggagatcactcgcacggatcgggacctcgacgaggccatcgaggagaacgccgccttcaaggccaacgagacccttctcaggagcgtccccggcgtcggacgggtcctctcccgcacgcttttggcggagttgcccgagctggggaagctcacccacaagcgcctgtgcgccctcgtgggagtcgcccccttcaaccgcgactccggacagaggagtggcaagcgggaggcgtggggaggcagggcttcggtgagggccacgctctacatggcggcgctcgtcgccacccgccacaaccccgtcatcaaggagttctaccaaaggctcctcgaagccggaaagcccaagaaggtggctctggtggcgtgcatgaggaagctgctctcgatcctcaatgccctgatgcgcgatcaagctatttggaggtgtcctcatgccctgactccttgacattcaagacggttg

SEQ ID NO: 4662 - DNA, 1197 bp, unidentified
  source 1..1197: mol_type = unassigned DNA; note = element_7189b12
  misc_feature 1..4: note = core
  misc_feature 5..221: note = LE
  misc_feature 222..1175: note = CDS
  misc_feature 1176..1197: note = RE
  misc_feature 43..209: note = bridgeRNA
tcatcctatgtttgcagatatataattaatttagaagattaattaaaagaaaagaaaggtaaagaaaaaaactatagtttgtcattagtctaaaagacagtacgcaatgcaagttcctttacctttactacaaaaacttggacagatcattaggttataaaaacctgtattaaggatagataagttaatgtagtgttcttttcctttataaaactttttgtatgtgtaaatttataggaattgacattagtaagcaaacctttgatgtaagttttttagaagacgaaaaatggcaacatcaagtattagaaaacaaaccattaggatttaagaaaatatccaagattttgaattcagaagactgggtagtcatggaagcatcgggaagttattatcttccgttggcagaatatttaacggaaaaaggatttaaggtaagtgtagtaaatcctctagtaataaagagattttcgcaaaccaatctgtaccgggcaaaaaccgataaaaaagatgcaaaaaccattgcagaatatgcagaaaagtatgaattaaagaaatggaatccagagagtgaaaatgctaaaaaacttcgccaactctatacaagaatagagatgttgagaaaacaagttcatcaaaacaaaaggcaactggaagccttttcagcgagtggatttttggataagattttgaaaaatgaaatcaatagttccgttagatttttagaaaacaaaatcaaaaagttggaaaatgaaatgaacagaatttctttggaagaatattcagaaactatggaaaatctacaaagcattccgggagtgggaaaacaaacggcaatgatgatgtgtctaataaccaataattttgaaaaatttgagcattacaaacaattaattgctttcgtaggctttagtccaagaatttatcagagcggaaagagcgtgaaaggaaaagggcatatttgcaaaatgggaaaatcacaaatcagaaaactgctgtatttatgtagttggagcgcaaaaagatggaataaaacctgcaaggaaatgtatcaaagattgaaagaaaaaggaaaacctgaaagagtaataaaaatagcaattgccaataaactcatcaaacaaatatttgctattggcaaaagcaaagaaaaatatcagccaaatttttgttaaattatttggaaatgaacacaga

SEQ ID NO: 4663 - DNA, 1210 bp, unidentified
  source 1..1210: mol_type = unassigned DNA; note = element_718ccbe
  misc_feature 1..2: note = core
  misc_feature 3..376: note = LE
  misc_feature 377..1207: note = CDS
  misc_feature 1208..1210: note = RE
  misc_feature 40..195: note = bridgeRNA
tcctttagattagcagaggataaaagttactaactttagagaaagataaagcatttaattaaactaagagtgcctccgaataagattcatgggctgataaagaattaaatgctttattcatttaaaactcaaatagaaatacgggattgaggcccattataaggagttgagtaaaaatgaaaaatctcttttcccttttttaacctaaacccaaagttatggaaaaagtaataattggcattgatatcagtgcaagaaccttggacatctgcaaaaaagaagacaaaaaaaagattttttcaccattagcaacagtatttttgagatcaaaaagatttttaaaagtctaaaaaagtattctcaggtaactattgccatggaaaacacgggacggtataattggtatatttatgaggccctaaaggatttttcttatactgtttttgttatcaatcctcttcatttaaaaagaagccaggggctggtcagggggaagaatgataaaatagattcagaaagaattgctgattttgcttcaaaaaatcaagaaagtcttaaatcctggaagccggattcagaaagtattgagaaagtaagattcttgttttcagaaagaaattctaaggttaaactcagagcaagtttattaaagcagcaaagtaattataaactaatgcaatccaaattagccgaagaattattgaagatgaataaagaagaaatatcgcttttagaaaaacatattgcaattttagaaaaggatatagaaaatgtaattgcttcacatcaggatcttaagaaaaaaagtgagcttttaaaaagtgttccgggtataggaaaagttttatgctggatgatgttaataaaaacaggaaactttgaagagattacagaacctagaaaacttgcttgttattcaggcgttgttccatttgatcatcaatcaggaacttctataagatacaagcctaaactatctttctatgctgataaatcattaaaaagtatacttcatatggcagcaatgagcgctataagactagaaaatgatcttagagaatattatttaagaaaggtagctgaggggaaaaataaaatgctggtactgaataatgtaagaaataaaattattcatagggcttttgccgttatcaataaacaaaagccctatgaaaaaaattatataaataatttggtaacgtcatagaaa

SEQ ID NO: 4664 - DNA, 1211 bp, unidentified
  source 1..1211: mol_type = unassigned DNA; note = element_71910ba
  misc_feature 1..2: note = core
  misc_feature 3..210: note = LE
  misc_feature 211..1038: note = CDS
  misc_feature 1039..1211: note = RE
  misc_feature 34..200: note = bridgeRNA
gtcgtacatttgccataagttaaacaattgaattatttttacacccttaagcatggaataagacagacgctatgttggttttagaaaccgttttacacgttccgtccccatgctttacatcttaaaaccggacagttcgttaggccaagcagagcccgtgttcgcgacgatggtttacaagatgtagttatcacttaaattctttcagttatggtttacatcggtatcgacatcagcaaaagcagtttcgttgcagcttatccgtcagtgaacggttatcgtacccagacttatccgaacactgttgcaggagctcgcaagttcattgctacgctctctgtcgcagagcatcactgcgtcatggaagccacaggtaattacgggtttctgctgctgtacctgcttcatcagagcggtattgccgtcagtcttgtaaatcccaagcagatcaagcatttttcccggatgataatggctgttaccaagactgacaagaaagacgcctgcatgatcgccatgtacggagagaagatgaatcctcccatctacaaaatgccgtcgcaggcaatcctgctgctcaaacagaagaggaccgtaatccgtcagttgcgtaaacaactcgttgcttcaaagaatctgcgtgaatcgcttgtcgtactgccttatcgggacaaagcctgtctacgggcattggacaagaccattgactttctgaccaagcaaatcgaacaactcgaagcagaactggcagagatcgcatcatccgagttcgacaagcaactcaaagccctgacatccatcaaaggaatcggcattacgctcgctacggcgctgattcttaccaccggaggctttacctacttcgacaatgccaagcaactgtcccgcttcatcggtatatgtcccacctatcaacaatcgggaacatccgtaaatatcaaagggcatataaaccgaaatggcgatgaacacttgcgatccttgctttatgtcgcatcatggaccgcattacgttacaagaatgctatctccgattaaaggcaaatggaaaaccatcgaaagtcgctctaatcgcggtggtcaacaagctcgtcagacaagcttttgccattgctacaaccgactcgacctacatcgacgggtttgtctcggctaaaaaataatctccagttcattttttttatctttttacttgttttttaatacagttc

SEQ ID NO: 4665 - DNA, 1340 bp, unidentified
  source 1..1340: mol_type = unassigned DNA; note = element_7195ae1
  misc_feature 1..3: note = core
  misc_feature 4..77: note = LE
  misc_feature 78..1097: note = CDS
  misc_feature 1098..1340: note = RE
  misc_feature 1114..1329: note = bridgeRNA
tgatgatgtggacgccgccgacctcgcaactgcgtgtattgtgcttagaaagagtggaactgggaaggagtatcgaaatgcacatacaaacaataggcctcgatcttgcgaagagcgtcttccaggcccacggcgtggatgacgccggcaatactgttctggcgaagaagctgcatcgcaagcagatgatacccttcttctccaaactcgcaccgtgtctgatcggagtggaggcgtgtggagcggcgcattattgggcacggacgctcatcgccatggggcatgagattctaataatgccgccttcttatgtcaagggatatgtgaagcggggtaagagtgacgccctggatgccgaggctatctgcgaggccgtgcaacgtccgacgatgcggttcgtgccggtcaagaccgtcgaacagcagggcattttgatggcgcatcgcaccagagcgttgcttgtgcgccagcgtacgatggcagcaaacgcattgcgtgcgcacttggccgagttcggattcgtcgccaacccgggtgtcgccaatctggtgaaactggcggatcaagccttcaccgatgaggttctgcctgcctacgcccaccgggccctcgaaatcctgatccggcgaatggcggagctgactgaagagatcggagagctcgatcaggaattgcgtacatggcatgaaggaagtgacgtcaaccgaaggctcgccgccatccctggcatcggcgtcatcacagcaagcgccatcgccgcgacggtgacagacaccgatcagtttcaatcaggtcggcaattcgcggcatggctcggtctcacgccgcagcagcaatccacgggcgggaaaaaccggctcggtggcatatcaaaacagggcgaccgatacttgcgacggttgctggttgtcggtgcgacagcggtcatgagacatgcgaaacgaaaaccgacacctctgacggactgggtgagcaggttgttggagaaaaagccgttcaggctcgtttccgtcgcccttgcgaacaaacttgcccgtatcgcatggacgcttctcaaacgaggacagatttacagaccttacggattgtccgcctgacagtgaacaaccaaaccgaattggcaatggcagtcaatgatgcgtaacgatcgagccaatggcgaggcaaacccgtctgattcaatgcacttcaaaagtgcgccaacttgatcagggacctcgccggcggatttccatcagggccagcggcaaaatcaactccgcacaaacaggccggacatatgaaagcaaccgatctacgcaaaacgataaaaagtccttgccataggcggcgtccacata

SEQ ID NO: 4666 - DNA, 1370 bp, unidentified
  source 1..1370: mol_type = unassigned DNA; note = element_7198600
  misc_feature 1..3: note = core
  misc_feature 4..73: note = LE
  misc_feature 74..1108: note = CDS
  misc_feature 1109..1370: note = RE
  misc_feature 1081..1358: note = bridgeRNA
tgatggggtggacgccccccgacggcctttatggcaaagtggaggtgttgaagcaccactagaggaggcgtccgtgtcacaggttaccacgattggtctggatatcgcgaagaacgtttttcatgcccatggcgcggatgagcgtggagcgatggttttcagtcgcaaactgacccgagccaagttgctcgacttctttgccaagcaacccacgtgtgtagtcgcactcgaggcatgtggcggtgcgcatcactgggcacgcgagttagccgcgttggggcacgacgctcgactgatcccgccatcctacgtgaagccgttcgtgaagcggaacaaaagcgatgccttggatgcggaagcgatctgcgaggcagcgcagcgccccggtatgcgctatgtggcggtgaagtgcgaggagcaacaggcggccggcctcgtgttccgcacgcgcgatctgatggttcgccagcgcacgcagctgatcaatgcgatccgcggtcatctgagcgaatatggttgggtcgctcctcgcggaacggcgcacatggcgatgttggccgatcttctcgaagaagaggcaatggccgccactcttccgcaagcggcgcgaccaatgttcaagctgatggtcgagcacctgaatgaactcgaaaagcgcgtcgcagagttggaccgcgaaatcgcccgccgtgcgaaggaagacgaagatgcccggcggctcatgaccattcccggtgtcggtccgatcgcggcaacggcaattctcgcgctcgcaccgccgatcgagactttccgcaagagccgcgacttcgcggcatggctgggtctgacaccgcgccagcactcaaccggtggtaagcaacgccttggcagcatatcacgaatgggcgaacggagcattcgacgactgctgatcatcggcggcagctcgatagttcgccaggcaagacgcttcggggcgccggaaggttcgtggctggaacgcatgctggctcgtaagccgcgcatgctggtctcggtggcgcttgccaacaaaatggcgcgcatggtctgggccctgcttaccaagcgcgaagatcatagagctccggcggccctcgcggtgtaagtcgcgaacggcagccagaggcgtcggaggacgtaggcgatcgaaggagggtatggcacaaccgtcggcgagacggggctggaagaaccagagaatggcagggcgctagccaagcgcgcaaagctgaaatggatccagtccgcgaactcccatactggcccgcagctatggtgctgctcatcgaggccggacagatgacagcatccgactacgtgccaacatacccgaatttattgcttgcatcccatggggcgtccacaga

SEQ ID NO: 4667 - DNA, 1397 bp, unidentified
  source 1..1397: mol_type = unassigned DNA; note = element_71a9e2b
  misc_feature 1..2: note = core
  misc_feature 3..84: note = LE
  misc_feature 85..1122: note = CDS
  misc_feature 1123..1397: note = RE
  misc_feature 1140..1384: note = bridgeRNA
tgatgtgtggaacggccccgctatcgcggcatcactgtgccaaagtgtggtcgttgcgacaaccacatgaaagggagccgttccatgcagcagattaccaccatcggtctggatttggccaagcaagtatttcaagtccatggcgctgaagcggacggcagtcctgtcgtcagccggaagttgcgtcgggctgacgtgctggggttcttcaagaagctgtcgccttgcctggtcgggatggaggcctgcggaggggcgcatttttgggcgcgtgaaatcgccaagctcggtcacgacgtgcgtttgattccgccatcctacgtaaagccgttcgtgaagcgtggtaaaaccgatgctgccgatgcggaagcaatctgtgaagcggttatccgcaagacaatgcgatttgtgcctgtcaaatcggccaaccaacaggcggctgcgatggtgttgaagactcgcgagcttctggtccggcaacggacgcaagtcatcaacgccctgcgcgcccatttgtcagagctcggcattatcgcaggcactggcccggcgaagactgcgacattgatcgagatcgtgcgtgacgaggaggacgctcgcctgccgcctgcggcccgcttcgctctcagcgaacttgccaatcagattgagtggacgaggaagcggatcgacaagctcgagcgtgcgattgtcattgaggcaaaacgtgacgaggacatgcggcggctggtaacgataccgggcgttggagtgatcatcgcggcctccataaaggcgctcgttccagaccccaacgggtttaagtccggacgtcactttgctgcctggcttggcttgacgccaaggtcgcattcgagtggcggcagggagcgcctcggcagaatatcaaagatgggcaattcaacgctgcgctccttgttgatccttggagcaacatccgtcttaaagcacgcacggcataggacggatgcttccacatggttggcggccattctggcacggcgccccttcaaggtcgtcgccactgctctcgccaacaagatggcgcgtattatctgggctcttctcaccaaaggcggaacatataaatctggtttggcaatcggcacggcgaacgcctgagtcgagtgacaaccaggacaggctgcccggcttagacgccggcaggggcgaggtgcaccaagcagacgatgaacctacgggacgaaatcccgaagcgagagaggccgtctggtacaatgcgcacaaagcgcgtttttttgatcagccactcgcatcgcggacttcatcaaggccagcggtcaaaggccgcattaacaggccgtacatatgaccgcaccgtcccaacgtggtgaaacgtctgaaaaaagcacttgcctgcagggccgttccacata

SEQ ID NO: 4668 - DNA, 1310 bp, unidentified
  source 1..1310: mol_type = unassigned DNA; note = element_71b036a
  misc_feature 1: note = core
  misc_feature 2..66: note = LE
  misc_feature 67..1083: note = CDS
  misc_feature 1084..1310: note = RE
  misc_feature 1084..1304: note = bridgeRNA
taattagatggtacgcccctccattccactaaactcgacagtatcgggtaaggaaaggtgaccatcatgaacagcactcatattattggtatagatttagcgaaacatgtctttcatctagtcggccatgattgttcaggaagagagactttccgaacgaagttaacccgacagaaaacgcttcagttcctttctgctcacgatgctgccattgttgtaatggaggcgtgtggtggttgccactggtttgcacgaaaatgtcaggagtatggacatcaggttaagttgatccccgcacagtacgttaaaccatacgtcaaaacgcacaagaacgacttcattgatgcagaagctattgctgaagcagctacgagaccaaagatgaggtttgtttctccgaaaagtgaacaggctcagatcagtgtagttattcgcaagatccgatctggctatataaaagaaagaaccgcctgcatgaataggattggctccatgcttctggagttcgggatcagctttccaagaggtcatcatcagatgaagaatctttttcaatggttggctgatcataacgaagtcgtgccgcccttgctaatcctcgagctaagaaaccagcttgattactacaacctgctaaataaatggattaaagaacaggaagaaaagctagatcgtgtaaacaaagataatgagctgatggctattttacaaagtgtaccaggtatagggccaattaccgcttcctgctgtttatctgctgtcgcagatcctcaagactttaagaatggtcgcaactttgctgcttggctaggcttagtcccataccagtatacgacgggaggaaagccacgaatgcttggggtctccaagcgtgggaataaagagcttcgcgaactatttattcatgctgcacgagccgtcatgtggagagatgtgtcagcagaaaagtattttggctcttggctaatcgagctaaaacggcgaaaaccatttaatgttgctcttgtagctttggcaaacaaactcgcgaggatagcttggtcagttatgatgactcgcaagacctttgagataagaacctaattagatttgcagatgatatttaaagatgacagaacagttagaccaccagattgaagaccttgtggacataacagcattcatagtgctttcacgtttttgaggacaatctggcgcggatctcatcgtagagctgaggcttatgattagtctctatcagactctgaatacattagcgcaaatcagctccgttattatttatcaacttgcaaaacggggcgtaccataca

SEQ ID NO: 4669 - DNA, 1393 bp, unidentified
  source 1..1393: mol_type = unassigned DNA; note = element_71b3644
  misc_feature 1..2: note = core
  misc_feature 3..82: note = LE
  misc_feature 83..1120: note = CDS
  misc_feature 1121..1393: note = RE
  misc_feature 1166..1388: note = bridgeRNA
taattggatggactcgcccctcgccgaggcgtctgggcgccacggtggcacgctatggccaacgacagcgagggacgagcccatgaacaagcttacgccgacttatgtgcgcttggcggtggatcttgccaagcaggttttccaggtggctggtgaggacgccagcggccgggttgtgtacgaggaacgagtgaaatcccgtgccgcgtttaccaaactgctggagggcctggatccaaaggtcgaggtgctgctggagaccggtccgggcgcccaggcatgggcccggctgattcagggtgtcggggccaaggtgcggattctgccggcgcagcgggtggccgagcaccgcagcggcgccaagaatgatcgcaatgattgcctggccattctgcgtgccggtcgtgacgagatgctccatgacgttcctgtcaaatcgatcgaggcgctcggaatgcaggcccagcaccggatccgcaccggttacatacggcggcagacgttcatcagcaatcagctgcgtggcctgctgatggaacatggcattgctgtgtccaagtccaacgcagcgctgtcgctttgggtgggccgcatccagaccgacaccagctatccgatcccgccgatgctgcgcgaactgattgcagatctgtgggctgagtgggggcatctggcgcagcgccgcgagcggatcgacaagcagctggaacagactgccaaaagcgatgaactggcgcgccggttgatgaccatccgcgggtttggtccgatcatggtcacggccctgatcgccaagcagagccagccggagcgatttcccaatgcccgtcagtttgcggcctactttgggctggtgccggaccagcacagcagcggcagcagggtgcgtctgggtcgaatgacccggcggggtgacgcctacatccgaagtttggcagtaaccggggcccagtcggtcctacaccacgtcaaggccgatgcgaccgagaccgatgacaaacgattgcaacgctggtgccgtcagcacggcaaaaagggcgcggccatccgcctggccaaccgaaatctgcgcatcgcatgggtagtgatgaccacccagagcgagtatcgccgccaataaaaaggacgagcagaacagaccaaaaaccgtttccgccaccgggtgcccagcacccaccccgctgctttgaaaacatgggagacaggtcagaccgtcgcgacatgatgcctacgaccctaccggccctcgaggcctcctggtaatcggcagatcgcgagctcaaccaattttggccggcaggcgtacgcgcccgccatcaaaggcctgatacatagatgcagccggttcccggtttcgaaaaagcagcttgacgggtgggggcgagtccataca

SEQ ID NO: 4670 - DNA, 1346 bp, unidentified
  source 1..1346: mol_type = unassigned DNA; note = element_71bece9
  misc_feature 1..2: note = core
  misc_feature 3..311: note = LE
  misc_feature 312..1103: note = CDS
  misc_feature 1104..1346: note = RE
  misc_feature 1118..1332: note = bridgeRNA
gatggggtggatggctcccgtccccggcgtcgcaatgcgccatactgcaggtgtcagaacctgcaactgagaggagccacgccatgcaagttagcactgtcggcttcgacctggccaagaacatctttcatgtccacggagttaccgcgatcggagaggttgccttcaaccgacctttgcgccgggcgcaggtgctggcgttcttcggatgactgtcgccctgcctcatcggcatcgaagcctgcgcatcgagccaccaccggggccgcgagcttgcgaagctcggccatactgtccggctgatgccgccgatgtatgtcaaaccctgcgtgaaacggggcaagtccgacgctgtcgatgcagaagccatttgcaaagccgtgacacggccgacgatgcgtttcgtcgagatcaaatccgaggaccagcaggcgctcttgtctctgcaccgcgcacgcgacttcgtggttcgacagcgcacccagttgatcaacatgctccggagcctggccgcggagttcggcatcgccatcgcccggggcgtcgcgcgggccatcgattttgcgaaagggatcatcgagggcaagcagccggggttgcccgagctcgcccgggacgtcctgcgggtcctcagccgacagctggtcgatctgcacaatcgcctcggctggtacgagatcacgatgcgtattcaggcccgcctcagccgccaggcgcaactcctgcagaccattcccggcgtcgggcccgtcacggcctcggccgtggccgctacgatcgggtcgggccgccaattccggagcggtcgagagtttgcggcgtggcttggcctgacaccgcgcaatcattccagcggcggtaaggagcggttgggaaagatcaccaagatgggtgaccgatccctgcgccagcttatcgtcgtcggaatgacatcgcgcgtgcgacaggtcgccaatcatccggaacgcgccgatccatggctgacgaagctgttgcagcgaaagccagcccggctcgcgaccgtggccatggcaaacaagacggcacggatcatgtgggccgttctgaccagggacgcgccctgcaaaccacacgcggcgtagcccgccgagtgctcgagagatagcaagaccgacgatgtgatggtgtacccttcagccgcaacgatcaggacgctccgccgaatgtcccgggcgaaattgcccgcaaagcagttaggaacctgatctgcggatcccatcagggccagcggtgccaaccgcacaaacaggccggacacaagaccgcttctgaaaaggtacacgcagtctcatttacatcttgctaggcgggagccagccacacag

SEQ ID NO: 4671 - DNA, 1166 bp, unidentified
  source 1..1166: mol_type = unassigned DNA; note = element_71bf443
  misc_feature 1..2: note = core
  misc_feature 3..200: note = LE
  misc_feature 201..1163: note = CDS
  misc_feature 1164..1166: note = RE
  misc_feature 3..176: note = bridgeRNA
cttgtatggttagacttgtaggggtggtgggactaaaagccagcatctgactctagccagtacagaccgtgggagacttcgccccaccccttcaccaaagcgccgataaggaatgcatcggccatgaccgacgatagaagcaagccagcgcaacggtgaagccccgacaagcccgtaaaccctaacccggagcttttctcatggcaatgactgtctcgcaatcaatcattggagtggatgtcgctaaagccgaagtagttgtttatcaaagtgaaactgctgaaacaaagatcgtatcgaacaagaaaagcgagctgaaggcatggctgaagtctttgcctgcgggcagcgccatcgcaattgaagccaccaatatctatcacgtggataccgtcaacttggctcattcgatgggccatatcgtttacgtgattgatggatatcgccttagccattaccgcaaaggcacaggtggtcgcgctaaaacagacttcagtgatgcgcagttgctggctcgctacttgaagaatgaacaggctgatttacgcgcctggaatccgccgccgaagatttataccaagcttcaaagcttgctgcgtcgacgcgcagcgctggtgaaaatgcgtgttgcactgaatcagagctgggcgggcgagccatcactcaaggcctcgtccaagagcatttcagcgtgtcttgataggcatgaggggctcattgagaaaaggatattagatgctgttactgaggcggggcttttgcatcaggtcaagcgctgccaagccgtcgagggcattggttttctgacagcggttgccctggtaatggcgtttcagcgaggagaatttgaaagtgctgacgcttacatcgcgttcttgggaatggacttgagagtgtccgattcagggcaaatgagcggacgccgctcattgagcaagaagggagattcagagatacgcagattgctgcataacgcggcgtcagcaggtatcaggtcagaagcctggaaacctttatacgagggttatctggccaggggcctgaaaacgactcaagccccggtcatcattggccgcaagctggcgcgcatcgccttttcgctcatgaaaaacctgagcgaataccagtcaaaagcggttttgggggcttccccaaaaccatagaat

SEQ ID NO: 4672 - DNA, 1386 bp, unidentified
  source 1..1386: mol_type = unassigned DNA; note = element_71c5ca8
  misc_feature 1: note = core
  misc_feature 2..70: note = LE
  misc_feature 71..1102: note = CDS
  misc_feature 1103..1386: note = RE
  misc_feature 1145..1381: note = bridgeRNA
caatggtatggaccccgccctcgcggcggagtgaaatctcggacgtaaactgcagcgaaggaggaatgtcatgcagatcgttcggatagggttggacttggcaaagtacgtgtttgaggttcacggtgtcgacagccgtggaaaagctgttgtgcgaaagacattgcgtcgcgatgcagtgtcccacttctttgccaatctgccaccgtgcctagttggcgtcgaagcctcgaacggagcgcattattgggcaaaggtgctgaccgaccttggtcatgaagtgcggctgatcagccctcagttcgtgacgccctatgtcaaatccaacaagaatgaccggaatgatgcagaagctatctgcgaagccgttggccggccatccatgcgcttcgtgccgccgaaatccgccgaccagttggcggtacaagccattcatcgcattcgccggcgactggttgcggatcgggtccggctcgtcaaccagatccgcggtctcctctctgagcatgggattgtcattgcccgtgatatctcgcaactgcgacgccgtctcgcggacattgtcggcaggagcgacgatggcttgagcgaactcgtccgctcgcttatgagggacctacagacggaaatggtcgacctcgatctgcgaataacgtcctatgaccggcgaatacgggagatcttccgcaacagcgagccgtgccagcggcttgggaagatcgagggcatcggacctgtcacggcaacagcgttgattgccgctgtcggcgatcgatcctgcttcaagaatggtcgccagttcgccgcatggctgggcctcgtaccgaagcagcgatcgagtggtggtcgaactcgattatatggcatcagcaagcgtggtgaccgctacttgcgtactctgctgatccacggcgctcgagcagctttgggtcgagcaggcggcaaacaggatccacggagcctctggctcaataagttacggcaacgccgacatcccaacatagcggccgtcgcacttgccaataagaatgcacggatcgtgtgggccatgctcgccggcgacacatcctacgaaccggcgccgacggtgaaggcaacctgaggcaaggccacaaaaggaagaaagcaaaggaggtctcaccccagcaattgcagcaaatggcaggagatggcgaaacggtcacaccgtcgcttcccaaacctggtgtgtggaccggcatggcttcggccaatgtctcggagccattgaggtagaagcgggcgaaaacccatcgaggctcgcggcgaaaaatagtcgagccgcatcaggaagccggatatacgtcagcagttgtggcctttgatcctaatccagccatcccgttgcaatcgggcggggttcatata

SEQ ID NO: 4673 - DNA, 1521 bp, unidentified
  source 1..1521: mol_type = unassigned DNA; note = element_71c8591
  misc_feature 1..2: note = core
  misc_feature 3..239: note = LE
  misc_feature 240..1403: note = CDS
  misc_feature 1404..1521: note = RE
  misc_feature 3..218: note = bridgeRNA
cttgtataatgaacacatagtaattagtgttctttttttctttttactatatgataatcataggcttgtggattggttcttactcctatagcttagactattttattaaggctccaaccacatttctatgtttatttgtttatgagttagataacgctagacgttttatctcgtgcaaggatacgatacatagtttttgtggataaccacagccaatttattttaaaggatgtgtttttatgttgcttattggtatcgatgttgctaaggataagcatgattgttttatttgtgattctgatgggaatgtgattagagatgtctttaccttttccaatgatagggaaggcttcaatcttcttttatcttttatgccaacatcttctgaaaatgtaaaagtggggcttgaagctactggtcattacagcttaaacttaatcaattttttgattgataatggctactccccagtagttttcaatcctttgcaaattaatcttttcagaaaagctcatacgcttagaaagactaaaactgataaaattgatgctaagttaattgctcttatgctttcttccagtgatgctaaaccccacttggatttatcttaccatgttacggagcttaagtcactgactagatatcgttctagacttaaagatcaattagctaggctcaaaatctcgcttgctagaatcattgagattgtgtttccagagcttgaggattgcgtttactcgattaatcaaaaatctactatggcccttctttatgagttcccttcaaaggaattaatcgcaaatgctcatcttactaggcttactaatctccttaaagataattctaaaggaagatattctaaggacaaggcgttagaaattagaaatgttgcgagcaattctattggaactagttctgatgcaagtagttttgagcttgttcaaacgattgatatgattaatttctattcttctaaaatggatgaactagatgctaagatagaagatattatgattgaattaaactctcctattctatctatccctggtatttcttacaatcttggttctattattttagctgagattgttgatatcaatcgatttgatactcctgctcagttacaagcttttgctggccttgatccaaccactcatcagtctggaaaatttatcgctacgggtgtttctatggttaaacgtggctctccttatcttagatgggctatcctcaatgcttctaggttaatagctatgagagatccttgctttaaagattattatcagggaaagagaaaggaaggtaaacaccactacgttgctcttacacacgttgctaaaaagctaatcagagttatatttaaattacttaaaacaaacactcaatttgttcctcaaacataacttcatttttaaaattgccttttttcaaggcttatttgccatgctcatttttattagattgtcttttgctatctttcataaaattcttttgttttctacttgacttcatatagttagt

SEQ ID NO: 4674 - DNA, 1172 bp, unidentified
  source 1..1172: mol_type = unassigned DNA; note = element_71cb72b
  misc_feature 1..2: note = core
  misc_feature 3..206: note = LE
  misc_feature 207..1160: note = CDS
  misc_feature 1161..1172: note = RE
  misc_feature 3..182: note = bridgeRNA
cttgtatggtaggacttgaaggggtggtgggacgacatgccggcttctgactgttccgagcagtacagaccgtgggagacatcgccccaccccttccaccaaagcgccgataaagaatgcatcgtttgcaagcgacgatagaagcaagccagcgcctcttggtgaaaccccttcaagccgaaaaaccataacgtggagaaccgcccatggcaatgcaggtaagcaagttgatcgtgggtgcagacgttgcgaaagctgagctggttattcatcacgacggtagtgatgcgctgatcaaactgaagaacgcaaagcccgagatcaagcgatggctcaaacaacagccccgcaataccgccattgcagttgaggcgaccaatgtctaccacttggacctggtcgagttagctcatggtgcgggtattgaagtctatgtaattgatgggtttcaactgagcaattaccggaaaagtgtgggtgggcgagtcaagaccgacccttccgatgccaggttgttgtcccgtttcctgagaaatgaaggcgaggaccttcgtccgtggagcccacctcccgccgtctatggcaaggttcagagcctgcttcgacgccgggcagccttggtagcggctcgtactgcaatgacgcaaagctgggccaacgaaagtctcctgaagagcgctttcgacgcgttcatcaaatcgatagaccgcctggatctgttgatacagaaaaaacttaaagaagtgctccgcgaagccggactgcaagaacaagttgcccgctgccaagcggtggaaggtattggttttcttaccgccacggcattggtcatggcctttgttcgaggtgagttcagaagcagcgacgcttacatcgcatttctgggaatggacttgcgggtgaatgactcgggacagacgaacggacgtcgtcgcctgaccaaacggggatgctctgagatccgccgcctgctgcacaacgcggcaatggctgcgagcaggtcagcggcttggaaagatatttacgagcatcatcggaacagcggcaaagcaaccactcaagccctggtcatcctggcccggaaactcgcacgtgtggcattcgccctgatgaaaaatcaggacgaatacgtcaccaagggcggcaaattggcttgctgaaaaccatagaat

SEQ ID NO: 4675 - DNA, 1236 bp, unidentified
  source 1..1236: mol_type = unassigned DNA; note = element_71cfc57
  misc_feature 1..3: note = core
  misc_feature 4..233: note = LE
  misc_feature 234..1214: note = CDS
  misc_feature 1215..1236: note = RE
  misc_feature 20..209: note = bridgeRNA
gctattagtttagctttctatctttaaagtgaatttaatcatattgaattctgaaaaaccagaagagaaaggtgaactatttcgactattggatatctagatccatgctgagcatcagtcctttcccttcttgggttttcgataccatttagaatgtcaagctctcaggcttattaatagcgttggtacacgaacccattggtctttcaggtttcaatagcaaaatcaaatctatgaaaaaactagtagtagggatcgacatctcaaaggacacgctggacttttgcatccttgaaagcgagggcgtcaccatcaatggtcgtggtcagctacagaacagttcaaagcagatcaaaaaatggctggacggcttcaacagggagcaggctcgttttgtaatggaacataccgggcactacggcatggaactcatacagagccttgccggagcgggacatgacttttatctcataaatcctctcgaactcaagagatccatgggcatccagcgcggcaagagcgatagggtcgatgcctatcgtatcgcagaatatggcatcacgaaccggcacaagctcacaccctttgtcctgcccaccgagaacctggtcaggctcagggcgctcatgacggcccgacagcgatatgtcaagatagccgtccaggtcaagaacagcatcagggcaaacgagatcctgggaaggacggtggatgtaaaaagcctgctgcgggaagaaagaagacagctcgcacaggtcgagaggacgatcgctagcctggaacgccagatgaacgaggccattgcgtccgaccaggcaatcagacagacctatggcaagataacgaaggtcacaggcgtcggcccgatcatcgcaatgaagtgcatcgtcgagacagacaacttcaccagattcaccgatccaaggaagttctgctcgcatggcggacttgccccattcccgtaccaatcgggaagcagcataaagggcaggaacaggacgcaccatctaagggacaggacgctcaaggcattgctgatcaggggcgcgacaacggccgtccgacacgacccgcaactcaagaggtactacaacagaaagactggtgagggaaagcaccacatgagcgtaatcaatgccgtggccaacaaacttgtgctaagaatatttgccgtggcaaaaagggacgaaccctttgtgaaattagctgcctaaaaacttgtatttatcttagaat

SEQ ID NO: 4676 - DNA, 1429 bp, unidentified
  source 1..1429: mol_type = unassigned DNA; note = element_71d709a
  misc_feature 1..2: note = core
  misc_feature 3..91: note = LE
  misc_feature 92..1132: note = CDS
  misc_feature 1133..1429: note = RE
  misc_feature 1195..1425: note = bridgeRNA
ataatggaatggacgcccactaccctaaacggcatcaaagtgccaaagtagtggtgcagtaaaacccaccaaatagagaggagcgtccatcatgaagattactacgataggcatcgatttggcaaaggaagtgttccaggttcacggggtagatacgcacggcaaagcggtgctgcgcaaacaattgcgccggggcgaaatggcgaaattctttgccaatctggagccatgcctgatcggcatggaagcctgcggtagtgcgcaccactgggcgagaaagctgggcgggttcgggcatacggtaaagttgatggcgccccagttcgtcaagccctacgtcaaaaccaacaagaacgacatggcggatgcagaagcgatctgcgaagcagtgggccggcccaatatgcgcttcgtgccgatgaagaacgtcgagcaacaagcgatcctgtccgtgcaccgggcgaggcagggcttcgtcaaggccagaaccgcgcaagcgaaccagatgcgcggcctgctttccgagttcggcatcgtcatcccgaaagggatcgcgtcgatccccaaaaggatggatgacatcctggaagatggggaaaatggcttgccaggcaccatgcgccagttactgcagcggttgtatgaccatttcaaggaactgagtcgccaagtgcaagaactggaattgcagatcaagcagtggcatcaggaaaatgaagccagcaaaaaactggccgccatacccggcattggtccgatcactgcgagtgccattgtggcgacggtggggaatgccacggagttcaagaatggcagacagatggcggcatggatcgggttggtgcccaagcaacactccagcggcggaaagcagacattgctgggcatcagcaagcgcggtgacacttacctgcggactttgctgattcacggtgcacgcgcggtgattcgctttgcggagaacaaggctgaaccggatagctggctgcgcaagctgatggcgcgacgcaacaaaaatgttgccgcggtcgccttggcgaacaagaacatccgcatcatatgggcgttactgaccaaaggcgaaatgttccgccccgatcaccctacggcagcgtgcgctgccgcagcatgatcgaagcggttgaaaaaaccgtatcggaaacggtacgcatcgataacgagtttaaggagcaagacttccaccgattgcacaggcaatcatgaaatgatggcgagacaggtcagaccgtgagtgaccaaaccagcgtaatccatagcacttcgagtgcgagctaatgatctggcgttactcagcgtattccatcagggatagaggcaatgcgcctcacaagaaatccggatgtatggctgcaatctttacctactcaaaatcatcaattgaaagcttggcaaaagtgggcgtccatgt

SEQ ID NO: 4677 - DNA, 1427 bp, unidentified
  source 1..1427: mol_type = unassigned DNA; note = element_71f30f7
  misc_feature 1: note = core
  misc_feature 2..109: note = LE
  misc_feature 110..1144: note = CDS
  misc_feature 1145..1427: note = RE
  misc_feature 1188..1419: note = bridgeRNA
caatgggatggactcctcctcacccttgctgctttaagtagcaattcggcgtcaatgcgccagaatggagttacgacacaaccattcgtgagatgagaaggagtccgacatgcagattacccgagtaggagttgatattgctaaatcagtgtttcacctctatgccgtggatcgccatgatcaagtgcagtgggaagtgaaactcaagcgaactaactggattgctgagctttgtgcgcgcgtgaaaccaggagcggtaattgccatggaggcttgtgcatcagcgcatcactgggcacgtgagttgcagcgacgcggctatgtagtgcgtctgatcgcggctcagttcgtgaaaccgtatgtgaagagcaacaagaacgaccgtgtcgatgcggaggcgatctgcgaggccgctagtcgacctggcatgcgattcgttggcgtcaagagcgtcgagcagcaggatttgcaggcgtcgcaccgggtgcgctcggagctgatcaagcaacgcaccgcgaaggctaatcagatccgagggctggtcggggagtacggggtcgttgctccagtcggtatcggacagctccggcgcgccattccctgctggttggaggatgccgagaacggactcggcgaatcgttccgagtactgctgcatgagctgcaagaggatcttctacggcttgacgagcgtgtctcggtgctcgatacccggatcgaacgtttcgcacgcgaggatgaggtcgctcgacgactgatgagtttgcgtggtgttggaccgttgactgcgacggcactctcggtggcccttggcgatggctcgagtttccggtgtgggcgcgacttcgctgcctcactcgggcttgtgccccgacagcacagcaccggaggacgcgatcgattgcttggtatcagtaaacgcggggacgcgtacctacgcacgctgcttgtgcatggcgcgcgcacggtgcttcaacacgcaaagacgcgtgaggacgaactcagtcgctgggtcatccagctctctgagagaaagcacgcgaacgtagctatcgtggcgctcgcgaacaagacggcgcgtatggcgtgggcgctcactcacgctggcgtcgattacgacccggcccgcgcagcggcagcatgaacgcctgaatcgcgatccggtaagcaacaccaacagaggtacattccacaacgattgcaaagcacagcgcttgatggcgaacaggtcgaaccgatgctgactcaacccggtttacacgtagggctctggagcccgtctacacgttaggaggtcagcgtgcgaatagcccattatggtcagatgcccgtgagaacggtgtcagtcaaagaccggatatacgtaggcagtcgtacttttgtccccagagaagcgaagtgcttgcaaacgaggaggagtccatata

SEQ ID NO: 4678 - DNA, 1214 bp, unidentified
  source 1..1214: mol_type = unassigned DNA; note = element_71f3d6b
  misc_feature 1: note = core
  misc_feature 2..212: note = LE
  misc_feature 213..1079: note = CDS
  misc_feature 1080..1214: note = RE
  misc_feature 34..203: note = bridgeRNA
tcttaagtttgtaatagttttaaattagacataaacaagaaagcacaaaagaacgggttaaggttattttataccgagaagcaacgacttcgtcaacattgaaaatccccgttcttttctacacagatttcgtacagttctaagaggcttttaagacctcgtttttaagtagtagaaactcgcgtagattgtcctttcaaaaaacagttcttatgaataaagatataacatattttggtattgatatcagtaaatcagtttttgatgttacagattctcagggtaattattaccaatttgataataaggtttcaggctttaaaaagtttttaaaatcactggattctacaagtcattgtgtaatggaagctacgggttattatcattatcagttagcgtattatttagttgaaaatgcagtgcaagtctctgtagaaaatcctttgtcagtaaaacgtttcattcaaatgaaattatcaaaaataaagacagataagagtgattcaaaaatgatatgtgaatatgccaagcatgttgaattaaagttatggtatggagattcaaaggagcaacaagaaagtcttcaaatcactagattacttagtgtttatacaaagcaaaggactatgttaaagaacaaaattcatggagaagaagttttaggaattccgagcatgtcagttttacgatccataaagcgaagtttaaagagcgttcaaaaagagatagaaacaatagaacgaaagctgttaatcttggtcaaaaaagaacatcaagatttattaactcgtttagaaaccattcctggaatcggcaagaaaacgtctttgatgttggttgttttaacggatggatttaaacgttttaccagcggtagtgaactgtgtagttattcgggtttaactccaatgattcggcaaagtggtagtagtgtaagagggcgagcacgcataagtaaaataggcaatgcgaagcttcgaaatttattatttatgtgtagtttcaatgcttgtaaatataacaaggcatgtaaagcaatttatgatcgaatcgtagctaagggaaagagtaaaaactagcattaattgcggtttgtaataagctcttaaagcaagcatttgccatagcaaaatcaggattaatatatgacgactcttatagaagtgtattggttatagattaagtgaatatcacttgttttttaccacagttct

SEQ ID NO: 4679 - DNA, 1457 bp, unidentified
  source 1..1457: mol_type = unassigned DNA; note = element_71f5f78
  misc_feature 1..2: note = core
  misc_feature 3..85: note = LE
  misc_feature 86..1123: note = CDS
  misc_feature 1124..1457: note = RE
  misc_feature 1222..1443: note = bridgeRNA
gatgaggtggatggctcccgctcccggcatctgagtgccacagtgggtttgctgtcaggcaacccgagcaaaggagccatccgccatgcagattaccaccgtgggccttgatctggccaagcggatttttcaggttcatgccgtcgacgcgtctggagacgttgttgtgcgcaagacactgcgccgatcgcaagttctgccgttcttcaccaagttgccaccctgcctgatcggcatggaggcgtgcggcacatcgcatcattgggctcgagaattgacggagctcggccatgaagtccgcctgatgccaccgtcctacgtgaagccctatgtgaagcgcggaaagaatgatgcggtggacgcggaagcgatttgcgaagcggtgacacgcccgaccatgcgtttcgtcgtgatgaagtcagccgagcagcaagcggccctatcgcttcaccgcacccgcaatcttctggtcaagcagcgtacgcaactggtgaatatgatccgcggcctgttggccgagttcggcatcgatattcccgaaggtttggagcgagcgcttaagctggcgcgccagatagccgcgaagaaatccacattggacgtaccggcaatggcactgcagattctgtgtctcctgtgcgagcaggtgctcgacacccatgcccggctccagaccatcgaccggtcgatccttgcccagcaaagaacgaatgaagtggcacggcgtctatcgaccatacctggcattggcccgatcggtgccactgcgttggcggcctcggttgctgatccgagtcagttccgctcgggtcgagagtttgccgcctggctcgggctgacaccttcgcaaaactcgagcggcggaaaggaccgtctcgggcacatcaccaagatgggcgaccggtacctgagaaagctccttgtgatcggcgcgacctctctgatccgacgggcaaggcataagcccgatgctgcggatccgcgcctcctcgcgttgctcgccaggaagccagcgcgcgtggcgagcgtagcgatggcaaacaagatggcccgcgtggtgtgggctatcatggcgcgcggcgaaacctatcaagcgcgtcatgctccgaaccttgcggcgtaagttgcgcagaagacgagacactgaagcagaaatcagatcgagccgatcaatcggctccatgaggttgtaagagcagatcgagccgatcaatcggctccatgaggttgtaagagcgacgcgatgtgatggcgagaccggtcaggccgggaacagggacaacccatgcgatgtcggaggcatcatagcctgcaaagcagattgggaccttgttcgccgaccccatcaaggccagcagcttcgaacggctgcatgaacaggccggacagaagactgcacccgaccaatgcgccagaacaacgaattacctcttgcaatacgggagccatccacagag

SEQ ID NO: 4680 - DNA, 1437 bp, unidentified
  source 1..1437: mol_type = unassigned DNA; note = element_7202f46
  misc_feature 1: note = core
  misc_feature 2..144: note = LE
  misc_feature 145..1167: note = CDS
  misc_feature 1168..1437: note = RE
  misc_feature 1205..1435: note = bridgeRNA
atggaatggacgcctccccccgtaagggctgctgatcactgaccgtgggggcgggcaaaggtagggtgggttctcgcaaccgacggcatcagatgtgccagagtggaagttgggcaacgaaccacttgaggaaggagaacccaaatgaactttactccggtcggtgtggatattgcaaagcaggttttccaggtgcactgggttgatccgcaaaccggcgaggtcatcagccgacagatccggcgcgccgcgtttctggagcatttcgccaatcgcacgccctgcctcatcggcatggaagcgtgcggcggagcccagcactgggcgcgtcggctgggcgaaatggggcatcaggtcaggttgatgccgggcaaggcggtcaaggcattcgtgattggcaacaagaacgatgtggccgatgcgcgcgcgatctggaacgcggtacagcagccttgcgtgagggcggtggcggtcaagactgaaacgcagcaggcggtgctggcgctgcaccggatgcgccagcagctggtcagattccgcacgatgcagattaatggcctgcgtggactgctgacggaatacggtgaggtgatggcggtgggccgggccgcgctgaaccgggcgatggccggtgtgctggcgcgcctgagcgagcgtttgcctgcgatgttgatggacacactgcgtgaacaatggcagcggcttgacgtgctcgatgagcagattgcgcagatcgagcgccggctctcggagtggatgaaggaagagcgcgcctgcaggcagatcgcggacattccaggcgtcgggttgctgacggcaaccgctgccgtggcgacgatgggggatccgaagacattcagttcgggccgtgagtttgcggcctggctggggctggtgccgcgacagaccggcaccggtggcaagctccggttacatgggatcagcaaacgtggggatgtgtacctgcgcacgctgctgatacacggcgcccgatcggtgcttgcacgcacaaaagagccggggccgtggatcgagcagttgcgcaggcgccgcccgaacaacgtggtgaccgtcgcactggccaacaagctggcccgaacgatctgggccttgctggcacacgaccggaagtacgagaaagctcatgtcagtgttcggccggtgtgaacgcagcgaagtctgaacagaacggttttgcaaagaggaaaacgtcaaaggttgtgcaaggtaattgagtgtgatggcacacaggtcagaccgggactcaccaaacctgaagccctttgcgggctaacagcccgtgtgacaaatgaggcgtgagccagcggaatccatcgaggccagcgggttcgacctgcaacaaggccggatataaagccgcagccttcctgtctaccagcacataaaattccttggcaaacgggaggcgtccatata

SEQ ID NO: 4681 - DNA, 1421 bp, unidentified
  source 1..1421: mol_type = unassigned DNA; note = element_7206de5
  misc_feature 1..2: note = core
  misc_feature 3..149: note = LE
  misc_feature 150..1169: note = CDS
  misc_feature 1170..1421: note = RE
  misc_feature 1187..1375: note = bridgeRNA
acatggggtaatcgcgggagcgattcggaccggccacttgtgacaattgtctgatgtcagccggttgctcctcgatatgatggagacaggcggcacgattggacaccgggcccccgaaccttcgacttaacatagattggagagcaaccatgtgtgactatatcggtctggatgtttccttgaaagagacggcgatctccgtccggcgggatggagagcgggtctggcggggcaagtgcccgtctgatccatctgcgatcgccagcgtgctacgcaaacgcgcgccagcgatggagcggatcgtcttcgagactgggcctctctccgtctggttcttccatgccctgcgcgctgcgggcttgcctgccatctgcatcgatgcgcgtcacgccaaagccgcgcttgatatggcgcccaacaagacggacgccaacgatgcggacggcctcgctcatctggcagagatcggcttctatcgggaagtccgggtcaaaggcttcgacagcatgttgctgcgaactctgattgcggcccgcaggcggcttgtaagaacgtcggtcgaactctccaaccagatccgcgggttgatgaaaaccttcggcctgatcatcccttccgcaaagggaggccggttcgcggcgcaggtgcagcgactcctcgacgggcaggagacactggcccggatcatcctgccattgctggaggcatggagcgcggtgcgggcgcaggcggcagatctggggcgacaagtcatgtgccatgcccggcatgacgacgcttgccaaaagctgatgtcgatccccggtatcggagcgatcactgcaacggctttcgcaactgccatcgaggcccctgagaacttccgaaagtcccgatctgtcggggcatggcttggcctgaccacccgacgctaccaatccggtgaggtggactacgctggccatatctcgagacgcggtgatgcccatcttcgcggcctgttatatgaggccgcaaccgtggttctgacccgtaccacagcccagagcgcgctgaaaacctggggattggccctgcgcgagcgcctgggcttcaagcgcgcggcggtggcggttgcccgcaagctcgcggtcatcatgcatgcgctgctgaaatccggacagacgttccagacggccgccatggtttgagatactgaactccacgcgtcgacctgctggcgcgtcgaggcgtccctgccgggacgaggcgagacccattccgtccagactgttgcaccatctgatcaaggctgatgcgtgcgtttcacacattgggagggtcccccgcgaagccccatcatgcggcggctgcatgccgaccgcgaagacgacactgctcccggctccggattgcacacgacgcgactaaaaaggtcttgcattttgatctgcgattagacg

SEQ ID NO: 4682 - DNA, 1177 bp, unidentified
  source 1..1177: mol_type = unassigned DNA; note = element_7216473
  misc_feature 1..2: note = core
  misc_feature 3..220: note = LE
  misc_feature 221..1174: note = CDS
  misc_feature 1175..1177: note = RE
  misc_feature 22..195: note = bridgeRNA
cttgtatgttcgcccgcggcaggtctaaaagggcctgccgggggtggagggactatggccgcttctgactgcaagcagtacagactgtgggagatgtcgtcccacctcatcacctagagcgccaataaggaatctatcggccaccaccgacaattcccgcaagcctgcgccccggtgatcccccagcaagctacttcacactagccaatgggagtgatgcatggcaatgcccgcacgtgagctcgacttcggtgtcgatgtcgccaaggcctcggtgcagatcgatggcgagggtctgagtctcgaactgtccaacacaacgcgtgatctgcgcacctggctcaagcgcctgccttcgcaggcctgctttgcgctcgaggcgacgagtacgtttcacctcaccttcgccaatctggcgcacgagctcggtcacgcggtctacctgatcgacgggttccggttgagccgctaccgcgagggtatcggcgggagggcgaagaccgatgtgctggatgcgcagctgctgcgtcgttacctctcccacgagaagcagtcactgcggctgtggacaccgccgcctgcgggatacagcgaaatactgaagttgctgaacctgcgtgagcgctgtgtttcggcgcgcgtgatgatcgagcagagcatggcaggcgttggtgtctgcaagcgcgagctgagcgagaccgtgcgcaagatgcgcgcactcgaagcgctgctgggccaacgcatcgaagcctgcgcccgacgctactgggccgagcaggtgacgcgatgccggcagatcgaaggggtgggacctatcacctcggctgcgctggccgcgatctaccagcgcggcagctttcgcagcagtgacgccttcgtcgccttcatcggtctggatgtgcaggcgcgcgactctggcacccagagggggcggcgcaagctcagcaagcgcggcaacgccgaactccggcgcctgctctacaccgcggccatgactgcctgccgctcaggcacgtggaagccctattaccagcagcttctggcccgaggtttgaagaagatccaggccctcgttgccttgtcgcgaaagctcgcccgagtcgcctttaccctcatgaagaacgagtgtgactatcagcccgaaatgcgctctgggggttgcctcgcaacatagaat

SEQ ID NO: 4683 - DNA, 1453 bp, unidentified
  source 1..1453: mol_type = unassigned DNA; note = element_7217c38
  misc_feature 1: note = core
  misc_feature 2..231: note = LE
  misc_feature 232..1440: note = CDS
  misc_feature 1441..1453: note = RE
  misc_feature 13..255: note = bridgeRNA
ctactaagagacttccctcaggatcggtgtctggccagacttcgatctaggtgatcggcgggacgctctcaatcgcggctgcccacccgggctctgggtgtggctctcatctggactgcgacccgtcgaccaccatgacgaggagtggctcaagaggggtctgcccagctcgtagtagcaatgcccacctcgtcgactctgtcggtttccaggcgaagacgaggtgagcaggtgagcagcacgaagaagggcgtgatcatcggggtcgatccccacaagatgtcggtgacgatcgaggttgtcgacacccacgaacggctcctcggtagcggtcggttcgagaccacgaacaccggctatgccgcgatgcagcgttatgtgaagcaatggccgcaccgggtctgggcggtcgagggagccaacggcgccggccgtccgctggcccaacggctcgtcgcagccagcgaacaggtcgtcgatgtcccagcgaagctggcggcgcgggtgcggttgttcgacaccggtcacaaccgcaagactgacgccctggacgcccactccatcgcggtggtcgcggtccgcaccgacgggctgcgggcggtggtcgaggacggggagctcgaagcgctgcggatgctcaccgaccgtcgtgaggagctcgcccggcagcgggtgcagacggtcaaccggctgcagcgtctgctcagtgaactgctgcctggccagcgcaaacgcgacctgtcagcgacccaggccaaggcgatgctggccacggtgcggccccgcgacgtcgcgggcaagacccgccgtcgcatggcagccgaggagatcgccgacctggtcgccgtcgatgcgaagttgaagaaaatcaaggccgagctgaaggccgcggtcctcgagcgaggctcggggctaatggacgtctacggcgtcggcccggccggtgccgccagggtgctggccgatgtcggggacgtggcccggttcgtcgaccgcaaccggttcgcgtcctggaccgggaccgcgcccctggatgcctcatccggtgagcagaaccgccaccggttgtcgcgtgcggggaaccggcggatgaaccacgtcctgcacgtcgcggcgattgtgcagatccgccacgacaccgaaggccgcgcctactaccgacgcaagctcgccgccggcaagactccgatggaagcgctgcggtgcctgaaacgacgtctgtccgatgtcgtctaccgccagctcgtcgctgacgcgaaccgggcaaccgcggggctggacgcgggtccgggagggcactgcggggcgactcttcaatccagcgcggccgactcccacccgctcatcgacacttcggatcagccacttcccggacccgcgaagccgacgctacgccgacgaccagccgacaggaagaccctcctcaacgccgtgccttgacacagaggggtgc

SEQ ID NO: 4684 - DNA, 1517 bp, unidentified
  source 1..1517: mol_type = unassigned DNA; note = element_72209e1
  misc_feature 1: note = core
  misc_feature 2..226: note = LE
  misc_feature 227..1453: note = CDS
  misc_feature 1454..1517: note = RE
  misc_feature 14..241: note = bridgeRNA
ctacttgttgacttgccttaggaccggtgtctggcgaggctcggtctaggtgcccggttcgtcgctctcatttcggctgcccacgctggtcgtgtggctctcatttggcgcgcggaccgggtgccgcggtgagcggggagaggctcaagaggggcttgttcagctcgaagtagcggtgccctcctggctcggcaagaacagcgtgatcgagtaggagggactggagatgagccaggtgatcatcgggatggacccgcacaagcgttcggccacgatcgaggtcatgaccagcgatgagaccgtcgttggcgggggccggtatggcaccgatgcggacgggttccgggcgatgctggcggaggcgaagcggtggcgggagcggacctgggcgatcgagggatgccagggcatcggccggcacatcgcgaaccggctgctggccgcgggagaacatgtggtggatgtgccgcccaagctgtcggcccgcacgcgggtgttcgccaccgggcagggccgtaagaccgatgccaccgatgcgcattcggtggcgctggccgccacccggatgaccggcctgcggcaggtggtcgatgaccagcagcttgcggtgctgcggatcctggccgaccgccgccggtcgctgggtgaagaccacacccggatggtctcccagctgcatcagctgctgctcgagctcatgcccggcggggccaagaaggacctgtccgcggcccaggccaaggcgctgctcgcccgggtccgcccccgtgatgccgcgggcaaagcccgccgccgggtcgccgccgagctgatcagcgacctggaacgcatctaccagcgcaagaaggaggcgaacaaagaactcaatgcgctgctcgccgtcaccggcaccaccctgaccgatctgcacgggatcgggccctccggcgctgcccggctgctggtcgaggtcggtgaggtgacgcggttccctaacaaggcgcacttcgcctcctgggatggcaccgcgccgatggacgcctcctccggcgaccaggtccggcaccggctgtcgagggccgggaaccggcagatcaaccgagtgctgcacatcatggccgtcgtccagctccgcaaccccaccgagggccgcgcctactacgaccgcaaagtcgccgccgggaagaccccccgcgaagcgatgcgcgccctcaaacgccggctgtctgacatcgtctatcaccagatgatcaccgacacccggcgcgcggcaacgggcccgggaggacacctgggggcggctactggctccagcgcggccgacttgcaccccagcgccggcacttcggagaagtcacttcccggacccgccaccaacgaccttacgccaggaaagccagcccattctcctggtcgctcccggcactctccgtcggcgccggaccgcagacgtcgtcaagcgcagtctgcttgacgacggcgaggaccggggcacactatccaggccgggaatgacccctcttgacacagaggggagc

SEQ ID NO: 4685 - DNA, 1210 bp, unidentified
  source 1..1210: mol_type = unassigned DNA; note = element_7224463
  misc_feature 1..2: note = core
  misc_feature 3..189: note = LE
  misc_feature 190..1176: note = CDS
  misc_feature 1177..1210: note = RE
  misc_feature 12..198: note = bridgeRNA
cttgtatctctcagtattaaatggttagctaccaattaatacatcaagaagtcagagagtttgagcacgaccttagcaaatgtatgctgttttgtagattaaaccctgacttctttcactcaataaactgaatggtatccaagcgcactttataagttgacgctgtatgtacaaggggagtctatcgagatgatgcattttacaggtatagatgttagtaaaaacaaatttgacgtttgctggctaagagatgcgactaccaacaagcgcaaaacgaaagtatttaagaataaacaagaaggtcatgaagcgctggctgaatggctactcaacaatatcaaagcagtgccagagaatatcgttataatacttgaacctacaggggtttatcatgaatcactgatgtatttattacacgataaggggtttaaggtttatttggttaatacaggcaatgctaagaaatatgcagaggccatcaatttaacgcataaaacggataaatccgatgcttgtatgttagccaactatggttacgcgcagcaaagtaacttgcaactctggttaccagaagccgttgaagttcgggagctcaaagctttattacggcgcttagatgcgctggaatcagattatcaaagagagttaaaccgcttagactcaagtgaattcagtctgccttcagagcgggttttagcgtctttaaaagagatgattcgagcacttaagtcggaaatagaaaagcttaaaaaagatattgataaccatattaacggtcatccagaattaaaaaataatcgaaagcttttagagagtattcctgggataggctccgtattatcgcgagagctgacttacctttttgctgccaaaacatttaaaaatgcaaagcaagtcggtgcttacagtgggttaattccaaaatttcacgaatcaggcaaacttaaagggcgcacgactttgagtaaaacgggaccatcccgattacgagccaaactttatatggcagccgttgttgctggacgatacaacaagagtgttatgcgacaaaaagagacactattaaagcgaggcaaaaccatgatgcaggtaataggtgcaaacatgcgaaagctaatgcaaatatgctttggcgttgtaaaaaatcaaaccgaatatcagcctcaagttacttaaacttcaacttgaagctggttgtgagagatggtat

SEQ ID NO: 4686 - DNA, 1411 bp, unidentified
  source 1..1411: mol_type = unassigned DNA; note = element_7229d32
  misc_feature 1: note = core
  misc_feature 2..81: note = LE
  misc_feature 82..1107: note = CDS
  misc_feature 1108..1411: note = RE
  misc_feature 1184..1402: note = bridgeRNA
taatgagatggtccgccgtttgattcctcagccgctgtagagggatcgtggtggcagcttctaacaaggaggatcatcgctatgcagattcattcagttggcatcgatctgggcaagacgacgtttcacctcgtggcgctgggcgcggcgggcaaggtgctggtgcggaagaagttcacgcagaagcagttgattacgttcacagcgaacctgcagacatccctgatcggcctggaggcatgttccggtgctcacttcctcggccgagcgctgcgagcacaaggccatgaggtgaagttgattccagctcagtttgtgaagcccttcgtgaagtcgaacaagaacgacttcattgatgccgaggccattgccgaggcggtcgagcgcaagaacatgcgcttcgttcccataaagaccgatgaccagctggaccttcaggccatccaccgggttcgagatcggctgatctccaggcgtacagccgtgatcaaccagctgcgtgcattcctgctggagcgtgggatggtgtttgccaagacgccagcgaagctacgagctgcgatggcggatgtcctggagaacgcagatgccgacctgacgccacagatgcgcaacctgatcagcatgctgtgggacgagtggaagctggtggaacaacagatcacagcgctcacggatgatctggagaagatcgctgatgcggatgcgggttgcgcccgtatccgccagattcccgggatcgggccggttgtagcgacagccatcgtggctgccatcggtaacggtgctgcctttcgcaagggtcgagagttcgcagcctggctcggcatcgtgccacgtcagtactcgaccggaggcaaggcgaagctgttcggcattagtaagcgcggcaacgtctacctgcgcaagatcctgatccacggtgcacgcgctgcggtgttgaggattaagcgcgaccgggcgcccattggagcctggctcgatgcactcgactcccgagcacccaagaacgttgtcgtggttgctatggcgaacaagctcgcacgcattgcatgggcggtcctgtccagcggccacgactacaggccaacagcggttcccgcataacggtgcggaaaagacgccttcggcttggaagcgctgcgcgctcccactttcccgcaccaccacgacgacgaacgtttcccaccgaagtctgcacggagtagcaaggacgaaagaacagtcacaacggcgtgtctgcagcctggtcccgaaaatggtcttcaacgaccgaccgactttgaaggacggacacgcgcgcatctcatcctggccaggagaactagtctccacccgaaggccgtatacatttgcgcagacttgtcttcccgcccaaacttttccttgcagtcctgcggcggaccataca

SEQ ID NO: 4687 - DNA, 1455 bp, unidentified
  source 1..1455: mol_type = unassigned DNA; note = element_7233bbe
  misc_feature 1..4: note = core
  misc_feature 5..213: note = LE
  misc_feature 214..1440: note = CDS
  misc_feature 1441..1455: note = RE
  misc_feature 12..201: note = bridgeRNA
tccttacctttcttgaagggtggtcgttgcccttagctctaggcttcgaattgcccaggtacgtcgggtatggcttgcatgtggttgctgtatttgatggccgaggaggattggccgcccgtcgtcccgcaacgactcgaccgctaattgagagatgcgatttgatcgctgtgtaaggacacgtcggcgtggtcgtctgctgggttggtagcgatgacaacgatcacggaggtggctgtgagacaacaagtctgggccggtgttgacgccggtaaatccgaccaccattgcgtggtcataaacgtcgaagggattcagctgctgtcgcaacgcgtcgttaacgacgaaacggcgctgctggatctgattggagccgtgacggcgctggccgacggcggtgacattacgtgggcgatcgacctcaacgccggcggcgccgcgttgctgattaccttgctcatcgcctccgagcagcggttgctctacattcccggccgcaccgtctaccacgcctcggccggctatcgcggcgacggcaaaaccgacgccaaagacgccgccgtcatcgccgaccaagcccggatgcgccgtgatctgcagccgctgcggcccggcgatgacatcgcggtcgagctgcgcatcctttccagccggcgcaccgatctggtcgccgatcgaacccgggcgatcaaccggctgcgagcccagctgctggaatacttccccgctttggagcgcgcctttgactacagcaccagcaaggccgcactgatcctgctgaccggctaccagacccccgacgggctgcgccgcgcaggccctgcccggctgacggcctggcttgctaaacgcaaggcgcgcaacgcctctgccgtcgcagccaaagccatcgaggccgccaacgcccagcacagcatcgtgcctggtcaaaacctcgccgccaccatgatcgcccggctggccaaggaggtgatggccctcgacaccgagattggcgcgactgagacgatgatcgaggaccgatttcgccgccaccgccacgccgagatcatcgtgagcatgcccggcttcggcgtcgtgctcggcgccgaattcctcgccgccaccggaggcgaattgagcgccttcgactccgtcgaccgcctggccggcgtgtccgggctggcaccagtaccgcgcgattccgggcgcatcagcggcaaccgcaaacgcccccgccgctacgaccgtcgcctgctgcgcgcctgctatctgtccgcccagatcgccatccgcaccgatacaccctcgcgcaactactacgaccgcaaaagatccgaaggcaaaacccatacccaagccgtcctcgccttggcccgccgacgcctcaacgtcctctgggccatgctgcgcgaccatcggccctatcaacccaccgcgcctaacactgcggcggcttgacaacttcattgagat

SEQ ID NO: 4688 - DNA, 1497 bp, unidentified
  source 1..1497: mol_type = unassigned DNA; note = element_7238b3f
  misc_feature 1..2: note = core
  misc_feature 3..212: note = LE
  misc_feature 213..1481: note = CDS
  misc_feature 1482..1497: note = RE
  misc_feature 2..208: note = bridgeRNA
ctgatggcactaccttctttcttcatcgggaacccctggggaacgcttgcggcgcttgtcctgcgaggactgaggtgagacggcgtccccgggggtgaccggcggaggcccgaagcccacgagggtgttgtcccgcgaggactggtccatcagcacggcgcagcgcctccaccgtcgatgatcgcgaacctgaatgggggcaggtgtgattggtgtgggggtggactgggcggagtcgtttcacgacgtggcgctcggccggccgggaacgggggtggttaagcagtttccggatcgaacacggcgcggccggggtggcccggctggtggcccgcagcctggagctggaggccgatccggcggaggtgcgggtggtgctggaaacccgccacgggctgctggtcgaggcgctggtggacgcggggttcacggtgctgccggtgaacccggatctggtcgcccggcgccgcggcccggcgaagaagaaagatgacgccgaggacgcccggatctgctgcctgctcgccctggatacctacaccgagctgcgccggctgatcccgcacggcgaggtcggcaccgagctgcgcgcgatcgcccgcgacgatgagcgcgccgcccgtgacgagcgccgtatcggcaaccggctgcgcgccgacctgctggccgtctttcccgccgcgatcgacatcgccgacggcgacctgagcgcggcggtgttcctcaagctgctggaacgctggccatcggccgccgatctggccaccacgaccggcgaggagctggagtccttcgcccgctcgtgccgccatggctggcccgcccggttcaccgaacgggtcatcgctgccatggccgcgccgcggctggcggtgcgcccggagctggcccgcgccaaggccggctccatccggctggccgccgcccagctcctgctgctgcgcacccagcgcaaggcctgggaacggcggatgggtgagctgctgctcggcgctccccgccacgggcgggccaagaccccgaaggacccggacccggggaaggcgttcccgggcggcgagatctacctgagcatgcctggcctgggtgaccgtctcgccgcccgggtcgccggtgagatcggcgagcactaccagcagttcaccacgccgaacgccctgcaatgctacgcaggccgcgccccggtcaccagacgtagcgggcgcagcgagttcaccgtcgcccgccgcctggcctgcaaccgccacctcggcgaagccgtccagcaatgggcgttctgcagcctccagcaatccgcctgggcgcgggagttctacgacgaaaagatcgccgcaggaaagtctcaccatgcagcccttcgggccctgggcaaccgctggctcgaagtcctctggcactgcctggacaaaagagtgtgttacgacgaaaccatccacaccgccaaccgcctgcgatctcgcatgctcaaacccgcggcgtgaggttgacagagggtgt

SEQ ID NO: 4689 - DNA, 1433 bp, unidentified
  source 1..1433: mol_type = unassigned DNA; note = element_7241d12
  misc_feature 1: note = core
  misc_feature 2..91: note = LE
  misc_feature 92..1132: note = CDS
  misc_feature 1133..1433: note = RE
  misc_feature 1196..1428: note = bridgeRNA
taatggaatggacgcccactacccaaaacggcatcaaagtgccaaagtagtggagcagtaaaacccactaacaatgagaggggcgtccgccatgaagattactacgataggtgtcgatcttgcaaaggaagtatttcagattcacggggtagatgcgcatggcaaggctgtgctgcgcaaacaactgcgccggaatgagatggcaaagttcttcgccaacctagagccgtgcttgattggcatggaggcgtgcggcagcgcgcattattgggcaaggaagcttggcgagtttgggcatacggccaaactcatggcaccccaattcgtcaaaccctacgtcaagaccaacaagaacgacatggcggatgcagaagcaatttgtgaagcggtgagccgacccaacatgcgcttcgtgccgatcaaagacgtcgagcaacaagccatcatctcggtacaccgtgccagacaggggtttgtgaaggccagaaccgcacaggcgaatcagatacggggtttgctctccgagttcggcatcgtcatcccgcaaggcatcaaatcgattgccaagcgcatgccggatattctggaagatggcgagaacagcttgccaggcgccatgcgtaacttgctggagaggctgaacgacaacctcaaagaaatggataggcaggtggcggaactggaattgcaaatcaaacagtggcatcacggcaacgaggccagccgcaaactggaagccattcccggcatcggcccgatcaccgcgagcgcgattgtagcgacggtgggaaatgccacggagtttaagaatggcaggcagctggccgcatggcttggtctggtgccgaagcagcactccagcggcggcaagcaaacattgctgggtatcagcaaacgcggcgatacttacctgcgcaccttgttgatccacggcgcgcgggcggtcatccgctttgccgagaacaaggcggagcctgatcaatggctgtgtaagttgatgggtagacgaaataaaaacgttgccgctgtggcgttggcgaacaaaaatgcacgcatcatctgggcgttattagcaaagggcaatgcatacgaacaggattacatttcggcagcgaagaccgccgccgcgtgatcagggcaaccaaataggcgcgtatcagaacgatacgtattggcaaccaagtttaaggagaaaggcttccaccgattgcacaggcaatcatgaaatgatggcgagactggtcagaccgtgagtggctaaacctgttaattccaaagcacccagagtgcgtagaaatgatgaggtgccattcagcgtattccatcagggacagaagcaatgcgcttcacataaagtccggatgtatggctgcaatctttacctactctcaaaatcatcgattgaaagcttggcaaaagtgggcgtccatgta

SEQ ID NO: 4690 - DNA, 1279 bp, unidentified
  source 1..1279: mol_type = unassigned DNA; note = element_724806a
  misc_feature 1..2: note = core
  misc_feature 3..193: note = LE
  misc_feature 194..1192: note = CDS
  misc_feature 1193..1279: note = RE
  misc_feature 15..202: note = bridgeRNA
cttgtattatccctccagtgcagagaaaatcggccagttttctctgcctgcagtccgcatgccgtatcgggccttgggttctaacctgttgcgtagatttatgcagcggactgcctttctcccaaagtgataaaccggacagtatcatggaccggttttcccggtaatccgtatttgcaaggttggtttcactatggaacatgaacttcattatatcggtatcgacaccgctaaagagaaactggatgtcgatgtgttgcgtcctgatggtcgtcatcgcaccaaaaaattcgctaacaccactaaagggcacgatgagctggtgagctggctgaaaggtcacaagattgaccatgcgcatatctgcatcgaagcgaccggcacctatatggaacctgtcgctgagtgcctttacgatgctggctacatagtgtcagtcattaatcctgcgctgggtaaagctttcgctcagagtgaaggactgcgtaacaagactgataccgtggatgcgcgcatgctggcagagttctgtcgtcagaagcgccctgcagcctgggaagcgcctcacccgcttgaacgcgcgttgcgtgccctggtagtccgccaccaggcgctgacagatatgcacacgcaggaactgaatcgcactgaaacggcgcgggaagtccagagaccgagcattgatgctcaccttctgtggcttgaagcagagctgaagcgtcttgagaagcagataaaagacctgacagacgatgatccggatatgaaacaccgcaggaaactgctggaaagcatcccgggtatcggagagaaaacatctgcggtattgctggcttatatcggtctgaaggaccgcttcgcccatgccagacagttcgccgcttttgcgggtctgacaccacggcgttatgaatcaggtagcagtgtgagaggggcgagccggatgagtaaggccggacatgtgtcgcttcgcagggcgttgtatatgcccgcaatggtagccaccagtaagactgagtggggacgggcgttccgcgaccgtctggcggctaatggcaagaaaggaaaggtgattctcggcgcgatgatgcgcaagctggcacaggtggcgtatggagtgctgaagtcaggcgtgccgttcgatgcgtcacggcataatccggtagcggcgtataaatcgcggaagggatgaaaaaaacagcgcctgacggcgctgtgtctggcatgcctgcaatccgggaaaccggaccaggaaaaaacttgcaggccataacagtat

SEQ ID NO: 4691 - DNA, 1329 bp, unidentified
  source 1..1329: mol_type = unassigned DNA; note = element_724ea7d
  misc_feature 1: note = core
  misc_feature 2..219: note = LE
  misc_feature 220..1155: note = CDS
  misc_feature 1156..1329: note = RE
  misc_feature 46..211: note = bridgeRNA
tcttaagtttgatttctaataaaacagttaattttaaatataaatcagaaggaaacggagagagaggattaaggttattatacacgttgaggatagaacctagtcaacaaagctaaccccctctctttttcatctatagcacgttcagttctgtgcggcttagacctcgttttcatgatgttgtgtcatcgatgattgttctttcataaatatgttcttatgaataaatataaagaaacttttggagttgacatcagcaaagctgtttttgatgtttatggcagcgaaagtaggcacgaccaattcgtaaatgcccctaatggatttgattcttttttaaaggctttaccaagtgatagtttagttgtcatggagacgacaggttactatcattacagactatcacagtttctttgcaagcataaagtagcggtttctgtagtgaatccactttcagtaaaacgttttatccagatgaaattatcgaggataaagacagataaaagggatgctcaagccatttgtgactatgggatctataatcaagttcccctttataatggtattaatgctcttcaagcggagtgtagacagttgcttagcttaaaagctaattatgtaaagcgacgaactagctcaaagaacaagcttcatggtgaggaagttcttggcaaaccctcaaaattggtggtacggtcattgaacaatgataaaaggcacattgacagggagctggtaaaaattgagagtaggttgctagagttggttaaaaaatcttggcagtgtgaactcacacttcttaagagcataccaggaataggcgataagactgctgtttttctaattgttgccactgatggcttcagtaagtttgggaatgcctctcaattgtgcagttacctaggaacaacccctgtaatcaagcgatctggaagcagcgaaagagggcgaagtagaatcagcaagatggggaataggcaactgagaaacctaatgtttatgtactctatgtctgcttatcaatacaacaaaccgtgcagggatatgcaccatcgtatcataaataagggaaagagcagtaaactggcgctgatcgcagtctgcaataaactaatacatcaagcctttgcgattgttaagtctggggtaccgtaagatccttattatatttctgttaggaaatagtactaaaataactaatatgatgatggtaatagcttgttgaactggaaatcaatcgacgtaggggatttattccatttcaataaagccaatcaacgcttatgcacaaaattaggtgaaattaaacttggattataactcagttct

SEQ ID NO: 4692 - DNA, 1393 bp, unidentified
  source 1..1393: mol_type = unassigned DNA; note = element_7252828
  misc_feature 1..2: note = core
  misc_feature 3..78: note = LE
  misc_feature 79..1116: note = CDS
  misc_feature 1117..1393: note = RE
  misc_feature 1114..1380: note = bridgeRNA
tgttggtgtggacggcccctgacggcatcgatgtgccagagtgaggtcgttgctgatctcagacagaggaggccgtccgtggaacaggttagccgcattggcatggacacgtcgaagcacgttttccagtttcatggcgtggacgcctccgaggaggcggtcttgcgtcggaagctgcgtcgcaaggagatggtggcgttcttcgagaagcttgcgccgaccgtggtcgcgatcgaggcgtgcggcgcgtcgcaccattgggctcggcttctgcggtcgttcggccacgaggtgaagttgatcgcgcctcagttggtcaagccatacgtcaagcggggcaagaacgacgcggctgacgcagaagcgctttgcgaggcgatgagccggccgacgatgcggttcgtgccggtgaagacggccgagcagcaggcggcgctgatgctcatgggcttgcgcgaacagctggtcgccagccgcacgcagttgtcgaacgccatccgcggctatgcgatggagttcgggctgaccgccgcccaggggaaggctcacctggaaccgctgctcgagcgcatccaggccgatgacagcctgccggtcttggcgcgagagctgttcgcgatccaggccgagggctatcggcggctgcaggcgcaaatcgacgaggtggatgccaagctggcggcttggcaaaagtccgacgaatgcagccaacggctcattaagatccctggcgtcggcccgatcggcgcggcgcttctgaagatgaagaccccagcgcctgaactgttcaaatccgggcgtcagtatgccgcttggatcggactgacgccaaaggaccattcgaccgctggcaaggtcaggctcggcgtcatcacccgggccggcgacgagaccttgcgcagcgtattggtggtcggcgccaccgccgcgatccaacaggctcaacgacatggaaaggcctcgccttggctggccgcgcttctcaagcgcaagccgccgaagctcgtcgccgtggcgctggccaacaagatggcccgcatcgcctggaagctgatggtcacgggccaaagctacgccgcgagatctgcgcccgccgccctggcggccgcagcttagagatcagccaagcacggccgccattgaacgacaaccgtgccgagctgatgccagaacttgcaagcaaacggcagatgatgtgatcgatcggtccccggcaagagacactccgttgtccgtcatggccatcgtaggtcgttcgtttgttaggaactcttgtcgcggaaaccatcttggccagcgttcatgtgcgagcgcgaaaacaggccggacatatgaacgcaagcgatctgatcaaaccaccgccaaaccttgcgaggagggggccgtccacata

SEQ ID NO: 4693 - DNA, 1354 bp, unidentified
  source 1..1354: mol_type = unassigned DNA; note = element_72607c1
  misc_feature 1..2: note = core
  misc_feature 3..84: note = LE
  misc_feature 85..1116: note = CDS
  misc_feature 1117..1354: note = RE
  misc_feature 1142..1342: note = bridgeRNA
agatgtatggactcccccccattaacgggagtgtacggtataaagaaactgcagagaatcttttaccaaattaggagtccatacatggcatattgtaatttagttgctattgatttagcaaaaaatactttccaagcggcgcagtttaaaggcaacaaactgatgtccaataaatcagttaaccgtcaaacgctgcttgagttattagttaaagcaaaaccgtcggttgttgctatggaggcatgcgcaagcgcccagcattttgcgcgcactgcgcagtcttttggtcatgatgtaatactccttgaccctttgttcgtgaaagcatttagacaggggcaaaaaacagatgcgaacgatgcaatcgcaatagccgttgccagtcgagtcccgaatgttcgttcgtgtaaaattcttaccattgaagagcaggctttacagtcacttagcaaagtaagagcgttagcagataaacaaaaaattcagttatcaaaccaaatacgcgggctactccttgagtttggtattgtgattaaccaaagtgaggccgcatttaaagcagccatacccgatattttagaagatgcagaaaacacactgccgctagaactaaagcatgctctcgcgctcagctattcactttataaacagcagtgtgacaataaggtagagctgcaaaaacaaatagagcgtattgcaaaacaaaatgatggctgtcaacgcttaatggctctcgaaggagtcggcccaatcacggctatcgagctcctgtcttttttaggtaacacgacacagtttaacgatggaagaagtgctgcggcgtgtgcaggagtgacaccattacagcattcgacaggtggcaaagcaaagatagggcgcatacccaaaagacgaggtggtgcattaagacgaaacctatttttaggcgctcgctcagtagtgagtaaattaaaaaacagagaagccacgacagaaaaagaacgatggataaaaaaccttctaataagaaaaggtgtcaagtgcgccgctattgcattagcaaacaaaacaatgcgaacagcctacgccttactcaaaaatggaacgagttatgaagcaagattattaaccgcgtaaaaataaaaagtcagtaaacaaaagaattgaacaagccaagatagagcattaagtggtgagacccacccttgagagcctgaaaaatcgctagtgtacgaagataccgtgtagcagataaggcacaagggcgcgaaaacatcaaagtggccgaggtagcgcctcattagagcccgtatataagcacgcaatcacatcattttaatgtaaaaaggcttgtgcaataggaggagtccatata

SEQ ID NO: 4694 - DNA, 1368 bp, unidentified
  source 1..1368: mol_type = unassigned DNA; note = element_72652db
  misc_feature 1..4: note = core
  misc_feature 5..78: note = LE
  misc_feature 79..1113: note = CDS
  misc_feature 1114..1368: note = RE
  misc_feature 1086..1357: note = bridgeRNA
atgatggggtggacgccccgcccgacggcatcgatgtgccaaagtggaggtgttgagcaccacttaagggaggcgtccgtgtcagaagttatcacaatcggtctggatatcgccaagcacgtttttcaacttcacggagcggatgggcggggtcgagcgatgttcagcaagcggatcagccgaggaaagctgctggatttcttcgcggcgcagccgagttgcacggtagcgctggaagcatgtggtggagcacatcactgggctcgtcagctgacccagcttggccatgaagttcggctgatcccgtccgcctatgtaaaaccgttcgtgaagcggcaaaagaacgatgcgagcgatgccgaagcgatttgcgaagcggcgcagcggccgagcatgcggttcgtggccatgaagagcgaagagcagcaggcggcgggtctgctgttccgaacccctgatctgttggcgcggcagcgaacccagctcatcaacgcgatccgaggacaccttactgaatatggttggatcgcacccaaaggtccgtcgcatgtgtcgatgcttgccgacctggtcgacgcagaagcgatggccagctcgcttcccgaagcggcccacaccatgttccgattgatgttagacctgttcgccggcctcaacggcaagatcgcagatctcgacaaagagatcgcgcgacgcgctcgcgaggacgaagtatcgcgcaggctgatgaccgttcctggcatcggcccgatctccgccaccgcgatcgccgctctagcaccgccggccgagacttttgccaaaggtcgcgacttcgcggcctggctcggtctcacgccccttcaaagatctacgggcggcaagcagaagctcggcgcgacatccaaaatgggcgagcgcacgctcaggcgcctcctcatcatcggcagcagcgccgtagtgcagcaggcaagcaaacggggcgggccaaaggggtcgtggctcgaacagatgctggctcgcaaaccgcgcatgctggtaacggtggcgctcgccaacaagatggcgcggatcgtctgggcgctacttgtaaagcaggaaaactacagagctccggtcgccgcgaaggcgtgagcctggcgggcctaaggtggtcacaggtgcagtcggtcgaaggagagtatggcgcaacagtcggcgagacggggctggaagaaccagatgtactcatcgtgcctggagcacgcatttatgatttggttccggtccgcgaactcccatacaggcccgcagctccatcgctgcatcagaggccggacagatggcagcatccgactacgtgccaatcttcctctaaaattccgcttgcatccggcggggcgtccacag

SEQ ID NO: 4695 - DNA, 1155 bp, unidentified
  source 1..1155: mol_type = unassigned DNA; note = element_72684df
  misc_feature 1..2: note = core
  misc_feature 3..195: note = LE
  misc_feature 196..1143: note = CDS
  misc_feature 1144..1155: note = RE
  misc_feature 42..205: note = bridgeRNA
cttgtctgttggaaggctgttagcgtgagggggtcttccgggacacccgcccggcggtgcaacgccaggcgggtttcggcggaggggccgataacccctgggcgtttgggccgtgggtgagcagggccgccgccgaagtttcatgacccggatggttgcagggacgatgaggtccgaagccacaaggatgggtcgatggaacggtgtgagcgtagcacgaaaatcggcgggatcgacgttggcaagaagcagctggacgcggcggtgcatggcggcggcgagcagttccaggcggccaacgacgcggccggctgggaggcgttggccgcctggctgaaggaacggggcgtggggcgcgtggggctggaggcgaccgccggctacgagcgcggggtgcgggggaggctggaagcggcgggcctggaggtggtggtgcaccagccgctggaggtgcggctgtttgcaaggctcaagcggctgcgcgccaagaccgatcggatcgacgcggcgctgatcgcagcggcgacggcccaggtggacacggtgcgggcggcgcaggatctccgcctggtcgagctggccgaacggatgacggcctacgagcagatcagcgacctgaccgcccaactcaagacctccatggagcacgtgacgctgcccgatcttgccgccagtctcgacgagcagatcgaaagcctgaagcagttgaaagcacggttggcgcgcgagatcttcaccaggatcaaggccttcgaagacctggtcgcccgctggcggctgctgcagtcgctgccgggcgtggggccgatcgtggccgccagcctggtcattcgcatgcccgagctgggcgccctccagcgtggccagcccgccagcctgatcggcgtggctcccttcgaccgccaatcgggccagtggcgcggccagagcttcatcggcggcggacgaagccggcctcgccgcatgctctacctcgccgccatcgccgcaaagcgcttcgatcccggcttcaaggccttcgccgaccgcctgctcgcggtcggcaaaccacccaagctcgccatcgtcgccgtcatgcgaaagctcatcgaggccgcaaacctcgtcctcgcacgacagcagccctggatgcgccaagcctgatcaacatggttg

SEQ ID NO: 4696 - DNA, 1142 bp, unidentified
  source 1..1142: mol_type = unassigned DNA; note = element_726a924
  misc_feature 1..2: note = core
  misc_feature 3..190: note = LE
  misc_feature 191..1126: note = CDS
  misc_feature 1127..1142: note = RE
  misc_feature 34..200: note = bridgeRNA
cttgtatgtttcgaaagcagcatactgaagggtgacgtgggtcggttcataacaccgcccccgtcgcgatcggaagcccgcagccgcctcggttgacagaccgcgaatgagccaggtgctccgatcgtttcttccattcccggacagttgcaagggcacgagcccgcatcagcaaggtaggggcacgaagatggtggagcgctttggtggcatcgacgtatcgatggaccgtttggatgtgatggtgctgcccgatcggtcgggatttttggtcgaaaacaatgccgaaggctgggccgagttgatcgagcggttgtccggctcgcggcttattgcaatcgggatcgagccgagcggcggatacgagcggggcgtcatccgtgcgctgctcgcggcgggcctgtcggtccgtcgaatcaatccgaacaagctgcggcagttcgcccgggcccgcggcgtcctggccaagaacgatcgactcgatgcacgactgatcgctgagtatgtcgcgatcatgccgacgcggattgtgcagttcgatcccgccgctcaacggctcgccgaagtcgtaaccatgcggcggcagctctgcgatgagcacgtcacggtccagaaccaggccacccatgtcgaggacgccatgctgcggcgtctcaataaacgccgcctggcccggcttgaggctgatatctgcctgctcgaaaagcgaatggcagagatggtcgctgccgacccggttctcgctcaccgttatcgactgttgatctcgatgccgggcgttggtcctgttctggcatttacgctcgtcgccttgctcccagagctcggtcagatgagtcgcaagcagatcgccgcattggtcggacttgcgccctacgacttcgacagcggaaagctcaggggacatcgcagcatctatggaggtcgaatgccggtccgcaacgtcctctacatggcagccctcagcgcctgcagatacaatccagtcctcaaaacgttccacaatcgtctcgctgccgcagacaaaaagtccaagattgtcatcgtcgccgtgatgcgaaagatgatcacaaatctcaacgccatgctgcgcgacgacaccgaatggcagcccaaatctgcatgagctaacaacacagttg

SEQ ID NO: 4697 - DNA, 1701 bp, unidentified
  source 1..1701: mol_type = unassigned DNA; note = element_726c463
  misc_feature 1..2: note = core
  misc_feature 3..330: note = LE
  misc_feature 331..1551: note = CDS
  misc_feature 1552..1701: note = RE
  misc_feature 29..305: note = bridgeRNA
ctcgtataataagtttaaagttaataattcagatatcagcaggctttgagatgcccgtgatacaatgctgtaaggtcggcagggtcaagctcttttttctccagttgaaccgaaaggttgcttcagcgaaagtccgttcccctgggccggaagttagctgcaaactcattggctgtttgccggatgtgaggccgccccttcagcagtgggaggacatcgcattggcctccttcggaatgattcttataagcgaggttgctgatgctccggtcatcatgggtatctcaaagcctgctgacctgagatccaccatgcgaggaggtgatattcgtgaacaagcttttcgttggcattgatgtgagtagccagaacaacgtttcttacttgatggattcggatggagtcaaatatagcagcttttccgtgcagaacaatcttggcggtgctaaactgttgacagaaaagatcgtgtcggcaatggaaacgctgaagctctccgatgtggtcatcgggatggagtccacatccatctacggaaaccacttggtccactctctgcgggaggacggaacgcttggccgctaccagcgaaagatccatgtgctcaacccaaagcaggtcagcaaattcaaggaggcttatccagacctgccaaagaatgattgggtggatgcttttgtaattgccgactgtcttcgattcggaaggatcagatcggaggtctacatggacgattaccgccatgaagccctgaaaacccttaccagagcccggttttacgccgtacagaaccttgcccgggagaagcaacgcttcgccaacctattatttctcaagtgttccggcctggctcaaagcgcagatatcaagaacaccagctctactgttctctccctcatggaagaatatgaaacggtagatgatctggccaacgccgatctggaggatttgaccgtatttgtgactgcggcaggtcggggccgctttgctgatcccgagaatactgcgaagactctgcaggccgctgcaagaggctcttaccggcttcccaaaaccatcaacgactctgtcaatcaggccatgtcggtttccattgcgaccatgcgctccatgaaggagcagatcaaggtgctggagaaagccattgagcagcagtttgaaatcatcccaaacacgcttacctccattccgggcatcggcaaagtctactccgctggtatcatcgccgagatcggcgacatcaaccgtttccaatctcaggcttccgttgccaagtatgccggccttgtgtggacacagcatcagtctggcaatttcgaagccgagaacacccgcatgattaaatccggcaaccgattccttcgctactacctgctggaagctgcaaactctgtgagaggatgcgaccccgagtttcagcgctactatgacctcaaataccacgaggtcaataagggccagcataaacgtgcactcgctttaactgccagaaaactggttcggttggtctttcgactgctgaaagacaaccgcctgtataaccgttggtgagtttatctcactgacatttctgcccctgcttttgaaacattttgcaggcagggcttggatgagtgttgctttttttctgagcagtccgcctaaaattgccgttttcctccgatttttcctgcatcaccctcttgacttaataccattgga

SEQ ID NO: 4698 - DNA, 1380 bp, unidentified
  source 1..1380: mol_type = unassigned DNA; note = element_7293972
  misc_feature 1: note = core
  misc_feature 2..74: note = LE
  misc_feature 75..1118: note = CDS
  misc_feature 1119..1380: note = RE
  misc_feature 1151..1375: note = bridgeRNA
atgctgtaatggacgctccccgcgccacggttctatacccacaacggtggtgactgtgcattgggagaggtgtgatgaaacgcatagcagttgatctggccaagtccgtttaccaagttgccgagagtgtccgtgccggcgtggtgagtcagcgcaggcggctgagtcgtgaggcgttcgggcgatatatacaggagcaggccgaggcggtcgagtggctgatggaggcctgtggcacggcgcactactgggggcggctgatgcaggcccgtgggcaccgggtgatgctgctgcatccacgctatgtgcgatcgtaccggcggcgtaacaagaccgaccgcaacgactgtgaggcgatgctcgaagcggcgcgctgtgccggcctgcatccggtgccggtgaagagccacgagcagcagcaactgcagcagttgcacggcctgcgcgagacctggaagaagagccgcacccagcgtatcaacctgctgcgtggcatcctgcgcgaagcgggtatcgaggcgccagccagcaccgcggccttcctgcgccgggccaacgaactgatcgagcgcccggagctggcgcgcctgcgcggcctgctgcagatcgtcctgggtgagatcaatctctatcagcagtgcatggcggactgcgagcggcagctgcagcaatggcatgccgaggatgaaatcgtgcgcaggctggacgaggtcagcggcatcggcctgctcaccgccagcgccctgaagaccgcggtcggcaatccgcagcgcttcgccagcggccgccaactcagtgcctggctgggcctgaccccacgcgagttcagcagcggcaaccggcgcaagctgggccatatcagctgccagggcaacgtctatgtgcgtaccttgctggtccacggctcccgcgccgccttgttggcggcccagcgctgcctggccaacacgccggaacgactgaccgcattacagcgctgggccacgcaaacggcggcgcgcatcggccacaacaaagcggcggtggcgttggccaacaaactggtacgaatctgctgggcggtgtggtgccacgaacgacgtttcagcggcaactggcagagcgtaaggcccgcctgacggcgggagtaaccaggagggaatgagggttttcgggtggttgtggtgagacgcgagactgtcggaacaggcgagtcctgcagcggaacaaggccgataacaatcatgatccacgtgatcgattgaacgctgggcccccgctgtgcgaactacagagtggccagggcgatgctgcccatgacaggccggatatacgaatgcaaccgcactgacgacaggcttgaaaagcgattcctcatctacttgtggggagcgtccatat

SEQ ID NO: 4699 - DNA, 1179 bp, unidentified
  source 1..1179: mol_type = unassigned DNA; note = element_72972e0
  misc_feature 1..2: note = core
  misc_feature 3..330: note = LE
  misc_feature 331..1158: note = CDS
  misc_feature 1159..1179: note = RE
  misc_feature 38..207: note = bridgeRNA
ccttgtattagaatatgggcaaaagaaaaccccattacgagtaccttcataatggggttatagagaaagtagagttgctttgccccttgtgccattaagcacgtagtgtagatataagcctactttctcatccactatcaccccgaatggtatctcaggcacgttttccgtagcccgcattcacaaggtttggaggtcaaatggataacccattatattacgttggcattgatattgccaaagctaaatttgatgttgccattaaattacaaaatggcaaacataagcataaaagtgtttaaaaataatccagaaggatttcaatcacttatgcaatggctcaatacatttggtgaaacttttcactgcgtgatggaagccaccaatatttatcacgaagctttggcagattttctgttccaacagcaaatcaccgatttcacgaaaaccgataatttacgctctaaaaccgacaaaatcgacgcaaaaatgcttgctgattatgccgatgaaaagcgtcataaattaccgatttatcagccaatttcacctgctcaacgggaattgttgcgtaaaaatcgccaacttgaccacctgaaaaaacagttggcacaagaaaaaacacggctaacaatgttgcttgacagcgattgcattgcttcaacacagcagatgattgccttcatcaaagcgcaaattaaggctttggaaaaaacaattaaacagtgcattaatgcagataatacattgaaaaacaatgtaaaattactttgcactattcctgctattggctttgcaaccgccgttcaactgattgcccatttaggtgatggaaatcgttttaaaaacgcgaaagcagccgccacttttgcaggtttaaccccgatgattaaaagttcggggaaaagtttaaataccgttattggtatttcaaaaatcgggcaatccgacattcgtaaggcactcttttgccctgcaatgaactttgcctttggcagctacaaaaacagcgtatatcgctcgtttgtgctgcgattgcttgaatgcggcaaacctaaaatggtgattatcacggctttaatgcgtaaattagtcactattgcacaggctgttttgcaaaaacagacagcatttaatttagacacatttatgaaataaaatttgttgtgtcttatggta

SEQ ID NO: 4700 - DNA, 1366 bp, unidentified
  source 1..1366: mol_type = unassigned DNA; note = element_729bb49
  misc_feature 1: note = core
  misc_feature 2..77: note = LE
  misc_feature 78..1109: note = CDS
  misc_feature 1110..1366: note = RE
  misc_feature 1143..1360: note = bridgeRNA
tactgagatggtccgccgctagaacctcatcctagttgggagggttttagtaagcagagtgaaggaggatcatcgacatgcagattcgctccgtagggattgaccttggcaagacgacgtttcacctggtagcgcttgacgataacggcacggtgctcattaggaggaagttcacccagagacagctgatcacgttcacagcgaacctgcagacttccctgatcgggatggaggcatgtggtggggcccacttcctgggtcgtatgttgcgagcgcagggtcacgatgtgaagctgatcccggcccagttcgtgaagccattcgtgaagtcgaacaagaacgattttctggatgccgaggccatcgctgaggcggtggatcgtcagaacatgcggtttgttccgatcaagacggacgaccagctcgacctgcaggcactccacagagtgcgcgatcgtctgatcgcgcgaagaacctccgtcatcaaccagctgcgtgctttcctgctggagcggggtctcgtcttcgccaagagcccggccaagcttcgagagcgtatgcctgagatccttgagaacgccgaggaagatatcactccacgcatgcggaacctgcttgccctgctgtggaacgagtggacggatttagagtctcagcttgaagagatgaacgatgaagtcgaacggatcgcatcgagcgacgccgcctgtatgagactacggcagatccctggcatcggtccgttggtcgcgaccgcgatagtagctgcgatcggcaacggggcagccttccacaagggacgagagttcgctgcctggcttggcattgtgccgcgccagtattcgaccggaggtaaggcgaggctctacgggatcagcaagcgcggcaacaactacctgcgcaagatcctcatccatggagcacgcgcggtcgtgctgcgatcgaagcgagaacgaatcgcgatgggtgcatggatgaccgctcttgaggccagagcgccacgcaacgtgctcatcgtcgccaccgccaacaagctggcgcggatcgcatgggccgtactttcgaccggccaggactatcgagcggtgcaagacccagtcccggcataggtcagcgtcaccatcaagatcaagctctcccacccaggtctgcactggacaagtgaagatgaaagaacagtcaaaacggcgtacctgacacctgattgctcaaatggctcttacacagccgacgggttttgtaggacagggacgcggcgtatctcatcatggccaggagattactctccacccacaggccgaatacatttacgcagactttccttcatccaaaacttttcccttgcattcacgcggcggaccataca

SEQ ID NO: 4701 - DNA, 1413 bp, unidentified
  source 1..1413: mol_type = unassigned DNA; note = element_729d451
  misc_feature 1..3: note = core
  misc_feature 4..82: note = LE
  misc_feature 83..1138: note = CDS
  misc_feature 1139..1413: note = RE
  misc_feature 1152..1400: note = bridgeRNA
tgatggggtggacggcccctgagcggcatctatgtgccaaactcgggttgttgaggacaccgagcgaaaggagccgtccgccgtgaagactagcgcaacagccatcccggccaccatcggtctcgacatcgccaagaactttttccaggtccatgcggtcgatgccgccggccaggtcgtattgcgccgcaagctcagccgcggggatgtgctctcattctttaaggaccgacccaaggctctggtgggtatcgaggcgtgcggcacagggcactactgggcccgcgagatcgccgctctcgggcacgaggtgaggctgctgccacccacctacgtcaagccatacgtcaagcgcggcaagacggacgctgccgatgccgaagccatctgtgaagcggtcacccgacccaacatgcacttcgtgccgatcaagacgcctgaacagcaggcggcactgatgatgcaccggtcccgtgagctgctggtcgggcagcgaaccgctctggtgaacgcgcttcggggtcacttggccgagctgggcatcatcgccgcccaggggatccgtcgtgtcgccgatctgctggcggagctggtcgatgcggacaacaccaggatacccccgctcgccagggcgtcgctcaactgcctcgctgcccagatcgaagcggtggagacgcagatcgacaaactcgaggcgctgatcctggagtggcacaagggcaatgaggcgagccggcggctggccaagatcccgggcgtcggaccgatcaccgcctccgccgttgtggcgacgatcggggatgcttcgaacttcacctccgcccggcacctctcggcggcatgggggctggtcccgaagcagaacagcagtggcggcaaggccaagcaaggcggcatctccaaggcagggaacgcctacttgcgacgtctcttgttcatcggtgccgtcgcggtgatccgcagccagagggcgcaggaggccgaaagctggctggggaggctgctcgagcgccggccagctaaggttgcggccatcgccatagcgaacaagaccgcccgggtgatctgggccatgctgcgcagcggtgacgcgtaccgggcgcccaagctcgcaggagccgtgccggccgccgcgtaaacgagggtgtagagcttcctcatcggagctgccgcggccgatgggggcgtgagggcgaagcggagtgatggcaacaccggtcgatcccgaaaccctgccaaacccgagtttttcaaagcgcgattgagcgcgatccgttgattgggagcagggttcgcggattccatcaaggcccgcggtcatgcgtaccgcacatcgaggccggacacatgaccgcacccgaccgcggcgccatcacaccacaaagcccttgcatcgaggggaccgtccacaca

SEQ ID NO: 4702 - DNA, 1210 bp, unidentified
  source 1..1210: mol_type = unassigned DNA; note = element_729fc02
  misc_feature 1..2: note = core
  misc_feature 3..192: note = LE
  misc_feature 193..1179: note = CDS
  misc_feature 1180..1210: note = RE
  misc_feature 12..201: note = bridgeRNA
cttgtatctctcatcgatagatggttagctcccattctatcacgggaagtcagtgaggttgtagccgacctaagcacaaagatgctgttttgtagattatgcccctgacttctatttatctttaataatctggatggtatccaagcactctgattatcagatgatgctgcatgtacaagggaagagaaagatatgttttattttacgggaattgatgtaagcaaagacaagatagatattggatggttacgtgatgccgctaaaggaaaaaagaaaagtaaggtattaaaaaataccgcacaaggtcatcagcaagcggttaattggttatttaaaaacacccaggcaagcgcagaagacattgttgttgtattagaaccaacagggatttatcacgaaggactgatgtatgctcttcatgataaaggcattaaagttttattagtgaaccccggcaaagcaaaaaaatatgcggagtccattaatctgttgcacaagaccgataaaacggatgccattatgttggcttattatggccatgcacaaaagcaacagcttactttttggcagcccgaaacacctgaaataagggaactaaaagccatgatacgtcggcttgatgccttagaaaaagatttacaacgtgagcaaaacagacaagaagctaccgagtttagcttaacctctcagcgcgtttcacaatcattaatggatatgattgacgttttgaaaacggagattaaaggtttgcaaaaagagattgataaccacatcaatcaacatcctcaactgaaaaaaaaccgagaactgcttgaatcaatcaaaggaattggtccggtgatgtcacgagaacttgtgtatttatttgccagtaaaaccttcacccacgccaaacaggtcgcggcttatcttgggttaattccaaagctgagagaatcgggtaagtataaaggccgtaccacgttaagtaagacgggaagcgcaagaatacgtgcgaagctttatatggccgcagtgtgtgcgagcacacacaacctcgacataaaagcacaaaaagcacgcttactgaaatcggggaaagttaaaatgcaggcattaggtgccgcaatgagaaagttaattcaaatttgttttggtgtgattaagcatcaaaccgaataccaaccacgagtaatataattcgcttgtggttggtagtgagagatggtat

SEQ ID NO: 4703 - DNA, 1588 bp, unidentified
  source 1..1588: mol_type = unassigned DNA; note = element_72a56a5
  misc_feature 1..2: note = core
  misc_feature 3..246: note = LE
  misc_feature 247..1425: note = CDS
  misc_feature 1426..1588: note = RE
  misc_feature 3..226: note = bridgeRNA
ctcgtattataaagtagtagtgtttatagtccctctccaaggactgtatgctatactgttggagatactgtggattgttttttccctcctaccacttgatggtttcggaaaggctacaaccacagtctctttgtatatttgttaatcagttagataccgcatgacggtttatttagaacgaggttacaatcgcagagagtaactgtggccctaaacagtatcaaatactttgcaaaggagtttattatgatctacgttggaattgatgttgccaaagataagcacgactgctttatcactaactcagatggagaagtgttgtttaatgcctttgccatccctaacagccgcgagggttttaatgcccttttccagaaaatccaatctgtaactaatgatctgtccaaagtaaaagtaggactcgaagccaccggacactacagttacaaccttctgggttttctctttagtaaaggtctgccaacctacgttatcaatccgttacataccaatctttacagaaaaagcctgagccttagaaagaccaaaacggataaagttgatgcccatacgatcgcttccatgatcatgtctgatgtgaacttaaagtcctactcagacacatcttatcacaatgaagaactaaagtcattaacccgttaccgttttgataaggtcagggaacgggcaaaactgaaatcctctgtgtcccgccttatctgtattcttttcccggaactggagaaacttgttcctacgatccatatggcttgcgtctatgctcttctttcggagtttccttctgcttcggcagttgcttctgctcatctgaccagactttcaaaccttctttcaaaaagctctaaagggcgttacgcaaaagatgctgccgtcatctttcggcaagcggcaaggagttctatcggttctcatatgcccgcaaagtccttggagttgaagcacaccataaggctcatccgtgaactggatgctgaaattgatgagatcgaaaatgacatcagacggatcatggatgaagatatccgttcacccatccttaccattcccggtatcagttaccgtatgggcgcaatgatcattgccgagatcggtgatttcaaacgttttgattctcccgacaggatactcgcctatgccggcatgtcaccctcaacatatcagtcagggcaactcgataactgttattcccacatggaaaagcggggatcaaaatatctccggtacgccttgttcaatgccacaaaatatgtctgcctttgggatgaatcctttgctgcgtatctcgctaaaaaacgggcagaaggtaaacattacaatgttgcattatcccatgccgcaaagaaacttgttcggctgatctatgcaatggagcggtcagggctgtcatacagtaaagctgtctgaacctttctgcaagtgtcagcatgacactttaatatctccttttggagtgcctataatgacactctgtttgtcatgcagttttcaaggtacaactatatctgaaatgccatccggcaattcattctaaaattttcattttaggccttgacttttaatagttagt

SEQ ID NO: 4704 - DNA, 1437 bp, unidentified
  source 1..1437: mol_type = unassigned DNA; note = element_72a7553
  misc_feature 1..2: note = core
  misc_feature 3..230: note = LE
  misc_feature 231..1421: note = CDS
  misc_feature 1422..1437: note = RE
  misc_feature 10..223: note = bridgeRNA
tccctacgttgttctgcgggacgcggtgagcccttcgtatggttgacccgcccaggggtgccgggtgtggttgaaaaagctctgccacttgtggctctcagtgattggccgcccggtaccccacgacgactcggctgccaattaggaatcgcgaatgatcgctccgtagggaatcgacagcgaggtcgtccgttgggaggcgtcagcaccacatcgcacggaggcaccgcatggccacgatctgggccggcatcgacgcaggcaagacccaccaccactgcgtcgcgatcgacgagagcggccgccggctgctgtcccgacgcgtcgccaacgacgaacccgaactgctcgaactcctcaccgacgtcctggccttgggcgacgaagtggtctggggcatcgacatggccgacggcggagccgccctgaccatcacgattctcctcaaccacgaccagccggtgcactacatctcgggccgggccgtccaccgcgcctccgagagctaccgcggcgaaggaaaaaccgatgccaaggacgccgcggtcatcgccgatcaggtccgcatccgacgggatctgcacccgttgcgcactggcgacgagacagtcactgacctcaagattctcaccggccgtcgcatcgatctggtcaccgaccgcacccgaaccgtcaaccggctccggtctcggctcaccggcttcttccccggcctggagcgggaactggacctcaccaacaccggtccgctcatgctgctgactggctaccagacgcccgccgccatccgacgcatcggcagcaggaggctgcagacatggctgcgcaaccgtcacgtcacccatgctgagcggctcgccggcactgccgtccaggctgccgaacgtcagcacaccagcctgcccggggagaagctggctgccgaactggtgcgtacgctggcgatggaggtgatggccctcaaccagcaggtcaccgagctcgacaaggccattgaggcacgatttcgcgagcatcccgcctacgacgtgatcaccagcatgcccggcctgggcatcatcctcggcgcggaattcctggcggccaccggcggcgacatgaccgccttcggcaccgccgaccgcctcgccggcttcggcggcgtcgcaccagtgcctcgcgactccggcaagatcagcggaaatctccggcgtccccggcgatacaaccgccgactccagcgcgtcctctacatctccgcgctgttcagcatccgcacttgcgaggaatcccgccggttttacgatcgcaagcgagccgagggcaagcgccacacccaggccgtgctcgccctcgcccgccgccgagtcaacgtcctctgggccctgttgcgcgaccgacggtgctacgaacccacgccgcccaccgctctcgcggcttgacaaaccgcattaggaa

SEQ ID NO: 4705 - DNA, 1475 bp, unidentified
  source 1..1475: mol_type = unassigned DNA; note = element_72ae286
  misc_feature 1: note = core
  misc_feature 2..232: note = LE
  misc_feature 233..1456: note = CDS
  misc_feature 1457..1475: note = RE
  misc_feature 1..233: note = bridgeRNA
cgttaccttgtgagggccccttgatcgtcgggggcctggtcgctcggccgggtatggctttgttgccctgccatccatggtccggggggtgttgccacccggtcgagagacacgcgttgaccgctgatagggacacggcccgccgattcggcgaggtctcttcgtaacgtgggtgccggcatcgggtgtcgagactgcgaccagcagtgatgcgttcaaggaggacgacatcatgaactccagatacgccgtcgtgatcggcctggacgtcgggaagagcgggcaccacgcctgtgccctcgacccgggcggcaagaagctgttcgacaagcccctcccgcaagacgaggcacaactgcgacaggtcctctcgggcctgcagaagcatggcgaggtgctgatggtcgtcgatcagcccaacaccatcggtgcgttgccgatcgcggtcgccagggacgcgggctgcaccgtggcctatctgcccgggctggcgatgcggaaggccgcggacctctatccgggcaggtcgaagactgatgcgcgcgacgcgttcatcatcgctgacaccgcccggaccatgccccacacgctgcggcaggtcgacagggacagcgaggtcctctcctcgctgaaggtccttgccgggtttgatgaggacctcgcccatgagaccacgcgggcgctgaaccgcatccgctcgcttctcacgcagatccaccctgcgctcgagcgggtctttgctggcggtcgcctctccacggcgctggtgctggatctgctggagaagttcggcggccccaccgggctcaacactgctggtcgaggcaaagttctgaggtttgctcgttcccactcccgccgcgatcccgaagcgctgatcgaccagatcttcacggcgctcggcgagcagaccgtgacagtgccggcgaccgcggcggtcgagctcgtgatccccagggtggccggccaggtcaaggaactcaaagagcagcgggccacggtcgcccgcgaggtcgagggcatgttggaggacttccctctcgcaggggtcttgatgagcatgccggggatcggcatcaagaccgccgctcagatcctcatggccatcggcgacggcaccacgttcgagaccccgggccatctcgcggcctatgccgggatcgcaccggtcacacggagatccggcacctcgatccgaggcgagttccccgcacgatcgggcaacaaaaggctgaagaacgccctgttctactcggcctgggtcgcctcgcactccgaccccgtctccaaggcctactacgatcgcaaacgcgccgagggcaagcgccacaacgcggccgtgatctgcctagccagacgccgctgcaacgtcatcttcgcgatgctccgcaacggaacctactaccagcccccggccaccacccccagtcaagagccagccgccctcgcagcttgactcagaacatagggacacc

SEQ ID NO: 4706 - DNA, 1619 bp, unidentified
  source 1..1619: mol_type = unassigned DNA; note = element_72af692
  misc_feature 1..3: note = core
  misc_feature 4..280: note = LE
  misc_feature 281..1501: note = CDS
  misc_feature 1502..1619: note = RE
  misc_feature 15..303: note = bridgeRNA
actactacaatatatttgtggttaatactcctaacatccggttgggatgttatccatcttgttgcttaagctgttagaatgagtggagcaatcggtctggccatcctcacctaggacctcgcgtccgtaattgagtcagccaaccagcccctcattcgcagcgttcgttttctgcaggttgaaccggtcatcagcgttcgcgttacgccccagtagattgaataggcaatgagagaagctggtatcgaccatcccaattcacttcaaaggagcagaaatcatgatgaacgcagttggtatcgatgtttcaaaacgcaagagcacagttacgatcctcagacctggcgatgaagtcattctatcccctgtggatattccccacacccgttcctcgatcaacaaactgatctgcctgatccgcggccttgatggggacactaaggtctgtttggaatgcacgggacgctattacgaaccagtggcatcttctttatcggacgccggcatcttcgtcagcgctgtcaatcctctcctcatcagcatgttcggggatgaatccctgcatgcagtgaagaccgataaagcagattcttcaaaaatcgcacgctttgcacttgcacgatggtccaaattgcctcaatatgggcttatggatgaaacacgcaatcaactcaaaaccatgaaccggcagttcgggttctacacggatcgaaagaccgctatgaagaacaatctcatcgcgcttctcgatcagacctatcccggcgccaacagtttctttgacagccctgcccgcgatgacggccaccagaaatgggtagactttgtgtacacctactggcatgtggatcgtgttcgtggcatgtcgctgaacgctttcaccagggactatgagaaatggtgcaagcgtgcgggctacaacttcagtcccagcaaggcagaggaagtatatgaggcttccgctgacctgattgccgtactccctaaggatgacatgaccaaaatgctgatccgtcaagccatagatgctctgaacgccgtctctgcagctgtcgagactcttcgcataaagatgaatgagactgctgccacacttccggaatatccggtggtgatgggcatgcggggcgtcggccccagtcttggccctcagctgatcgcagagattggtgatgtcacccgatttgaaaaacggggatcgttgatcgctttcgctggagttgatcccggaaaggatgattccggagaccgcaaccgcaaaagcgtctccacctcgaagaaaggatctccacacctacgaaaaaccctgttccaagtcatggacgctctcatcaagacctctcctgtaggtgaccctgtatatgacttcatagacaagaagcgttcccagggaaaaccctactatgtctacatgacggctggcatgaacaagtttctccgcatctactatgggcgggtgaatgaataccttgcccagctggaagaagctgaggaatcctaatcttaagaccattacttctccggtcggcgtcccgcggcggcccggttctcgtgcgttcgattcaacctgtatgaaaatttcaatgttcaatcaaaagtgcttgactttttatttgcag

SEQ ID NO: 4707 - DNA, 1172 bp, unidentified
  source 1..1172: mol_type = unassigned DNA; note = element_72b8221
  misc_feature 1..2: note = core
  misc_feature 3..180: note = LE
  misc_feature 181..1149: note = CDS
  misc_feature 1150..1172: note = RE
  misc_feature 33..201: note = bridgeRNA
cttgtatcttaaagatcggttaaaatagcatcggaatgatttggcaaggctcatgcagctcgaactcagccaggggattaaaaagcccgatgtggagccaattgcgcatgagctgagccactcatctgaaacccgaacagttgttggaacctcaattcgaatatacaaggatgggtaataatgagtcagccaaatcagatctgtgttggtattgatgttgctaagggatccttcgatatttgcgtgggaaccggcaaagcttcttttactgtcataaatagcaccgatggtttcgaacagataattaaggccctgaaaagcgtctctgtttctctgattttgatggaggcaactggcggccttgaagccccggtggcctatcatcttcaagctgaaggttacgaaatcgctgttgttaaccccagacaagccagagatttttgtcgggcgatgggataccttgcgaaaaccgatagcattgatgccagagcgctcgcccaaatggcggatgtaatcaataaccatcctgagcgagaacgattcattctggccctgcctgacaatcagcgtcaggttctgaccgcccgggtagctcgccgccgacaattggtggggatgcttgttgcagaacgaaaccgacttcacaccacccatccagcagtgatgaaaagcgttgagtgccttatttgcgcattgaacggtgagcttgaactcattgatattgagataaaagagcacgttcagaagcattttattgatctgtccgcattgctcagatcggtcaaaggtgtaggcccaacgaccattgcaagcttgctggctgacgttcctgaactcgggaacctcactcgaagagagatatgtgctcttgtgggcgttgcccctgttaacagagattcgggcaaaatgcgtggtcggcgctcgatttttggcgggcgtgccagtgtgcgaaccgctctgtatatggcgacactctgcgcagttcgtttcaacccggcacttaaaaccttctacacgcgtcttgtcctggcagggaaacccaaaaaggtagccatagtcgcctcgatgagaaaactgcttactatcatcaacgccatgatcaaaaaaggtgaggaatgggacaatactttccataatttggcctgttaatgaggtggtgttcaagacagttg

SEQ ID NO: 4708 - DNA, 1327 bp, unidentified
  source 1..1327: mol_type = unassigned DNA; note = element_72b8f29
  misc_feature 1: note = core
  misc_feature 2..30: note = LE
  misc_feature 31..1086: note = CDS
  misc_feature 1087..1327: note = RE
  misc_feature 1095..1323: note = bridgeRNA
taatgatatggtcagcccgccctccggggtatgctggtccgttcactcacgtcggggactgtcatggagaacatcgcgcttttaggcatcgatctcggtaagcacaccttccacgttcacgcccaagacaaggcagggcatcagctatggcgcaggaaactgaatcgcaaggagcttgtagagcttgtcgccaacacgccggtttgccgaatcgtgatggagtcatgttctggcgcacatcatttcgcgagaagatttttgcagttcgggcacgacgtgaagttgatcgccccacagtacgtgaaaccgttcgtgaagggaaacaagagcgacttcgtcgacgcggaagcaatctgtgaggcggcatcccgcccgacgatgcggttcgcggctgtgagaaacgagcaacagcagacgatctcggcgctgcaccggacacgggatatgctgattcgcagtcgcgggtcagctcacaatcagattcatgcatatctggtcgagttcgggatcgccattagcaccggcccagccgcgatccggaaactgcctgcggtgcttgaggcaaatgaattgccgccgcggcttgtggcgttgctggagcagctccgggattacgtttttcacctcaacgagcaaatcgcagtcatcgagcgcgaactgaacgcgctgatgaaagaagatgatgtcgcccaacgcttgctgacagtcccaggtatcgggccgattaccgcgagcgtgctcgctgcgcaggccggtgacgcgcgtcaataccggacgagccgtgattttgcagcgtctctgggacttgtgccacgccaatacagtaccgggggaaagacaacgctcctcggtatttcgaaacgcggcgacaagcatttgcgaaccttgctggtccagtgtgcccgatcgatcatgatgcacattcacaaacgcaccgacgccatggcgatctgggtacgccagctgctggagcggcgaaattcgagtatcgtcgcctgcgcgttggctgccaagcttgcccggatcgcatgggcagtactgggcggtaacgctgcctacgttccgcacccgcagcgagctgcatagcaacccaattcattcttcctgcttttgcgacgacaaatgtagatgacgacaacggcaatcggccccgcgaagaacctgacatttgaatcagctctcgtagctgcgacagttttgaggatcgtggggcgcgaattttcatcgtggaccggggagtaacgtccccatcgagagtccggatacgttagcgcaagcctttgccttcatcgaaatttgcagttgcaaaaatagggctgaccataca

SEQ ID NO: 4709 - DNA, 1445 bp, unidentified
  source 1..1445: mol_type = unassigned DNA; note = element_72ba9c9
  misc_feature 1..2: note = core
  misc_feature 3..98: note = LE
  misc_feature 99..1169: note = CDS
  misc_feature 1170..1445: note = RE
  misc_feature 1187..1383: note = bridgeRNA
agaccgtatggagtgcccggcgcctcgctcgtaagttggcgcgggttgccgccgggataggcccggcggtagagccgcaattacgggaggcgccggtcatggtcgaaggtagctgggttggactggatgtgcatgcgcgctcggtgctcgcgagcgtgctcgatgcgggaagcggtgagctgcagacgttgcgggtgccgccgcgaagtgaggagacggttgggtggctgctggggttgcccgctccggtgcgggtcgcctacgaggcggggccgaccggctacgttctcgcgcgcgcctgcgcgcaggcagggatcgcctgcaccgtggcggctccgtccaagatcccgcgcgcgccgggcgaccgcgtcaagaccgaccgccgcgatgcggagcggctcgcgcggcttctgcgcctgggcgagctcgtggccgtgcgcctccccgaaccgcacgaggaagcggcgcgcgacctcgtgcgtgcgcgtgaggacgcgcgcggcgatctcatgcgcgcccggcatcgactctcgaagctgcttttgcggcacgggctcgtgtacgagggcagcgcctggacgctcgcgcacgagggctggctgcgccggcagcggttcgaacgccgggcgctcgcgctcgccttcgacgagtcctacggcgccgtttcgcaggcgaagggacgtcgggacgcgctcgaccgggcgatcgccgagctcgcctcggagccgccgttcgtcgaggtcgtcggtcggctcatctgtctacgcggggtctccaccttgaccgcgctcgcgctcaccgtcgagctcggcgactggcggcgcttccgtccgcacagcctcggccccttcctcggcctcgtgccgagtgaggattcctccggcgagcgccgccgccagggtgcgatcacgaacaccggcaacacccacgcgcgccggctgctggtcgaggcggcctggcaccagcgtcgcccgctgcgggcgagcaccgcgctcgagcggcgtcggcagggccagccggcagcggtgcggtcgcaggccgaccaaagcgcgcgacgcctccacgcccgttggcacgcgctcgagcggcgcggcaagcgacgcacgatcgtcgccgtcgcagtcgcacgcgagctcgccggccactgctgggcgcttgcgaccatgtagccgccgcctcctcagcggcccggtgaggagagcgcaccggcgacagacgcgagaagcgacccgcgagtcagctacgagcagccgaccaggccaagctcgaccctagagggcggctccgcttctcacctcgcacacccggtcatgcggtcccgacccgcgcatatcagccgtgatacaggcgtcgacagcggccggtgcgctccccccaccgaaggagaaggcccaccaagcgcgggccttcggaccgtgcgcacttgacaaatctcattccatatc

SEQ ID NO: 4710 - DNA, 1355 bp, unidentified
  source 1..1355: mol_type = unassigned DNA; note = element_72bec91
  misc_feature 1..3: note = core
  misc_feature 4..246: note = LE
  misc_feature 247..1107: note = CDS
  misc_feature 1108..1355: note = RE
  misc_feature 3..220: note = bridgeRNA
cttatattatatttaacgcagttagctactgccaaagcccaagtggtatacttggaataagccactgtggattagttcatttcctccaatcgcttgacgatttccgaaagggtctaaccacagctttttgtttcaattggtaatgagtttgataacgcatagacgttttatctcgtctaaggtaacaaggcaaaaagttcgtggataaccaagtagacttgaaatactatatctggaggtactcccatgctttatgtgggcattgatgtcgctaaaaataaacacgatgttacagccttgaatgttccaggaaaaactgttcttaaaccactcactttttcaaataataaagctggttttgaactcttagatctgtcttttcgacagctcaaccaagactgtctcatcgctcttaaacttctttctgaccccaatcgtgaacaatttcaacacgataatcggcaagtagaactaaaaatactggctagacatattcatcgtctcaagaaaaaacagtctgattggaaagtacaatacactcgttgtcttgatatcatctttcctgagttggataaaatcgttggaaagcattcagaatatacctaccaactcttgacacgctaccctaatcctcagaaaaggcttgaggcaggatttgataagctgatagaaattaagcgattgaccgcttctaaaattcaggatatcctctcagtcgcacctcgttctatcggaacaacatctcctgctcgtgaattcgaaatcatcgaacattacaagaggctcattgacaaggcggaaacatgtgtcaatgacttgatggctgagttcaactcggtcatcacgacggttactgggattgggaatcgtttaggggcggtcattttagccgagattcgaaatattcatgcctttgataatcctgctcaattacaagctttcgctggactggattcttctatttatcagtcaggtcagattgatttagctggaagaatgatcaaacggggttcccctcatctgcggtgggcactcatacaagctgccaaagcatgcgctcgcttttcacctgcttttaaggcctatcttaagactaagttagaataaggaaaacattacaatgtagccatcatccaccttgcaaaaaaacttatccgaaccctgttttatatcctaaaaaagagctgccatttgacgaacaaaaagtgatgtaatttctgaaattaacacaggattacctttgaaaaaatggactttttcaagggctttttgccgtgctctaaaatcatcgccaaatcatcaaattgaaataagaagtagtttagataaaactattgacttttcttatagtttgt

SEQ ID NO: 4711 - DNA, 1397 bp, unidentified
  source 1..1397: mol_type = unassigned DNA; note = element_72cb42b
  misc_feature 1: note = core
  misc_feature 2..80: note = LE
  misc_feature 81..1118: note = CDS
  misc_feature 1119..1397: note = RE
  misc_feature 1139..1387: note = bridgeRNA
tgatggtgtggaacgaccccgctcctgcagtaccgttggcgagacaggctggtcgttcgaggacatcaaaggagcacgcaatggaagagatgacaacagtgggactagacatagccaagcaggtctttcaggtgcatggtatcgccagcgacggccgagtggtcgttaggcgatcgcttcggcgctccgaggtgcttcgctttttctccaagctgtcgcgctgcgtcgtcggcctcgaagcgagcggcggcgcccatcactgggcgcgcgagattggagtgttcgggcatgacgttcggctgatcccgccaagttacgtcaagccctatgtgaagcgtggcaagaccgacgcgatcgatgccgaagcgatttgtgaggcagtctctcgtccgaccatgcggttcgtgccggttaagacaatcgcgtgccaggccagtcagatggcgctcaagagtcgcgaccttctcgttcggcaacggactcagaccatcaacgccttgcgcggacatcttgctgaactgggaatcgtcgcagcaaaggggttggcgaaggctgatacgctggccgccattgtcctcgacgacaccgatgaacggctgccgatgtccgcacggaaggcgctttccgtgcttgtggatcagctccggtccttgaccgaccggatccaacagctcgagcgtgatatcgttgcggacgttcgcgccagccaaacagggtgtcggctgacgacaatcccgggcgtcgggccgattacagccgccacgctccaggcgcttgcgcccgatccagccgccttcgcttcgggaaggcacttcgccgcctggatcggcctgacgcctcgaagcaactccagcggcggcaaggagcggatcggcaggatttccaagatgggcaaccctgcgttgcgctcactcctggtcgccggcgcgaccgcggtgatcatgcatgcacgacggggacgccccatgtcgacgtggctgaggcggctgctcgagcggaggccgccgaaggttgtggccatcgccctggccagcaagatggcgcggatcgcatgggcccttctcgcaaagggcggcgtctacaatcgcagcctgcctgccatggcggtcacggcataagctcaccacccacctgacgaattggccagccggctccgacggttggtcatgggcaaggcgcagttaactgtgatgaccaacgggacgacatctcgatagggcgtaaggccgcggattcccaagcgcatcaagcgcgttgatttgattggcccgtactatcgcgaacgtcatcaaggccggcggcttttgtccgcacaattagaggccggacatatgggcgcaccgaaccccaaaggtcattcaggcgacagcgacccttgaccgcggggtcgttccaca

SEQ ID NO: 4712 - DNA, 1213 bp, unidentified
  source 1..1213: mol_type = unassigned DNA; note = element_72d086b
  misc_feature 1: note = core
  misc_feature 2..213: note = LE
  misc_feature 214..1179: note = CDS
  misc_feature 1180..1213: note = RE
  misc_feature 36..203: note = bridgeRNA
tcttaagttagcaattgtttaaatttagtaataaaaaccagaaagaaaaaagcgtagagtaaggttatgatatacgttgaaacctagatttcgtcaacattgataatccctacgcttttacgacttcgaattcgttcagttctgtgagatcaagatctcgattttaagttgtttaattgatagtagttattttctttccaatccttttttcttatgagtaaaaataaacaatttttaggaatcgatgtaagtaaagacgttttagatgtatatgattatcaaggaaattggtatcagtttaaaaatgatgcatcaggttttaaagagctgttgttaatcacaactgatttaacacattgtataatggaagctacaggatattatcatgtacgcttagcttattttttaacagaaaaaggagttttgttatcggtagaaaatccgttgaaggttaagcgttttattcaggtgaatttatcaaaagtaaagacggataagagtgatgcaaagcagttatataattatggcgtaagtcaatctccttctatatggaaaggagatagtaaggaacaacaagagtgtttacaaatagtacgtttgttgagtgtttatacgaaacaatctactcaattaaagaacaagcttcatggcgaatcagtattaggaactccctcaaaattggtagttaattccttaacaaggcagctgaaaaacatacaaaaagagatagttaaattagaagatttgttgctagagaacgtaaaaaagagttatcaagaagaaataactttattaaagtctattccaggaatagggggtaaaacagcattaatgttattagtttttaccgatggatttaagcgttttacttcagcaaaagagttgtgtagttacgcaggtattacacccactattagagaatcaggcagtagtataaaaggacgccctcgaataagtaaaatggggaatccaaagcttagaaatttattatttatgtgtagctttaatgcttgtaaatataacaaagcatgtagagagctttatgaccgaatagttgctaaaggtaagagtaaaaaactagctttaatagcggtatgtaataagctactaaaacaagcttttgccattgtaaaaagtggtttgccttatgacgcaaattataaaaggatgttggattaaaaagtataaaatgtacttgttttatctcggttct

SEQ ID NO: 4713 - DNA, 1485 bp, unidentified
  source 1..1485: mol_type = unassigned DNA; note = element_72da1de
  misc_feature 1..2: note = core
  misc_feature 3..244: note = LE
  misc_feature 245..1465: note = CDS
  misc_feature 1466..1485: note = RE
ctaatgggaagtgccggggttgccgttcaggcagactcggtgcctggtagccgctggtgagtgagcacttccgccacctggacttcgagtcctggggtcagagcgtgccctcaccggtggtcaggggctgttgatcgctgatgggatgtcgtgccccccgaacgttggggtgagcactggtccattaggtcgccgacgcgctcctgcgggctgctgtgtcccgttgtcgatgttggaggtctgggtgctgttggtcggggatgactgggctgaggaccaccacgacatcgaggcccaggacgagacgggccgggtgttgaagcgggctcggctggccgaggggatggccgggatcgcccggttccacgacctcctcggtcggttcgtcgctgacgacgctgaggcgtcggaggtgctggtgtgtatcgaggtcgatcgggggccgtgggtgcgggcgctggtcgcggccgggtaccgggtgttcggcgtcgaccccaagcaggcggcccggcaccgggagatcctcggcagctcgggggccaagagcgacaagggtggcgcccacgccctggccgacatgatccgcacccgccgccaccagttgcgcgaggtcgccggggactccgggatcgccgaggcggtcaaggtcgtcaccagggcgcatcagacactgatctgggaacggacccgccacatgctccgccttcgggtggcgttgcgggagtacttccccgccgccctggccgcctacaagtccctggacctcaccagcgacgcggtgctgaggctgctggtcaaggcgcccacgcccgaggccgcggcgaagctgacgatctctcagatcacggcctgtctgaagggccgccgcggcatcccggacaaagccgcagcgatccaggacgtcctgcgcgctgagcacctcgggcaagcgccgttggtcacgaccgcctacgcggccacggtgaagtcactggtcgcgatcatcaccgtcctcaacagcgagatcaagaccctccaaggcgaggtcgaggcccattttggccgacacccggacgctgagatcatcctctcccagccgggactgggtgtgatcctcggcgcccgggtgctcgccgagttcggagacgcccccggccgctacgcctcggcgaaggcacgcaagaactacgccggcacctccccgatcacccgccagtccggcaagaccaagaccgtccaggcccggttcgtccacaacgaccggctcatcgacgccctccacaatcaagcctcgtgcgcgatcctccacgacccgcacgtccgcgcctactacgaccagctcaaagcccgcgacatcagccacaacgccgccctccgccaggtcggcaaccgcctcgtcggcatcctccacggctgcctcaaaaccggcagcatctacgaccaagcaaccgcctggtcacaccacgaccacgacctcgccgcttgacatccaacctccagggatgt

SEQ ID NO: 4714 - DNA, 1643 bp, unidentified
  source 1..1643: mol_type = unassigned DNA; note = element_72f7853
  misc_feature 1..4: note = core
  misc_feature 5..282: note = LE
  misc_feature 283..1518: note = CDS
  misc_feature 1519..1643: note = RE
  misc_feature 13..302: note = bridgeRNA
ctcctacaataaagttaaggttctaggcacggcagccagccgtgtctatttccatctcaaagccgaaactgttagaatgggagtggaaatggtctgacgcgcgtcaccttgggccagcacgcccgcaaaggagtctgtcagccgccgctctcattcgcagtattcgatttaagcaggttgtcccaccgtctttcggtgcgttcgtgtaaatgaccaggagattgaacaggcaatgagaaaaaaggcggtcgccattatttcatcaatcaggaggtacttctaatgaacgctgttggtatcgatgtgtccaaaggcaagagcacggtggctattctccggccatttggtgaggttgttcatttgcccttcgacgtggcccatgactatgggagcctcgaacggctggcagatcagatcatctgcctggatggggaatccagagtcctcatggaggccacgggccgctaccacgagcctgttgccgcggccctgcacgagcggggcatctatgtgtccgtactgaatccgctggccatccacggatataattccggcggaaccgtccgtaaggtcaagacggatcagaaggattccatcaagatcgcaaaatttgcacttgaccattggacggatttgcgagaatatacacctgtggatgcaatcagacaacaacttaaaatctttagccgccagtataatctctacatgaagtccagcgtggcactgcaaagcaacctcatttccctgtctgataaggtctttcccggcgtgaatgagatgttcaccagcccggaaagagcggatggacataagaaatgggtagattttctcactactttctggcattgcgaatgcatcagccgggtcagggaggatgcattcgtggaacgctacagaaagtggtgcaagcggaagggctacaacttctccgaagcgaaggcttccgatatttacaccgacagcctgggccacatcgtcacgctgcctaagaacaacaacaccaaactgctcatccagacggctgcaaaggagctgaccgcaatgaatgagctgctggcgtccgttcgggctgagatggtgcgtctggcgaaggagctgccggaatttgagacggtacacgccatgtacggcgtgggtgaggccactgccgcccagctcatggccgagatcggcgacattcggaattacccccgcagaagctctctggtggcctttgcgggtgttgacccggaggttgaccagtccggcaagaaggacagcaagagcaacccctccacgaagcggggatcgccccacctgcgcaggacgctgttccagatcatgacagtctacctccgtctgaaacctcaggacgaggccgtgtaccagttcctggacaagaagcgtgcggagggaaagccctactatgtctacatgacggcaggctccaacaagttcctgcggatctactacgcacgggtcaaagagtgcatggcaaagctcgacgcaccgactgaaaccgccgaagaaaacggctgattcacagcggctattctcccagccgatgaacgctccagttcaccggcggctttgctatgccctttttgcctcgccacttgagccaaaatttttctcaattgggggcttgactttttgtttgcaga

SEQ ID NO: 4715 - DNA, 1308 bp, unidentified
  source 1..1308: mol_type = unassigned DNA; note = element_72f8640
  misc_feature 1: note = core
  misc_feature 2..192: note = LE
  misc_feature 193..1293: note = CDS
  misc_feature 1294..1308: note = RE
  misc_feature 4..228: note = bridgeRNA
cagtgaggatgtgtaggagcgggtcacccggccggtctgactcggcgtctgactgaccttgagggtcctctacgggattcgtcggcctgtccgggtgacccgttcctgcactcacctgctgggcgttcgtgacctgataggagcctgtgcaagaggtcccgtcactgtcctgtccgcccgtcccggcggtgcgtgccgaccctgttcggtgcaagcgagagggacgacggtttcagcatggcagccaagaagcgtcacgtcacaggtggtgtcgatacccacggtaagactcaccacgccgccgcggtcgatcagaccggcagggtcctgggtgatcatgagttcccagccactgccgtcggctaccaacagttgctcgcctggttacgcgggttcggtcgggtgatcaagatcggcgtggaaggcaccggcacctacggcgccggcctcgcccgctacctcgcctcccgtggcgtcgccctggtcgagatcgaccgcccggaccggcgtgcccgccgcgccagaggcaagtccgaccccctcgacgccctcgctgccgcccgcgcggccctgtccgggcaagcaaacggcacccccaagacccgcagcggaccggtcgaagccatccgcgccctgcgcgtggcgcggcgaggagcagtcaaggcccgcaccgccgccctgaaccagatgcacgggctgatcgcctccgcacccgacgcgctgcgccaggacctcaccggcgcgggagccaaactcgtcgatcagcgcgccgctctgcacgccgacgaaacccgactcaccgatcccgtcgaagccaccaaagcggccctggccgtgatcgccgcccggatccggcacctcaccgccgagatcacccaggccgaccgccgcctacgccctgccgtcgcccgcaccgctccacacctgaacgccgtctacggcgtgggaaccgacgtcgccggtcaactcctgaccaccgccggcgacaaccccgaccgactccgatccgaagccgccctggcccacctctgcggcgccgcacccatccccgccagctcaggacgcaccgaccgccaccgcctcaaccgaggcggcgacagagccgccaactcagccctgcacaccatcgccctggtccgcatgcgctacgacccccgcacccgcgcctacgtcgacaaacgcaccaaacaaggactcagcaagaaagaaatcatgcgctgcctcaagcgctacatcgtccgcgagatccacaccgccctcctcgccgacttcaccgccctcaacaccccttgacttccataggagcat

SEQ ID NO: 4716 - DNA, 1210 bp, unidentified
  source 1..1210: mol_type = unassigned DNA; note = element_72feabe
  misc_feature 1..2: note = core
  misc_feature 3..208: note = LE
  misc_feature 209..1195: note = CDS
  misc_feature 1196..1210: note = RE
  misc_feature 12..189: note = bridgeRNA
cttgtatctttatctccgtggtggttagctaccaccgcacgaagcagaggtagcctgaacccatccttaaggcattgaccttgtagcgtagatcaggccctctgcttcacctctcgccagcacggacactgaacggtagccaaggggcaaaccctgaatgcacaaggcaagtgggcgaagttggccaacattgtaacggaggttcatcatgttttatctcggtatggacgtcgcaaaagccaagctggattgttgtctgttgctggatgaagcaactggccgccgcaagaccaaggcggtgaacaacacccggcccggcatcgttgagttgctggctctggtcgccaaacaaaacatctccccgcaggagttgcacgtcgtcatggaagccaccggcgtgtatcacgaacaagctgccttggccttggcggatgccggggtaacggtttccatcgtcaacccggcgcaggtcaaggatttcgggcgcgggctggcggtgcgcactaagaccgatggcgtggacagcttcgtgctggcgcgttacggcgccctgctcaagccggttgcctggcaacccccgccgcccgaggcgcggatgctgcaagcgttgctggcgcgccgcgaagccattgcccaagatatgcaacgcgagcgcaaccggcaggagaaagccgatgccaccgacaccccggagccaatacggcaatcccttgccgacagcatcgggtttctgtcccggcagctcgcccagttgcagcaggacatcgaccggcacatcgaccggcatcccggtctcaagcatgatctggcgctgctgcaaaccattcctgcggtcggcccgaaggtaggcagcaacatgctctcggtgatgcatagccacgatttcggttcagccgaacagctggcggcctatctgggcttggtgccggtggagcggcagtcgggcagttcggtgatgggccgcgcccggctgtccaaggccgggccggccagaatacgcgccgtgttgtacatggctgccgtggtggcaaccaaatacaacccgcacatcaaggccgtctatgaacggctgcttgcccgtggcaaatccaggatgtccgccctcggtgcggcaatgcgcaagctggtgcatttgtgctttggcgtcatcaagacacaaacaccgtatcagccgaattatgtgaaaatcgcttgacgctaaagacggtat

SEQ ID NO: 4717 - DNA, 1439 bp, unidentified
  source 1..1439: mol_type = unassigned DNA; note = element_72ffc9b
  misc_feature 1..2: note = core
  misc_feature 3..229: note = LE
  misc_feature 230..1432: note = CDS
  misc_feature 1433..1439: note = RE
ctcctaccatgaattcgtatatagaaagaagtataatggtgttgtaatattaattaggaaggcaggaggactaataacttcctgggcgctagagcccttatttcagtatgtcccaagcctctgagagccataataggttggttggatcgtagaatccttgtaacgctggaggattggtctggaggctgcggcacctgcttttcattttcttctattgggaggtgatgtgatgtcaggattaaaaggcaactttggttgtattgtcgggattgatgtttccaaggataagtttgacgcctgtggaataacgggtgaagaggtcaagctttttcagctttcggtggccatggatcggaagggttttgagaaactgaagaaacatctttcatctttttcagagtcatctgtattaatcgggatggagtctacggcatcctatcatgttaatctcttctcttaccttgttgctgaaggttataaagtcattctcatcaatccattgctgatttccaattacgtaaaaatgcagttaagaaagaccaaaacggacaaaaaggatgccgttgtcattgcccagtttcttcttgccaatggcgataccctgattcaacgggcgactccggctttgatttcggatcttcgggacctttcccgtcagcgggagagtttagtggacgagatgacatctttgaaaatcgagatcaaacaactcctgaatatcacctttccggaactggagcacatggttggtatatttacgaaggctattctcaaacttctacagcaatatccttccgcaaatgcgattaagaatgcagatattggccaattatcacaagccttgattgcggattcctatggacataaaagagaggagtttgctaagacgctgatcaaggtggcccgttcttcgataggcaccaacagtcccgccaaagaaatgattctaaaacagaaaataggtctgctccttcacttggaagaagctcttcaggagattacagacatgctgattgagatggcacggaaactgatggaagaagacatcgatattatgacttccataaaaggtatcggggacaaaactgccgccaattttctggtggaaatgggtggcgacatcaataattttgaatgctccggcaaaatcattgccatggcgggattggaccctgctgtttaccaatcaggccaacatgaaggcaggggcaggataacgaaacggggcaaccgtcatttgcggaggatcatctggatgatgacaaccagtgtgatccaatacaccgatatttttcatacttattatcaaaaacgaagaaaagagggattaccctacaagaaggctgtattagctactgctcataagttgattcgtgtaatttatgctatgctgacacagcggaaaactttttgtccgcagggaaattcatgatagttga

SEQ ID NO: 4718 - DNA, 1369 bp, unidentified
  source 1..1369: mol_type = unassigned DNA; note = element_7304084
  misc_feature 1..2: note = core
  misc_feature 3..86: note = LE
  misc_feature 87..1085: note = CDS
  misc_feature 1086..1369: note = RE
  misc_feature 1121..1328: note = bridgeRNA
gaatgtaagggacttccccgtcccgatgagacaccgaagtgtcaggattgagttgcgaaaccgatccctcagaaaggggaagtcccatgaacctagtttctacgcttggaatcgacttggcaaagaacaccttctcggtgcatggcgttaatttaaacggcgaagtagtgctgcggcgcagcctgtcgcgggcgaagctcagcgagcttgtggcgcagctgccgccgtgcctgattggcatggaagcctgctctggagcgcacgagtgggcgcggcgattctcagtctttgggcataccgttaggctgatggcagccaagttcgtgacgccgtatcgcaagagcggcaagaacgacggcaactatgcggaagcgatctgtgaggcggtggggcgcccgaacatgcgcttcgttccagtgaagtctcttgagcagcaatccgatctcaccctgcaccgtgtgcgccaagggtttgtggaggagcgcaccgcgacgctgaaccggctgcgcggcttactggcggagttcgggcacgtgctgccgctgcgcgcggttgaggtgcatcgacgggtaccacagctgctggggaaactgccgatccgggtggcgagctgtgctcgggatctgttggagcacgctgcgcggctgcaagcgaagaccctcgagtatgaacacgagatccgaacacacgtgcgctccaatgcactcgctcgtcgtgcgcaggctcgcatgggcatcggacccatcaccgcatcagccctggtcgcgaccgtcggcaacggccgtgacttcaagaacgggcggcagttcgccgcctggcttggccttgttccgcgccaatactccacgggcggtaagacacgactcggacacatcaccaagcgcggcgatccgtacttgagaaccctgctggtcatgggagctcgtgccgtattgcaacgagcactcagcctcaccgatccattctcccgctgggcgctcgccgttcgagagcgtcgcggatatcaccgcgcttgcatcgccatcgcggccaagaacgcacgggtggcatgggcgttactggccaaggaacccgtgactgcctgagcgtagcgcccaaaaatgcaccttcgaacaggagatctcacaagcactgcactcgtagagcacacaggtcagaccggcgctcgcagatccagatcaagcttcgagcggaaaacgctgcctaacgatcgaggtgcgagcgcgcggcttacacgcgggcccgagtgctaagcactcaccagtggccgattagagtgacgcagtctgtccttctcgctcaaccgaatccctgcaggcgaacgaaccagaactccaccagctgttgacacaacggggaagtccttaga

SEQ ID NO: 4719 - DNA, 1579 bp, unidentified
  source 1..1579: mol_type = unassigned DNA; note = element_7304582
  misc_feature 1: note = core
  misc_feature 2..325: note = LE
  misc_feature 326..1324: note = CDS
  misc_feature 1325..1579: note = RE
  misc_feature 75..292: note = bridgeRNA
cagggaggatgtggatagtgcttcctggcccctgctcgtccggctccggccccgcttctgtggttttgggctggtgcgggcgtagggccgggggcctgggtcccggcctgacctgctaatcggctgatgccgtttggctgtcctgctaacgacttgtcggccgggccccaggttttggcacccaccggcgctgccggcctgatctgcctggcctgggcaagaggccggggttcccagatcggcggccagcgggtgcgtgccatccctcaaccacagaaagggatgacgatgcccatcgcaggggacacgcgccattaccggcggcgtggacacccatgctgacacgcatgtagcggccgcactggattccatcagcgggttacccggcgtccaggagttcgcggccaccgcggccggttacgccgatctgctggactggctgcgcgggttcgggaccgtctgcctggtcgggatcgaggggactggcagttacggcgctgggctggcccggcacatggccggcgctggggtgcgggtcgtggaggtggatcgcccgggccggcaggcccggcgccgggcgggcaagtctgatccgctcgatgcggtcagcgctgcccgggcggcgcagtccggccggccctgcggtgcgccgaagggccgggatggggcggtggaggcgatccgggcgctgatggtcgccaagcgcagcgcccgcgccgaacgcacccagaccatcaaccaggcccgggccctcatcctgaccggccccgatgacctgcgtgcccgtttcgccaagcttcccccagccaccctggtcaccgagatcgcgttactgcggccccggcccggtgacgcggccgcctatgccatacgggtggcgctgcgcgagctcgggcgccgcgcggagttcctggatgggcagatggagcgcctggacgagctgatcatcccgctcgtgacagcccgcgcacgtggcctgctcaccctgcgcggcgtcggcccggagaccgccgcgctgctgctggtcaccgcaggagaccaccccggccggctgcgctccgaggccgcctgggctcacctgtgcggcaccgcgccaatccccgcctcctccggcaaacgcacccaccaccgcctcaaccgcggcggggaccggcaggccaaccacgccctgtggcggatcgtgatcacccggatgagctcccacccgccgacccgcgcctatgtcacccggcgcaccaccgaaggcctgtcgaagaaagagatcatccgctgcctcaagcgctacgtcgcccgtgaggtctacccctacctgcgcacccgctagaaaacccagctcccgggggcggcctggcccactaatcggctgccgcagacgtgctggcctgcgaacgatccgccggccgccccccgggcccaccctgacttcgctggccacgtgacctaataagagcctgccctccacccggagcggcccgtccctgtcctgtccgtcccagcaatccgcgctccggccgagcacacttcgcccagaaacaacttccaagaaatgctcaccagcccttgacagccataggagcat

SEQ ID NO: 4720 - DNA, 1580 bp, unidentified
  source 1..1580: mol_type = unassigned DNA; note = element_7310e08
  misc_feature 1..2: note = core
  misc_feature 3..248: note = LE
  misc_feature 249..1424: note = CDS
  misc_feature 1425..1580: note = RE
  misc_feature 2..226: note = bridgeRNA
ctactattagtattagtcatagtctttctttaccttttcaataggttcgactatgctgtttaagatgctgtggattggtcttttgctcctaccgcatagacggtttttgagaggctccaaccacagtctctttgtttatttgttaatcagttagttaccgcatgacggtttatcaagaagtaggttacgattgcaaggagccctgtggatctgaaacagtatcaatactatttttagggaggtcctatatgatctatgtaggaattgatgtcgctaaagacaaacacgattgcattatcaaaaactctgttggggaagttgttttcagaacattcaccatcaaaaacaatctcgatgggttcaatgatctttatcagaagatagaatccgtaatggaagatgtatctaaagtaaaagtagggctagaagccacaggacactatagctacaatcttcttggatatctcgttgataaaggtctacccaccttcgttatcaatccgttacataccaatctgtacagaaaaagtctaagccttagacagacgaaaacggacaaagtagatgccagtacgattgcttctatgctcatgtcagatgtgaacttaaagtcctactctgacacatcgtaccacaacgaggaactcaagtcactaacccgatatcgctttgataaagtaaaagaacgggcaaagctcaaaacttccatatctcgtctaatctgtatcctttttcctgaattagaaaagcttgttccaactctacatatgaattccgtttattcattgctatatgaatttcccggtgctaagcaagtagcaaatgcgcatcttacaaaactttcaaatctactagccgaagcttctaagggtcattacgacaaggatgctgccataacatttcgagatgcagcaagagcctctatcggctcaaatatgcccgcaaaatcccttgagctaaagcataccatcaaactgatacgcgaacttgattccgagattgatgagattgaaggtgaaatcaaagctattatggacaccatcaattctccgattctaagcattcccggaataagctatcgcatgggagccatgataattgccgagattggtgactttgatagatttgactctgcagataaaatccttgcttatgccggtttatcaccttccacataccaatccgggcagttagataactgccatccaagaatggaaaaacgaggttcaagatatctacggtatgctctgtttaatgccaccatctatgtctgccattgggattcgacattcaatgcttaccttgcaaaaaagcgagccgaaggaaagcactactatgttgctgtatcccatgcaacgaagaagctcgtgagacttatatatcagcttgagaaatctcatcagtcatacaacaaagcagcttaactaattccgtacaaatcttctttcaagagcatctaaaacgatgctctatttgtcatgcagttttcaaggtgctgaatacgatgaataagtcatcgtcgctatatttaaaacatttctgttttaaaacatttttattgactttctttaatagttagt

SEQ ID NO: 4721 - DNA, 1618 bp, unidentified
  source 1..1618: mol_type = unassigned DNA; note = element_731277f
  misc_feature 1: note = core
  misc_feature 2..240: note = LE
  misc_feature 241..1485: note = CDS
  misc_feature 1486..1618: note = RE
  misc_feature 6..220: note = bridgeRNA
tcgtaatataagttcaaccagtttttactggttgaactttttttatttggttttattatagcggtagtcggagtagaacgtagcgcccgtgggactcgatcccgtccgcaaaactgttcactccctacttgtataagcatgttttaggctggttgggacaatgatcccgtttaacaagcgaacctatgacagtacaagcagcctagggacaaccgactaatcttaatttccaaggaggagatgatgatgaatccagtagttgggctggatgtttctaagggggaaagtcaggtacaagcattcttagataagggacagccttttcgtaaaagttttagtgtaaaacatacagtggagggctttgagaatttattaggattcttaaaagagattgaaagagtagctgatggtaagcaaccttcggttattttagaatcaacaggacattaccactctcctgttattcaatttttggaggaacagcaatatgtttatattattgtgaatccccttatctctcatcgtgcaaggagtacaagtttaagaaaggtaaaaacagacgctgtcgatgcctatcttctttgcgaactatactacaaagaagaagttgagccgtataaaaaaagaggtatacaactcttaaaccttcgtaatcttaaaaggcaacaagagacaatttcaagtatctctgcacaaaccaaggtacagcttctaacagtgctagatcaaatattccctgaatatagaggtgtctttggtaatttatattcaaaagtctcattacagactcttttcttatttcctacttctgaacatgtactaaatactaccgaatccgttttaactgaaaagattgtatcgttatgtaccagacgttcagaaaagtgggcaaaagaaaaagcacaaaagcttattgaggctgcagtacgaaatccatttcaaaacaatttgtatgaaagccatatatttaacctaaagatgtttattaccattgttcttcaatatcaagagcatctatcacaactagaaactgaaatagatgcccatgctaaagaaattgaagaatataagattatccaatctatccctggtatcggagaaaaaattgcggcaacaatcatttccgaaattggaggaatagatcggtttaatcatcctaaaaagttagttgcctttgcaggaatagatcctagtgtttactcttctggaaggtttacagcgaccaacaatcgcataactaaaagaggatccagaaggttaaggcaagcattatatatggctgtgtactgtggaattcgagatgcacgtaaacaaaagaagagcgataccgttatacctcgagacaaaagattaagagagttttacgataaaaaacgcgatgaaggtaaaccctatagagtagcaataattgcttgtgctaataagcttttacacttgatttatgcactattaaagaacaaaactactttccaagagttaacttaaaaactatatttaacaacataaaacaaaaccttccaataatgaaattcaggaaggttatttggcatactcatctttagtatatcatctatttttcatttttttattgaaaaatgttgacaactattagctggtt

SEQ ID NO: 4722 - DNA, 1364 bp, unidentified
  source 1..1364: mol_type = unassigned DNA; note = element_73205a0
  misc_feature 1..2: note = core
  misc_feature 3..74: note = LE
  misc_feature 75..1103: note = CDS
  misc_feature 1104..1364: note = RE
  misc_feature 1079..1352: note = bridgeRNA
tgatgatgtgaccgccccccgacggcatcaatgtgccaaggtgggtctacgatgatccacaaaggaggacggtcatgtcggagattatcacggttgggctcgacctggcgaagaatgtgttccaggtgcacggagccgacagcggtggtcgggcggttttgcgcaagaagctgcggcgcgctcaggtgctggagtttttcggccagctgcctgcatgcgtcgttgccatggaggcctgtgggggtgcgcatttctgggggcgagagatcgggaagctggggcatgaggtgcggctgatcccgccggcctacgtgaagccgttcgtaaaacgccagaagaacgatgctgccgatgccgaggcgatctgcgaggcggcgctgcggccgacgatgcggttcgtgccggtgaagagcgaagagacgcagggcgcggccatggtgtttcggatgcgcgagcttctgatccggcagcggacgcaggccatcaacgcccttcgcgggcacctgagcgagttcggccggatcgtaccgcagggtgcggccaatgccgcgcgactgatcgccatcgttgatgacccggacagtggcctgcctgccgatgccatccccacgctcaacgtgctggtcgcagctctcgctcatctcgagacggagatcgccaagctcgatgccgagatcacccgtcgagccaaggagaacgagttggcgcggcgcctgatgacggtgccgggtatcgggccgctcattgccacagccatcgcgacccttgcgccgccggcggagaatttccacaaggcccgggattttgccgcttggctcgggcttacggcccgacaacattcgaccggcggcaagcagcgcctcggggccacgacgaagatgggcgagcgatccttgcgacgcctgctgatcattggcgccaatagcgtcatcatcaagcggcacacccatgctgcggcgcgtccgggcacatggctgggcgggatgctgtcgcgcaagccgccgatgctggtgcgggtggcgctcgcgaacaagatggcgcggatcgtctgggccctgatggcccggggtggcgtttaccagtctccggctgcggcggcataagccgaccgtcggtcgcgaggacgtcggagcacaagagggcaaggagaagtttggcgcaacagtcgtgagacgggatcaggaaaaccagtgcgcaacaaagtgccatcgagcacgcggcgttgatttggagcctgatccgcgaacaccatacgggccccgcggcatgtattgcgccgcatacgaggccggatacatgtcagcacccgacgacgcgccaagatcaactctgaaaaaacctcttgcgcaaggggcggttataca

SEQ ID NO: 4723 - DNA, 1315 bp, unidentified
  source 1..1315: mol_type = unassigned DNA; note = element_732e091
  misc_feature 1: note = core
  misc_feature 2..467: note = LE
  misc_feature 468..1268: note = CDS
  misc_feature 1269..1315: note = RE
  misc_feature 58..264: note = bridgeRNA
cctttagatttgaaaaccaaatttaagtgttaaaaagaaataatgataatgatgtatatctttcttttttctttgttaataacattaaatttgttgataacttaaataaaaaaaagaatggggtgaacttttttgtgttatagacttttaaagcctaaacggagtattagtccccattctttattaaccaggttacaaggaccaaatagaatactagaatttaccttttaaaggtgttagtcaaagtaaccattttaaacttcataaaattatgaaaattaaagacacaattggcattgacatgagcaaattaaattttgatgcatgtatttactctaacaaagctaacaaacagtttgagaacagtaaaaaagactataaacaattagtagcttgggcttacaaaaattcaaaattagataaagagaatatcatttttgtttttgaacatactggactttactctcatggttttttctgtatatctagcatctaaaaatattccatttcttttagttgctggattggaaatcaaacagtccctaggaatagttagagggaaaaatgacaaagcagatgcaaaaaatatagcaaaatatggccatagaatgagagacgaaattacacctacaaagctttcttctgacgatgaattaagccttaaacgtctgctgtctctcagagaaaggcttgtaaagcaaagatccggctataaggcttctttgaaagagcaaaagcgtgtgctggttcaaaaagataataaaactcttttctcaactcaagaaaaaatgatttgctatctgacaaaacaaattgatgaggtagaaaaagaaatgaatgaaataatgaataaaaatgaaagtatgctcaaaaattacgagctgttaagatccataaacggtgttggtccacaaactgcattgtttataatagcttacacagctaattttactaaattcaaaaactatagaaaatttgcctcctattgtggaatcgcaccattccagaatcaatctggaaccagtattagaggtaaaaccaaagtcagtaatttagctaacaaaaaaattaaaagcctactggatatgtctgctaaatccagtattcaacacaacactgaaatgaaattatattatgaaaaaagaattgcaaagagtaaaaataaaatgagcactataaacataataagaaacaaattgttatcaagaatgtttgcagttgttaatagaaatgaaccttatgtggatactttgaaatatgctgcctaaatttctgtgaaaatttaacattttacgcttgttttaatcatagaata

SEQ ID NO: 4724 - DNA, 1204 bp, unidentified
  source 1..1204: mol_type = unassigned DNA; note = element_732f200
  misc_feature 1..2: note = core
  misc_feature 3..200: note = LE
  misc_feature 201..1178: note = CDS
  misc_feature 1179..1204: note = RE
  misc_feature 32..224: note = bridgeRNA
cttgtatccttaaaacattgaagttcaggacaaggtaatgggaagttgtccacagcccgattccccctctgggagcacagcatcccgagactcagcaggtggcgtggacagctgaccgtttgcaagtagcccgaacagttgctggttggcaatgcaccgcatgggcggtgtgattgacctcgtatttgcaaggctgggcaatggcagacgaatcccgtgaatccgtgtatgtgggcattgatgtgtccaaggacagcctggaagtgtctttgggtgacaagggcgccagcatgcgctttggcaacgacgatcagggcatcagtgcgatgctcgattggctggcaggtcagagcgtggcagtggtgcttatggaggcgacgggagggctggagaagcgctgcgcgcagcgcttgtacctggcggggctgacggttgttgtggccaatcccaggcaggcccacgagtttgcaaagtccctggggtatctggccaagaccgatggcatcgacgcgaaggcgctgtcgcattttgcgcgaaccctgcacaacagtgagcggtttgagaagtcattgttcaagctggctgcagcacaccaggaacagctgcaggcgctggtcacaaggcgagcgcaattggtgcagatgcgcgtggcagagaccaatagattggctcaggcgcacgccctgtcgaccaagagcatccaggcagtgataaagatactggacaagcagatcaaggcacttgatgaagacatcggtggcaggctcaagcagcactttgcgcaaaagctcaagctgctggagggcttcaagggcattggccaaggaaccaaagcagtattgatggcagcgctgccgcagctgggccaattgaaccggcgagagatcagcaagctggtaggagtagccccgttgaaccatgacagcggcaagatgcgcggcaagcgctcgatctggggaggtagaagcgacgtgcgctcatcgctgtacatggccgcgctcagttcagtgcgcttcgacccggtgatcagagagttctaccagcggctgcgagcggcgggcaagccagcgaaggttgccttggtggcatgcatgcgcaagatgctggcgatcttgaatgcagtgatcaagtcgaacacagcgtgggagcaacgttgtccacagccaggcgcggtatgaaaagcgcttgactttgaacacagttg

SEQ ID NO: 4725 - DNA, 1352 bp, unidentified
  source 1..1352: mol_type = unassigned DNA; note = element_7331a7b
  misc_feature 1..2: note = core
  misc_feature 3..258: note = LE
  misc_feature 259..1287: note = CDS
  misc_feature 1288..1352: note = RE
  misc_feature 31..209: note = bridgeRNA
cttgtatcttgcttgcatctccccgattcattcactccgtgctacttggagccagaatcgggtttcggcgggaggccgatcgcaccctagaggcgctgtccttcgcagcctggattgtagataggccccccgccctccttttctgacgccgtggagaatccgaggccacatgagcctgcattcacaaggtcggcgagagaggttgctcagggtcggggagccgaaaccgagtctaatcccaatctggaggagttgagaatgacagatcgtccggatgaacatgtcgacgttttcgctggtctcgacgtcagtgcacgtgcgatcagcgtcgcccggcttcgaagcaaagacgggacgctaacggttgccagctttgcgaataacgcctccgggcataaggcgctcctggcgtacttgctgcagggaaccgaacaggtacgggtttgtctggaagccagtggtaattacagtctcgatctagccctggccttgcatgctcaccgtcacgtcgaggtcagcctcgtaaatccgcgtcgcgcccgccgctttgcggaatcgctgggggaacggagcaagactgaccctgtcgatgcccgtgtgctttgcgagtacgccgcgcgtatgccgtgggtggtctggcgaccaccgagcacacgagggttgcggttgcgcgccatcacccgcgccatcgaaagcctgggcgttatgcatactcaggaaaaaaatcgtgagcatgcgttgcaggctagccaggctttgccatccttggtgattcgggagatgcgacatcatcagcgctatctggagaatcgcatggagcaactccgtcgcgaagctcgccggctcatcgcgaaggaccccgagctagatcgtcgttttcgcctgatggtgacagttcccggggtcgccgaaaccagcgcgctgcagattctcggagagcttgtagggttgcccgatagcttagatgctcgccagtgggtggcattcagtggactcgatccctcccagttcacttccggtacgtcagtcgagaggcgcccccgcatcagccgtgggggcagtcgccatctgcgccgcgcgttgtacatgccggcgctcgtggctctgcggcacgagcctcatctgcggactttctatcgacgtttagtggaccgaggcaaagctcggctacaggctgtcgtagctgtaatgaggaaactgctccatgccctatttgcgatgtttcgcagcaatcagacctacgacggggccaagctctgctccgcggaactggtgtcgtgtgtttgatggcaaaaaagagagaggttctccgcacctctccagagagaaaaaattgaaattcaagagagaat

SEQ ID NO: 4726 - DNA, 1499 bp, unidentified
  source 1..1499: mol_type = unassigned DNA; note = element_7335199
  misc_feature 1: note = core
  misc_feature 2..112: note = LE
  misc_feature 113..1129: note = CDS
  misc_feature 1130..1499: note = RE
  misc_feature 1172..1400: note = bridgeRNA
gaatgaaagggacttccccgtcccgaggtgcgcgcagcaaagcgcagtacggcatcgaagtgccacgatgggaagtgttcgtttccatccaccacctgcgagaggggaagtcatgagcattgtctacgtcggtatcgaccttgccaagaacgtgttcgcagtccacggcgtcgatgaacacggcaagcccgcactcgtgcgtcctgcggtggctcgcgcccggctgcacgagctgatcgccgcgctgccgccgtgcacggtggccatggaagcgtgcaccggcgcgcaccactgggcgcgcctgttcgctgcacacggccacagcgtgcgcctgatcgccccgaagttcgtcaccccctaccgcatgagcggcgcacgcggcaagaacgacgcggccgacgccgccgccatctgcgaggcggtgcagcggccttcgatgcgcttcgtgcccgtgaagtccgtcgagcagcaggcccggctgatggtgcaccgcgcgcggcaaggcttcgtcgaggcgcgcaccggctgcatcaaccggctgcgcgggctgctcagtgagctcggcatcgtgctgccgctgaaggccgccaccgtgcggcgcgaggccggcgctgcgctcgaagacttgccgggctgggccaacacggtcgttggcgatctgctcagcgagctgcatcggctggacgagcgcatcgcgcagtacgaccaccacatcagcgtcatcgcgcgcgacgacgagcgcgcccggcagttgatgcgcctgagcggcgtgggtccgaccacggccacggcggtcgtggcgatgatcggcaatggccatgagttcaggtgcggccgccagttcgcggcctggctgggcttgacgccggggcagtacagctcgggcggcaagacgcggctggggcgcatcaccaaggccggcgacgcgtacctgcgcacgctgctgatcctgggcgcgcgggcggtgctggccgcagccaagaacaagaccgatggtctgagccgctgggcgatcgcgctcgaggcgcggcgcggctattggaaggcggtggtggccatcgcagcgaagaacgcgcgcatggcctgggcggtgctgtcgcgcggcgagcagttcaagctggcggcgtgagacttatcaataccgctgaccaacaagaagatcgaacccgtttgactccaccgcgtgatgcgccagcgttgatgagcaaaggtttggacctgcgcggggtgtgcctgatcagctcaaggcggcagcgcaggctgtccgcggctaacgaatgaggcccccgcgcgcgtccttcatcagggtccgcagcattcaacagctgcacgaatgaccggttgtagtttgtccgtccgcacccttgctcgacagatcgatgcgatgcgcagcagcacggtggtgccgtagtcgaaagaacaagccaagtcagatgtgaatcgagccgctgcgcggctcgatgggtttcattcgcttgacaaagggggaagcccttgta

SEQ ID NO: 4727 - DNA, 1235 bp, unidentified
  source 1..1235: mol_type = unassigned DNA; note = element_7337fee
  misc_feature 1..3: note = core
  misc_feature 4..245: note = LE
  misc_feature 246..1214: note = CDS
  misc_feature 1215..1235: note = RE
  misc_feature 103..266: note = bridgeRNA
cttgtatcttaaaagtaggttaaaataaatacgattagatttggcgcagtgtacgcagtctgagttgcccttgtatcttaaaagtaggttaaaataaatacgattagatttggcgcagtgtacgcagtctgagttgccctggggttttaagcccgttttaaagctattggcgcatacactgagccactcatctgaaacccgaacagttgtctgttatccataacgcatttgcaaggcagggtaatatgagtcagccaagtccactttgtgtaggcattgatgtttccaaagcttcattggatatcgccgccagtacaacaataagcgcgttcactatcagtaatgatcctgatggctttgacgtcattgtgtctacgctgaaggaacatacaatttcactgatcctgatggaagcaaccggaggactggaagcggctgtggcttatgcactgcaagctgaaggtcttgatgtcgtgatcatcaatcccagacaagcgcgtgattttgcccgtgctatggggtatctggcaaagactgaccgtattgatgccaaagttctggctcagatggcggaggtgatagatcgtcaccccgaacgtgaacggtttattcgagcactaccggatgctgaacgtcaggttctttctgctatggtggtgcgcagacgccagttgattaccatgctggttgctgagcgtaatcgtctgcatccatctcatccacagagtcgaaaaagtattaacgtgattattgaagcattggaaagagagttgtcgcgcattgataacgatatgaataaccatatcaaaacgcactttaaatctatctcagaaagactttgtagcgtcaaagggataggcacgacgaccaccgcagcattgttagcagaagtacccgaactgggtaaactcacgcgtcgcgaaatcagcgcccttgtgggtgtagcccctgttaaccgtgattcagggacaatgcgaggccgacgaaccatttctggtggtcgggctggagtgcgtaccgcactctatatggccgcacttgtggcaactcggtttaatccggtgatcaaggcgttttacaatcggttgctcgctgcggggaaggctaaaaaagtagcgctggttgcctgtatgcgtaagctattgactatcctgaacgccatgaccaaaaagaatgaggaatggaatgaatcgtatcactacattacctcataaaaaaattgtctaagacagttg

SEQ ID NO: 4728 - DNA, 1557 bp, unidentified
  source 1..1557: mol_type = unassigned DNA; note = element_733f1e6
  misc_feature 1..2: note = core
  misc_feature 3..263: note = LE
  misc_feature 264..1430: note = CDS
  misc_feature 1431..1557: note = RE
  misc_feature 2..240: note = bridgeRNA
gtatgatgtttatggaagcgaaaacaccatgtttcctttcttttaatatcgtggtttaatacattcagatactgtggacttttaataatagcttgtagctttgactactcaaaggagtgtattgccgctacctttatctgaattgtttatagctggatgtttccgtaagctttcgcttatgagtacttatttccatcaagtctacgatgataatcgctggcggatatcacggcatcagactttagaaagggaggtacaacctcatgatttatgtcggcattgatattgccaaactcaaccattttgcctcagccatatcttctgatggagaaatactcattgagccgttccagttctgcaacgacagtgatggcttccatttgctgctctctaaacccgattcattcgataaaagcagcctcatcattggtcttgaatccacggcacactacggcgacaaccttgttcgataccttgttgctgagaattacaaagtgtgtgtttttaatcccatcaagacttcgattatgcgaaaaaacaatgttcgcaaaacgaagactgataaagtcgacacttacataatctgcaaaactcttaagatgcaggattcccttagattcgtatcatattatgatctggatctaagggatcttaaatcacttagtcgctttcgtcaaaagaccatcaagcagcgctctcgtttgaaaattcagctgactgcttatgttgatgaagtctttcccgtgctgcagtatttcttcaaatcaggtctgcatcagaactctgtctatgcgcttctcaaagaagctccaacgcctcaggcaattgcttctatgcatatgactcatctggctcatctcctcaaggttacttcccacggtcactttgataaagagaaagctcagcagataagagttctcgcacagaagtctgtcggtactagcgacagtgctttatctattcagataactcataccattgcacagattgagttattgaatgatcaattagatcaacttgaaactgagatgacagaaatcatgaaatacaatgattctgtcatcatgaccattccgggtatcggttacatcaatggcggagtgatacttggtgaaatcggtgatattcaccatttttccagccccaacaagctgcttgcatatgctggtttagacccttcggtttatcagtccggtaatttccaggctacgaaaaccaggatgtctaaacgtggatccaaagtcctcagatatgcacttgttaacgcagcacacaatgttgttaaaaacaacgctaccttcaaggcatactatgatgccaaaatggctgaaggccggactcattacaatgcacttggacactgtgccggcaaactcgtcagagtcatctggaagatgctcactgacgatgttaagtttaacctcgattaagaggctattctattattatcgatagactttgaaatgcccccttaagagagctttattaaagttacccttttaccaccgataaggaaaacagaatttttgcttatttatacttgacttttcatagctg

SEQ ID NO: 4729 - DNA, 1579 bp, unidentified
  source 1..1579: mol_type = unassigned DNA; note = element_7356aba
  misc_feature 1..2: note = core
  misc_feature 3..279: note = LE
  misc_feature 280..1449: note = CDS
  misc_feature 1450..1579: note = RE
  misc_feature 13..256: note = bridgeRNA
tcataatatccttgtatgatgttttcagaagctaaaacatcaatttcctttctttttaatatcgtggttcaatacattcagatactgtggacttttgattttttcctgtagctcgactactcaaaggagtgtattgccgctaactgtatctgaattgtttattagttggatgttgccagcagggatccttccctcagagtacttatctcacgcaagtctacgatgatatggattggtggacatcacggtatcagactttagaaagggaggtacaacctcatgatttatgttggcattgatattgccaagcttaaccattttgcctcagcagtctcgtctgatggcgaaatactcatcgagccgttcaaatttacaaatgacggtgatggcttccaactgctggtctcgaaactcaattcgcttaatgcagagcccgacatcatcatcggtcttgaatcaacggcacactatggcgacaaccttatcaggtaccttgttgccgaaagtttccaggtgtgtgtgttgaaccccattaagacttctactatgcgtaaaaataacatccgcaaaacgaagactgacaaggtcgacacatacatcattgctaaaactcttatgatgcaggattcctacaggttctatactttctatgaccttgacctgatggatctgaagactatggggcgtttctaccagaaaaccgtcaagcagcgtacacggctgaaaatacagctcactgcctatgttgatgaagtcttcccggagctccagtacttctttaaatccggtctgcatcagaaatctgtctatgccctcctgaaggaggctccgacaccggaggccattgcttccatgcatatgactcatcttgcgaacctgcttgtaaaaacctcgcacggtcatttcaacagggataacgccaaagaattaagagttctcgcacggaagtctgtcggcacatccgacagtgctctatctattcagataactcactccatagcacagatcgagttactggatagccagttacagaagattgaagatgaaatggctgagatcatgaagttcaatgactcagttatcatgaccattccgggtatcggctgtatcaacggcggaatgatacttggtgaaataggcgatattcaccgtttctccaatccttgcaagctgcttgcctttgccggccttgaccccactgtatatcagtcaggtaactttcaggccaggcggacaaggatgtcaaagcgcggatccaaagtcctgcgctatgcccttataaacgcagctcacaatgtagtaaaaaacaattccactttcaaggcttattatgatgccaagatggcggaaggccggacccattacaatgccctgggacattgtgccggcaagcttgtcagggtcatctggaaaatgatgactgatgacgtagaatttaacctcgattaagaggtctgtatatcacatcgatagacttgtttaaaagcgcccacccgggagccttgttaaggttaccctttttgccatcgatataaaaaaggaattttttgctaatttaagattgacttttcatagttgg

SEQ ID NO: 4730 - DNA, 1183 bp, unidentified
  source 1..1183: mol_type = unassigned DNA; note = element_7357500
  misc_feature 1..2: note = core
  misc_feature 3..215: note = LE
  misc_feature 216..1160: note = CDS
  misc_feature 1161..1183: note = RE
  misc_feature 60..226: note = bridgeRNA
cttatatctttcgattggttcaaacttcagcgtgcagaccggttggtgaactgcatgccgatccggttggctggccgcggtgcagcttgtgtctcctgcgagcgaacaagctccaacgacagctcaaggcgtaccgcggctgcctcgttctgcgtcatcccgaatggttgattgatctcatttcgcatccgtaaggctgggagccggagaacaccatgagccaacccttgtttgtaggtatcgatgtggccaaggacaccgtggaggtggcctgctcggatgcatcgagtcattcgttcaccaacaatgaagctgggcacgccaagctgctgcgatggctggcgcgcaaatccatcaccttgatcgtgctggaggccacgggcggctatgagcaggcctgtgcggtggcactggcggctgcgggcctgcctgtgtcggtgctcaatccgcgccaggcgcgtgatttcgcacgagcaatgggcaaactggccaagaccgatcgcatcgacgctgccgtgctggccgagttcgctgcagtccttcacgctcgcggccatcagcccaggccgctggccagcatggagcaacgcgaactcgcagcgctcgtggccagacgccgccagctcgtggtcatgctggtggcagagcgccagcgcctgggtgtggcccactcgcgcgccaagcccagcatccaggcggtgatcgagttgctgctcaagcaactcgccgacatcgacgacgacctgcaacgcaccctcaaggagcgccacgccgacctctctggcctgctgcagtcggtcaagggcgtgggtccgaccaccgccagtacgctgatcgccgaactgccagaactcggactgctcactcgcaagcagatcaccagcttggtcggactggcacccctgaaccgcgattccggcaccctcaggggtcagcgccatatcttcggtggccgtgccagcgtgcgtcgtgtgctctacgtcgcagccctggttgccacacgcttcaatcccgccatcaaggattgctacacccgcctcgttgccgcaggcaagcccaagaaggtagccctcgtggcgtgcatgcgcaagctgctcatcacgctcaacgctatcgcccgcaccaagactccttggcgcaaggacttcgcttcggcttgacttcaaggttttcaagatggttg

SEQ ID NO: 4731 - DNA, 1383 bp, unidentified
  source 1..1383: mol_type = unassigned DNA; note = element_7357d32
  misc_feature 1..3: note = core
  misc_feature 4..86: note = LE
  misc_feature 87..1121: note = CDS
  misc_feature 1122..1383: note = RE
  misc_feature 1145..1371: note = bridgeRNA
tgatgcggtggacggctcccgcccgacggcatcgcaatgtgccaaagttgtggtttctatgaaccacagggaaacaggagccatccatgaacgaagttatcacgataggcgtcgatcttgcgaagaacatttttcaggtccactgcgttgatgttgagggtggcgtgattgtcgggaggcagctgagacggtcccaggtgctgccgttcttcaaccagcagccgccctgcctggttggaatggaggcctgcgccacctctcatcactgggcgcggcaattgatcgagcttggccatgaggtcaagctgatgccgccacattatgttaagccctatgtgaagcgctctaagaacgatgcggcggacgcggcagccatatgcgaggcggtgacccggccaaccatgcgttttgtatcggtgaagagcatggagcagcagagcgtgctgatgctgcaccggacgcgggagttgctggttcgccagcggaccatgctgatcaacgcgatccgcgcccacatggccgagttcggtatcgtcgcgcctgttggcgtaccgcaggtcaagaagcttctcggcattatagctgatacggacgatgcccgattgccaccgctggcgcgggcatgcctggaaagtctggttcggcaattcctgtcgctccacgaggagattgctctcgccgagaagcacatccatgcctggcatcgctcgaacgaggtcagccggcggctggagaccatccccggcatcggaccgatcatcgccagcgccctggcggcttccatcactgatcccgaggtcttcaggaatggccgcgaactggccgcctggatcgggcttgtgccccggcagaactcaaccggtggcaaggagcggctcgggcacatttccaaacagggcgatcagtatctgcgctggctgctggttgccggtgcgatgtccgttatccgccatgccaagcggcggggcacgacaaacctgccgtggcttgcgaagctgataaccagcaaaccgacaaaggtcgcagcggtggcgctggccaacaaaatggcgcgcattgcctgggcactgctcaggcatggcggaacatatcaaaggcctgcagctgctccggcagattgaggccggcacagacaaaggcgttaaagagtttggcggggtgacaagtgaggtaatgcaaaatcggtcgatagccgaggatcgggaaaacccgtttgggtcagggcgctcctaacgcgcgtgcttatgattgggacccgatcccgcggatcgcattagggccagcggccatgtgtgccgcatcaacaggccggacacatgactgcacccgaccagtttgcacaaacctcaaaatatcccttgccaaaagggagccgtccacaca

SEQ ID NO: 4732 - DNA, 1598 bp, unidentified
  source 1..1598: mol_type = unassigned DNA; note = element_7359fc9
  misc_feature 1..2: note = core
  misc_feature 3..264: note = LE
  misc_feature 265..1476: note = CDS
  misc_feature 1477..1598: note = RE
  misc_feature 12..284: note = bridgeRNA
ctattacaataaatttggacaggaaagtcggacagccagtccggcttcctttccgtctcttgcctaagctacaataaggggagcaactggctgacctttgcctccttgggcttccgtgtccgttcgaaagactgtcagccatccccttattgcagcgttcgatttgagcaggttgagccatagagttcgcgtcacccaatagattgaatcggcaatgagaaaaagatggattccggttgcgattcacagattggaggaatgcaaatgaactctgttggcattgacatttccaaaggcagaagcacgattgccgttatgcgtccctttggagaggtcgtcatctcgccctttgaggtccggcacaccgacagtgaactgagcgaactggcaaggcagctcaaaagcctgaacggtgagacacgcgtggtcatggaggccacagggaattaccatgcgtcggtggcaaagctgctccacgacgcgggactgtatgtttccgtcatcaatgcaaagctggtgcacggctacgggaacaacgatttgaggcgggtcaagacagaccgaaaggatgccgtaaaactggcaaactacggccttgaccgctggctcactttgccgagatatgttccagaggaagatacccggctgttgctgaagaactgctaccgccagtaccggcagtattccaaggtgcagacggttctgaagaacaatttgatttcgttgctggatacggtatttcctaatgtaaaccgtttgttcagcagtcccgcccgtgcagatgggagcgagaaatgggtggacttcgtagctaaattttggcactgtgagtgcatttgtgaacgctcggaaaaggcgtttgtcagcaagtaccaaaagtggtgcaaaaagcatggctacaacttcggtgaggaaaaggcttgcgcgatttacgccgaggcaagcgggcacattggtgtcatgccgaaatctgaaacgacgaagcttctcgtggaacaggctgtgtcccaactcagggcgacttctgcagcacttgccgcgctcaaacacgaaatgcagtcattggcttccgtgctgccggaatatcccgctgtcatggacatgttcggcgtaggcccgacgctcggcccgcagctcatagctgaaatcggagatgtacgccgcttctactcaaagaaagcgctcgtggcctatgctgggctggatgctccgccaaatgattccggtgatgtgaccggcagacacaagagcatgagcaaaatcggcgcgtcgtctctgcggcgaacgctgttccttgtcatgagtgtctatttgcagaacgctcctttggatgagccggtctaccagttcatggacaagaaacgcgccgagggcaagccctaccgcgtctacatgatggcctctgccaacaagtttctgcggatctactacgccactgtaaaagcctatctggagtcactggaacacaccgcttgatctcgccataaagcattggctggccgccgtttcatttctgagatgcgaagcggcttggcttggcgcggcctttttgcataccgcattaccttgaaatttctacttgacttttcttagcaggt

SEQ ID NO: 4733 - DNA, 1567 bp, unidentified
  source 1..1567: mol_type = unassigned DNA; note = element_7360296
  misc_feature 1..2: note = core
  misc_feature 3..585: note = LE
  misc_feature 586..1437: note = CDS
  misc_feature 1438..1567: note = RE
  misc_feature 3..247: note = bridgeRNA
cttgtatgattaattagaagctaaatcatactctcctttccatttttactgtttgtgtcataatacattcagatactgtggactttttattttatttctgtagcttttgactacttgataggagtgtattgccatctcattatctgaattgtttattagctggatgtcgccggagcatttacttccgagtacttatatcaatcaagtttgcgaggataatcctaaggtggacctgacagtatcaaatctctacgaaaggaggcgttttcaatgatctatgtcgccattgatatcgccaaactcaatcgttttgcctctgccatcgattccgatggcacattgctcatcgagccgtttgaattcttaaatgacaatgatggcttctattcgctgctttcaaagcttgattcctttgaaaaagacagtatcatcattggtcttgaatcaactgctcattacggcaacaaccttgttttcttccttgtatcaaaaggttttcatgtctgtgtgctcaaccctattcagacttcctctatgtgaaaaaacaggatccgcaaaaccaagactgacaaggtcgatactctggtgattgctaaagctattgctttgatggaaaacccccgctttatcactctatacgacattgctctcatgcagcttaaaaatctgggcaggtttcgtctgaagctggttaaacagcgcacccgcactaagatccagcttacctcctatgtggatcagacttttcccgaaatccagtatttctttaagtccggtctccatcaaaaagctgtgtacgccatcctaaaagaagctccttgcgcttctcagattgcttccatgcatctgactcatctcaagcaccttcttacgtctaactcccatggacactttaagaaggaatctgccttagaattaagagttctggcacagaagtctgtcgggaattccgacaggtctttatcccttcagatcactcaatctatcgcactgatcgagcttctggataaacaaatcaatgctgttgaaaccgatatcagggacattgtcgaatctctggattctgttatcatgtccatacccggtatcggtccgatcaatggtgggatgatactgggtgagatcggtgacatcagccggttttcaaagtctcgcaaactgcttgcctttgcaggccttgatccatccgtttaccaatccggcaacttttctgcaaagaaaacccggatgtcaaagcgtggttcaagtgcactcagatacgcccttatgaatgctgctcacaatgtcgttaagaacaatgcgacttttaaggagtactatgattccaaacgagccgaggggcgcagtcattacaatgctcttggtcactgtgccggcaagctcgtccgcgtcatttacaaaatgcttacggacgatgtaaaatttaatctggattaaactttattccatacatttttgaggcttccatttaggaggtctttttcgcttgcgtattatcagctttgcgtcccaccattcaatttattctattttcttctgatatttaccttgacttttcatagctggt

SEQ ID NO: 4734 - DNA, 1183 bp, unidentified
  source 1..1183: mol_type = unassigned DNA; note = element_7362463
  misc_feature 1..2: note = core
  misc_feature 3..205: note = LE
  misc_feature 206..1168: note = CDS
  misc_feature 1169..1183: note = RE
  misc_feature 6..210: note = bridgeRNA
cttgtatcttcaattcagatcggagcggtagagtctgaatgccgttgaggcatgcaggccggcccgtgcagtttgaacacctctggggtgatcgagcccgtcgctgagtacagagcgcacggccgccgcgctgatctttatcaagcccgaacggttacgcgcgccttcgatgagcgcgcatgcacaagaaagggatctgaagatcatgtctgttttgtcagtgacggtgggcattgacgtggccaaagcgcacgtggatgtctttgtgctgggcaccaagagcgatgccaagcggttgaacaacgatgccgaaggccattcggcgctggcagcgagcctgctgcccctggacgtggagctcgtggtgatggaggccaccggcggctatgaagcggcgctggcctgcgcgctgcaggcagcgggcttgcccgtggcagtggtcaatccgcgtcaggcgcgcgactttgccaagtccatggggcggcttgccaagaccgacacggtggatgcgcgcatgctcgccgagttggcctcggtgctggtgcgccgtgaagaccttgctcgcttcctgcgcccattggccaatgagcaccagcagtggctggccgcgctggtcacgcgtaggcgccagttgctgagcatgctgcactcggagcgccagcggctgcagatcacacccaagaagctgcacgccagcatcgagaccatcgtcaaagccatcaaggcgcaactcgacgagatcgaggggcagatggtcggccacgtgcgcgagcacttcggcgatctggaccggctgttgcagtccgctgcaggcatcggcccggtggccagtgccacgatgatcgccgagctgccggagctgggtcggctgaaccggcgcgagattgccgcgctggtgggtgtggcgcccatagccaatgactcgggcaacaaaaagggacggcgcagagtccagggcgggcgcttcgagattcggcgcgtgctgtacatggccacgttgacggccacgcgccacaacccagccatcaaggccttctacgagcgcctgaaggccgcaggcaagttgcccaaggtcgccctggtcgcctgcatgcgcaagctgctgaccaccctcaatgccatggtcagaaccggcaaaccttgggacaaatcgctgcacggcacttgactttgaagacggtta

SEQ ID NO: 4735 - DNA, 1474 bp, unidentified
  source 1..1474: mol_type = unassigned DNA; note = element_7363ac2
  misc_feature 1..2: note = core
  misc_feature 3..270: note = LE
  misc_feature 271..1344: note = CDS
  misc_feature 1345..1474: note = RE
  misc_feature 16..238: note = bridgeRNA
ctggtatattataattgacttatctttctgtcaattatatacaccttttcctttcattgaattttgtttagaattgaattgtgaatgtgtactttttctttcatcacctgtagcttgactacttgaaggaggttattgccacatctttgtatcttaattgtgatcagttagataagtctttgaatttgtattttgcaccaggctctttgatactctgtttgtggtttaatcacatatcactatcttatataaagaaaggatgtgctttttatgttttacattggtattgacgttggtaaattcaatcactgtgcctgcgttatttcttctgaaggtgaagttcttattgaaccttttttcttcactaataatctagacggattcgattcttttatcaaagctgaagttgcattgataaatccattaacaactgatgccaaacgcaaaagcaaaataagaaaaactaagaatgataaaaaagatacttttcttatctgttccgttctctttgacagagactataccagagtcactcagcacaaactcgatatgaaacaggctcgagaattaactcgttatcatgcttccattgctgaagatatcaatcaaaaaaaaaaccaacttcagaaatgtattgatatcgttattcctgagttcaatacttggtttaaaactaaatactccaaagcttatatggctgttttaaaagaatttggaagttcttataatttagccagtgccaatcttactcatcttaaaaaagttctcaagcctaaaagcagtggaagccaggtggatatagatgcatcatctcttcgtgccagtgcaaagaaatccattggtgagaacaacgaagttatcgctcttgaaattaaaatgcttattgaaaatatcgaactgttaaccagtcagcttaaaactgtagacaaaaaaatagaagaattagctgttaaactagattctcctatcttctcgattcccggtattgggatttatacgggaatgtcaattttaagcgagattggtgatatcaataacttcagctctgctgtcaaagtcatgggatttgcaggtgtagaccccggtacttatcagtccggtgaatacagcgcacctcgaacagcattgtctaaacgtggttcgcgctatttgagaaaaagtttataccagtgcattctaccagtctgcacaaacaatctcactttcaataaatattataaactaaaacgcttacaaggtaaatcccatagatgtgctcaggggcattccgtacgaaaactcataagagtaatctataaactgttgtctgaaaacatacaatttgatgaaaaactgcttatttaaaagcattcaattgaatatttttaaaatgctgcataaagcagtagttttcattgtacacaaaattcacttttcaaagaactaaaaaacatttagataattattaaaaattacttgatttatatatagttag

SEQ ID NO: 4736 - DNA, 1457 bp, unidentified
  source 1..1457: mol_type = unassigned DNA; note = element_7371882
  misc_feature 1..2: note = core
  misc_feature 3..224: note = LE
  misc_feature 225..1436: note = CDS
  misc_feature 1437..1457: note = RE
  misc_feature 7..223: note = bridgeRNA
ctaatagggccagacgctccccgatgatggggaggtcatccgagccaccggtgggtgagcactcaagccgacagggccattgagctctagagctagagcgtgcccccgccggcgggcgaggaggtcgagacgaccggtgggatgtcgtgcctcgagcactgctctattagcgcgtcgcggatctccttgggctcggcggcagacctgccttgagggagatgcggatggtcttcgtcggagttgattgggccgagacccaccacgacgtctgcctgctcgacgagcagggtaaggtgctgggaaagcgccggattccagagggcctggagggcgtgagccggctgcacgagctggtcgccgagcacgccgaggagcccgcgcaggtggtggtcgggatcgagaccgaccgcggcctgctggtccaggcgctgctcgcggccggctaccaggtctacgcggtcaacccgctggccgtcagccgctaccgcgaccgccacaccacctcgcgggccaagtccgacgccggcgacgccaagctgctcgccgacctggttcgcaccgaccgccacaaccaccgtcccatcgccggcgactccgagctcgccgccgccgttcaggtcctggcccgggctcaccagaacctggtctggtcgcgtcagcgccaggtgaaccagctccgcaacaccctgcgcgagttctaccccggcgctctggaggccttcggcaccgaccttgccggcgtcgatgcgatcgccatcctggagcaagcgccgacccctgtgcaggggcgctcggtctctcaggccaagatcgtctcggctctgcgcaaggttggccgtgcgcgcaacctggaggtcaaggcggccgagatccaggctcacctacgggctccccagctggaggtcccgccgctgctcacccaggcttacggccgcagcgtcgccgctagcgttcgcctcctgcgccagatgaaccaggagctggccgggctggagcgggagctagccgcccattttgagatgcacccggacgccgagatctacctcagtcttcccggactcggcttcgtcctcggcgcccgggctctggccgagttcggcgacgaccgaactcgcttcgtcgatcctaaggcacgtaagaactacgccggcaacgcgccgatcaccaaggcctccggcaagagcaaggtggtcttggcccgcgtcgctcggaaccggcggctggccgacgcctgccacctctgggccttctcggcgctcaccagctcgccaggtgcccgccgttactacgaccagctccgagcccgcggcaagacccatcagcaggccctgcgtaccctcgccaatcgcctcgtcggcatccttcacggctgcctcaccaatcgcgagctctaccgagaggacgtcgcctggcccacgctggaggtcgccgcttgacttcttccagccgtgggatgt

SEQ ID NO: 4737 - DNA, 1193 bp, unidentified
  source 1..1193: mol_type = unassigned DNA; note = element_7374758
  misc_feature 1..2: note = core
  misc_feature 3..212: note = LE
  misc_feature 213..1190: note = CDS
  misc_feature 1191..1193: note = RE
  misc_feature 40..195: note = bridgeRNA
tcctttagatttgtatttataaaaataagtaaatttatcataaagagaaaagtgtttaagtaaactatcacccgctcagagaaaaactcatagttcgatttagacttaaacacttcttatcaaaaatctcaaatagaaattcgggctaatgacccattataaaggagttgagttaatgataagttctctttaatctctctaaattcaaagatatggaaaaagtttttataggtattgatgtcagtaaattaacattagatttttatgtaaaatcaaattcttcgcaacagcactatcaaatacagaatagtgtaaaagctattaaaaagttgcttaaaccctttcagaacaatgagaataccattattgcaatggaaaatacaggcagatataattttgcgttgtatgaatttctagcagataacaattttagtgtttttgttgtaaatccgctacatttaaaaagaagcattggtttattacgtggcaaaaatgataagatagatgcccaaagaatttgcatgtttattgaaaagaactatatggatttagaatcgtggaaccccagcagtatcgatattcaaaaaatatctctattaaatacggaaagaagacatcgggtgaaattaaaatccggattattacgccagacacaagatttagagctcttaaaaaacattgcagacaaagagattattaaacttaatcaacaattaatcaagacaatagaaaaacagataaaagttatagaagataagattttagagctgattttttctaatgatgaattaaaagaacagttcaacagaatgatctctattcccggcgtaggaaaagtattggcaacattgatgattattaaaacaaaaggattctctgaagtgaaatcagcacggaaaatggcttgctttgcaggtgtagttccttttgaacataaatcaggttcttctatttactataaaccaagaatatcgacaatggctgacaaagaattaaaaaaagtactgcatttagcagctctaagtaccataaggttgaaaaacgatatggcggcttattttaacagaaaagttaatgaaggtaaaaataaaatgtcggttttaaatgctgtaagaaacaaaatcatacatagaatatatgcagttgttaaaaataaatctgtgtataaaaattgtttggcagtgtcatagaaa

SEQ ID NO: 4738 - DNA, 1373 bp, unidentified
  source 1..1373: mol_type = unassigned DNA; note = element_7375d05
  misc_feature 1..2: note = core
  misc_feature 3..79: note = LE
  misc_feature 80..1108: note = CDS
  misc_feature 1109..1373: note = RE
  misc_feature 1082..1360: note = bridgeRNA
cgatggggtggacgccccccggcggcatcaaatgtgccaatgtagcgggtgttgaaacactgctacgaggagagcgtccatgaatgaggttaccatcatcggcctggatttggccaagaacatatttcaagcgcacggcgccggagctgatggctcggttatattccgccgcaagttgtcacgtgtacagctgttgaagttcatgggcgagcaaccgccctgcgtcgtggcgatggaagcatgcgcgagtgctcatcattggggcagagcgatcggcgatctcggtcatgatatcagactgatcccgccagcctatgtgaagccttttgtgaagcggcaaaagaacgacatggccgatgcggaggcaattgctgaggcggcgtcacgtccgaccatgcggtttgtcgcggtgaagagcgaggctcagcaggctatggcgatggtctatcgcacccgcgacctactggtccgacagcgcacccaaacaatcaatgctctgcgcgctcatttggccgagcaaggcatcgtcgcacccgccggtccagctcatgtcggccgtctcgctgcggttattgacggcgacgacgatgcgctgcctgtagcagtgcgcgaccttgcgcgactgcatctggaccagattgcaggtttgagtggaaaaattgccgacttggatgccgatctgcgccgcgcagcaggaaccaacgacaccgcgcggaggttaacgacgatcccgggcgtaggtccaatcaccgctgcggcgatcaccacctttgcgccaccgatggagaccttctcgaagggacgagattttgccgcctgggtcggactcacgccgagacaacattcgagcggaggcaaggagcggcttggccgaacatcaaagatgggtcagcgcgatatccgacggttgctgatcattggggccgtcgcggtggttcggtgggctgcccgcaagggtgcgcccgagggttcgtggctcgcgcgtatgctggagcgcaagccgaagatgctggtcgcagtggcgctggccaatcgcatggcccgaacggcctgggcgttgatgcgcaagggtgaagattatagagatccggcgatggcgaccgcataggtcaagatcaacggagtgtcgccgcgaatgtgagcaggacggaggaacgtaagggcaaacggtcaagagaccggatcgggagaaccatttatccggacgatgcgccttcgagcgcgggtaagcgaactggacctgatctgcatatctccatacaggcccgcggcgcatgaaaggtcgcaacttagaggccggacacacgaccgcacctgatcacatgcccaagcgtaccaaaaattgtgcttgcattaaacggggcgtccacaca

SEQ ID NO: 4739 - DNA, 1343 bp, unidentified
  source 1..1343: mol_type = unassigned DNA; note = element_7377086
  misc_feature 1: note = core
  misc_feature 2..68: note = LE
  misc_feature 69..1109: note = CDS
  misc_feature 1110..1343: note = RE
  misc_feature 1125..1337: note = bridgeRNA
taatgggatggcccgccccgcgccccggcgtagcatcggggtgtcacctgaccatgaggagagaaaggatgcgaaccaaacctgtccctgagactgccgcctttggcattgatatcggtaagacggtgttccatgtcgttgcgctggatgcctccggcgcaacgatccaacgcgcaaagttctcgcgtgatacgctgatggcgttcttcgaagcggcgccgaaggtgctgatcagcatggaggcctgccccggatcgcaatggctggcgcggcggcttgtcgcgatgggtcatgatgcccggattattccggcgcgcttcgtgaagccctatgtcaagtccaacaagaccgacaccgtagatgcggcggcgatcgccgaagctgtgacgcggtcgaccatgcgatttgtcgaagtgcggacgcccgagcaggtcgatcttcaggcgctccaccgcattcgccaccggctggtgggacatagaacggcgctgatgaaccaagcgcgcgctttatgccttgaatacgggctggcgatgcgtgtcggcgccggcggtttccatgccgacatccgcaggcatctggccaatgcggggaacgatctgacacctgccatgcgggcgctgctcgatgatcttgcctataccgaagggcgcatcaaagccgtgaatgccaaggtcgacgcctatgcccgcgaacatgaggcggtctgccgtcttgtcgccattccgggcatcgagccattgggtgcaaccgcaattatcgcagccgccggagacgacaggcgattccgcaaggcgcgtgatctggccgcctggctggggttggtgccagcagagcattcgaccgggggcaaacagactcctctgggtattagcaagcggggcaatcgttacgtgcggcggctgatcattcacggcgcgagatcgtgctttttgcatcgcaaccgtgcaagccacgctctgggcggctggctctcggctctggaagcgcgaacgcaccgcaacaaggccgtcgtcgccctggcaaacaagctgacccggatcgtctgggccatcccgaccagacccggcaccgtctatctgcagtcgagcggcgcagccgcgcgctgacctcttcgccgcagaaccgattgcaggggatgtgatgtccaaacggttgatcgaccacaggtaagccacgcgcaaaaaaacgggactttatcccgcgccactaatctggaacccgaggggcggatctcgtcaaggccttgtcgccaaaagcggctgactgatcagaggccggatacatttacgcaagccggacggtcagagcgaaaaccttgcaatagtggggcagaccataca

SEQ ID NO: 4740 - DNA, 1517 bp, unidentified
  source 1..1517: mol_type = unassigned DNA; note = element_737732d
  misc_feature 1..3: note = core
  misc_feature 4..244: note = LE
  misc_feature 245..1231: note = CDS
  misc_feature 1232..1517: note = RE
  misc_feature 3..221: note = bridgeRNA
cttatattatatttagtgcagttagctactgccaaagcccaagtgttatacttggaaaaagccactgtggattagtttgttgtctccaatcacttgacgatttcagaaaggctctaaccacagctttttgttttcattggtaatgagtttgataacgctagacgtttaatcttcagtaaggtaacaaggcaaaaagtaagtggataccaagtgggcttaatacttaatatctggaggtacttttatgctctatgttggcattgatgtcgctaaaaacaaacacgatgtgacagttattgataatacagggaaaatggtgttaaaacccatcactattacaaaccgtaaacaaggatttgaactacttcataataccttgaaacaactcaaccagaactgtcttatcgccatggaagatactggacattatgccttaaatctcttaacattcttacatcaaaacaattatcagatttacacctataatcccttactcatcaaagaattcacaaagtctatctcacttcgtaaaacaaaaacggataagaaagatgcacgtacaatagctcttaaattactttcagaccctaatcgtgccctatttatgcatgacaacaagcaagaagaacttaaaattatgacacgtcacatgaatcgtttaaagaaacatcaatcagattggaaagtccaatataccaagtgtttagatattattttcccggaactacatcaggtcgttacgaagcactctgattatgtctatgagttactcaaacgtttcccttctcccgagaaaatggtaacggctggctttgataaacttattgagattaaacgattaacagctaaacatgcattggatattcttgaactagctccaaattccattggcacaacttctttggctcgtgaatttgaattgattgaaattattaagaatatccaacactacgaaaaactcatcaaacaaactgaaaagaagattgatgagttgatggctgagctcaactcggtcatcactacagtaccaggcattagtaatcgtcttggttctgtcattttagctgaaatcagaaatattaatacttttaatcattcagctcaactccaagcttttgcagggttagaaccagctatctaccaatctggacaactagatgctcagggaaaatggtcaaacgaggctcatcacacctacgttgggcactcatacaagctgccattaaagtagctagatactcccctgcgtttaaagcttattttaaaaccaaattagcgcagggaaaacactacaatgtcactatttctcacgttgctaagaagctcattcgagtgctgttttatctgcttaagaataatgaaacttttgacgaggataaactgagataaaccaacaaaaacatagatgaaaaactttttaaaacagtcgttttaaaaggctttttgtcgtgtctaaaacacattctaaagttttctaaaaaatttagaacaaactattgacaactcttatagtttgt

SEQ ID NO: 4741 - DNA, 1196 bp, unidentified
  source 1..1196: mol_type = unassigned DNA; note = element_737f839
  misc_feature 1..2: note = core
  misc_feature 3..233: note = LE
  misc_feature 234..1193: note = CDS
  misc_feature 1194..1196: note = RE
  misc_feature 27..209: note = bridgeRNA
cttgtatgttgtaggggcaagtcggtagtaagaagagacttgtcggggtggagggaccaggtccgcatctgaccctagcgtacagacagtgggagacatggccccaccccgcacctatagcgccgataaggaatccatcaggctgagtcgccactcagaccgacgatcgttggcaagccagcgccgaaggtgcgccccgacaagcccgttaaccctagcgtgagggctttcccatggcaatgaacacccagcccatccagatcggtatcgacgtcgcgaaagaagagctcgtgatctatcgtcaggacctggatcagctcgactcccttcccaatacgccccccaacatccgacgctggctgaagaccctgcccgagcaggccgccctggcggtcgaggcgaccggcacctaccacatgtcacttaccgaacaggcccatcgggccggccacagtgtgttcgtgatcgacggctaccaactcaagcattaccgggaaagtgtgcgcgcccgggccaagaccgacccctgtgacgcgcgcctgctggcgcgctacctggctcgagaaggcgatgacctgcgggcgtggacgccaccgcccaaagcctatcgcaccctgcagagcctgctgcggcgccggagcaagttgatccaggcgagggtcgccctacagcagagtctgggccaggagccgtccctgaaggctccgctgaagcgcttggtggcgcagattaaccggatcgatcaactgatccagaagcggatggaccaagccgttcgccaggcggacctcaccgagcaagtggctcgatgcgaggccgttgaaggcatcgggcccttgagcgcctgcgccctggtgatggccttcctgcgtggggacttccgtaatagtgacgccttcgtcgccttcctcggactggacgtgagggtccgagactccggaaaacaagtgcagcggcgacgcctcagcaagcgaggggatccggagatccgccgcctgctgcacaatgccgccatggcggcccgacggcacccctactgggctaacgtctaccagcgctaccgcgatcgagggctgcaaaccactcaggccctcgtcatcctggctcgtaaactggcccgcatcgccttcgccctgatgaaaaaccaaaccacctatcaggcaaaggctaggccagcttgtgggacaacatagaat

SEQ ID NO: 4742 - DNA, 1207 bp, unidentified
  source 1..1207: mol_type = unassigned DNA; note = element_7384b98
  misc_feature 1..4: note = core
  misc_feature 5..222: note = LE
  misc_feature 223..1191: note = CDS
  misc_feature 1192..1207: note = RE
  misc_feature 1..223: note = bridgeRNA
ccccgttaccttcttcgtagctcctgatcaaggagtgctggtcgccaggcccggcatgacttgcttccccagtcgaacgcatgatccgggggaccgggtttggtgcgtgggtggaccgctgatagggacacggccgccctctgggcaggtctcgtcgtaacgtggttgcggccgtcggtgcgtgactggcgaccaggacacgacgagacgtgaggaccgttgatggacgacggctacgcggtgttccccggcctggacgtcggcaagggcgagcaccacgcggtcggcctggacccggcagggaggcggttgcacggcgggccgctgcccaacagtgagcccaagctgcgggaggtcttcgacaagctcgcgaagctcgggcgggtcttggtggtggtcgaccagcacaacacgatcggcgcgctgccggtcaccgtggcccgcgcctgcggcctggacgtcgcctacctgcccggcctggccacgcgcgggatcgccgacctctaccccggcaacgccaagaccgacgcccgcgacgccttcgtcatcgccgacgccgcccgcaccctgccccacgccctgcgccggatcgacgtcggcgatgacaccctcgccgaactggacgtgctcatcggcttcgacgacgatctggccgccgaggccacccggatcagcaaccgcatccgcggcctgctcaccggcctgcaccccgcgctggaacgcgtgctcggcccgagagccgcccaccccgcgacgctggagatcctgtcccgcccggcggcccgatcggctgcccgggtcctgacctccatgcccggcatcggggtcaggaccgccgcccgcatcctgctcgaagtcggcgacgcctccgcgttcaagtcctccgcgcacctggccgcctacgcgggcatcgctcccgtcacccgcacctccggcaccagcatcaagggcgaacaccccgcgagatccggcaaccgcaaactcaaacgcgcgttcttcctctccgctttcgccgccctgcacgaccccgccggccgcacctactacgaccggcaacgagccgagggcaagaagcacaacgccgccctcatccgcctcgcccgacgccgccgcgacgtcctgttcgccatgctccgcaacagcgcccactaccgccacaccgaacccgcccacaccgccatcgcggcttgacaaccccatagggaca

SEQ ID NO: 4743 - DNA, 1429 bp, unidentified
  source 1..1429: mol_type = unassigned DNA; note = element_7386dbf
  misc_feature 1: note = core
  misc_feature 2..234: note = LE
  misc_feature 235..1416: note = CDS
  misc_feature 1417..1429: note = RE
  misc_feature 14..248: note = bridgeRNA
ctacgtgtctcattgacggcaggatcgggcccggccaggctcggtcccaggtgaccggggcggtcgttctctttgcggctgcccacgctcttggcgtgaggctcacaattggcgtgcgtcgtcccggtcaccgccagggctgcgagaggctcaagaggggtatgcccagccgtacgtagcggtgccctcccagctcgacaccaccgttgttgtcgcgagcaagggagcacgagcatggacgagcaggttccgcgggtcgtgatcgggatggacccgcacaagcgcagcgtcacgatcgaggtcatgaccgccgaggaggcaatcgtcggcagcggccggttcggcaccgacctcgacgggtacggccggctgctggcctatgcccgtcagtggccccagcgggtgtgggccgtcgaagggcgcgcgggcatcggcaagcacgtcgccgaccggctggtcgccgacggtgaggacgtggtcgacgtgccggcgaagatgtccgcgcgggtgcggatcttcgccaccgggcagggccggaagaccgacgccaccgacgcccactccatcgccctggtcggggtacgcatgtccgggctgcgcccggtcgtctccgatgaccagctcgagatcctgcggatgtgcgtggaccggcgccgctctctgggtgaggagcacgtccgcaaggtgtgccagctgcacaaactgctgctcgagctcatccccggcggggccaagacgttcctgtccgcggcccaggccaaggagctgctcaagaaggtccgccccaccaccgcggcgggcaaggtccgcaagacccacgccctcgagctgaccgaggacctggccccgatctacgcgcgcaccaaggccgcggacaaggaactcacggccctcgtcgccgagaccggcagctcgctgatggacctgcacggcatcggaccctccggtgccgcccggctgctcgtggaggtcggcgacatcacccgctctcccgaccgcaaccacttcgcgtcctggaccggcaccgccccggtcgacgcctcctcaggcgagcacgtccgccaccggctctcgcgaggcggcaaccggcagatcaaccgggtgctgcacatcatggccgtcgtccagctgcgcaccagaaccaccgaaggccgggcctactacgaccggaagaaggcggccgggaagacgtcgatggaagcgctgcgctgcctcaaacgacgcctgtctgacctcgtgtacaaggcgatgctcgacgacctcgctggacacacgacgacgggcccgggagggcaactgggtgacgactctgactccagcgcgaccggctcacaacccgctgccggctcttcggacaagcctcttcccggacccgccgctcccaagactagaacccctcttccggcggcgtcttgacatagaggggtgc

SEQ ID NO: 4744 - DNA, 1370 bp, unidentified
  source 1..1370: mol_type = unassigned DNA; note = element_7388778
  misc_feature 1..2: note = core
  misc_feature 3..84: note = LE
  misc_feature 85..1110: note = CDS
  misc_feature 1111..1370: note = RE
  misc_feature 1112..1359: note = bridgeRNA
tgatgatgtggacggcctctcaccccaacggcattggtgtgccagaatggttttgtgagaaagccacgcggagggagaccgtccatggagaagtttatccggattggcgtcgatttggcgaagaattattttcaggcgcacgctgtgccggcggcgggagggccggcggttcggcgcaagttgcatcgttcgcgggtgcgggcctttttcgccaatatggcgccttgcgtcatcggcatggaggcctgcggctcggcgcattactgggcgcgggagttcgcggcgatgggccatgaagttcggctcatcccgcctgcctatgtcaaaccttatgtcaagcgcggcaagaacgacgctgtcgacgccgaggcgatctgcgaggcgatgagccgccccggcatgcgtttcgtcgcgatcaagagcgcggagcggcaggcgacgctgatgcagcacaaggcccgcgatcttttgatcaagcagcgcaccatgacgatcaacgccttgcgcggccatctcgccgagttcggcctcgtcgtcgccaagggcgtcggccgcatcggcgagctgctcgctttggcgcgcgaagatgcgacgctgccggccgcggcgagaacgacggcggcgcttttggccagacttctcgaagagatcgacgcccagatcgacgcgctcgagcaggccatcgccgaggcctgccgggaaaacccgctcggccggctgctcgacggcgttcccggcgtcggcccgctcatcgcctcggcggtgatcgccgccgcgccagagccgcaggcgttcggctccgcgcgggatttttccgcctggctcggcctcacgccgcggcaaaactccagcggcggcaagccgacgctgggcaggatcagcaagcagggcgacaagcgcctgcgcaagctgctagtgctcgcggcgacgtcgctgctgcgcgtcgtcggccggcgcaagggcgcgctcgcagactggatccggacgctgctgtcgaaaaagccgtcgcggctcgtcaccgtggcgatcgccaacaagctggcgcgcatccttcatgcgatgatgacgaccggcgaagccttccgcggcgagctgttcgccaaagcctgacaatgccgccgccgccggctgcggcgttgatttggaacaagcgcaagaaagcgtgatgaacgatacggtcgcaaccgaaagcccggacattccgccacaaagcacgagcctcacagctcgctggattgatcggaaccgggctcgtcggacttcatcagggccagcagccaatcgcgccgcaccaacaggccggacatatgaccgcagccgaccaattcgccaaacgcataaaacgcgcttgccaaaaggccgtccacata

SEQ ID NO: 4745 - DNA, 1373 bp, unidentified
  source 1..1373: mol_type = unassigned DNA; note = element_7388ef9
  misc_feature 1..2: note = core
  misc_feature 3..79: note = LE
  misc_feature 80..1126: note = CDS
  misc_feature 1127..1373: note = RE
  misc_feature 1143..1360: note = bridgeRNA
tgatggtatggacgcccctcacggcttcacgatgagccatactggagcgtgtttaataaaccagaaagaggaggcgtccatgacgaatattacgacggttgggctggatctggcaaagacggtttttcaggttcacgctgcggatcaggatggcaggccggtcgtgcgcaggaagctgcgccgggctcagatgattccgtttttcgcagatatggctccgtgcctgatcggcatggaggcttgtgcttctgcacattactgggcgcgggaactgcaggcgctcggccacgaggtgcggctgatcccgccgcaatacgtgaaaccgttcgtgaagaccaacaagaacgatgccgccgatgccgaggcgatctgcgaggcactggtccgtccgacgatgcgatttgcggcggtgaaatccggggaacagcaatcggttctgatgctgcaccgggcccgcgagttgctggtgcgccagagaaccatgttgattaacgcgctcaggggccattgtggcgagttcgggatcgttgcggcccgaggggcgccgaaagtagcggacctgatcgcggtgatcgaggatccggaagaccagcgtgtcccgacgctggcgcgcgaggcccttgggtctctcatcgaccagcttcgggcggctcaggcacagatccgggaccttgagaaaaaactgacggcgtggcatcgcgccaatgaggcaagccgccggcttgaggcgatcccgggtgtcggggtgatcacggccaccgccctggtcgccaccatcggcgatgcctcgcagttccagtccgggcgtcaactggccgcctggcttgggctggttccccgacaatactccagcggcggcaaggaacggctgggacgaatatcgaagcgcggagacggctatcttcgccgccttctggttcatggggcgcgtgcggatctgcgctggtccagacaccggaaagcgcagcgctccctgtggcaggagagtttgctcgcacgccggccgaccaatgtcgttctggttgccatggccaacaagaccgcccgggtcgtctgggcgatgctcagccggggtgaggcgttccgaaccgaaacattccgggccgaaacaccggcgaacgcataacgaagcgcggaacgaactctattgcgagggtgacgatgacttgatggcgaaacagggtaaccgggatcggccaaacccgaggcagtgtccgagcttcgagctcgatgctctgactgggcgtcgatccacggattccatcagggcccgcggcaaagaatatgctgcatcgagaggccggatagatgactgcaaacccaacccgcttcaaagcatcaaaaacacttgcaatcaggggggcgtccataga

SEQ ID NO: 4746 - DNA, 1384 bp, unidentified
  source 1..1384: mol_type = unassigned DNA; note = element_7390de4
  misc_feature 1: note = core
  misc_feature 2..69: note = LE
  misc_feature 70..1101: note = CDS
  misc_feature 1102..1384: note = RE
  misc_feature 1144..1379: note = bridgeRNA
caatggtatggaccccgccctcgcggcgaggtggaatctcgagcgttaactgcgatgaaggaggatgtcatgcaggtcgttcggataggtctggatcttgcgaaatacgtgtttgaggttcatggcgtcgacagccacgggaaagtcgtcgtgcgcaagacgctgcgtcgcaatgcgggagcccacttctttgccaacttgccaccgtgcctggtcggcatggaagcctcgaacggtgcgcattactggacaagagtgctcactgagttcggccaccaagtgcggttgatcagcccgcagttcgtgacaccgtacgtgaaatccaacaaaaacgaccgaaacgacgcggaagccatatgtgaagccgtcggccgaccatcaatgcgcttcgtgccgccgaaatcggtggatcagttggcggtgcaagccgttcatcgcattcgccggcgtctagtcgcggaccgggtcaggctcgtcaatcagattcgcggtcttctttccgagcatggaattgtcatcgcccgtgacattacgcagttacgacgcggcctcgcgaatattgtcgggagcagcgatgacgggctcagcgacctggttcggtcgctcatgcgggaattgcaagtcgagatggctgaactcgatcagcgaataacatcctatgatcgacggatacgggaaatcttccgcaacagcgagcaatgccagcgcttgggcaaaatcgaaggtattggccctgtgacggcgacggcattgattgctgccgtgggggacagaacgtgcttcagaaatggccgccagtttgccgcatggctgggcttggtgccgaagcagcgatcgagtggagggcgagttcgtttgttcggcatcagcaagcgcggcgaccgttatttacgcaccctgatgatccatggcgctcgcgccgctttgggtcgagccggcggcaaacaagatcctcgaagcctctggctcggcaaattgcggcagcggcgacatcccaatgttgcggctgtcgcgctcgccaacaagaatgcccgcatcgtgtgggccatgctttccggcaatgcatcctacgaaccggcgatgtcagtgacggtagcctgaggcaaagccgcaaacggaagaaagagaaggaggtttcaccccagcaattgcagcaaatggcaggagatggcgaaacagtcaccacgtcgcttcccgaacctgatgtgtggaccggcatggcttagccaatgcctccggggcattgaggtggaagcgggcgaaaatccatcgaggctcgcggcgaagattggtcaagccgcatcaggaagccggatatacgtcagcagttgtgacctgtgatcctgatccgtccaacctgttgcaatcgggcggggtccatata

SEQ ID NO: 4747 - DNA, 1642 bp, unidentified
  source 1..1642: mol_type = unassigned DNA; note = element_73934a5
  misc_feature 1..4: note = core
  misc_feature 5..283: note = LE
  misc_feature 284..1432: note = CDS
  misc_feature 1433..1642: note = RE
tcacgtataatctaattatgtgatttttgcacatatattagaaactcctttcttttataattttatattatcactgaactgagttataatattcaagcactgtggatttgtatctattttattacagctttgactggttggatgtgacgactaccacaggcttttatttttattggtaattagttggttaacgctttgacgtttcatatcctacgtgaatacataaatagaagtcttgtgtaaaacatacagtgcattaataactaatatggaggtgtttactatgtattttgatatttcaaaatacaaacatgactgtttcatttgtactgaaacaggtgaagtaatttgtgaaaatttatcctttcaaaacaccagtgaagggttttcacaattacttgatttattaaaatctttagataataacaaaataataaggataggatttgaagctacaggtcattatggaatgaaccttaagctattccttgaaaagaataactattcttttatggaatttaatccggctcttgtaaaagagttcataaaaggtcagactctaagaagaactaaaacagataaaaaagatgcatatcaaataacaaggtatcttatatctgttgattacaaaccccatccaaaacaattttatcacaaatattctttaaagtcattgtctagaatgagagaaaagtttgttaagcaacgttcatattatgaagttgcgctaactaatgtcctagatcatacttttccagaatttaaacctttctttaataatgaattttctaaaactgctttatttatattagataaatataaatctgctgataaaattggacatatgaaagattttgattcaattagaaaagtatctaggggaaagtttacttctgctcattttatcaaacttaaagaactggctaaaaatacagttggttcatctaatgatatatttgaaacagaattagaatctttacttcttcttcattcacaaattgatgaacaaataaaaaaattagaagataaaattgaaattattatcaaagaacttaatccgccaactctttctattaaaggaattggtattgtatcttgtgcaggaatcatatctgaatttggtaacatatcaagatttaaatcagctgatgcaatggttgcatttgccggtattgaaccaagtatatcccagtcaggtacagaatctcacaacggtcacatggttaaacatggatcaggacatttaagatactttcttttaaatgcagctgactatgtctttatgcatgaacctatattcacagaattctattataaaaagcgtaatgaaggtaaaacacatcaagtagcattaaatcatgttgctaaaaaacttgtaagaataatttataaattagaatctgaaaatatcaaatttgaccataatatttaaatcatccttggtttcttgctttacttctttttcataaaagaagtaaagcccgtctggcaagacaaataattaacttatagaatggtgactataaattaattcatgattttagcaaagtttttaaaaaatacccttttaaaaaccttttttgcatggataaatttaaatattgaaatttctattaaaaagtacttgactttttatagttgg

SEQ ID NO: 4748 - DNA, 1468 bp, unidentified
  source 1..1468: mol_type = unassigned DNA; note = element_7393610
  misc_feature 1..3: note = core
  misc_feature 4..132: note = LE
  misc_feature 133..897: note = CDS
  misc_feature 898..1468: note = RE
  misc_feature 1199..1383: note = bridgeRNA
aacatggagtaatcgcggacggtttccccaaaggcattgcctcagcaatatctgacatgggtggttgcccccggtaggatggaaatacgggctcacgattggaaccgggcccaacatcaaatggaggcaaccatggaccaatatatcgggctcgatgtttcgttgaaagatactgcggtgtcgatccgagagaataggaaacggatctggcgagggaaatgcccttctaatccgaaagttctatcgcagatcatccgcaagcacgctccgcacgcgaagctcgttgtcttcgagacaggtccactgtcgacgtggttctatcatgcgctgacggccgaagggattcctgcgatttgcattgaagctcggcacgcgcaaaaggttctgagcgagacgcttaacaagactgacgccaatgatgcggacggtctagcgcagttggccgaagcaggattttacaaggtcgtgcgagtaaagactttcgacaacatgctgacgcgcacactggtggcggcgcgtagccagctcgtaagcatttccaagcagctcagcaaccaaatacgcggtctcctgaaaacgtttggtcttatcgtgcccaaaggggaaggtcgggtatttgatgccaatgtgagagaactgctgaatggaaatagcggcctggcagttgtgatattgcccctgctcgaggcgtggcgcgacatacgtaagcgcgcagccaatcttgatcaccagttgctcgcagcttccagacagagccgggctacgaagctcctgatgacgattccaggcgttggcgccgtcacggccgtctcttacattgctgcgatcgaagatcctgaaaacttccccacatcgcgctccgttggcgcttggctcgggctgacgacgcggcgctaacagtcaggcgaaatcgattatgatggccatatctcgcgacgcggtgacggtcggctgcggggattactctacgaggcggcaaccgtcctcttaacaagaaccggtgccaggaccgaatgcagtctcaaaacgtgggggctgaagctgcgtgagcgactgggcttcaaacgtgccgcggttgctgtcgcgcgaaaacttgctgtcatcatgcatagcatgctcaaaaccggggaagcgttcaacccattggccggcgctaccgcataggcgaaaaagccggcctacctgcctcagcgcctcaacccgattgagatgctgggcgtccctgctgtggacgtgggttgggtcattccgtcgattccgtcgcagctcgtcgagactgcgtcttgaacaaaggaagatccgccctgcgaaaacccatcatgcggcgactatgtgtcgaccgcggagacaaccgtgctccccggcgccggacgaattggcaggaacaaagatgcagaccccatccaaaacagaaagatgtcgcgatccacgagccacaagccgcttgaccccgagcacgcgattagac

SEQ ID NO: 4749 - DNA, 1608 bp, unidentified
  source 1..1608: mol_type = unassigned DNA; note = element_73a85ea
  misc_feature 1..2: note = core
  misc_feature 3..278: note = LE
  misc_feature 279..1490: note = CDS
  misc_feature 1491..1608: note = RE
  misc_feature 14..298: note = bridgeRNA
ctactacaataaagatatggttaatcaaccttacagccagtaaggaattacccatcttgttgcttaagttgtataatgagagagcaataggtatatcgcggagcgtcttggacttcgcgtccgtaaggtagtccgataaccagctcctcatttgcagcgttcggtttatgcaggttggatcacctcgtgtgcattcgtgtcacaccacagtagatagaataggcaatgagtaaaactggtacttatccattgcaataatcttaaggagtgacaaaattatgaacgcagtaggtattgatgtttctaaaagaaaaagcatggtcgcaatcattcggccttttggtgagattgtatattccccctttgaaatcaaacatacatcgaatgacatacagtccttaatccagcttatctattctatggaaggagaatcccgtatcgtaatggaacatacagggcactactatgaatcccttgcccatgaattatctgcagcaggtcttttcgtgagtgctctcaatccaaaacttatcaaagattttgataataattctcttcgtgaagtcaaatcagacaaagcggacgcaatgaaacttgcccgctatgcccttgacaaatggccggatctgagacagtatagcgttatggatgaattacgaaatcagttaaagacaatgaaccgtcagtttgatttttacatgaaacacaagaccgccatgaagaataatcttatcagtattcttgacatgacctacccaggtgtaaatacttactttgaaagtcctgccagaagtgatggcagacagaaatgggtggattttgcaacgacatactggcatgtggattgtgttcgtaagatgtccttgaaagcgtttacggaacactatcaaaagtggtgtaaacgaaagaagtacctcttcagtgaagcaaaagcagaagaaatctatggaaaagcaaaggagcttgttcctgtacttccaaaggatgctgtcaccaaggaactcatcaaacaagcggcggaacagcttaatagtatctcctcaacggtggaagaactgcgtaccaaaatgaatgagacagcctcaaaacttccggaatatccaattgttatggaaatgaaaggagttgggacctctttaggtccgcagatcatggcagagataggggatgtaatgagattcacacataaaagtgcaatcacagcgtttgcaggagtcgatcccggagtcaatgaatccggtgactataagaagaaaagcgtgcatacatccaaaagaggttcttcgcaacttcgaaagagccttttccaagtgatggaggttctggttaagacaatgccgcaggaagaccccgtatatcgattcatagacaaaaaacgaggagaaggaaaaccgtattacgtctatatgacagccggagcgaataagtttctaaagatctattatgggcgagtgaaagaatacctttcttcgctatcagattcaaactaatcccagacataccaaaaaagaccagcactggttgtggtggtcttattttggtatctaaatttcaaacaatataaaatataaaattttttaaatttagtcttgactttttatttgcagg

SEQ ID NO: 4750 - DNA, 1449 bp, unidentified
  source 1..1449: mol_type = unassigned DNA; note = element_73aa53d
  misc_feature 1..2: note = core
  misc_feature 3..237: note = LE
  misc_feature 238..1434: note = CDS
  misc_feature 1435..1449: note = RE
  misc_feature 19..201: note = bridgeRNA
tccttacctttcttctcgggtgctgtaagccactggctgccataggctttgcagcacccgggagcgccgggtatggctttcatggtcgtgccctcgatggctcagggggattggccgcccggcgctccgcgacgactcgaccgctgattgagatacgcgacccgatcgcttcgtaaggacacgacggcgcagtcgtctgcgggacaactcggcagagcggaaacgacgggagtggctgtgcaacaactgtgggctggagtagacgctgggaaatcggctcaccactgcgtcgtcatcgacgccgacggcaaacgactgctgtcgcgacgggtgatcaacgatgaacaacagctcggcgagctcctcgccgcggtcaccacgctggccggaaactcggacctgacctgggcgatcgacctcaaccacggtggcgcggctctgctcatcgcgatgctggcagaccgtgatcagcgcctgctctacatacccggccgaaccgtgcactgggcctcgggaacctaccgcggcgacggcaagaccgacgcgaaagacgccgcgatcatcgccgaccaggcccggatgcgccgagacctgcaaccgttgcgcatcggtgacgaaaccgcgaccgagctgcggatcctcacctcccggcgcaccgatctgggctgcgaccggaccagggcgatcaaccggttgcgcgcccagctgctcgaatacttccccgctctggagcgagcgttcgacctgcgtgcgagcaaagcggcgttgatcctgctcaccggctaccaaacccccgacggcatccgccgtatcggcgaggaccggctggcggcctggctgcgcgagcacggcgcccgtgtcagcgctcgcgtcgccgcgaccgctgtcgccgccgcgagcgcccagcacaccaccgtggtcggggagcgactggccgcggcgatggttgcgcgtctggcgaaggaggtgatggacctcgacatcgagatcagcgagatcgacgcgatgatcgaggcccgatttcgccgccaccggcacgccgcgaccatcctgagcatgcccggattcggtgtcctgctgggcgcggagttcctggccgcgaccggcggggacatgaccgccttcgccagcgtcgaccgcctcgccggggtcgccggcctggccccggttccgcgcgattccggccgcgtgagcggcaacctgcgacggccacgccgctacgaccggcgattgttgcgggcctgctacctcgccgcccaggtcgcgatcatccacgacccggtctcgcggacctactaccagcgcaaaagaaccgagggcaagaaccacacccaagctgtcatcgcgctggcccgccgccgtctcaacgtgttgtgggcaatgatgcgaaccgacaccccataccggcccgaaatcagggccgtcgcggcttgacaacatcattgagat

SEQ ID NO: 4751 - DNA, 1439 bp, unidentified
  source 1..1439: mol_type = unassigned DNA; note = element_73ab88e
  misc_feature 1..2: note = core
  misc_feature 3..82: note = LE
  misc_feature 83..1186: note = CDS
  misc_feature 1187..1439: note = RE
  misc_feature 1256..1377: note = bridgeRNA
taattacatggactcgcccacgccgaggcgtcaatgcgccacggtggcagtctaagaagccaacggcagcgagggcgagtccatgaaaaagcatacagcaactaatcaatcccaggccttaaacgatctatcggcctgcacgacagtggcagtcgatcttgccaagcgggtctttcaggtggcgggagaagacgctcttggtcaggtgcgttacgaggcgcggatcaagtcgcgtgaggcgttctacgagtttctgtgcaagttgccgccgagtgtcgtcgtgctggttgaaactggcccaggtgctcaggcgtgggcacggcagctacaggggcaaggcaacctggcgcggattcttccggctcgtctcgtcgagggtcaccgcagcggtgcgaagaatgatcgtaacgatgccctgtcgatcttgcgcgccggtcgcgatagcaagatttcagccgtgcccatcaaaagcgctgcctcgctggccatgcaggcgctgcatcgcgctcggcagggttatgtgcgtcggcgtacggcgatgagtaatcagatgcgcggtttgctgctggagcacggcgtggctctggcgcaaggcgatgcggctatcagccacgtgataccgagggtgctggaagatgcaacgcagccactgccggagatactgcgggagttgatcgacgaattgctgggtgaatggcggcaattgggcgaacgcatcaacgtcttgagcgggcgcttggaagctgctgcgaacgcggacaagaccgcgaaacgactgatgacggtgcgcggagtcggcccgatcatcgccaccgcgctgctggccaagcaaaccgaacctgaacgtttcgccaatgcccgcttatatgcggcttacttcggcatggtgcctgatcagcacagcagcggagaaaagatccgcctgggcaagatgagcaagcgaggcgatggctacctgcgcagcctgatgatccagggcgcgcatgcggtcctccaacaactacggcctgattcgcagcaaccggatgatcgccgcttgctgggctggctgagtcgcctggggcgcaaagaggcggcggtgaggttagccaaccgcaacctacggatcgcctgggtgctgctacagaatgaacagacttatcaacgccagccagttaatgacaggcaggcggaaatgagtcactgatccaccgagttctgccaccggggcgcgaagtcgctccaacctctgctagaaaacattgaccccaggtaagaccgttgcggattgatgccttggctcctactggccttcgaggtctgaatgtaataggcataccgcaagctcacacaatgttggccagaagctgatgacagcttcctcgaataggcctgatacatagatgcagccgggtagcagtgttgaaaagcaggtttgacagtgggggcgagtccataca

SEQ ID NO: 4752 - DNA, 1563 bp, unidentified
  source 1..1563: mol_type = unassigned DNA; note = element_73b05d3
  misc_feature 1..2: note = core
  misc_feature 3..265: note = LE
  misc_feature 266..1432: note = CDS
  misc_feature 1433..1563: note = RE
  misc_feature 3..242: note = bridgeRNA
cttgtatgattattaggaagctaataatcatctcttcctttcattttaatatcgtggttcaatacaactcagatactgtggacaaatgattgaccttttgtagtttgactactcgacaggagtgtattgccgctacctttatctgaattgtttatcagctggatgtgccggagttttctcctgagtactcatttcaatcaagtctacgatgataatcgttggtggatatcacggtatcagactttagaaagggaggtaaaacctcatgatttacgtaggcattgacattgccaaactcaaccatttcgcctctgcgatttcttccgaaggcgaagtactcatcgagccgttcaagttcacaaatgacggtgatggcttccagttgctggtctcgaaactcgaatcattcgattcggacagcatcatcatcggtcttgaatcgacggcacactacggcgacaaccttgttcgataccttgttgccagttcatttaacgtgtgtgttctaaatcccatcaaaacgtctactatgcggaaaaacaacatccgtaagactaagacggacaaagtcgacacgtacatcattgccaagactcttatgatgcaggattctttcaggtttatgacttattatgatcttgacctgatggatctcaaaacactcggacgttttcgtcaaaaaacagttaagcagcggacacgcttaaagatccagctgactacctatgtggatgagactttcccggaattacaatacttctttaaatccggcctgcatcaaaaatcagtctatgcacttctcagagaagcacctactgcaaaagccgttgcttctatgcatatgacccatttgtcacatcttcttgaagtttcctcgcacggtcacttttccaaagaagatgccaaagcattaagggttcttgcacagaagtccgtcggtgcttccgacagtgctctatctattcaggtaactcaaaccgtttcacaaatcgagttactggatagccagttagaatctatcgagcgtgaaatgactgatatcatgatgtttcacgacccgataatcatgaccattcctggtatcggatatatcaatggtggaatgatccttggagagataggtgatattcaccgattctccaatcccaataagctgcttgcttttgcaggactcgatcctgttgtctatcagtccgggaactttaaagccaccaggacaagaatgtcaaaacgtggctcaagagtgctcagatacgctttgataaacgcagctcataatgtagtaaagaataatgcagtcttcaaggcttattatgacgccaagatggctgagggccggtctcactacaacgccttagggcattgtgccggcaagctcgtcaggatcatctggaaaatgatgacagacgatgtagaatttaacctcaactgagaggtctgtataccgatatcgtaagattttgaaaagcgcccttcagggagccttattaaggttacccttttttacctacgatagagaaatgaaatctttggctaatttaggcttgacttttcatagctggt

SEQ ID NO: 4753 - DNA, 1338 bp, unidentified
  source 1..1338: mol_type = unassigned DNA; note = element_73b0e7a
  misc_feature 1: note = core
  misc_feature 2..260: note = LE
  misc_feature 261..1322: note = CDS
  misc_feature 1323..1338: note = RE
  misc_feature 13..253: note = bridgeRNA
ctgtgaggatcgattctgcagcctgatcgtgctgggctgtggctgacggccgtgggtgtgacccttcgcctgactggcttcgtgcctttgccggacttgtccgctcacgaccgtcggccccggcctgggcggagcagctggcctgatcaggagcttgaccgtcgagcgttaacggcgcccgtcgtgtctcatcacagtcctgccgagtctccacccggaccgggaaccacgtccccgttccaggcaaggagagagaacgcatgaccagtctgaccgatctgcgtgaggtggtcgatgtcgtcatcggcgtcgacacgcacgtgcacacccattccgcggccgcggtcgatgcccgcaccggtggcgtgttgggcgaggtcaccgtggaggcgaccgcggacggttacacccagctggccgccttcgccgaggagcacgccatgctgcgtgcctgggcgatcgagggcaccggcggccacggcgccggcctggcccgccacctggcccgtcgcgacgagctcgtcgtcgagctcgaccggccggaacgagcccggcgacgcaacggcgccaagtccgacccgctggacgcgatccgcgcagcccgggaggcgctgtcccgggcccggctcggcacgccccgcggcggcggggaccggcaggcgctgtcggtgctgctggctgcgcgccgttccgcggtcgaggccggcaccgacgcccaacggcagctgttcagcctcgtgatcgccgcgccggaaccggtccgggcccggttccgcggtctgaagctgccggcgatgctgcggaccgccgccgccctgcgggtccacccgtcctgggacaccgagacgaccgtcacggtcatcacgctgcggtccctggcccgccgggcccgagcactgtcgcaggaagcagccgggcacgagaagaccatcctgggcatcgtgcggtcctggcgcccggacctgctcgagcagcccggcatcggcccgatcgtggccgcgaccgtgctgtgcgcctggtcccaccccgggcggatccactccgaggccgccttcgccatgctcgccggcgccgcacccatcccggccaacagtggccaggtcaccacccgacaccggctcaaccgctacggcgaccgccagctcaaccgcgccctgaataccatcgccctgtcccggatccgctacgaccaagccacccgcgaatacgtcgcccgacgcaccaccgaaggcaagaccggccgcgagatcaaacgctgcctcaagcgctacatcgccagagagatcttccgaaccctcgaacacccacccgcaaccacttgacgatccataggagcgt

SEQ ID NO: 4754 - DNA, 1472 bp, unidentified
  source 1..1472: mol_type = unassigned DNA; note = element_73b1cb8
  misc_feature 1..3: note = core
  misc_feature 4..263: note = LE
  misc_feature 264..1457: note = CDS
  misc_feature 1458..1472: note = RE
  misc_feature 26..243: note = bridgeRNA
tccttaagttcgtagttgcagttacttcgtattgctgagcgttacgttgggctgtgacccgggtgggtcgggtatggctgccatggtggtgccggccctggtggtgcggcttgaaaggactggccgcccggcctgcctggacttcctcgggccgctgattgagatctgcgatgtgatcgcttgtttaaggaaatgccggcgaggtcgtccttggggattctgttggcagacaagcgaaaagaggtccggtgaccgaaaagcaaatgtgggctgggatcgacgtcggcaaagaacatcactgggtgtgcgtcgtggacagcaacggcaacatggtgttctcgcgcaaggtggtcaacgacgagcgcacgatcggcgacctggtcgccgaaatcgacacgcttgccggtgaggtgtcctggacagtggacttgagcaacgtgtacgccgccctggtgctcacggtgctggccgatgcaggcaagacggtgcgataccttgcgggccggcaggtgtggcaagcatcggccacctaccgcggtggtgagtccaagaccgatgccaaagacgcccgggtgattgccgatcaatcccggatgcgcggtgcggacctgccggtcctgcgtcccggcgatgacctgatcaccgaactgcgcatgctcaccgcccaccgcgccgatctggtggccgaccgcacccgcaccatcaaccgcctgcgccaacaactgctggccgtatgcccggcactcgaacgcgtcgccgaactgacccaagaccggggttgggcggtactgctggcgcactaccagcggccgaaagcgattcgccgaaccggtgtttcgcggctgaccaaggtgctggcggcggccggggtgcgcaacgccgccacgatcgcggctgccgcggtaactgctgccaaggcccagaccgtccgcctgccaggtgaggatgtgggtgccggattggtcgccgagttggcccagggggtgatgaacctcgatgagcgcatcaaacacaccgacgcggacatcgaggaacgatttcgccgccatccgctcgctgaggtgatcaccagcctgcccggcatgggctttcggctcggcgccgaattccttgccgtggtcggcgatcccgcattgctggaatcgcctgaccaactcgctgcctgggccggattggcgccggtatccaaagattccggaaaacgcaccggccggctgcacacgcccaagcgctacagccgacggctgcgccgggtgatgtacatgtccgcgctgaccgcgatccgctgcgatcccacgtcgaaggcgtactaccagcgcaaacgagaccaaggcaaacgcgccatccctgccaccatctgcctggcccgccgacgcgtcaacgtcctctacgccctcatccgtgacaaccggacctggcaccccgacacgccccaaatcgccacggcggcggcttgacacggtcattgagag

SEQ ID NO: 4755 - DNA, 1427 bp, unidentified
  source 1..1427: mol_type = unassigned DNA; note = element_73bac5a
  misc_feature 1: note = core
  misc_feature 2..88: note = LE
  misc_feature 89..1129: note = CDS
  misc_feature 1130..1427: note = RE
  misc_feature 1191..1422: note = bridgeRNA
taatggaatggacgcccactatccaaaacggcatcaaggtgccaaagtagtggtgtagtaaccactcaactagataggagcgtccgacatgaagattacaacaataggaattgatttagcaaaagaagtatttcagattcacggtgtagatgagcatggcaaggccgtgttgcgcaagcaattgcgtcgcagtgagatggcgaagtatttcgtcaatctagagccctgtttgataggcatggaagcttgtggcagctcacactattgggcaaggaagctggctgaatttgggcacaccgtcaagcttatgtcaccccagtttgtcaaaccttatgtcaagaccaacaagcatgatagggccgatgcggaagcaatttgcgaagcagtcactcgacctaatatgcgctttgtcccgatcaagaatgttgagcaacaagccatgctgtcagtgcaccgagccagacagggttttgtcaaggccagaaccgcacaggcaaatcagatacgcggtctactctctgagtttggtatcgtgattcctcagggcatccaatcgattagcaaacgcatacctggcattctggaagatgctgaaaatggtttgcctgaaataatgcgccgattgctggaaagactgaatgatcacctgagggaactggaccgccaggtgaacgaattagagtggcaaatcaagctttggcacaaagagagtgaggccagccgaagattggaagccattccgggggttggcccgatcacagcgagcgccatggtggcaaccgtaggaaatgcgacggagtttaaggacagcagacaattagcagcatggctagggttagtgcccaagcagcatgcaagcggcggcaaacagttattgctcggtatcagcaaacgcggcgatacttatcttcgcaccctgttgatccacggagcaagagcagtcatccgcattgccgagaaaaaggccgagcccggaagctggctatgcaagctgatagcacggcgcaataaaaacattgctgctgttgctctggcaaacaagaacgctcgcgtcatctgggcattgctcacccaaaaagcgacatttcaccccgatcacactatggcaaccactgaggcagctcattgatggtaagggttgaataaaagcgtataggtcatgttgcaataaaaacgaggttaaggagaaagatgaccaccgattgcacaggcaatcatgacatgatggcgagactggtcagaccgtgagtggctcaacctaagtgaaacacagtgcatcgagcacgctgatgtgataaggcgccactcagcgaattccatcaggggcagaggcaatatgcctcatacaaagtccggatgtatggctgcaatctttacctgctcaaaatcatcagttgaaggcttggcaaaaagtgggcgtccatgta

SEQ ID NO: 4756 - DNA, 1411 bp, unidentified
  source 1..1411: mol_type = unassigned DNA; note = element_73bb2d4
  misc_feature 1: note = core
  misc_feature 2..91: note = LE
  misc_feature 92..925: note = CDS
  misc_feature 926..1411: note = RE
  misc_feature 1171..1406: note = bridgeRNA
taatggcatggacgcccctactctgcacggcatctgttgtgccaaagtggaagtgttgatcaaccacttaaactgagtaggagcgtccgagatgaacattacgacggcggggttagatttggcaaaaaatgtgtttcaggtccacggtatcgatgagcgcggcaacgcgaagctgtgtaagcagctcaagcgcgctcaggtattgggttttttcgcgaacctgccgccgtgtctgatcgggatggaagcgtgtgcgagcgcgcatttctgggcgcgcaagctcagcgcgttcggtcataccgtgaagcttatagcgccgcagttcgttaagccgtacgtgaagtccaacaagcacgatgcggccgatgcggaggcgatttgtgaggcggtggccaggccgaacatgcgctttgtaccggtgaagaaccccgagcagcaggcgcttctgggattgcatcgtgcgcgccagggttttgtcgccgcgcgcaccgcgcaagccaatcagatccgaggcctgctggctgagtttggcatcgtgtttgcgaaaggaatcggttgcgtcacgcggaagatgccggaggtcctggaggatgccgagaacggtttgcccggcacaagccgcgagctcttcagtcgattgtttagtcattttcgtgagctcgatcgccaggtgaaagagctcgagggccagatccaggcgtggcaccatgaagacaccgccagcctgcgtttacaggcgattcctggcatcggaccgctcacggcgagcgcgttggtggccagcatcgctgatgcgcgcatgttcaagaatggccggcagctggcggcatggttgggcttggtgccgcggcagagttccacggggggaaaactcagttgcttggcatcagcaaacgtggagataagtacctgcgcatgctgttgatccatggggcgcgttcggccttgtggcatcagaagtctcaaagcactcccacgcaagggtggctcaagggtctgctgacacggcggcatcgcaatattgcagcggtcgctttggccaacaagaacgcacgcatcgtctgggcactcctggcccatggtcgcgagtaccaatccggttacatcccggcgcaggctgcggcttgatcggggcgataaccttaacttagatacagctagcacagctcttcccaccaccgaatgctcaggcgtttgtaaaagtgatggcaacacaggtcagaccggggttgattaaatctactgtcgctctgggacatcaaaagtccgaagcgctgatcagacgtcaaccagcacattccataggggacagcggtcatgcgccgccccaaaagtccggatgtatggctgcactctctacctgtcttcctgaactgcaacaaattgcttggcataggggggcgtccatgta

SEQ ID NO: 4757 - DNA, 1582 bp, unidentified
  source 1..1582: mol_type = unassigned DNA; note = element_73bc40b
  misc_feature 1..2: note = core
  misc_feature 3..107: note = LE
  misc_feature 108..1223: note = CDS
  misc_feature 1224..1582: note = RE
agataatatgaagtggcctcctattgtcaatacgtggattacgactcataattgaattgattaaaaacacttatggtgtcgatgccataacacaataggaggccactatgaaaagtatattatctgttggaatggatgtccacaaaaattcgtttagtttatgcgcttatgacggttatacaggagaaatcgtttcagaatctacatttgcttctgatgtaaaactagtaattaagtttattgaaacacttaaaagtcgacatgaaaacgatgtagaaatcaaatgtggttatgaagcaggttgtcttggatattctctttataagtcgttaactgcaagaggagtggattgtgtgattctggctcctacaactatgcaggtttctgcaaaaaataagatggtaaagaatgatagaatggatgctttgaatatcgcaaagaatttggctagtggatcatataaagctgtatatgttccagatgaagaagttgttgaaataaaagaatacatccgtatgattcatgatttcaaaaaagaattaaaaagagttaagcaggaaatctgcgcgtttgtattgcgtcatggctatcaatatgatggtaaatcaaaatggacaattcgctatatgaattggatcagagaattggaaatgtcagaaattcaaagagaaaccttaaatgaatatatcgcagaaatggaaaatctaaatgataaaattgatcgattcatgaatcgtattgatgagatgtatcaaagcgatagatacaatgaaaaggtatctaaattaagatgttttaagggtatagatacatttgcggccatgactatacaggtagaaacagctgattttgaacgttttccaagcgcaaaagcatatgcatcctatactggacttacaacaggagaacattctagtggcgataaaaacaaccaaattggtattacaaagcaaggaaatacagtgattagaaaaacactggtagaatgtgcacaatctttggtgaaaggaaacgtatatgcgaaaaaatcacaaggattaaaaagtcgtcaaaaaggaatggatgtaaatattattgcatatgcggataaggcaacagaacgtttgaagaagaaataccaaaaattgattgaacgaaatgtgcctagaaataaggcaatagtcgctgtagctagagagttagcatgttttatttggggaatggaaacaggaaacatccattaaaacaaaaaaataagggaaaggagatttgaagaaagacttttagaaagacaaaggattgatgatatagaggaacttcgtaaataatgaaacaggtctggttatttacggttcacctcttaaggcaatagtggtacacgaatcaaatcgcgaggaggactgtacaaaaaagctattgatccacgatacgagatttacaaaacctgctcgacggaccattaaccttaggtacccaatccacgaataacagagtggttaactgtcgatagatttgtttaggagttcctgtatgtcatcaatctaaaactgaatatttttaaaatatgagtgtaattttgtcttgacaaaggtcacttcataac

SEQ ID NO: 4758 - DNA, 1411 bp, unidentified
  source 1..1411: mol_type = unassigned DNA; note = element_73c5f38
  misc_feature 1: note = core
  misc_feature 2..45: note = LE
  misc_feature 46..1116: note = CDS
  misc_feature 1117..1411: note = RE
  misc_feature 1180..1403: note = bridgeRNA
taatgggatggtcgcccctcctaaaccggcagcacctgtgccaacgtgtgggacgatacattcatcaatgtgagtggagcgaccaacctgaacgttaaaactatcgggatcgatttagcgaaagcgattttccagatacacggtgtgaacgaacacggcaagtgcctgtttaacaagccgctcaagcgggcacaaatgatcagcttttttgccaatctgccaccctgtctgattggcatggaagcctgtagcagcgcccactattgggccaacaaactgcaagggctaggacataccgtcaaactgatggccccgcagtttgttaaaccctacgtgaagaccaacaagaacgatgcggcggatgctgaggcgatctgcgaagcggtgggccgtccgaacatgcggtttgtgcaaatgaagagtagtgaacagttagccgtcctggcgctgcaccgcgcccgacaaggctttgttaaggcgaggaccgcacaggccaaccagctacgcggtctgctggcagaacacgggatcatcatccctaaaggcattgcccacattggcaagcatctgcccgagatcctagaggagtgcgagaacgggttgccagggacgtttcggcaattgctcgagcgtctgggggctcatctcaaggcgctcgaccggcaggttcaggaactggaggtccaactccagaactggcaccgtgagaacgccgccagcaagaagctggcgctgatcccgggcatcggcccgatcaccgcgagtgccttgatcgcctccgtcggagacgcaaaaaattttaagaatggcagacagttggcggcgtggttgggactggtgccacgccaacattccagcggtggcaagcaaacattgctggggatcagcaaacgcggcgacagctatctgcgtaccctgctgatccatggtgctcgggctgtgctccgggtagctgagcgcaaggcgcaacacgcaggcagttggttagcaggggtgatggggcggcgcaatcataacgtggccgccgtggcactcgccaacaagaatgcccgcatagtctgggcattgcttgctcaggaaagagaatatgaagctaattatggcgtggtagcctgaacaacaagtgtcccgcgacaccaactgcgtagcgactctaatagtaactgatatcgatgagaacaaccgattgcacaggcaatcatgacgtgatggcgagacaggtcagaccgtgatggggaaaacccgtggactacagggctttgtaagagcgaacagctgatagaggtccccatcagcgaattccattagggatagaggcgctagcctcgattgaaatccggatctatggctgcaatctccacctgactcactttcatggattgagggcttggcaaaccggggcgaccatcta

SEQ ID NO: 4759 - DNA, 1609 bp, unidentified
  source 1..1609: mol_type = unassigned DNA; note = element_73c7700
  misc_feature 1..2: note = core
  misc_feature 3..274: note = LE
  misc_feature 275..1249: note = CDS
  misc_feature 1250..1609: note = RE
  misc_feature 14..294: note = bridgeRNA
ctgttacaataaatatagttgttaaatccataacaaaccagctatggtttacacgcactcatttctgagctacaatggaagcagtgattggaatgacggattcctccttgggacaaagtgcccgtaatttagactgtcatccatgctttcattgcagtgttcgtttttgcaggttgagccgccgcatcggtgtgttcgtgtcactcaacagattgaataggtaatgagtaaaagcgtggcatccgattacaaattcaaacaggagtgatgaaaaatgaacgcagtaggtatcgatgtttccaaaggcaaaagcacagttacagtgctaaaaccattcgaagaagtggtggcttcaccttttgatgttgttcataacgacagcgatcttcatcagcttgtagagttgatcaaaggactgccggatgagtcaaaggttgttatggagtacaccggtacatattttgaacccatagcacagttccttcataacaacgatatatttgtttccgtagtcaatgctctcttagttcatgactatggtggaaactctttgagaaaggtcaagaccgacaagaaagacgatttaaagcttgcttcctatgctctagaccgctggactgaactcgaagaatatgttcctgccgatgaacagtgcaagacattgaaactgctgaacaggcagtacaatcagtccgtcaaaattcagaccatgataaaaaacaatcttatctcgctgaccgattctgtttttccgggtgtcaataagctgtttacatctcccgaaagacagtctgacggtcatgaaaagtgggtggattttctaagagcatttcctcataaggactgtgttgctaagctgtatctatcttctttcaaagccaaatacaaaagctggtgcagtaaaaacaagtataattacaccgactccaaagccgaggaaattcacgcttacgccagatctgttatcgctgttcttctactgaatgacagcataaagctgcttgtaacacaggctgtaacccagcttaacaccatactcgaaaccgtttcttccattcgcaaggagatggacagaattgcttcttcgctgcccgaatacgaaaccgtaatggcaatgtacggcgtaggaaaggtatatggacctcagctcatggctgagatcggcgacacacgccgtttcagaaacaggcgtgccataacttgcttttgcagggctagacgccccgccgtatcagtcgggacagcttgatatcgcttcaaggcacatttccaaacgtggttccgcagctctcagaaaagtcctttttcagataactgagatatttattcttaacaagcccgaagatgaactggtgtatcagttcattgacaaaaagcgttccgaagacaagcattattactcttacaggatcgctgctgcaaacaagtttctgaggatctattatgcgaaagtaaatcaagctctgaactcacaataactttcggttttatatccacatcaggctgcttcaaaattttttctatgaagcggtctttttgtcatgccctttttaggcttatgaattatttgtaaattcactttttgagggcttgacttttatttgcaagt

SEQ ID NO: 4760 - DNA, 1457 bp, unidentified
  source 1..1457: mol_type = unassigned DNA; note = element_73c9792
  misc_feature 1..2: note = core
  misc_feature 3..361: note = LE
  misc_feature 362..1441: note = CDS
  misc_feature 1442..1457: note = RE
  misc_feature 10..229: note = bridgeRNA
ccgttaccttgttggtggtcccgggtggtccggggctgggccagctgccgtgggcatgatgtcttgcccctgtccacagatgatccgggggtgttgtcaccgcggcagccgggcgctggtgaccgctgataaggggaacggcccgctgcgtgtgaggtctttcgtaacgtgggtgcgggaccggtcgtccaccggctgaccctcacccatgcaccgagaggcggcacgaagatggatatcggagacatcgacgtcttcatcggcatcgacgtcggtaagagcgagcactgggccacggccctgagccgggacgggcagaaggtcctcgacaaggccctgcccaacgacgaggaccggctgcgtgaggtctaccagcgcctgcaggcaaaggggcaggtgctggtggtggtcgatcagccctgccaccatcggggccctggccgtggcggtggctcaggacatgggcatcaccgtgggctacctgcccggactgtctatgagacgcatcgccgacctgacgccgggcagcgccaagaccgacgccaaggacgcggccgtcatcgcccaggccgccaggaccatgccccacaccctgagagccgtcagcacctcggacgaggaggccgcggcgctgagcatgctcactggcttcgacctggacctggcccgccaggtcaaccagaccgccaaccggatccggggcctgtacacccagatccacccagccctcgaggccgtggtggggccctggctggagcacgacgccatcctggaggtcatcaccgcctggcctaccccagccgatctgaagcgagcgggcaagacaaggattgacgccaggctcaagaagcacgggtgcaggcggcacgccacctgggccggccagatcgtctcggccctgaagcaccagaccgtggtggtcgccggcaccgacgccgcaggcacggtgctgccccacctggctcgtcagctcatcaccctgcacgcccagcgagccgatatcgccgcccaggtcgagaccctggtgcaggcccaccctctttaccaggtcctgacctccatgcccgggatcggggtcaggaccgcagccgtcttcctggccgagaccctgggcaagaccttcgacaccggagcccagctggcctcctactccgggctcgctcccgtcacacgccgctccggctcatcgatccgcggcgagcacgtctcccacggcggcaacaagaggctcaagcgcgccatgttcctgtccgccttcgcctcactgcgctccgaccccgtctcccgagcctactaccagcgcaaacgagaccagggcaagcgtcataaccaggccgtcctcgccctggcccaccgccgcatcctgaccctgcacgccatgatccgcaacggcgcactctacgacccccaaccagccacgaaactacccgcagccgcttgacacaccacatagggca

SEQ ID NO: 4761 - DNA, 1296 bp, unidentified
  source 1..1296: mol_type = unassigned DNA; note = element_73ca8ca
  misc_feature 1: note = core
  misc_feature 2..213: note = LE
  misc_feature 214..1182: note = CDS
  misc_feature 1183..1296: note = RE
  misc_feature 34..204: note = bridgeRNA
tcttaagttagattctctttaaattgatgtaataaccagaaagaacaaaagagagaattaaggttagtatacacggtgaagcttcagacttcgacaacattgataatcctctctcttttactacttaaatcacgttcagttctgtgagaccttagatctcgttttcaagttgttgtgagcagaagtagccggttctttcataaaatatttgttatgaataaatataaagaaacttttggagtcgacattggtaaagatgtctttgatgtacatggcagtaacaaaggtcacaaccggtataagaacgatgaaacgggattcaagaaataccttaaagaattaccccctggttcattggtggttatggaagctacaggttattatcattacagactggcacagtttctttacaaaaatcaggtactggtatcagttgtaaatcctttatcaataaagcgatttattcaaatgagattagcaaaagtaaaaacggacaaaagtgatgcaaaggctatttgtgaatatgctttaatcaatgaagtccctatttacgatgctttgacagatatccaaagtgagtgtttacagttgtttcggttattggacacatatttaaaacagcgtaccgcaactaagaacaagatacatggagaagttgttttgggtgttccgtcaaagtttgtttatcgttcattgatccgtaacaggaaacagctggataaagaaatatcggctatcgaattaaagattctgtcattggtaaaaaaggatcaacaagagcaattgaccctgttaacttccatacctggaataggtcaaaagacagccttgttcttaatagttgtgaccgacggtttttccaagtttgagactgcggcacagctttgtagttacgttggcataactccaacgataagagagtcagggagcagcgttagaggtcgttcacgaataagtaaggtaggtaatggaaaactgcgcaacctattatttctatgctctttcaatgcctgtaagcacaacaaggcatgtacggcggtttatgatcggatagtaaataaagggaaaagcaagaagcttgctttgatagcagtagccaacaaactgcttaaacagtgttttgccattgcaaaatctggcaggccatatgacgaaacttacgtttcgatattgccaagataaatcaggaaaaaaatagaataaaaaagctcaaagaaccaagttattgaatctatgagcctagaatgataatgtctcagattaaggagtaatttgtttgttttttatctcagttct

SEQ ID NO: 4762 - DNA, 1415 bp, unidentified
  source 1..1415: mol_type = unassigned DNA; note = element_73cadef
  misc_feature 1..2: note = core
  misc_feature 3..86: note = LE
  misc_feature 87..1139: note = CDS
  misc_feature 1140..1415: note = RE
  misc_feature 1154..1402: note = bridgeRNA
tgatgtggtggacgacgcccgctcccggcatcgatgtgccatagggtgatcgttagagacagaatcacattgagggggccgtccacatgcaggttatcacgatcggcattgatcttgccaaacacgtgttccaagttcacggcgtcgacgccaatgacaaggtggtcttcaacaagccgctgcggcgctcacaagtgctccccttcttcgccaaactcgcgccatgtctcatcggcatggaagcttgtgcgtcggcccactactgggcgcgcgagctcaagaagctcggccacgatgtccgcctgatgccggccaaagatgtgaaggcgtacgtcaagcgcaacaagaacgattcggtggatgctgcagcgtgcagtgaggcggtccggcgaccgacggtccgaaccgtgccggtgaagacgcccgagcagcaagcagagctcatgcagcaccgcgtgcgcgacctgctggtgcggcaacgcacacaagccatcaatgcgttgcgctcgcatttggctgagctcggcatcgtcgcggcacaaggctatgacggtctgaaggtgctgcttgtggtcatcgccgactgcagcgatgtccgcctgcccgagaatgcacgcgctagcctctcggcgcttattgcgcagattgcctcttgccaggctgagattggtgccatcgagaagcgccttctcgctcagcatcgcaaaaacgccgacagcaaacgtctcgagaccattcctggcattggcgtcctcggcgcgagtgccattgtcgccacggttccggatgcttcgatcttcaagacggggcgtgacttcgcggcctggatcggcatcgtctcgcgcgaggattcgaccggcggcaagcagcggctaggacccatctccaagcaaggcgatcgatacttgcggcgcatcctgattgtcggggcgtttgccgtgatcaagcaggcgcgcgcccatcccgagaagtacccttggctgacgcagctattggcgcgcaagccggcgaaggttgctgcagtcgcgctggccaacaagacggcgcgcatcgcctgggccgtgctgaccaagaaagagatctaccgtgtcacatcccatcaccgcgacacctgcgtcgttgggaggttgaagaagtaagaggcttagcaatgaagtagtgcatagaccatgtaaacgtagcgttctcggattgcaggggtgaatacgacgtgatgcgaaacggtcgagccgttcgattgggagaacccgttgagtgccatgcgctcaaagcgcgggctactgattgggacccgatccgcggatcacatcatggccagcggccaaagtggctgcaacagcaggccgaatacatgaccgcacccgacattcgcggaaacgtcagattcctcttgcatcgcgggcgtcgtccataca

SEQ ID NO: 4763 - DNA, 1524 bp, unidentified
  source 1..1524: mol_type = unassigned DNA; note = element_73d086b
  misc_feature 1..2: note = core
  misc_feature 3..256: note = LE
  misc_feature 257..1483: note = CDS
  misc_feature 1484..1524: note = RE
  misc_feature 47..228: note = bridgeRNA
cttatattaggtctgttgaatgtaaacatacatcaggtgatcttatgtaaaccaattttaaagagcttgctgggatgaggaccaaccctacccaattcccccatcgaggatcagggagagactgtcccgtccagtgagagaacggagctaaaggttcaatagaaagttgtccccttttggaggaccgatataaggctaactttccgttcagagctattgggattggaattatataacgaaggaggagcaagagaaggtgaagcgatactacatgggagtggattggggagaccgcttgcatcaggtgtacgtaggtgatgaggagggtaagaaagtaagagaggtgaaagtgccagagacggtggaggggctggctgaaatggggcgctggcttgacgagaagcgtgccgaggagatcgagctctgggcagccattgagaagccggcgggacgcatcgtggactttctgctcgatcacggggtggtggtttatccggtcaatcccaaggcggtggatcgagtgagagatcgttatcggatgagcggttcgaagagcgatccgttcgatgcctacgtgttggcagagtttctcaggaccgatcaggtgcatttgagagcgcttcaaccaaactctgagaaggctcaagaacttaaattgctcagccgggatcagcgtcgagtggggcgccagaaaactcggttgctcaatcagctcaccatcacgctcaaagagtattatccccgggtcttggaggcctttaacgacctggaaacgcagatcgtcctggattttatcaaacagtatccgaccccggctcatctcagtgtgcttaaacgtaaagagttcaaccgctttgccaccaagcaacatcacctcggcaaagcacgctgtgaagagttgtgggaggagcttaaaaaaccgcaactggcggtgcccgagcatgtggtcagagctaaggcgcagttggtcgaggtattgatcgagcagcttcaggcttcgatcaaagcggtcaagatctatcacgagagggtcgagagttttttcgcttcgaccccggccgctgagattgccaaaacgctgccgggtggaaaaagcggagtcgtggtggcgggaatatgggccgagctgggtgatgctcggggtcgctggaaatcttctcgccacctccaagccgaggccggagcggtgccggtgaccaaagccagtggcaagagtcgtgtcgtacagtttcgttttgcctgtaacaaacatttgcgccacacgatgtattggttttcctttggctcgctcaaacactgtgagtgggcccggcactactatcgaggacaaaaggctaaaggccgaacccatccccagacgttgcgggccctggccgccaagtggctcaagattatttttgtgatgtggcgtgaccataaaccttacgatgaaaactaccacctggccaacatcgctcgtcagaagattcgtcaggaggcgtgaaaacatttttaaaaaggggcttgacaagtttcatagaaagt

SEQ ID NO: 4764 - DNA, 1616 bp, unidentified
  source 1..1616: mol_type = unassigned DNA; note = element_73ecbc1
  misc_feature 1..2: note = core
  misc_feature 3..308: note = LE
  misc_feature 309..1493: note = CDS
  misc_feature 1494..1616: note = RE
  misc_feature 13..309: note = bridgeRNA
ctactacaatataaattggttaatgcacttaacaaccagttaggttgttagccatcttattgcttaagctgtataatgatggggcaatcggtatatcggcttcctttcttggacttacacgtccgtttttaagactgataaccagctcctcattcgcagcgttcgttttatgcaggttgaaccactttcagtgcgttcgtgtcacaccacagtagattgaataggcaatgagtaaagttggtatttatcttttgcactataagtcttaaggagtgacaaatttatgaacatgaacgcagttggtattgatggttctaaaggtaaaagtatggttgccatccttcgtccttatggtgaaattgtttctacaccatttgaagtcaagcatagtcagcggtattcgctctcttatcgaacacattcaagccattgatggtgagtcacgcattgtgatggaacatacgggacgttattacgaacccattgtccgtgaactctcacaggctgaccttttcgtatctgccgtaaatcccaaacttatcaaagactttggagataactcccttcgcaaagtgaagtctgacaaagcagatgctttaaaaattgctcgctatactcttgacagttggacagaactcagacagtatagtttcatggacgagattcgtaatcagcttaaaatcatgaatcgccagtttgatttttacatgaaacataaaaccgctatgaagaacaaccttatcggcatccttgaccaaacttatcccggtgcaaatacctattttgatagtcctgcccgggaggacggaagccagaagtgggttgattttgctaccacctattggcatgtggattgtgttcgcaaactgtcgcttaacgcatttgttgaccactatcaaaagtggtgcaaacgtagaaagtacaacttcagccagtcaaaagctgttgaaatctatgaagcatctaaggagattgtttctgtacttccaaaagacgatttgacaaaactaattgtcaaacaggctgtagagcaattaaatatggcttctcagaccgtagaacagcttcgtgctatgatgaatgaagctgcctccaaactgcctgaatatcctattgtaatggctatgaagggtgtcggtagatcactcggtccccagcttatggctgagattggtgatgtttcccgcttcactcacaaagaggctatcaccgccttcgctggcgttgaccccggcgtaaatgaatccggttcttacgaacagaaaagtgttcctgcatccaaaagaggttctggcactcttcgtaaaaccttattccaggtaatggatgcccttatcaaaaccaaaccacaggatgaccctgtttatctgtttatggacaagaagcggtcgcagggtaaaccttactatgtctacatgactgctggggcgaataagtttcttcgcatctactatggacgggtgaaagaatatctttcatcgctttcgaaatagtcatctcatacatacctttatttcagaccagcgaatatcggtggtcttatttcaatgttcaaattcctacataaaactttttgcctgaaataatcaatttactattgattttttatttgcagg

SEQ ID NO: 4765 - DNA, 1585 bp, unidentified
  source 1..1585: mol_type = unassigned DNA; note = element_73ef0b3
  misc_feature 1..2: note = core
  misc_feature 3..102: note = LE
  misc_feature 103..1230: note = CDS
  misc_feature 1231..1585: note = RE
  misc_feature 1324..1526: note = bridgeRNA
agacataatgtattaaacctgtccaaccttaaggcgcgtgggttaggctttaaggtcgggaaaaccaaaaggctcagagccacaattaaggaggacaggtttatggatcagtatatcacaaagtatttggggctggatgtgcacaaagagacgatagcggtagcaatagcacgggcagggagaagcgagccgatttattatggtgagatacccaataatgctggtgcgataagaaagctggtaaagaaagtggtttctaacggggagagagtatcattttgttatgaggccggtccgtgcggttacgatgtatatcgtcaattgatcgagcttggtcaaaagtgcgatgtagtggctccttcacttattcctaagaaatcaggggatcgcgttaagacagaccggcgagatgcgattgcattgacacgattatatcgagcaggggagttgacgccggtatgggtcccggacaaagaacaggaagcgataagggatctcgtccgcgcccgtgaagatatgaagtccatggaagggcatgccaaacagcgtcttggggcatttctgttgcggcatggaaagagattcactggaaggtgcaaatggacgcaagcatattttagatggctggaagggataacatttgagatgccggcgcagcagatcgttttacaggagtatgtggatgcggtcaaacacataaagggacgcgtggaagcgcttgaggaagaaatgcgtcaggcaatgcaagggtggtctttggctccagtagtaacaggtctaatggctcttcggggagtcgagcttcttaccgcaatgacggtggcagctgaactaggtgacatcagccgatttacttctgctcctcagatcatggctcacctgggattagttccgagcgagcattcaagtgggaatcgccagcaacgaggggggattaccaagacaggtaatggacatgtgagacgtgtactcatagaggcttcctggtgttatcgttcaccggctcgtaaaacagctcaaatccagcgccgcgccgagaagaccagcgaaacagtccaggcgatagcatggaaagcacaaaaacggctgtgcaagaggtattggtatctggtcaataagggaaagcgtcctgtcgaagcatgtgctgccgtagcacgtgaattaagcggctttatttgggcaataggctgcgaggtaatggggaagccctatgtttgcgctactgcataaggataagaagatttgaccagagcagaaaactataggtgttgtctttaaaaggcagaatcgtttctctgctccttcagacaacgttactgattgggaaaatgtggacttcgggcaggacagcagtcggttgggagaaccctcgaaccgactatgaggcgcctgaagaaaggatgaccctcgcggttagacagaggcagctccacgacgaagataagtcatgcggtacccaacccgcgtatatcagagtgatctaccgtcgttcattgctgctgttctgtccgaggtacacattctcaaaggaggtcatataataggcaagaaagaaagcactcacttgacaggtttaatacatatc

SEQ ID NO: 4766 - DNA, 1379 bp, unidentified
  source 1..1379: mol_type = unassigned DNA; note = element_73fc51d
  misc_feature 1..2: note = core
  misc_feature 3..88: note = LE
  misc_feature 89..1108: note = CDS
  misc_feature 1109..1379: note = RE
  misc_feature 1124..1365: note = bridgeRNA
tgatgaggtggatgccccctgctccgcggcatcgaggtgccatagcgtggttggtgctgagcctgaccacgagggagaggaggcatccatggagcacgctaccacgatcggcctcgacctggcgaagaacgtcctgcaggtgcatggcgtcaacgccgccggccaggtcgtgctgcggcgcaagctgcgccgagcggcggtgctggagttcttcgccgccctgccgccggccctggtcggcatggaggcctgcggcggggcgcactactgggcgcgcgaactcacgcgcctcggccacacggtgcggctgatgccgccggcttacgtgaaggcctatgtcaagcggggtaagaccgacgcggcggacgccgaggcgatctgcgaggcggtgacgcgccccaccatgcgtttcgtccccatcaagaccgaggcacagcaggctggcctggtggagctcaaggtccgcgacctgctggtccgccagcgcacccaggccatcaatccgctgcgctcccatctcgccgagtacggcatcgtggccgcgcagggccgcaaggtcgccgagctgatcgcgctggtacgcgacgacgatacccggttgcctgacctggcgcgcgaggcgctgggcgagttggtggcgcagattgaggcgttggaggaccgcattgaacgtctcgaccgccgcatggtccggcatgcgcgtgagaacgagaccacgcggcggctggcgaccatccccggtatcggcgcgatcggcgcgacagccctggccgcgctggtgcccgacccgcacggctttgcctcggcgcggcacttcgccgcctggcttggcctgaccccgaagccgcactcgagcggcggcaaggagcgcctgggccggatctccaggcagggcaactccatgctgcgccggctgctggtcctcggcgccaccacctgcctgcgccatgccaggcgcagcccggaggcggcggactgggcaacgcgcctgctggcgcggcggcccttcaaggttgccgccgtggcgctggccaacaagatggcccgcattgcctgggccctgctggcccggggaggaagctacaacccatccgcggccgccgcctaggcgaccgcgtccgagctcgccgggcgccgcgcccggcggaggccaaggtgctgaaggagcgatgacagcgagagaccggcgagccggtgacgagagaggccgattatcacaatgcgccatggagcgcgctggcttgatcgcccctcgtcccgcgcagctcatcggggcccgcggtcagaccggccgcacgcgaggccggacacatgaccgcacccgtgctctcaatgccagcgctacggattcgccttgacccgcagggggcatccacaca

SEQ ID NO: 4767 - DNA, 1632 bp, unidentified
  source 1..1632: mol_type = unassigned DNA; note = element_73ff858
  misc_feature 1..2: note = core
  misc_feature 3..298: note = LE
  misc_feature 299..1483: note = CDS
  misc_feature 1484..1632: note = RE
  misc_feature 62..274: note = bridgeRNA
ctggtataatgataaaagactcatctaacagtcatttgtcattatacctttctcctttctatcaaccttttaatccgtggttgattacggttttaaacattggtattatataaataagtaatgtggatttgtacttgtgtcctgtggctttgactacttgtaggaggttcttaccacaccttgtttcttagtaatgattagttagatgagtctttgaattcgtatctcgtaccaggttttacggaacaagtgctgtggataacacattacatattttttatgaaaggaatgtattatcatgattttagttggaatcgacattggtaaaaacaaacacactttctccataattgagaaagattccggagaaatactttctcccccttctgattttagtaataatcagaacggattcttgtttctcatcaaaaagttaggtagctatgctaaatcggaacttcttatcggcatggaagatacagggcattatcattttgccttgcttaaatatcttcttgacagacgatatacagttgctctgattaaccctacaaccactgaccttacaaggaaaattcagggcggtatcaccaaaaacgaccctcttgattctcttaccatctgtgatgtaatcgcctctaatcaacgcaagaagccataccgcattacgaaagtaaaccgttttgacctctacgaacagaagcagcttacccgtcatcatcacaatctgaaagaagagttaaacatttacaaaaaccgtcttcaaaaatgtatcgacgttgtatttcctgaatttaactctctgtttcattctaaatacggaattgtctacatgaatattttaaagacattctcttctgccgaagctgttgcaaatgctgatatacgaagtattcgtaaatgttttgaagtcaaaggtcaggggaaacgaatctccctttctgccgagcagcttaaactaaccgccaagtcttctatcggcataccttcttctgctgaagaaatccaaatccgacatcttgtaagccaaattgaattattggaacaacaaatttctgagatagataaaaggatagaagagttctccatccaaaacaactctactatcctttcaataccgggcatatcacatttttccggtacttctattttagcagaattaggagatgtttgcaactatacaaaagcttctcagataattaaatttgcaggcgttgctccatatcactatgaatccagtcagtttacggcactgcatacagctattacgaagaaaggctctcggtatcttagaaaaactctatatcagattattttacctgttatcaacaacaatgaggttttctatgcctattacaacaaaaagctgtccgaaggcaaggggcacagatgcgctcaaggtcattgtatcagaaagctcttaagaattatctatcacctcttaaccacgggacagcaattcactccggagttcctggtgtaaccaaacataaaatcgccatttacaattcgcctttcacagagggtttatttgtcgtgccacaaaatccacaattatttatatattttcaatgttcatacttagctaactaaattttatttttaaaaactacttgatttttatatagttag

SEQ ID NO: 4768 - DNA, 1607 bp, unidentified
  source 1..1607: mol_type = unassigned DNA; note = element_74173c9
  misc_feature 1..4: note = core
  misc_feature 5..385: note = LE
  misc_feature 386..1597: note = CDS
  misc_feature 1598..1607: note = RE
  misc_feature 145..383: note = bridgeRNA
ctcactggactaccttcccttctgccatgaccggaggcagcacacggtgcagggttgtccacggcggcggccggtcggcgcttgcgacgaaccggccggccgacgcggtgggcaacccgtgttcggcaccgccgcactgcgtcttgatttgattcgtcgttcgcttcagagagaggttgtgacttccgtgcccccgcagtgaccgccacgcgcgctggccgctcgacggcccgcatgagacccgcggcctgtggggtgccggaagcccaagacgggctacagggtgttgcgccgcactgaccttgaggtgtgagcgccgatcagtgagcgacccgcacgggcttccggcacggcaagtcataccgcaacgatcaggaggctgtccatgagtactgtctttgccgggctggactgggccagccaaaaccatgtggtgtgcgtcatcgatgagcacgccggtgtccgcttgcagttggaggtcgcacacgacgcgccggggcttgccgagttgatgcggcggctgcgcgccgtgggcgcgcatgccatcgccatcgagcgcccgtcgggcctgctcgtcgatgcgctgatggaggccggcttcgccgtggttcccatccatcccaacgtggtcaaagccacgcggccgcgctaccggagccacggcggcaagagcgacgcctccgatgccttcctgctggcggacctgctgcgcaccgatggccatcgcttcaagccgttgcaggcgcagtccgacgacatccgcgcgctgcgcgcgctggtgcgtggccgcgacgacctggtggccacccgcgtgcagctcgccaaccagttgcgcagcctgctgcagtccttctggagcggcgccgccgagatctttgcggaggtcgattcgcccatcgcgctggacttcatccagcgctaccccacgccagaatcggcccgccggctcggccccaagcgcatggccgccttctgcgcgcaacacggctacagcgggcgacgcagcagcgaagaattgctggaacggctgcatcaggccccgcaggtccccttgggcgagatggaggtcgaagccaaaggcgagctggccctcgccctggcgcgcacactggcccgtgtggtcgaacagatccgcttgctcagcagtcgcatcgagcatcacgtcgccagccacgacgacggccgcatcctgatgagcttcccgcgcgccggccgcatctgtgcggcgcagatcctggccgaactgggcagcgtgcgcgagcgcttcgattccgacgagcatctggccgccgaggcgggcgtcgcgccggtgacctatgcgtcgggcaagtccaaggccgtgaccttccgatgggcctgcaaccaccgactgcgcagcgcgctgacctgcctggccgacaactcccgccacgccagcggttgggcggccgccgtctacgccagagccaaggcgcgcggctgcgatcacccgcacgccatacgcatcctggcccgggcctggctgcgcgtcatctggcgtgcatggactgaccgccaaccctacgaccccgctcgccacggcggactgcaaatcctgctcaaaaccacggggggttgacacagggtgt

SEQ ID NO: 4769 - DNA, 1376 bp, unidentified
  source 1..1376: mol_type = unassigned DNA; note = element_741974f
  misc_feature 1..2: note = core
  misc_feature 3..85: note = LE
  misc_feature 86..1114: note = CDS
  misc_feature 1115..1376: note = RE
  misc_feature 1144..1364: note = bridgeRNA
tgatgctgtggacggctcctccaccggcacgtgagtgccaaggacgtggttgctgttgaggtgaccacgattcggaggagcaaacatgcaaccggtcaccatcggtctagacattgccaaatcggtgttccaggtccacggcgttgatgctcagggcaccgtcgtcattcggcggcagttgaagcgccgacaggtcctgccattcttcaagaagctgcctccttgcctgatcgggattgaggcgtgcgcaacttcgcaccattggtcgcgcgagctgcaggggcttggtcacacggcgcgccttatgccgcctgcttatgtgaagccgtatgtgaagcggcagaagaatgatgccaccgatgccgaggcgatctgcgaggccgttacgcgcccgagcatgcggttcgtcgagactaagaccaccgagcaacaatcggttctggtgctgcatcgcagccggcaactcttcatgaagcagcaaacatcgctgatcaatgccctccgagcgcatctcgccgagttcggcatcgtggctcctgttggacgcaacggcgtcgaggacctgctgtacgtgatcgcagatcctgacgatgagcgtttgccggaagttgctcgtgagtgcctcgccgcgttgggagctgagcttcagcgtgtcaaagcgcagcttctggagttcgaccgcatgatcatggcatggcatcggtccaacgaggtgagccggcgacttgatgccatcccgggcgtaggaccggcgctggcaacagctctcgtggcgagtgttccagatccaaaaatctttcgctcggcacgcgacttcgccgcctggatcgggttggtgccgaagcagaactcgagcggtgggaaggacaggcttggcggggtcaccaagcaaggcgatcgctatctgcgaagcttgctcacgatcggtgcgctggcggtgatccgtcgagccaagatcaacggggccaagcaccggccttggctcagcgctctactggcgcggcgcccaaccaaggtggctgcggtcgcgctggccaacaagatcgcccgcatggcgtgggcgatgatggccaagggcgagcgctacaaggaacctgccgcgctggcggcttaacggaatcgcgtcgggcagccggcgtgatgtgaaggttggggaggggcgaacagcacgtaatgcagatccggtcgacccggagatcaggacaacccactagtgccatagcattgtcgaatgcgggcttttgaccgggacctgatccgcggagggcattatggccagcgggcatgcgcgccgcatcaacaggccgaacacatggccgctccgaccaggcctgcgacgtgaagaaagtccttgccaacacggagccgtccacaca

SEQ ID NO: 4770 - DNA, 1216 bp, unidentified
  source 1..1216: mol_type = unassigned DNA; note = element_741de28
  misc_feature 1..2: note = core
  misc_feature 3..226: note = LE
  misc_feature 227..1201: note = CDS
  misc_feature 1202..1216: note = RE
  misc_feature 6..200: note = bridgeRNA
cttgtatctcgactgcagcctctcaggaggcgatagtctccgactgatcatcggaggggagagtgcaagacgtatccacccttaagcttcgagcttgtaacgtagatagcgctgcactcctccgcactcatccagtaagtccgaacggtatcttgagctgcgagctcgcatcagcaaggttggacggatgcagtgacgatctatccgcttactgaggaggaaaaccatggccatcgtcgttggcgtcgacatcgccaaacacacattcgacatcgcgaccttgcaaagcaacggtaagtaccgcacgaaaggcaagctgagcaatgactcaacaggctttgaggtgctgcagcaatggctgctcaagtacgccgagccgcaggcatggatcgtcatggaggctacgggcatctaccacgaagccctggccgaatggctgctcgcgcgaggttacctagtgtgcgtccttaacccggcccaggttgcctattacgcccgtagccagttgcagcgggtgaagaccgacaaggtcgacgccaagctcatttccgattatggcagtcggcatcaggccgagctgcgtgcctggcagcctgatccaccgtccattcggtgcctcaaagctctggtgcatcgtttgaaggatcttcaggagctggagcaaatggaacagaaccgcttggacgtgacccgcgagaccaaggtcaaggagtcgatcaactcggttcttgagcatttacgtcagcaaatcgccgagacgctggaggtgatcaagcagcatttcgacgacaacgatgacttgcgcggccagcgtgacctgctcacgagcatcgacggcattgctgaccggacggcagcgcttctgctggctgagctgggggacgttcaacgcttcgataacagcagggctgtcaccgcctttgcgggactcaatcccaagctacaagaatcgggaaaactcaaagggcatgtgcggatttcccgcatggggtcggccaggttgcgcgcagggctctacatgccagccattacgtccatgagccgtaaccctgctattcgtgcaatggtcgagcgaatgaaagccagaggcaaagccggcaaacagatcgtctgcgcggcgatgcgtaagttgctctgtatcgcctatggcgtactgaaatccggtgaaccgttcaatcccaaactcgctattgcgaagtgacgggcaagacggtat

SEQ ID NO: 4771 - DNA, 1326 bp, unidentified
  source 1..1326: mol_type = unassigned DNA; note = element_7423083
  misc_feature 1..2: note = core
  misc_feature 3..136: note = LE
  misc_feature 137..1306: note = CDS
  misc_feature 1307..1326: note = RE
ctaatcagttctgggagtaagccatccggcagactcctggtggtagccgccgacaggtgagcactctgggttcctgggtcttgagtcctgatgaaagatcgtgcccctgttggtcggccgggagagttgatcgctgatggatgtctccggccgccggctggccaaggcccgcctgccggagggcgtggccgggatggcccggctgcacgcgatcgtgggcgagctggccggagatgacgccgacgaggtcgaggtgctggtgggcatcgagaccgaccggggcccgtgggtggcggcgctggtggctgccggctacaccgtgctggtggtcaacccgctgcaggccgcccggttccgcgaccggcttggggtctccggagccaagagtgacgccggtgacgcgcacgtgctggccgacatggctcgcacccactcccacgagctgcgtgccgtggccggggacacaccgcaggtccaggccgtcaaggtcgtagcccgcacgcacaagacgctgatctgggaacgcacccggcacactcagcggctgcggcacgctttgcgggactacttccccgccgcgctggaggcgtttgaggacctggacgccgccgataccctggagctgctggccaaggcgcccgctccggcgcaggccgcccggctgacgatcgggcagatcagcgccgcgctcaagcgggcccgtcgcaagaacgtcgccgataaggctgccgcgatccagagcgttctgcgcgccgagcacctgggccaacctgaggtcgtgaccggcgcctacgccgcatccgtccaggcgctgatcgccgtcctgaacgtactcaacgcccaggtaaagacgcttcaggggcaggtggaggagcattttgggcagcacccggccgctgagatcgtcctgtcccagcccgggctgggacaggtgctcggcgcccgggtgctcgcggagttcggtgacgaccccacccggtacgccagtgccaaggcccgcaagaactacgccgggacctcgccgatcacccgcgcgtccggcaggaagaaggccgccctggcccggttcgtgcacaacgaccgactcatcgacgccctgctcacccaggcgttcagcgccctgggacgctcgcccggcgcacgcgcctactacgaccggcaacgggcccgtggctgcggccacaacgccgccctgcgccagctcgccaaccgcctcgtcggcatcctgcacggctgcctcaagaccggcacgctctacgacgaagcgaccgcctggtcacatcacgcggaatcgcttgcggcttgacatctacgctcctgggatgt

SEQ ID NO: 4772 - DNA, 1405 bp, unidentified
  source 1..1405: mol_type = unassigned DNA; note = element_74244ad
  misc_feature 1..2: note = core
  misc_feature 3..84: note = LE
  misc_feature 85..1128: note = CDS
  misc_feature 1129..1405: note = RE
  misc_feature 1150..1392: note = bridgeRNA
tgatgtggtggaacggcccgctccgacagcatcatcgtgctaaaacgtggtcgttgttcgaacgccacaaggagggaccgttccatgaagcaggttagcaccatcgggttggatttggcgaagcacatttttcaagttcacggcgcgggtgccgatggctcgccggtgttcaaccggagactacggcgcagcgaggtcctgcatttcttctcgaagcagccggcctgccttgtcggaatagaagcctgtggcagcgctcactattgggcacgcgagattgcaactctcggccatgaagtgcggctgatcccaccagcttacgtcaagccgtttgtgaagcgtggaaaaacggatgcggcggatgccgaggccatcagcgaagccgtgactcgcaagaccatgcgcttcgttccgatcaaaacggccgagcaacaagccggaacgatggtcctgaagagtcgcgcacttctggtgaaacagcaaacgcagacgatcaacgccctgcgctcgcatctggctgagttgggcatcattgccgccgccggccggacaaaggtcgaggcgttggttgcaatcgtacgggatgtagcagatatccgcttgcctgcggcagcgcgcttcgcgctgacggcagttgccgatcagatcgaggctcaggcggaccagattgacaagctcgagcgagccattgttgctgcggcaaggaccgacaaggacatgcgccgactgactaccatccccggcattggagccattacagcggcgaccatcaaggcgctggtgccagattccggcggcttcaaatccgctcgtcactttgctgcctggctgggactgacgccgcgacagcattcgagtgggggcaaggagcggatggggcgaatctcgaagatgggaaaccccgaacttcggagcctcctcgttcttggggcgacatccgtcctgcgaattgcccggaaggctgatcgggcgccgccatggttgaagtcgctgctcgccagacgtccgtacaaggtggcagcggtcgcactggccaacaagacagcgcgaattgcctgggcgctcttgaacaggggtgggatttatcggcatccggagacgctagcgacgactacgcctgccgcttgatgaatacagcagttgtcaaagagatctgaccggcgcgggccggcagagggcaaggagcaataacaggcgatgaacccacgggacgaaatcccgacacgagtgaggctggcgcgacaatgcgcttcaagcgcgtctgattgatttagccccttgtgtcgcggacttcatcgaggccagcggtcatgcgccgcgctttacaggccgtatacatgaccgcaccgctcccatgtgtgaagtcgactgagaaagctcttgcgcccgcgggccgttccataca

SEQ ID NO: 4773 - DNA, 1416 bp, unidentified
  source 1..1416: mol_type = unassigned DNA; note = element_74277e7
  misc_feature 1: note = core
  misc_feature 2..90: note = LE
  misc_feature 91..1119: note = CDS
  misc_feature 1120..1416: note = RE
  misc_feature 1185..1408: note = bridgeRNA
caatgggatggacgcccccacccgtaacggcatcgaatgtgccaaagtggaagtgttgttcgaccacttgaaccgagaggagcgtccaccatgaagattacaactattggcatcgatctggcaaagaacgtatttcaagtccacggtgttgatgcgcgcgccaagaccgtgcttaagaaacaactcaagcgtgaccaggtcacgaccttctttatcaatctggagccttgtctgatcggcatggaagcgtgtggtagcgctcattattggagtcgcaagctgcaggcaatggggcataccgtgcgcctgatggccccgcaattcgtcaagccgtatgtcaagacaaacaaacatgatgtggccgatgccgaagcgatttgcgaagcggtcgcacggcccaacatgcgcttcgtggcgactaaaacggcggatcaacagtcggtgctcgccttgcaccgggcacgccaaggcttcgttaaagcacgtacggctcaagccaaccagatccgtggcatgttggccgaatatggcgtggtcttaccgctgggtattcatcatatccctcagcgcgtgcctgagctcattgaagatggggaagtcgagttgccgggccaattccgtctgctgatccagcgtttggtggagcactttaaggagctcaatcgacaggtgcttgaactggaaacacagatcaaggcatggcatcgtgccaatccgagcagttgcaaactggagaagattcccggtatcggaccgattaccgccagtgccctggtcgcctctattggcgatgcccgccacttcgctaatggtcgacaggtagctgcctggcttgggctcgtgcccaaacagagctccacaggcggcaagacgatgctgctaggcataagtaaacgaggcgatacgtacctgcgcacgttgctgatccatggcgcccgggcggtcttgtcccacgccgggcgtcgggcggatcaggacagttggctacacaaattggttcagcggcgtaacgccaatgtggcggcggtggccctggccaacaagaatgctcggatgatctgggccttactggcccacgaccgagagtttcgagccgattacgtgtccgtagccccgtaatcggctcggttcaattaagcagtaaagcggtagtaatcttcgatagttgtacgccgtattaatctaccgattgctcaggcgatcatgcagtgatggcaaaacaggtcagaccgtggttggccaagcccgattccctcaccgcaccgcgagtgcattgacgcgatagaggcgccaaccagcaaaacccatcagggacagcagcattaaatactgcacacaaagtccggatgtacgggtgcaatcctaccttttagccttcatgaattgagcgcttggcaaaccgggggtgtccatgta

SEQ ID NO: 4774 - DNA, 1576 bp, unidentified
  source 1..1576: mol_type = unassigned DNA; note = element_7427f77
  misc_feature 1..2: note = core
  misc_feature 3..244: note = LE
  misc_feature 245..1447: note = CDS
  misc_feature 1448..1576: note = RE
  misc_feature 7..223: note = bridgeRNA
ttcgtattataaggttaaccagtttttactggttgaccttatttttataggatttaatatatcagtagccagggtaggacgtacgggtgcgtgggacaatgatcccgtcggctaaactgtccaccccctacttgtagaaacatgtttgaggctggttgggacatagatctcgtataacaagcgaagctatgacactacaaggaggaacaggggtactggtgagtgagtcagaggaggaagttaaatgaacccagtagttggactggatgtggcaaaaggagagagccaagttcaggcatttttagataaatcgaagccgtttggaaagagttattctatgaagcatacacgagaggatttagaccgttttataggcttcttacatgagatcgaagtgatgaccgggcaaatgcctatagtcattctagaatctacaggtcattaccactctcctgttattcaatgcttggaggagaacgaggttttatatatcttgcttaaccctattatttcttatcaagcgaagagatctagtttaagaaaggtaaaaacagacgcaattgatgcgtatcagttgtgtatgctttattataaagaagattttgaacctcataaaaaaagagggattcaactcttaaatcttagaaatctatcgagacaacaggagattgtgacgaatatgtatgtggaggctaagctacagtttcacactattctagatcaagtgtttcctgaataccgcaaggtttttggtgatctttattcaaaggtttctttattgatgttaaagaaatatcccacttcagaagatgtaataacggctggagaaagtaagctagcagagtgtgtgatggagttttgtccaagacgttctagtctatgggcattggaaaaggcaaaaaaactaatggattctgcctatcgaaatccatttcaaaaagtggtgtatcatagtcacttgatcaatcttcaaatgtatattgaaatgctttttcagtaccaaggacacctttcggagttggaagttcggatagtgaccttggcagatgaattagaagattataagattgtccaatcgattccaggaatcggagaaaagatcgctgccacgatcatctctgagatcggagaaatcgaacggtttaatcatccgaaaaaactagttgcctttgcaggagtagatcccagtgttcactcatcaggaaagtttactgccacaaccaatcgtattacaaaacgaggttcaagtagattacgccatgctttgtatcttgccgtattgtgtggtatcagaagttcaaaaaacaacaagctgaaagaattctatgataagaagaaatcagagggaaagcctgcaaaagtggcgatagtagcctgtattaacaaactgcttcattggatttatgctttattaaatagcaaagaaactttccaagatatagcgtaattactggttacaagtaattaagagaaaaccttccaaaaggtttttggagggctatttgtcatgcataaaatagtatatcataagattaataataattttagagaaaaatattgacattctattagctgg

SEQ ID NO: 4775 - DNA, 1633 bp, unidentified
  source 1..1633: mol_type = unassigned DNA; note = element_74299f2
  misc_feature 1..2: note = core
  misc_feature 3..267: note = LE
  misc_feature 268..1488: note = CDS
  misc_feature 1489..1633: note = RE
  misc_feature 27..287: note = bridgeRNA
ctgatacaatatatttgaccgaagaaagtgcggtatttggaattgcactttccaagttccgttacctaagctataatggaagagtatttaaggtctgacgggattctccttgtgcttttacgcacgtatttaagactgtcagccggctttccattatagcgttcggtttttgcaggttgggcttcgcgtccgggtaaccaatcagattgaatcggtaatggttaaggtcggtcgcctttttactaattctttcttgagaggttgcttatgaacgctgtcggtatcgatgtttccaaaggtaaatctaccgttgccatcctgcgcccgttcggagaaatcattatttccccgttcgatgtatcgcacaatccaaaggaactttcggagctggtcacactccttaaaactttggacggtgatacgaaggttgttatggaatacacagggaattactatcttcccatagccctgttcctccgcaacaacggtttatttgtttccgtagtcaatcccattctagtgaaagattacagcaccaaatcattaactgtccgcaaggttaaaacggataagaaagactccgttaaacttgcttcttttgctctcgatcgttggaaagagctttcgcctttctccgctcaatccgaagcaagacttttactcaaatcctacaaccgacaatataaccaatacaataaactcaaagtttcgttgaaaaataatcttatctctatcctcgaccaaacctttcccagtgcaaataatttgtttacaacaccaacaagaaaatccgacggtcatgagaaatgggtggatttcgttctcaaataccctcatgcagagtgcatttcaaagaagtcttttcccgccttcgctaaaagttatctttcttggtgcagaagatttggttacaatttctctgaaagcaaggctaaatccgtttacgatttcgcttgtaactgttcgccgtctttatcctttacggaaagtgcagtcctactcgtttcaaacgccatctctcagctcaattgcattaacgaaacgcttgcttcgctcgcttctgagatgaacaagatttccgctacgcttcccgaatatgataccgttatgtccatgtttggcgttggttccgttctcggttcccagctcatcgcggaaatcggcgacgtctcccgctttactaacaagaaagctctcgtggggttcgcggggttagacgcttctccatttcagtccggaaactttaacccgcaatctcgtgctatctcaaaacgcggttcttccgctttgcgaaaaacgctgtttcagatcatgtccgttattctgcaaaactctcctgccgaaaattccgtttttcaattcatggacaagaaacgtgccgagggtaaacatttttacgtttacatgactgctgccgccaataagtttttgagaatttactatgctcgtgtgacggagcttttgaactctctcaaccctgtcgcttaaccgttatcctgctcgtttcaagtctgcgtcttttgacggaggcttttttgcgtcttttgacggaggcttttttctgttacgcttttcctacctcgaaaatttttccgaatttcttcatttttacccttgacttttatttgcaggt

SEQ ID NO: 4776 - DNA, 1650 bp, unidentified
  source 1..1650: mol_type = unassigned DNA; note = element_7432895
  misc_feature 1..3: note = core
  misc_feature 4..123: note = LE
  misc_feature 124..1299: note = CDS
  misc_feature 1300..1650: note = RE
agtaattatgtaataaagcatagcgcagtatgagtggtcattcgccaaaagcgaagccgcaattaattaatttagtagcgataactgaaggtttcgcaattattaacaattaaaaactgcactatgcttagtacaaatttgcaaaatccaattgactttaatggtcaaaaattttatgtaggacttgatgttcacaaaaaatcatgggctgtgactattcgtagcttgggaattcaggtcgctcatttcacacagccaccgggtgctgacgcgctattgaattatttacaaaagaattttccaggaggcgaatacagctcagcctatgaagctggtttttgtggtaccagcattcatgaacagctttgtaacctgggaataagtaatattcttgtacacgctgcggatataccagccacagataaacagaaaaagaacaaaaccgacctgcatgacagccgttcgattgccggttatctggaaaaaggaagccttaacgccattcatgtattaacacaggaacaacaggaattacgaagtttgtttcgtcttcgtgaagctaaagtgaaagaagtaaccagatcaaataacaggctcaaaagctttctgatgtattttgatataaaaatacctgaaactgtttctaaaaaagactatttatcgctcaaagcattggaatggctaaacttggaactggcaagcgcagccggtacaattaccctacaacaacatgttgaagaactaaaataccagcgtaaacggctcttcgaaataacaaaactgctccgtaaacagatacagagttttcatgccagatcatatgaatacctactttcagttcccggaatcggagctgttacggctatggggctgattgcagaaattgctgactttggccgctttgatgatcctgatgaatactgtagcatcctgggtctatgtccatgggaagacagttcgggagataccattaaaactaaaggcatgcaaccacggtgtaaccgccatttgcgcccattgctcgttgaagcatcctggacagctatcaaaaaatcacctgccttgtttgcttattatagtaaacatgccgttaaagacagtaaaaaggctattgttaaggtggcccgtaaactggccctgaccgtacgcggggttgttttgaagcaacaactttatcaggaagattatttacaaaaaaaagctgaacaaatggccctgaagaaaacttcaaataaaaggttttcttcaggcattgcggaacaacatataaacaagcagccaggcaatatacttgcgtaataacctggctgatatgctttatccggctgtaatatccctggcaggttgctcctcagcagagcccgtttccgtttcttacagccttataaagataaaaaacaaatattaatcaatacagtataaacagctaacgatctcaaaaaacttaaagaggaaaacgcaccatcagagactgtgggttcactacatttcgaagtattcgtacctcttttgacttcacacaattactggcggctcctttttaggaatgaccgcatatagcagtcggagattattttgttatactgcattaaaattataactttatgtgattagaaaatctcatacctgtcctattgctttatacatagc

SEQ ID NO: 4777 - DNA, 1392 bp, unidentified
  source 1..1392: mol_type = unassigned DNA; note = element_7437d39
  misc_feature 1..2: note = core
  misc_feature 3..89: note = LE
  misc_feature 90..1124: note = CDS
  misc_feature 1125..1392: note = RE
  misc_feature 1105..1379: note = bridgeRNA
agatgggatggttgccgccctccccaaacggcatcgcgacgtgccagcatggcggttgctcatcgccacgaaacggaaaggacggcaaaatgaaggacatgattatcggtgttgatttggcaaaagctgttttccagcttcatggtgcagctgcggttgacggcagacccctattccgaaaaaagctgtctcgcggccagttcctgcgtttcatgtcccagcatccagaagcagtggttgtgatggaggcctgtggcagcgctcattattggtcgcgtgaactaatgcaactcggtcataaggttctgctgatccctccgcagtatgtgcgccccttcgtcaagcggcagaagaatgatgccgctgatgcggaggcgatcgtcattgcagcgcgacaaccagaaatgcggtttgtctctcctaagaccgaagagcagcaagcgcgcgcggcactgttccgggccagagagcgccttgttcatcaacgaaccgaactcgtaaatgccttgcgtgcccttctctatgagtttggccatgtttttccggcaggtatgggacagatcggtcgtattgcggctgttctcgatgcagatgaaggaacgctccccctgctggtgagcgaggaatgcagagatttgctgcagcaaattgcggaaaaaacagttcgcatcgacgcaagaacccagaaagcacatcggcttgctgaagatgcagagacggcgaaacgcctgcaaaccctgccgggcgtcggcccgatcacggcattggctttcgaggcctttgcaccggacatgagaaccttccgacgcggacgggacttcgcagcctggctggggcttgtgccacgtcagcactcttcgggtggaaaggagcgattgggtcagatcacgaaagcgggtcaggcggacatcaggcgcctgctcataatcggtgcgatgtcgcggcttaaccggttgggacgatcacgcatcccgcaaggctcgtggttggagcggatgctggcgaggaagccccgcatgctggtggcgatcgccttggccaataaaatggcgcgcgccatgtgggcgatgatgacaaaacaggaggattacaggatccctgggccgagtgcagctgcgccttaatgcgcagccgatagcaggcggcacagggtaaagaggtgtgagaagccgacgaccccatgggcaaaagatcgacacgatccggatcgggaaaaccagatagcaactgcgagcactcgagctcgagacacagatgtggacccgcttcgctgatcaccatcccggccagcggcttcatgaaagtgccgcatatacaggcctgacagaagaccgcactcgatcaccgatcccagaagtcagagccccttgcacaatgggcggcaaccacaga

SEQ ID NO: 4778 - DNA, 1496 bp, unidentified
  source 1..1496: mol_type = unassigned DNA; note = element_744b582
  misc_feature 1..2: note = core
  misc_feature 3..237: note = LE
  misc_feature 238..1476: note = CDS
  misc_feature 1477..1496: note = RE
ctaatggcttctgccgggctggtttggcaggctcggttccggtagcggctggcgggtcagcactccacgcttctggccttggaggccttgcggcagaccgtgcgcccgctggtcgtgaggaggcgtaaccgctgatgggatgacgtgccccagccctgcctggtgagcacttggccattagatcgctgggtgtctcctccgcgctgccgccgtgccggttgcgagcctggaggcgagatgctgttcgtcggagatgactgggccgaagatcatcacgatgtcgagatcgtggatgaagatgggcggcggctggcgcgccgtcggctgccggaagggctggcgggcatatcgcagttgcatgccatgatcgctggtcacatgccggaggagtgggctgatctgccgccgggcgaggctgccgggcgggtgaagatcgggatcgagaccgagcgtgggccgtgggttgccgcgctggtggcggccgggtatgaggtgttcccggtcaacccgatgtcggtggcccggtaccgggaacggcactccacctcgggtgcaaagtctgacgccgccgaggcgcatctgctggcggagatggtccggctggaccgggcgcatcaccgcccggtcgcgggggactcgccgcaggctgaggcgatcaagctggccgcccgcgcccaccagagcctgatctgggaccggtcccggcatgtgctgcggctccgcgcggcgctgcgggagttcttcccggccgcgctgcaggtgttcgcggacctggacgccccggacgcgctggagctgctgggccgggcaccggacccggaccgggcggcggcgctgtcacgggcgaagatcgccgccgcgctggcccgggcgaaccgccgcggcgccgccgcgaaggcccagcagatccagggcatcttgcgcgcaccgcagctgcggcagccgccagcggtccaagatgcctacgccaccatcgtgtccgggcagatccgcctgatcaccgcgctgaacgcccagatcgccgaactcggcgaggtggtggccgcacattttggccgccaccgggacgctgacatctacgccagccagcccggccttggcgtcatcctcagcgcccgggtcctggccgagttcggcgacgacccgcaccggttcgccgatgccaaggcgcgcaagaactacgccggcacctccccgatcacccgggcctctggcaccagaaagatcgtcctcgcccgctacgcccgcaaccggcgcctggccgacgccctgcaccaatgggcgttctgctcgatgcgcggctcacccggcgccagggcctattaccaggccctgcgcgcacgcgggatcggccaccaggccgccctccgccagctcggcaaccgcctcgtcggaatcctgcacggatgcctcaagacccagactccctacgacgaaaccaccgcctgggcccaccacaccccagcagctgcttgacatctcagaacatgggatgt

SEQ ID NO: 4779 - DNA, 1536 bp, unidentified
  source 1..1536: mol_type = unassigned DNA; note = element_7450fe5
  misc_feature 1..3: note = core
  misc_feature 4..291: note = LE
  misc_feature 292..1329: note = CDS
  misc_feature 1330..1536: note = RE
aatctccattccgcgcgccttcaggcgcggcacaaatagtgatgaaagattttcaaaacctctacttcatgcgataataactttcaagaagctacactacaaagcacgggaggaggagttgtaaattctttctcgttttagacagcatttaaatcagtgtaagttctgccttttcaagcacaaataagtggctctataagaccgtacactaagaattgttttaacgccttggttaatttgtgtggcagttcagtcaatggcttcttatctttttcagaaaggagtctgactatgaaagttacttacaaaacctgttgtggtgtcgatgttcacaaatcatttctcgttgccacaatcattactaccactggtggtatcgaaccttcctatcagaagaaacgttattccacctttaacaattcaattcttgaattcaagcaatggcttcttgacaatgactgtcatgatctttgcatggaatccaccggtaaatactggattcctgtctttaatcttcttgaagatgaaatcaatgtcaccattgccaaccccaaatgggtaaaagctgtaaaaggcaacaaagatgatactaaagattctaaatggattggagatttattccgacttggacttgtaaaaggcagttacataccttgtaaaaagattcgtattttacgcgagttcacaaggtatcgctataagattgtttcctgccgttccagtgaaaagaatcgatatcagaatgcgcttacggtttgtaatgtcgcactggattctgttgtatccgatatctttgggaagtcatccacatccattattgactatttgcttgaacagtctggcaattctatcaatcatgaagaaatcgcttctaaacttcttaagagcctcaaatctaaagaagatgccgtgattgaatccattgaaggataccagatgactgattcccaaaaatatcgtatgcacctcgtccgtgcacatatggattatatcacagctgaaatcaatgatatagactctatgatagaatctatgatttcctctgatcctgattatgaaaatgctatccagttcctaatgactattccgggtgttaaacgtgatagtgcaatcactatcatctccgaaacaggtattgatatgtctcaattctgttcttctaaacgtttatgctgttgggctggtttagtccctggcaggaatgaatctggtggcaagaagaaatctgttcggatcgcacgtgctggagtttacctcaaacctgcattagtacaatgtgctcatgcagccgttaaatccgaaaagtctccttactacaaaaagaaataagaatctcttatgaaacgccgtggcaagaaaagagccatagttgctatcgctccaatgattcttactgcaatctaccagatgttatcaactggtgaagcatggaatccaagcgacttatacaaaatcgaacacttcaaaaagttgccatttcttgacagcttagattagtgcgccactttttggctgtcctctactttctttcacact

SEQ ID NO: 4780 - DNA, 1423 bp, unidentified
  source 1..1423: mol_type = unassigned DNA; note = element_746dd8a
  misc_feature 1..4: note = core
  misc_feature 5..203: note = LE
  misc_feature 204..1409: note = CDS
  misc_feature 1410..1423: note = RE
  misc_feature 1..193: note = bridgeRNA
ttccgtaagactaaagccggcccaggagggtcgggtgtggctgagatcgccttgcgctgtggtcgcttattgggaatgttcgcccggctcttcggggtgccctggctgctaattgagatctgcgctcggtcgcttggttacggatgcgtcagcggggtgttccacgggccgctgtcagcacctagaccaacggacggagcagcgtgaccgcacatcgagacatcgcctgggtgggcattgatgtcggcaagacccatcactgggcgtgcacggtggatgccgaaggcaagacagtgtcttcgatcaaagtcgccaacaacgaggccgacatagtggcactcatcaccgatgccggttcgcaagcgacacagcttgtttgggccatcgacatcatcggtgcgccatcggcgttgctgctggcgttgttggctcgagccgaccagtcagtgcgttatgcacccgggcgagtcgttgcggcgatgagcgcggcctacgccggagaaggtaagaccgacgccaaggacgcctacgtcatcgctgagaccgctcgcctgcgccgggacctgtcggtcgtcgacaccgataccgatctggtgcgcaacctcgcggtgctgaccgggcatcgcgcggatctgatcgccgaccgtgtgcgcatgatcaaccggttacgtgacctgatgaccagcgtatttcccagcctggagcgggcctttgactactcctctcacaagggagcgttggtactgctcaccgcctacgtcacccccgaccagatccgccgcatcggacaggttcggctgactggctggctgcgcaaccgccgcgtgcgcggatcggccgacgtcgccgcccgcgccatcgccgcggccaaggcacaaacggtggtgctgcccgggcaagagctcaccgccagcatcatcgccgagctggccaccgccatcctgggcctcgatgaccgactcaaggccctcgatgcccagatcgaggcgaccttcgctcaacatccgcaggcagcgatcattcagtcgatgcctggtttcggccctttccttggggcctcgcttctggtcggggccaacgacttacgtgcattccctagcgccgggcatctcgctgcagcggccgggctcgtgcccgtccccaacgactccggccggcgcaccggcaacctgcaccgaccgtcgcgctacagccgatcgctacgacatgtgttctacctgtcggcccagaccagcatgatgcgcaccgggcccaaccgcgactactacctcaagaagcgtgcccgaggcgctacccacagccaggccgtcatcgccctggcgcggcgccgcatcgacgtcctttgggcactactgcgcgagaaccggacgtggagcgcggaatcgccaccgctcgctcaggcggcttgacaacaccattgaga

SEQ ID NO: 4781 - DNA, 1160 bp, unidentified
  source 1..1160: mol_type = unassigned DNA; note = element_7474f6d
  misc_feature 1..2: note = core
  misc_feature 3..222: note = LE
  misc_feature 223..1146: note = CDS
  misc_feature 1147..1160: note = RE
  misc_feature 6..216: note = bridgeRNA
cttgtatcttggcaacggagccgttgtgctgcaaaagagagcggctgcgagatcttgccggtggcagatgctgaccaagggtcaagctcgcgttgtagttggatcggcagccgcgcagtgatttcaaactcgaacagttaccggagcgaccaggctgcggacccaagttgggaaggcacagcctggccagctcgcatttacaagcaggagttaaattaacctatgaacaaagcagttgtctatgtcggtgtggatgtatccaaagcttacctggatgtggcttgggcggaacgctctcgccgctttgcgaacaataaaagcggattaagcgcgctgatgaaatggatcaggcaaagtcctgtgcatttgatctgcgaagccagtgggggctacgagcgggggttgctcgaagcggccgagcaaaacgcaatcaaactcagtttggtgcaagccaatcgggtgcggcagtatgcccgtgctgctggcattctggccaagaccgataaggtcgatgcgcgtgtgctgtgcgcttttggcaccgccatgcaaccaaagccactggcgtcactctcaatgcagcaaaagcagttacgcgaattagaagcgcagcgccggcacttgagccgcatggtcgtctcagaacaaaatcggctggcgcagttaaagaataaacaactgcagcgtttaactcgcagtcttttagcgacgctcaaaaggcaaatgactgcaatcgacgcgcggatcgccgccgtgattgtgcaggaccagacgctggatgaaaaggcacaaaagctcaccgccattgtgggtgtgggtaggcgcaccgccgtgctgctgctggcgcaaatgcccgagctgggcacgctcaatcgcgctcaagcagcagcgctggccgggctggctccctttaaccgcgacagcggcaccttgcgtggcaagcgcaccatctttggaggacgccgtgctttgcgctgcggcttgtatatggccgcgctagtggccgcgcgtcacaaccgcatcctgcgcgatttttatcagcatctccgtaccaagggcaaacctcacaaagtcgccctcactgccgtgatgcggaaacttctcctcgcacttaatcacaccttaaaacccactgcttgcttcgcttgaactcgagacagtta

SEQ ID NO: 4782 - DNA, 1395 bp, unidentified
  source 1..1395: mol_type = unassigned DNA; note = element_747c5ec
  misc_feature 1: note = core
  misc_feature 2..88: note = LE
  misc_feature 89..1126: note = CDS
  misc_feature 1127..1395: note = RE
  misc_feature 1167..1387: note = bridgeRNA
caatgggatggacgcccccactctaaacggcatcaatgtgccaaagtggaaatgagagtgaccacttaaacgaatgggagcgtccgcgatgaagattacaacggtcggaattgatttggcgaagaatctgttccaggtgcatgcggttgatgaacggggtaacgcagtgctgcgcaaacagctgcggcgcaggcaagttgcagtattttttggaaatctgccaccgtgtgtgatcggaatggaagcttgcgcgagcgcccattattggggtcgcacgctgcagcgtttcggacataccgtgcgcctcatggccccgcagtttgtcaaaccgtacgtgaagacgaacaagaacgatgtcgccgatgcggaagcgatctgcgaggcggtgggccgggtcaacatgcgcttcgtgcccatcaagagcgtcgagcagcaggcaattttgtcggtgcatcgggtacgccagggatttgtgaaggcccgcaccgcgcaggccaatcagatccggggtctgttgggcgagttcggactcgtcattccccaaggcatcatcaacgtggccaagcgagtgccggaaatccttgaggatgccagcaacgagttaccggtgccgtttcggcacttgattgatcgcttgaccaagcatctgaaggacctggatcggcaagtaaaggagttcgagcgggagattatcgcctggcaccggagcagcgagctcagccgcaagctcgagaagatcccgggcatcggcccgctggctgcgagtgcactggtagcatcgatcgccgatgcgcacagctttgacaacggccggcaagtctccgcctggctgggtctggttccgcgccaaagctccagcggcggcaagccaacgctgctcgggatgagtaaacggggcgatgcgtacctacgcacgctactgatccacggggcgcgctcggccatcctggcggccaagaacaaggccgacaacacccagggatggttgaccaatctgctcaagcgccggcatccgaatatcgcggcggtggctttggccaacaagaacgtacgcaccgtgtgggcgatactcgcctatgggcgcgagtttaaagccgactatatgccgacacccatgaccgcataatccactgagttacaagaacggcactacaggagaacacaccaccgattgctcaggcgatcacgcagtgatggcaaaccaggtaagaccgtggttggcaaaacccacagtggccggagcacctcgagtgcgagaaagcgaacgggagccaatcagccaaacccatcagggacagcggctcaggccgcagcaaaagtccgaatgtacggttgcaatctgatcctgtcagccctcatgaactgtaagcttggcaaagtgggggcgtccatgta

SEQ ID NO: 4783 - DNA, 1624 bp, unidentified
  source 1..1624: mol_type = unassigned DNA; note = element_748a397
  misc_feature 1..2: note = core
  misc_feature 3..77: note = LE
  misc_feature 78..1124: note = CDS
  misc_feature 1125..1624: note = RE
  misc_feature 1359..1611: note = bridgeRNA
tgttggcgtggacggccctcgaccgcaccgctgtgtcatgctgggtctgtcacagaccccacgcgaggaggcccgccatggagcagatcagccgcatcggcatggacacgtcgaagcatgtctttcaactccatggcgtggatgccgccgagcggccggtcctgcgcaagaccttgcgccgcaaggagatggtgcggttcttcgaacggctgctgccgacgccgatcgccatcgagacctgtggcgggtctcaccactgggcccggctgttgggcggctttggccacgaggtgcggctgatcgctccgcagctggtaaagccctacgtcaagcgcggcaagaacgacgccgccgacgccgaggcgctctgcgaggcgatggcgcgccccacgatgcgcttcgtgccgatcaagaccgccgagcaacaggccgccctgatgctcgtcggactgcgcgaccgcctggtccgcagccggacccagctcgtcaacgcgatccggggctacgtggcggaattcgggatcaccgccgctaagggaaccgcccacatcggcgcgctcctggagcgcatccgggcggacgaggccgttccggacctggcccgcgacctgttcgcggtgcaggcccgggagtacgaggcgctgcaggcgcgcctcgacgaggtcgaggccaagctgatggcctggcacaaggcggacgcgtgcagccgacggctggcgcagatccccggggtcgggccgatcggcgcggtgctgctggccatgaagacaccggcgcccgaggcgttccggtcggggcggcagttcgccgcgtggatcggcctgacgcccaaggaccactcgaccgcgggcaagacacggctgggcggcatcacgcgggccggcgacgaagggctgcgcagcgttctggtggtcggggcgacggcgctgatccggcgggtgcgccaaggcaccggcggccgcggtttcgccgcctgggtgaccgagctgctcaggcgcaagccgccgaagctggtcgcggtcgccgtggccaacaagatggcgcgggttgcttggaagctcatgattacgggcgagtcctacgcgacgagggtgatccccgcggacatgggaccgcgctcgtgacgggaccgcgctcgtgacgggaccgcgctcgtgacatcgttgtgggcgttcagcgccgcaggcatccggaccggatggtccgccttccgccggcccgcctcaagtcttgccctcgcgggccaccgcctgcggcggctgcggacttgacacgggccagcctccaggcggctcgttccaccatcggatgccgggcgtggtgtcgctgaccacaaccgcatcggatccgcccggcacaggagcggctcagccgtgaacaaagccgggcggcgttggaccttgcagggtgacgaggagatggcgtgatcgatcgatccgagacatgagcaaacccggaagtgccagtggccttcgtggtcgcatcgttgtttggacccatgtcgcggaaaccatcttggccagcgctcatgtgcgggcgcgcgaacaggccggacatatgagcgcaagcgatccgaccacgacctgcaaccttttcagcttgcaagcagagggccgtccacata

SEQ ID NO: 4784 - DNA, 1482 bp, unidentified
  source 1..1482: mol_type = unassigned DNA; note = element_748ecf8
  misc_feature 1..2: note = core
  misc_feature 3..237: note = LE
  misc_feature 238..1461: note = CDS
  misc_feature 1462..1482: note = RE
  misc_feature 7..230: note = bridgeRNA
ctaatggggattgatcacctggtcccgcttggtggacgaggatggtcggctgagccaccagcaggtgagcactgaccgcccctgggccttgagctctgaggctagatcgtgcccctgctggctggtgaggtctcctcggatggctggtgggatgtcgtgccctgagcactgatccattagggagctgctggagtcctctggctcagggcgtgatccgtgacgggcgagaggggccagatgatctttgtcggggtggactgggcggaagcccatcatgacgtgcacgttcaggatgagaacggcaagcggctgggcggcggccggctgcccgagggagtggagggtatcgcccggttccatgagctggccgcgcggcacgcgcaggaacccgccgaagtggtgatcgggatcgagactgaccggggcttgttcgctgccgcgctgatggccgcgggctaccaggtgttcgtggtgaacccgttgtccgcctcgcgctaccgggaccggcacgcggtctccggcgcgaagtctgacccgggtgatgcgaaggtgctggcggacctggtccgcaccgaccggcataaccaccggccggccgccggggacagcgacctggccgaggcggtgaaggtcctggcccgtgcgcaccagtcgatgatctggtcccggcgccagcacgcgaaccggctccggtcggcgctgcgcgagttctaccctgccgcgctgaccgcgttcgatgacctgaccagcggtgacgcggtcgaggtgctccgcgctgcaccgactccggtactgggcgcggcgctgtcccgggccaagatcgccgcagcgctgcgccgcggcggccggcagcgccacatcgatgcgcgggccgcgcagatccaggcggcgctgcgcaccccgcagctggcacccgccccggtcatcgcgtccgcgatgggcgcctcggtgagcgcctcagtggcggtcatcgccgagatgaccacccagatcgccgtgctcgagcggcaactggccgcggattttgaggcgcacccggacgcggaggtggtccgttccctgccaggactggggaccatcctcggcgcccgggtgctcggcgagttcggcgacgatccaggccgctacgccaccgccaagtctcgcaagaactacgccggaacatcaccgatcaccagagcctccggcaccaggagggtggtgctggcccggcacgtccgcaaccagcgcctcgccgacgcgatctacctgtgggctttcgccgccctgactgcctcacctggtgcccgggccttctacgacacccgccgcgccgccggcgacacccaccacgccgccctccgggccttgggcaaccgcctggtcggcatcctgcacggctgcctcgccaaccacgcccagtacaacgaaaccaccgcctggggacaccgcaccggcaccagcttcacccaagctgcttgacacactccagccgtgggatgt

SEQ ID NO: 4785 - DNA, 1377 bp, unidentified
  source 1..1377: mol_type = unassigned DNA; note = element_749937c
  misc_feature 1..2: note = core
  misc_feature 3..87: note = LE
  misc_feature 88..1119: note = CDS
  misc_feature 1120..1377: note = RE
  misc_feature 1126..1365: note = bridgeRNA
tgatggtgtggaacggccctccgagccgtcgcggaaaatgactatgctggttctcgaagcgactgcatcaagaaggggacatacgccatggaaggtatagcaaccgtaggactggatctggcgaagaacacgttccaggttcatgccgtgaatgcagttggagatgtgatagttcggcgcgccttacgccgatcgcaggtcttggctttctttgaaaggttgccgccctgtctcgtgggtatggaggcgtgtggaagtgcgcactattgggctcaggagattggggcaatggggcacacagtgcgcttgatgccagccgcctatgtgaaagcttatgtcaaacggaataagacggatgcggcggacgccgaggcgatctgcgaagccgtgacccgcccaacgatgcggtacgttgcagtcaaagggcggcaggagcaggccgcggcgatcatcttgagaactcgcgacttgctcacgcgacaacgaacacaatccatcaatgccctgcgtggtcacatggcccagctgggggtaattgccgcggccggcgcgaagagctgcggcaagctgattgcgatcatacgagacgatgccgacgacaggctgccggcaacggcgagagaggcgctagccgagatcgcagaccagatcgaaaccctcaatgagaagattgccgccctggagcgcaagatcgttgccacggtgaggcaggatgaagtcgcgcggcgcctgacagcaattcctggtgtcggtccgatcacagcagcgacagtgagggcggcagtgccccatcccgggggctttcgacgcggcagggacttcgctgcctggatcggcttgacaccaaggtccagctcgagcggcggaaaggagaaactcggttcgatctcgaaacgcggaaatcctcagctccgctcgctattggtcgtcggtgccatggcaatcctgaagctttcgcggaatggctttggaatgccgccgtgggtggccgcccttcagcagcggcgtccgttcaaggttgtcgccacggcgatggcgaacaagatggcaagggtcatttgggccttgatgatgaagggtgaacaatacagtgcacccacagcgatgatgaagccataacgtcacacacttttccggcgattccgccggatcatggcagggtgctttctgttgatgaatcgaaggagcgtcatcccggtgcaaatcagaccgttcccctctttgcgcatcggagcgcgtgggtttgattaggcgatttgtgctgcggatatcatcatggccagcggttttgaccgcgcaacaggccggacatatgaccgcatcggtccatagattcaaagacaggagtggcccttgccaagcgggccgttccacata

SEQ ID NO: 4786 - DNA, 1340 bp, unidentified
  source 1..1340: mol_type = unassigned DNA; note = element_74a55bb
  misc_feature 1..2: note = core
  misc_feature 3..73: note = LE
  misc_feature 74..1099: note = CDS
  misc_feature 1100..1340: note = RE
  misc_feature 1078..1327: note = bridgeRNA
cgttggggtggacggcccctgcggcatcttgtgccaaagtcccgctgtcgaaggctgaacgatggagccgtccatgaccgatcttacacgcattggggttgatacgtcgaagtctgtcttcacgctgcacggggtcgatgcggcgggttgctgtgttttgcggcgcaatctccggcgccgcgagttcgaggcctttttccagaagttgccgcccgtcgaggtggtgctggaggcatgcggcgggtcgcaccactgggggcgatggctgatgaagctgggccaccgggtgaggctgatcccgccgcaatacatcaagccgttcgttaagcgcggcaagaatgatcgcaacgacgccgaggcgatctgcgtcgccgcagcacagccctcgatcggcgatgtgccggtcaaagcagttgagacccaggcgggggcgatgctcctgtcgacgcgcgagttgctggttcgccagcgcacccaactggtcaacgcgctgcgcggccatgccaccgagctcggcctggttgcgccgcaaggcgacaagggtctcacgcagttgcaaggcgagatcgccaccgccgacgatgaggtggtcccgccggcggcgaaggaggcattggcgctgctcggcaagcaagtcgaccgcggccaggctcgcctggccgagatcgacgccaagctgaagaagcaactcgcggccgacccgctcagccaaaggctggcccatatacccggcgtcggcccgatcatcgccttgaacctcgctctgcgggtcaacccggcgcaattcaagtcggggcggcacttcgcggcctggctcggcctcgtgccgcgcgagcgttccacgggaggcaagcagcggctgggcgggatcagccgcgccggcgacgagcggctgcggcaattgctcgtcgtgggggccacagcggtgatacgccatgccacgtcaggccgcgccggcgcctcgccatggcttctcgaactgctcaagcgccgcccgcgcaagcttgtcgcggtcgcttgggccaacaagatggcccgcatcgtgtgggccatgatgacgagcggagaggcatatcggcccgcgaaggccgccgcctgaccctcgtcatgccgccggtgtagagcttaagggatgagatgttgatcggacgatccgacgaaccacgaacaccgtgtagggcgaaggccatcaaggccgcttctccgtttggtggtggatcgcggaacccatctgggccagcggccgtcgtgccgctccaaacaggccggacacacgaccgctatcgcgccgtatcaaatttctcccccttaccccttgcaccgagggggccgtccacaca

SEQ ID NO: 4787 - DNA, 1364 bp, unidentified
  source 1..1364: mol_type = unassigned DNA; note = element_74a7496
  misc_feature 1: note = core
  misc_feature 2..78: note = LE
  misc_feature 79..1104: note = CDS
  misc_feature 1105..1364: note = RE
  misc_feature 1123..1360: note = bridgeRNA
taatgagatggtcagcctgaccgaaacggcccataggcttacgcttactgggccgtttccttttttcaaggggccatcatggcagacgcgaagttgatcggtatcgatctcggcaagtactcctttttcgttcacgcacaggacgcacgtggacagcaactctggcgcaggaagttcacacgccaccagctcatcatgatgctggcccagcatccaccttgcacggtagccatggaagcatgtgccggagcgcattggctggcacgcaaactccagtcctttggccaccagccacggctgatcacgccgcagttcgtcaaaccgttcgtcaaaggcaacaagaccgacttcggcgacgcccaggccatctgcgaaactgcctcgcgtccatccatgcggtttgtggccatcaagacacccgagcagcaaaccctgcttgcgctgcatcgggtgcgcgaagcgctggtgtccgaacgcaccgccaccagcaatcagattcacgccttcctgctcgaatttggcatcagcctgccaaccggggcgcgcgccatcgcccgtttgccggccctgctcgatgagcccgcacacgaactgccaccgcggctcatcgccacactgctacggctgcatcggcgctacggccagctcggcaatgaaatcgccgagatcgaaacggatctcaaggcccagctcgctgaagacgaggccgcacagcgcctgctcaccatcccaggcatcggcccaatcaccgccagcagtctgattgccgtgatcggcgacgcgcacgccttcaggcacgcccgcgatttcgccgcctcactcgggctggtgccccgacagcactccaccggcgggcgcgccacgctgctgggcatcagcaaacggggcaacgcccagttgcgaagtctgctcgttcagggtgcgcgtgccgtgatgcgctatatcgagcggcgccatgacgcgctcggcacgtgggtgcagtccctgctgcgacgccgccactccaatgtcgtcgcctgcgcgctggccaataaaatggccagaatcgcctgggcgattctggccagaggcggcgagtaccgggcacagcccagtcccgcctgatcaagtaccacctgcccgctacggcatgcctgcttctgcgaccactgagctgtgatgaagatatacggcacacggcccgatcggaaacctgacaaagaatccagtcatcaagactgccttactttctaggccaatcgggtgcggctactcatcaggggccgggcgtccaatccacgcccaacacgagcccggatacatttgcgcaagcccttttatcttagtcacaaatcgaggttgcagaaaacaggctgaccatacat

SEQ ID NO: 4788 - DNA, 1620 bp, unidentified
  source 1..1620: mol_type = unassigned DNA; note = element_74ac94c
  misc_feature 1..2: note = core
  misc_feature 3..282: note = LE
  misc_feature 283..1485: note = CDS
  misc_feature 1486..1620: note = RE
  misc_feature 14..302: note = bridgeRNA
ttgctacaatgtcaacaaccgggtgaggcacgccagccaggcgtgcttttctcgtactcacgcctaagctacaatggaagggaaattggcctgacgagacttttaatggactaaccatgtccggctgctaaacagtcagccatccttccgctgtagcgttcggttgaggcaggttgaactactggaaatctaggatgttcgtgtgaccaagcaatttgaatcggcagtgagaaaacgatggccgccaatttgaaactgattgaatagagagggacaagagaaatgaacgcagtagggattgacgtttccaaagggaaaagcacagtagccattatgcggcctttcggcgaagtagttgcagacccgtttgaggtatcccatacggatgcggagttgcggaaactggcttgctttttggagaagctgcccggagaaacaaggatcgtcatggagtacaccgggaactactggcaacctatcgccaaggtgttgcacgatgcaggcctttttgtctctatcgtaaatgcactgttaatctacaaatacggcaacaactcgatccggaagggtaagacagacaagttggacgctgtgaaaattgcgaattactgtcttgaccgttggacaggtctcgaacgttacacccctgttgaccaaatccgacaggcgctcaaaacgtgccgtcgccagtacgaccagtacataagattaaaagtcaatctcaaaaacaatttgatcgcgctactggatgggacgtttcctggcctcaacatcctgttcaaaagtgctccccgggatatggacggacacgaaaaatgggtggattttgccgagaaattctggcatcgggagtgtatctgcgggaactccgaaaaagccttcacaaaccaatacaaaaagtggtgtgccaaagccgggtacagattcagcgaggaaaaagcctcgtccatctacgcccacgccgtctcacaggtaaatacgcttccgatgaccgactcgattaaacgcctcgttactcttgcggtttctcaactcaacacaatcatagaaacgatttccgtaatccaacacgagatgctcactctggctactcagcttccagagtaccctgtcgtgatgcggatgtttggcgttggccctgtccttgggcctcagctcatggcagagattggcgatgtgcgccgctttgaccgcaagcagtctttagtggcctttgctggtgtagatgcaccgccttgccagtctggcacctttgaatcgaagaacagacatatttctaagcgcgggtctcccaggttgcgcaaaaccctctttcaagtcatgtccaccatcatccaacacgcccccgctgacgatcctgtattccaattccttgaccgtaaaaggcgggagggcaagcactattacgtctacatgaccgctgcagcgaataagtttctgagaatctactacggtactgtcatagcttatttagagaagctataactgcatcataaacgacgattttcatgccaattcgatgaccgccaaaacacgacggtttgcttttctatgctcatttttatgggatcacactttctggatttttatgcttccaggccttgacaactcttggcaggt

SEQ ID NO: 4789 - DNA, 1422 bp, unidentified
  source 1..1422: mol_type = unassigned DNA; note = element_74af2ef
  misc_feature 1..2: note = core
  misc_feature 3..268: note = LE
  misc_feature 269..1240: note = CDS
  misc_feature 1241..1422: note = RE
  misc_feature 3..171: note = bridgeRNA
tccttaagaatggttggcggtccgggaggaccgggtgtggctgacagttgtctgccgttgatggctccaggagactggccgcccggtcctccgggacgctccgaccactgattgagaactgcggtcatcgctggttaaggacctgtcggcggggtgttcttcgggccatgaaagtgctggtcacggaggaacaggagcggcgcggttgacaacgcggcatgcacgcatatgggtcggcatcgatgtcggcaaggggcatcactgggccgtggccattgatggcgacggtgagacggtgttctcaacgaaggtgatcaacgacgagccgcagatcctcgccctcatagagaccgcccgtgaacgggctgacgacgtgcggtgggcggtcgacatctctggccgtgcatccacgctgctgctggccctgctgttcgctcacagccagcaggtcgtctacgtacccggccgcaccgtcaaccgtatgtccggcgcctacaagggggagggcaagaccgacgccaaggacgcccgcgtcatcgccgatcaggcccgcatgcggcgggacttcgccccgttggacacaccgccggagctggtgaccacgctgcgagtgctgacccatcaccgggccgacctgatcgccgaccgcgtccgactgatcaaccggctccgtgacctcctggtcggtatctgccctgctctggaacgggccttcgactactcctcggccaagggcccggtcgtgatgctgaccgagtaccagaccccggccgccctgcgccgaatcggcgtcaaaaggctgaccacctggctggaacgccgcaaggtccgcggtgccggtgatgtcgcggggaaggccgtggaagccgcccagtcccaacagatcgcgctgccaggcgagaaaagcgccgccaagctggtctgcgacctcgcccaccagctcctgaccctggacgagcggatcaaggacaacgaccgggagattcgcgaggtcttccgcgccgacgaccgcgccgagatcatcgaatccatgcccggcatgggacccatcctcggcgccgagttcgtcgctatcgtcggcgacctgtccggctacctcgatgccggccgcctggcttcccacgccgggctcgccccggtgccccgcgactcggggcgccgcaccggcaaccaccaccggcccaaacgctacaaccgccgctgcgctggctgttctacatgtccgcccagaccgcgatgatgcggccgggaccatcgagggactactacctcaagaagaggggcgaggggctgctgcacacccaggccctgcttgcactggcccgccgacgcgtcgacgtgctctgggcaatgctgcgcgacaagaggctgttcacccccgtcccgccggtcacgcaaacggcttgacacgatcattgagat

SEQ ID NO: 4790 - DNA, 1243 bp, unidentified
  source 1..1243: mol_type = unassigned DNA; note = element_74b03ba
  misc_feature 1..2: note = core
  misc_feature 3..265: note = LE
  misc_feature 266..1225: note = CDS
  misc_feature 1226..1243: note = RE
  misc_feature 6..213: note = bridgeRNA
cttatatctcgattctgttctctacaacagtcagaatccccgactgatcatcgggaggaagagggagaagtcgctttggccctgaggcttcgagcctgtgccgtagatagaactctccctcctccacacccgccttggcagttcgaacggtatgcgtaggcccccgctggcgggtgagcttgaatcaccataaggctgaaccgggcgcgtggctccgaacgatttgcaccctcattgttgacccaagaccggtagacctgaacctatgccccaaaccatcatcggcgtggacatcgccaaacgaaaattcgatgtggcccgcctctgtgagcacaaataccgccacaagaaattcgaccacaacgcccagggtttcgtggccttcctcgactggctgaacagcttcggcgatccccagccgtgggtctgcatggaggccactggcgcttacagtgtccccctggccgagttcctggtggaacgaggctaccgggttagcgtcgtcaatccggccaagattcacgcctttgccaagagcgagttgagtcgcaccaaaaccgacaaagtcgacgccaaactcatcgcgcggtattgcctgagcctgcagccggaccggtggacgccaccgcctcgcgcgatccgtgagctacaagccctgttacgccgcgtcgagcacctgctcgaaatgcagcagatggaacgaaaccgtctagccacagccgatccggccatcgtcgcttcgctcaaaaccgtcctggacatgctggacaaggagttggaggagactcgccaacgcatcaaaagcctcatcgacaacgatcccgatctcaggcagcgacggcatctcctggagtccattccaggcatcggacccgccgcttcggcttacctgctgacggccctgagcccccattatggcttctccagcgccaaacaggccgtggcctatgcgggtctcgcaccagcaatccaaaagtccggcaaatgggtcggcaaaacccgcctttccaaaaccggtgaccctgccttgcggaaagccctgtacctgcccgcactcgtcgcatggcaatacaatccgattatccgcaccttctgtcagcgtcttaaagacaacgggaagaatggcaaagccatcgtctgcgccgccatgcgcaagctcatccacatcgctttcgccatcctccaatccgggaagccgtttgatcccaaattatcgcttgcatgaattcgttcaagacggtat

SEQ ID NO: 4791 - DNA, 1312 bp, unidentified
  source 1..1312: mol_type = unassigned DNA; note = element_74b305d
  misc_feature 1: note = core
  misc_feature 2..226: note = LE
  misc_feature 227..1297: note = CDS
  misc_feature 1298..1312: note = RE
  misc_feature 1..225: note = bridgeRNA
cagagatgatgttcatgagcacctcccgccggggtctgacccagcgcctgactgacttcgggtccttcacgggatttgtcggcctcggtcgggaggtgctcgtgcactcactggacgtggcgttgtgacttaataggagcctggccagaggccccatctctgtcttgtccgcgttgcccggctggtgcgtgccgccctgcccacagtcacgagcgacaggacgacgatgccctctattacacctgaagaagccgcgatcgaggtcgtcggtggagtcgacacccaccaggacacccacactgcagcggtgatcgacctggtcgggcgggtgctaggcacccagcagctccccgccacggcggccggatacgccgccctgctggcctggatgcgcgggttcggccggctgctgcgcgtgggggtcgagggcaccggcgcctacggcgcgggactcgctcgcctgctgcgcgacgaggacgtcgacgtgatcgaggttgaccgcccggaccgcaagacccgccggttccagggcaagtctgacccgatcgacgccattcaggccgccaaggccgccctggccggggaacgcaccggcatccccaagcagcgcgacggccgcgtcgaagcactgcgcaacctacgggtggcccggcgcagcgcggtcgaccagcgcgccgacacccaacgccagatcaaaagcctgatcgtcaccgcccccgacgaactgcgtgcccggctgtgcggtctcaccgtcaagcagctgatcgccacctgcgcgaacctgcgacccgaccgggccgacgccgccaccccggccaccgccgtcaagctcgccctgcgtgctctggcccgccgccaccaacagctcaccaccgagatcgccgacctggacgaactgctgcagcctctcgtcgccgccatcaaccccggcctgctggccgccaacggcgtcggcgccgacaccgccggccaactgctcgtcagcgccggcgaaaaccacgcccgactcaactccgagaccgcgttcgccatgctctgcggcgtcgccccgatccccgcctcgtcgggcaagaccacccggtaccggctcaaccgcggcggtgaccggcaggccaacgccgccctctaccgcgtcgtgctctgccgccttcgctgggacccccgcacccgcgcctacgccgagcgacgcaccaaagaaggcctgtccaagaaagagatcattcgatgcctaaagcgatacgtcgcccgcgagctctatcagatcatcacagcaaacgatcttgaactcgctgcttgacatccataggagcat

SEQ ID NO: 4792 - DNA, 1505 bp, unidentified
  source 1..1505: mol_type = unassigned DNA; note = element_74b3520
  misc_feature 1..4: note = core
  misc_feature 5..253: note = LE
  misc_feature 254..1495: note = CDS
  misc_feature 1496..1505: note = RE
ctcactggtgcaccatccttgtgtccggtcctgttgatgacaggattcgggcgcacctgaggtccccaccgggccatcgccctgctcgctcgactcttgaggtccgggatgagttctgcgaggcccggtggcccaggacgcgccgactggctacagggctgtgcgccacagagcgccgatcagtgagcgaccggcagccgcgtcccgggaccaccaggtgtcttcccactggtgcaacagcgaggagacaacattgagtgtcgccgatgcccccgtcctgccgcgacctaccgccggggtggactgggccaaagacgatcacgccatcgcgatcgtcgaccccgatggcgaaccgatcgaccggttccccgtcgcccatgacaccgccgggttgcgcacgatggtccgcaagctgctggccgccgaggtcagcgaggtcgggatcgagcgtcccgacgggccggtcgtcgacgcgctgcgccaggccgggctggtcgtctacgtcatcccgcccggtcagctgaagaacctgcggtctcgctacgggtcggccggcaacaaggacgaccggttcgacgcctacgtcctggccgacgtggtgcgcaccgaccgccgccggctccgcccgctgctggtcgacaccgaggccaccaccgcgctgcgccagaccgtccgtgcccgccgcgacctcgtcgcccaccgggtcgcagtcgctaaccagctgcgcgcacacctgcagatttgcttccccggcacggtcggcctgttcgccgacatcgactccgcgatcagcctgcggttcctcgaccgcttcgacacccaagaccgcgccgactggctctcgcccaagcgatggacggcctggctgtcggccgccggctactgcggccgcaccagccccgacaccttccacacccgcctgaccaacgccccacgcggcgccaccggctccgccagcgagtccgccgccaccgtcaccgccgcgttcaccgccgtgctgcgcaccatcacgacccaaatcgaggccctggccacccggatcgccgagcaactcgacctgcaccccgacgcaccgatcttcaccagcctgccccgctccggcaccgtgcgcgccgcccgactgctcgccgaaatcggcgacgcccgcggccgcttccccaccgccgactcgatggcctgcctcgctggagtcgccccctccacccgccaatccggcaagaccaccgcggtcagcttccgctggggcgccgacaaacaactccgcgacgccctctgcgacttcgccggcgacacccgccacgccaacccctgggccgccgacctctaccaacgcgcccgcacccgaggacacgaccacccccacgccgtccgcatcctcgcccgcgcctgggtcgacaacatctgggcctgctggaccaccaccaccccctaccaccccgaccaccaccgcgccctccaacgcatcctcaaccaacaccaaccagcagcggcttgacacagggcaa

SEQ ID NO: 4793 - DNA, 1417 bp, unidentified
  source 1..1417: mol_type = unassigned DNA; note = element_74ba17a
  misc_feature 1: note = core
  misc_feature 2..131: note = LE
  misc_feature 132..1151: note = CDS
  misc_feature 1152..1417: note = RE
  misc_feature 1180..1416: note = bridgeRNA
gaatggaatgaacgcctcccacctatgtggagcggctaatgaggatgcgaaggcggatcctcaggggccgacggcatcagagtgcccagaggtgaagaatggagtcttcacagccaaccgaaggatccgaaatgcagtttatgcccgtagggatcgacattgcaaagagcgtctttcaggtccactacgtggacgccgggacaggagaaatcgtgagcaaggcgatcaaacgcgccgtgcttctcgagttcttcgccaatcgcagtcattgcctgattggcatggaagcatgtggtggcgcgcagcactgggcacgtgcgctgactcgcatgggccatcaggtcaggctgatgccggccaggttcgtcaaggcattcaacatcggcaacaagaacgacgccgcggatgctcgtgcgatctggctggcggtacagcagcccggcaaggccgtcgccgtgaagaccgaagcgcaacaggcagtgctggcgctgcaccggatgcgccagcagttggtgaagttccggacgatgcagatcaacagtttgcgcggactgctgaccgagtacggcgaggtgatggggagaagtcgggccgcgctgaacaaggccatgccggacgtgctggaacgagttgcagatcggctgcccgcggtgctggtggatacgctgcgcgaacagtggaatggatcggcagcattggacaaacagattgccgagatcgagcgacggctgcgacagtggatgcaggaagaccagtccgtcaaagcgatctcggagatccccggagttgggcttctgagcgcgacggcagcggtggcgacgatgggcgatgccaaagcgttcaaatcgggacgggagtttgcgtcctggctcggcctggtgccaaaacaaactggctccggaggcaaggtccagcttctgggcatcagcaagcgtggcgacacgtatctacgcacactgctgatccacggcgcacgcagtgtcctcaggcatgccaaagagcctggtccgtggctcgaccagatcagcaagcgaaaaccattcaacgtggtgatcgtggcactggccaataagatggcacgcacgatctgggcgctcctcgcgcatggcagtcggtatcagaaggagtatgtgagcgtgcggcccgcgtagtggccagcacggcacgcaaggcttgacagtgacgtcaagaggttgcgtcggcaatcgagtgagatgacaaaacaggtcggaccggggttcaccaaacctgaatcgctgacagagctcgaagctcgccaggcgaatgaggagtgaatcagcggatttcatcggggcccgcagcgcatcaggctgcatcaaggccggatatagagctgcagcccatcctgtgcgtcagattacaagagaccccttcgcaaacgggaggcgttcatata

SEQ ID NO: 4794 - DNA, 1403 bp, unidentified
  source 1..1403: mol_type = unassigned DNA; note = element_74bf55e
  misc_feature 1..2: note = core
  misc_feature 3..122: note = LE
  misc_feature 123..887: note = CDS
  misc_feature 888..1403: note = RE
  misc_feature 1177..1398: note = bridgeRNA
agatggggtaacgggcctctggcgccgcggccagactttcggtcgaggcggtcgtccctcacaatgatggtgtgaacggcgttatggccgaagccagcgccaaacatcaaggagagacgaccgtggattattatgccgggattgatgtgtcattggaatgctcaagtgtctgcgtggttgatgggcagggcaagatcgtgcgggaagcgaaggtggcgagcgagccggaggcgctgatcgactggtttgcggcgctcgaagtgccgcttgcgcggattggcctggaggcaggcccgctgtcgcaatggctatttgctgggctgcaggcgtccggcctggcagtggagcttctcgagacgcgccacgtgcgcgacgccttcaaggcgatgccggtgaagacggatcgcaaggatgcgcgcggcatcgcacagctcatgcggcttggctggttccgccccgtgcattgcaagtcactgccagcacaggaagtccgcgccctgctgaccacgcgcaagctcctgcagtcgaagcggcacgatgtcgagatgagcatccgcggggtcttgcgcggctttggcctgaaggtcggcccgacggcgccgaagacctttgagcggcgggttcgcgaactggtcgcccatcatgacacgctggagcagattgccgaggctcttctcaagacccgagccgtgctgctgtgcgagttcaagacgatcgagaagcgtcttgtcgggttggcacgtcgcgatgcgcaggtgcgcaacctgatgggcgtgccgggggtcggggctttggtagcgctgacattttcggcggccatcgacgatccgtcgcggtttcgctcgtcccggatggtgggcgcccatttcggcctgacgccaaggtgacggggcgcatctccaaggtcggcgaccatggggtgcgtgtggcgctctacgaggcggccaacgtgatgctgacgcgaccggtcaagggctcggccttgaagtcctgggcgcttgcggtggcgaagcgggccgggatgcgaaaggccaaggttgcacttgcgcgcaagctggcggtggttctgcaccagatgatgcgcagcgctgagcgctttctgccgacaggccgtccttcggcagtcgtgtcgtgaagcgttcgataagaggataaggataaggaggaacacggcgggcatcgacaccagttcctgccgttacgacgtcccttgccaggacggtggacccggttaggccgctaagacgggagcagctcgtttgatgactgcgcgtccctagattggccagccgatcccgatcagatcccatcaggcagcggccaaagcgccgactgcggacagaagcaagaccccggcagcggacgaagttacgagggattgacaagtcgaggcccgttacaga

SEQ ID NO: 4795 - DNA, 1536 bp, unidentified
  source 1..1536: mol_type = unassigned DNA; note = element_74c277b
  misc_feature 1: note = core
  misc_feature 2..265: note = LE
  misc_feature 266..1480: note = CDS
  misc_feature 1481..1536: note = RE
  misc_feature 10..241: note = bridgeRNA
ccgttatgtttttcgcggtcctgcaatggggccgctggcctccgggcccggtatgaccgtgtcccctctgtcgaacggatgacctggggggggtggtgtcgccgggttcgtggggtgccgtcggagacgctgatgagagacccggccgccgcccggcctggcgcaatgccaggcagttcgcgggcggcaggtctgcataacgtggatgcgcgagcacggtgccaccgccgaggccggcaggatccaaccgctctggaggggtgcgatgtcagacaccggcgatgtggccgccttcctgagtatggacgtcggcaagagcgcccatcacggtcacgggctgacgccggcgggcaagaaagtcttcgacaagccgatgcccaacagcgaaccggaactgcgggccgtcttcgacaagctgaccgcgaagttcggcacggtgctggtgatcgtggaccagccggcctcgatcggcgctctgccgctgaccatcgcccgtgacgccggctgcgaggtcgcctacctgctcggactcgcgatgcggcggatcgctgacctgtatccgggcgaggcaaaaaccgacgccaaggacgcggcggtgatcgcggacgccgctcgcaccatgccgcacgtcttgcggtcgctggaactgaccgacgagatcacccccgagctcacggtgctgaccggcttcgaccaggacgtcgccgccgaagccacccgcaccagcaaccagatacgtggcctgctgacccagttccacccgtcgctggagcgcgtgctcgggccccggctggaccacccggccgtcacctggctcctcgaacgctacggttccccggccgcactgcggaaagccggccgccgcagactcctcgacctcatccgcccgaaagccccgcggatggccgcccggctgatcgacgaggtcttcgacgtcctggacgaacagaccgtcgtggtcccgggaaccggcagcctcgacatcgtgatcccgtccctggccgcctcgctcaccgcggcccacgaccagcgccgggcgctcgaagcccagatcagcaccctgctggaggcccaccctcttcaccaggtcctgacctcgatgcccggagtcggggtcaggaccgccgccgtcctgctggtgaccgtcggcgacggcaccagcttttccagcgccgcccacctcgcctcttacgccggcctcgcccccacgacgagatcctcagggacctcgatccacggcgaacactcaccccgaggcggaaaccggcagctgaagcgcgccatgttcctctccgccttcgcctgcatgaacgccgaccccgcctcccgcacctactacgaccgccaacacgcctgcgggaaaacccacacccaggcactcctccgcctcgcccgccaacgcatcagcgtcctgttcgccatgctccgcgacggcactttctacgaatccagagcccccgccgtcaccctccccgcatgaccatcccaaacagccccatacctggcatcacctcctcgacgaaagacatagagaca

SEQ ID NO: 4796 - DNA, 1724 bp, unidentified
  source 1..1724: mol_type = unassigned DNA; note = element_74c43db
  misc_feature 1..2: note = core
  misc_feature 3..244: note = LE
  misc_feature 245..1579: note = CDS
  misc_feature 1580..1724: note = RE
ctcgtattatataaattaatccttacggattttagttaatgacttgcgttttggtcaccacatgataacttctaattatcattggctttggtcaactggtataggttattgtctcctgtggtttatccacctaaaaagtctgccgcccagacaatcttctaatgtacctactcacatgctgttccgattagatactttattaaccatgagtaacgttaattgcagcttaaagtttttctaaccaatgtgtcctaatactgcgaggttgtatttagagattgtaattaggggttatcatgcggtgaccaatttaagaccagtaaatttaaacgaaaggaggccacttccaatgaaattatttgtcggtattgatgtgagttctacagatctagaaacagtgatgatgtcctcagaaaacaacgaagttgtctttcagggaaacttcataaatgacattaatggtgctagtgacattaaacgaactgttttaaaactcgttaccacgaatcattttgatcaaattatcatcggaatggaagctacttccatctacagttttcatccatcatttttctttaaaaacgacgatgacttaaatcagtacaataccgaaacagtggtaatcaatccaaaagaaacaaaacgatatcatgacatttttgaagaaaacaaaaatgataagcttgatgcattttatatcgctgactatcttcgaattggacgctacactgttggtatcgttaaacaggaaaactacctcgctttacaacgcttaacgcgttcgcgctatgaacttgttaaaagctccgtccgtgccaagcaacacttcattgaaaatttgtattacaaggtaaacaagctcgtaacgactgacaaaccaaaaactaacgtttttggatcaaccatgatggacatgctcaccgaggacctatctacggacgacttagctaacctctccatcgaagatttaactgactatttgtcaaaaaaaggtcatggtagattctctgatccaaaggcgcttgctagtgccattcaaaaagcggttagaggatcatatcgccttggtaaggttatggcagactcagttgatacagtattatcagtttatgcaaccgaaattaaaacattcaagaaaatgattgctgagttagatcacgccattgctgatctggttcagaccattcccgaagaacgaatcctgcaatcgattcccggtattggaccggtctatgcggccgggatcctggccgaaattgggcaaatcaatcgctttgacgatgagactaagttagccagctatgctggattatcttggcgtcaaaaacagtccggaaattataatagctcgacaacacctttaataaggtctggagacaattatctacgttattacctggttgaagctgccaatcatgtaaaacttcaagatgacgtctttaaagactattacaatcgcaagtaccatgaagtatcaaatacaccacacaaacgagctctcgtgcttaccgcaagaaaactaattagggtgattttcttcttactccaaaatcaccaaatctatgaagaacggagatgattggtatagataaatagttagtacgtaattacgtgttttaaaattcacctgagttcaggtttgtttaagtgcgcccaaaaactgatctgagcaagtacatacgcggtcatgcattattcaattgccttgacttactaccacatga

SEQ ID NO: 4797 - DNA, 1463 bp, unidentified
  source 1..1463: mol_type = unassigned DNA; note = element_74ce447
  misc_feature 1..2: note = core
  misc_feature 3..137: note = LE
  misc_feature 138..1187: note = CDS
  misc_feature 1188..1463: note = RE
  misc_feature 1231..1459: note = bridgeRNA
agatggcatggtccgcccacctaccgtgttgctgctgaagtgaggcacccctcctgagtcaggtggggcctcgcagaaacggcatcagagtgccaaagtggaggttcttgcaaccacctaagcctggaggccccgccatgcaatctacagcaaacctgcccgtcattggtctggatttggccaagacagtgtttcagttgcacatcgtcgatatcgaatcgggtgagatccaacgccgccaaatcaagcgcgccaagctcgccgagttctttgcaaagtgtcaacgcagtctggttgcaatggaggcctgtggcacgtcccatcactgggcacgggtgattcgatcccttgggcatgaagtcaagatgctgcctgcccaacatgtcaaagcgtttttgttgcgcgacaagactgatgccatggacgctcaggcgatctgggtggccgcgcagcagccgcacatcaaacccgtgccggtcaaaacagaacgacagcaaacctgtatggccctgcacggcatgcgccgccaactcatgaagatgcgcatcatgcaaaccaatgccctgcgtggcatcctggccgaattcggcatcgcgttgccggtagggtacaaacagttgctcaagaccgttcaagtcgagctggccaaagcacagcaggctgatcagctgagtgcagatctggtggtcagcgtgcaggagcaactcaaacgcattgactccctgcaagacgacatcgacctgctcggccagcgcttgcgcatcatgatcagacaagaccgacagatgcaggcaattgagcagatccctggcgttggggatttgacggcatcggcgttggtggcggccgtcggtgacttcacgacgttcaaatccggtcggcagtttgcatcgtgggttggactggtgccaaggcaggtgggcacagggggcaagacgcagcagttgggcatctccaaacggggcgacacctacctgcgcaccctgctgattgcgggggccagagctgtcgttaccaggacagagaaatcatgttggatcacccaactgcttgagcgacgtcacttcaacgtggtggtggtggcactggccaacaagatggcgcgcacagcttgggcgatccttgccaaaggcgtagcctttgacaaggtcaaatggaatccgctggaaacagtaagcgcgcgctgaacaccaccgaccgttgagcaacatcccaaagccaatctgctcacaccgttttgaaggagagcctgcaagaagcacagtgatggaatgagggtcaacccaggttggaaacatcccgatgaaccgcccgtaccgtgagtacagcccggagataggagctctgaccgcgaatagccatcatgggcagcgacacgatcgcatacacagcccgaatgtaaggcagcaaacctttcaaaccttcacgatgccgaatcttgctttccttgggcggaccatgta

SEQ ID NO: 4798 - DNA, 1155 bp, unidentified
  source 1..1155: mol_type = unassigned DNA; note = element_74d101d
  misc_feature 1..2: note = core
  misc_feature 3..194: note = LE
  misc_feature 195..1139: note = CDS
  misc_feature 1140..1155: note = RE
  misc_feature 22..193: note = bridgeRNA
cttgtatcttgggccgagtgcctcaatgatacagcgcatcgccaacctgggcgtgacagaccgacggtgccgaggtccgctgagaccgggggacagccagggtcgtcacgccctcaaacctgcagagcccgaacagttgcgtgggccactgagcccgcatcatgcaaggccgggccacccaggaggaggtcatgatgagtgctcctgtgtttgtcggtattgatgtttcccaagcccagttggacatcgccctgcgaccggccgggcacttcactgcgcccaacgacgacgcggggatcgcgaaggtagtagaccagctgcgcgcggtgacgccggccgtggtgctcttggaggcaaccggggggctcgaactgccgctcgtcggggccctggcggcggccgcggtgcccgtcgtggtcgtcaatccccgccaggtacgcgatttcgcgaaggccgccgggcagctcgccaaaaccgatgcgctcgatgcgcagatcctggcgcacttcgccgaggtcatgcggcctgcgccgcggcccctgcctgatgagcagacccacgcgctggctgccatcctgacgcgccgccggcaattggtcgagatgctgacggcggagaagaatcgtctcgcaagtgcccgcaagccggtgcgtaagagcctgcaggcgcacatcacctggctcgaacgtgagctcacccgcacggacaccgacttggcgcaagccattcgggagagtcccgtgtggcgggagaaggaggagttgctgcgcagtgcgcccggcgtcgggccggtgctgactacgacgctgctcgcgaatctgccggaactcggcaccttgaccggcaaacagatcgccgcgctcgtgggggtggcgcctctgaaccgggacagcggcacgttgcgcggcaaacgcacggtctggggcggccgggcgcaggtccgcgctgtgctctacatgggggcgctcgtggcggcccgctgcaatccggtcattcgtgcgttctatcaacgcctgtgtgcggccggaaaagccaaaaaggtcgtgctgaccgcctgcatgcggaagctgctgatcattctgaatgcaatgctgaaacatcggacgccgtggcgcacggagatggttcagtgtgcttgacagtccaagacagttg

SEQ ID NO: 4799 - DNA, 1908 bp, unidentified
  source 1..1908: mol_type = unassigned DNA; note = element_74d4e8e
  misc_feature 1..3: note = core
  misc_feature 4..232: note = LE
  misc_feature 233..1333: note = CDS
  misc_feature 1334..1908: note = RE
  misc_feature 1..236: note = bridgeRNA
cccgttaccttcttcgtagtcccgcgccgtggggccacggtcgccaggttcggtatgactttcttcccttgtctttcgaatgatccgggggtggtgtcgccgagcttggtggcatcggtagaccgctgatagggacagggccgccgggttcgaggtaggtctctttgtaacgtgggtgccgggtgtcgatgctggatcggcgaccggggaggaccggacgaaagactgcttcatggacacgagttacgccgtgttttgcggcatcgacgtgggcaaaagcgatcatcacgcgatcggactggacgcggccggcggccgcctgttcgacaaggcgctaccgaacgacgaggcccggctgcgggccgtgttcgcggatctggccgcgcacggaccgatcctggtggtcgtcgatcaaccaaacaccatcggagccctgctggtcaccgttgcccgcgcctgcggccacgacgtcgcctatctgccggggctgtcgatgcggcgggtcgccgacctgtatccaggggaggcgaaaaccgatgcccgcgacgcgttcatcatcgccgacaccgcccgcaccatgccgcacacactgcgacgggtcgacgtcggcgacgagaccctcactgaactcggggtgctcgtcgggttcgacgacgaccttgccggcgaggccacccggatcagcaaccgcatccgcggcctgctcgccgggatccaccccgcgctcgaacgggcgctcggtccccgagtggcgcatctggctgtcctcgagatcctgtcccgcttcggcgggccggacgggatccggcaggccggcaaacgccgggtcaccaccctcgcggtcaaacatgcaccacgcatgggaactcggctggccgaggagatcttcgccgccttggacgcgcagaccgtgacggttcccggcagcaagaccactgagatcgtgctgccgaaactcgccgactcgctcaaagaggtgctacagcaacgcagaaccatcggtgacgacgtcgagaggatgctcgccgatcaccctctttcccaggtcctgacctcgatgcctggcatcggcgtcaggaccgcagcacgcatcctcgtcgagatcggcgacggctcgggcttcgcgacggccggtcacctcgccgcctacgccggcatcgccccggtcacccgccgatccggctcgtcaatccgcggcgagcacccgggacactcgggcaaccggaaacacaacgcggccctgatctgcctcgcccgacgccgctgcgacgtgctacacgccatgctcaagaacaagaccttctaccagcccccaaacgcagaagcggcgtgatcacgcccagcaggcgtgctaatgcactcgcttcgccagatggaccagcgcatagccgcccggagtcggagttcggtgcgtttcctgatacccgaaccgagagtagagccgcaggttgccgaggctgcgctcacccgtgaacaactgcagatcagtgatctgctcaggtagtcgctcttccaccagttcgagcagtcgactgccccggccccggccctgcatgtccggggccacgaccagccttcccaactcggcggtgtgaggctccgtcggagagagatacacacgcacggcggcgacgaggcgccgagagtcatcgcgcaacccgaacgcgagtacgtcgggctgcgtcaactcactcaccaactcgtcgagggactgcatcaacgggggaaggttcacgtcgtcgtgggcctgcgcctcagtcacatacgcagcccgctgcaacgtcagcagctcacccgcgtccccacccgacagcgtcacaacggattccatgcatgtcgactattccagcccctacctgaccgcaccccagtggcatccccgagcggttgacatcaacatagggacac

SEQ ID NO: 4800 - DNA, 1377 bp, unidentified
  source 1..1377: mol_type = unassigned DNA; note = element_74d80cf
  misc_feature 1: note = core
  misc_feature 2..179: note = LE
  misc_feature 180..1124: note = CDS
  misc_feature 1125..1377: note = RE
  misc_feature 1143..1375: note = bridgeRNA
taatggaatggtccacctctcccataacggcttcaaatgggccatgatgtaagtacttacctaacatcaaaagagaggcagaccatgaaatataataccctaaaagaaaccgtgacagtattaggaattgatctggcaaaaatagctttcatctatacggtataaataaaaatggaaatatggctttaagcaaaaaactgacacgcgctaagctaacggcctttatcgcacagatgccggtttgcctgatcggcatagaagcctgtggaggcgctaattattggaaacgtgtttttgagcgttacggccatacggtaaaaatgatgtcaccgcaatttgttaagccttatgtaaaatcgaacaagagtgatgccattgatgccgaagcgatatgcgaagcggtgcagcgtcccaacatgcggtttgtgccatgcaaaagtattgagcagcaagacatacaaagcttgcatcgtattcgcagccaacttgttgctcgacgaaccgcacaggccaatcagattcgaggtttgcttttagagtacggtattgtcatccctaaaggcatatcctatgtgcgaaaacagataccgagcattttagaaaatgctgaaaatgaattaacgcttttatttagaacactgctaaaagatctgtacgaagaaatggtgcacttagatgaacgagttgaaagcctggaagatgaacttaaaaaagtgagtcaggaaaatataaattgccagcgcttattgactataccgggtgttggcttgctcagtgccacggcgctcatcgcggcgattggtgacatcagcgttttcaaaagtggaagagagttagcggcgtggttaggtttggtgcctcgccaacatagcaccggcggcaaaccgacgttgctgggtattagtaaacggggcgatacgtatataagaacgttattgattcacggaggacgatccattacgagattggctgaacaacatcaagataaacgaagccaatggataagtcggttagagcagcgccgaggcaacaatataacggctgtcgcggttgccaataaaaatgcacgtattgcctgggcgttattaacgagagaagtgaattttaaaacctgtttagtttaatagaatgttagagagataaaaatcaatgaattgcgaagataaaatacaaatgatggcataaaaggtaacacctgcgcatccaacaatctgagcgggacatgggctgataaaagccgtactagtgataagaaggatgcgcgcaaattccatcgaggccagagatgtaaagcatctcataaaaaggccggatatatgggagcaatacttttagctacacgatgattttgtcttgcaatacgaggtggaccatata

SEQ ID NO: 4801 - DNA, 1357 bp, unidentified
  source 1..1357: mol_type = unassigned DNA; note = element_74dd3aa
  misc_feature 1..3: note = core
  misc_feature 4..83: note = LE
  misc_feature 84..1103: note = CDS
  misc_feature 1104..1357: note = RE
  misc_feature 1090..1343: note = bridgeRNA
tgatggggtggacggcccctgcacccggcatcagcgtggcatagtggctgtcgtggcagtcaaactcaaaaaggagccgtcccatgcagatcagtgtcgtcggtctcgatatcgccaagcaggtcttccaggttcatgccgccgacgtggagggccggcctgtcgcacagctgaagctgcggcgcgcgcaggtgctggattactttcgggcgctgccaccatgccttatcggcatggaggcttgcgcgaccgcacaccattgggcgcgcgagttgagcgcgcttggccatgcggttcgtctcatgccgccggcctacgtgaagccctacgtcaagcgcaataagactgacgcggccgatgctgaagcgatcgccgaggcggtcacgcggcccacgatgcgcttcgtgcccgtgaagtcagccgcgcagcaagcggcgctcatgctgcaccgggtgcgcgaacttctcgtgcggcagcgcacgatgcttgccaccgctatacgggcgcatctggccgagttcggcattatcgctccgcaaggcatccaccgcgtcgagaagctcgcaaatgaggtcaacaacccggcagtgccgccgctggcgcgcgacgcgctgatgttgcttgttgatgagcttgcgagtgtttggcaacgcatcgatgagctggaggtgcggctcgtcgccctgcaccgcgccgacgaagtcagccgacggcttgcgtcgatacccggtgtcgggccgatcacggccatggcgatcgcaaacactgtacccgacccgtcgatgttccgctctggtcgtgagttcgccgcctggctcgggctcacaccaaagagccattcaagcagcggcaaggatcgacttgggcggatatccaaacgcggcgaccgttacatccggcatctgctctacgttggagcgggcaacgcaatccgctttgccaaggctcgcgccgcaacaggagaggcgtggatccggggcctgcaggagcgtcgaccgccaaaggtcgtcatcatcgcccttgccaacaaaatggcacgcattgcgtgggcgctgatgatccgtggacaatgctttcgttcgccggcggtcgtagcggcatagccgcaggcgggcacacctgttgcgagggcgaaagtgaggtgatggcacgaccggtcggaccggggatcgacacagcccgcagagctttgggcgccaagagcgcgacccgttgatgaggcgtcgatccgcgaactccatcagggccagcggtcatgaaaatgggccgcacgaacaggccgcatacatgaacgcacccgacccgcgcgttgcacgcccctcatctcgaaccttgcaacgcaggggccgtccataca

SEQ ID NO: 4802 - DNA, 1415 bp, unidentified
  source 1..1415: mol_type = unassigned DNA; note = element_74dfb36
  misc_feature 1: note = core
  misc_feature 2..232: note = LE
  misc_feature 233..1402: note = CDS
  misc_feature 1403..1415: note = RE
  misc_feature 14..235: note = bridgeRNA
ctacttgtttcattgacgtcaggaccggtgtctggcgaggctcggtctaggtgcccggcctggtcgctctcaatgcggctgtccactcttcggggtgtggctctcacacggcctgcgcgggccgggcaccgcctggggcgggtgaggctcgagaagggtgtgttcggctcgaagtagcggtgccctcccgaccccgacgaacgatgtcggatcgagggagaggagaacagtcgtgagcgagccgatcgtgttggggatggacccgcacaagcgcagcgtcacggtcgaggccatggacggcgccgagcgggtgctcggtggcgggcggtacgccaccagcgtcggggggtacgcgcagatgctggcctgggcccggcagtatccgcagcgggtgtgggcgatcgaggggtgcaacggcatcggccggcacgtggccgagcggctgctgggcgacggggagacggtggtggacgttccgccgaagctgtcggcgcggatgcgggtctatgcgaccgggcagggccgcaagaccgacgccaccgatgctcactcggtggcgctggtgggggtgcgcatcaccggcctgcgcccggtcgtcaacgacgtgcagcggggcgagctgcgggtgctggtcgaccggcgacgcgccctgggtgaggatcacgtgcggatgacctgccagctgcatgccctgctgctggagctgatcccgggtggggcgaagaaggatctgtccgctgcccaagccaagaagctcctcgcgaccgtgcggccgcgcgatgccgccgggaaggcccgccgccgggtcgccgccgagctcatcggcgatctggagcgggtctaccgccggcagaaggccgccgacaaagaactcaaggccctcgtcgaggccaccggcagcagcttgatgcgcctgcctggcatcggcccgcagggtgctgcccggctcatcgtggaggtcggggatgtcacccggttccccaccgccgcccacttcgcctcgtggaccgggacagcgccgatcgacgcgtcctccggcgaccaggtccgccaccgactctcccggggtgggaaccgtcagatcaaccgcgtcctacacgtcatggccatcgtccaactccgcaacccccgcgaaggcagaaactacttcgacaggaagaagaacgacggcaagacctccatggaagccctgcgctgcgtcaaacgacgactgtccgacatcgtctaccgcaccatgctcgacgacgccctcagacacgaaaggacgggcccggtcggacactcggggacgtctctgtcatccagcgcggccgactcgaaccccgtcatcgacgcttcggatcagtcacttcccggacccgtcccgacagagactacgcccccactcaagaccgcctcttgacacagaagggagc

SEQ ID NO: 4803 - DNA, 1319 bp, unidentified
  source 1..1319: mol_type = unassigned DNA; note = element_74e4c09
  misc_feature 1: note = core
  misc_feature 2..64: note = LE
  misc_feature 65..1087: note = CDS
  misc_feature 1088..1319: note = RE
  misc_feature 1084..1313: note = bridgeRNA
taatgagatggtccgcctcacctaatctacacttagggcagactattaaacgaggataaccatcatgtctactattcatattcttggaatcgatataggaaaatctacctttcacctggttggccatgattcatctggccgagaagtttgtcgtaagaaattaagccgtcctaaaataattcagtttctcgctaaggcagaaagtacaactgttgcgatggagtcttgtggtggctctcattggttagcaagaaagtgcaaagagtttgggcataaagcactgctaatcccaccgcagtacgttagaccttatgttaaaacaaacaaaaacgatttcattgatgctgacgccatagctgaagcatcgacgcggccatctatgcgctttgtcagcgttaaaactgaagcatctcaagtaatatctgtcattcaacgaatacgttcaagctatttaaaagacagaacagcatgtatgtctcgaatcggatcaatgttattagagtttggaatggctttcccaaattcgcattccaagatgaaaacattattccaatggctggctgaacatggcgagccaataccaccgatgttgcttttagaattaagagaccaccatgactattacttgaagctaaatcagcttattttgacacaagataaaaaactcaaagatatagtgctcaatgatgaattagctcaactactcaaaacaattccgggggtgggagacctaacagctagtcgttgcctatctgatataagtaacgctagtgattttaaaaatggaagacacttggctgcatggattggtttggttccccgccaacactctacaggagggcaaaccaaactactgggtataagtaaacgagggaataaaggactacgagagttattcattcacggtgcaagagctgttcttgtaaggccagagaaagctgtagcgagctttgggaattggatattagaattattatcacgaaaaccatacaacgttgtagttgtcgcattagcgaataaactagcacgtatagcatggtcaatattttcaaccaaacaagtattcgaagttagagtgcaagcctgatttgcaaataatgataaagatgaaacaacggttagaccactggatttaagacctgtggggcgattcagcaactttttaagaatgctttggcgcttttgaggacaatctagcgcggatctcatcgtggagctggagcctaatatattggtaatgcaaaaagactccgaatacattagcgcaaaccaactacgttatcgatattattacttgcaatatcgaggcggaccataca

SEQ ID NO: 4804 - DNA, 1340 bp, unidentified
  source 1..1340: mol_type = unassigned DNA; note = element_74f6154
  misc_feature 1..2: note = core
  misc_feature 3..70: note = LE
  misc_feature 71..1093: note = CDS
  misc_feature 1094..1340: note = RE
  misc_feature 1072..1312: note = bridgeRNA
cgttggggtggacggccccgcggcatctggtgccaaggttcgctgtcagagctgaaccaggaggccgtccatgggcgagattaagcgcattgccatcgacacgtccaagtctgtcttcaccctgcacggggtggatgggcaggagcgtccgatcttgcggcgcaacctgcgccgccaggagctggtggcgttcttcgagagactgccgccgacggaggtggtgctggaggcatgcggtggctcgcatcattgggcgcgcacgctgcaggcgctcggccacacggtgcggctgatcccgccgcaatacgtcaagccgttcgtcaagcgcgccaagaacgaccgcaacgacgccgaggcgatcagcgaggcggcggcgcggccggagatgcgctgcgtgccgctcaagtcggccgagcggcaggcgcaggcgatgctgctgtcggtacgcgaactgctggtccgccagcgcacgcaactggtcaatgccctgcgcggccatgcggccgagttcggcctggtcgcaccgctcggcgacaaaggggccgcgcggctgctcgccgaagcggccggtgatgcctcgctgccgcatgcggcggccgcagcgttggcgctgctcgggcgcgagatcgcccggctcgcggcacggctggccgagatcgacgccaagctcattgcccagcacaaggcgatgccgaccagccggctgctggccggcatcccgggcgtggggccgatcggcgcgttgagcctgacgctgcgggtcgatcccgggcagttcaagtcgggccggcacttcgccagctggctcgggctggtgccgcgcgagcgctcgagcggcggcaagcagcgcatgggcggcatcagccgcgccggcgacgagcggctgcgccagctgctggtgctgggggcgaccgcggtcattcgccacgccaaaccagggcgcgccagcgtctcggcttggcttctgtctttgctgcagcgtcggccgcgcaagctcgcggcggtggcgctggccaacaagatggcccgcatcgcgtgggccatgatgacgagcggcgaggcgtatcggcggccatcgccggccgccgcctaagcccgcgcgtcgtcgccgcaggtgcagggcaagacgagagagatgctgatcggtcgacccgacgatccgcacaacccgcgtagggcgccggccgccaaggccgcttttccgtttgggagtggatcgcggaatccatctgggccagcggccgcgtcgccgcaccacaaaggccggacacacgaccgcaatcgcaccgcatcagaaaaactctcgccaaaccccttgcacccgacgggccgtccacaca

SEQ ID NO: 4805 - DNA, 1195 bp, unidentified
  source 1..1195: mol_type = unassigned DNA; note = element_74fb065
  misc_feature 1..2: note = core
  misc_feature 3..228: note = LE
  misc_feature 229..1170: note = CDS
  misc_feature 1171..1195: note = RE
  misc_feature 22..202: note = bridgeRNA
cttgtatggttttcctgcaggtccaaaatgggacctgtcagggtggaggggctcaatcgttttccgacctttcggtacggactgtgggagatttcgccccaccctcaccataaacgccaatagagaatccatcggcagagccaagccgctcggaccgacgatacgttgcaagccagcgtctggtgagccctgacaagtcaaagactactttagcttggaggacgcgccatgacaaaacctgtggaatatatcctggtgggtatcgatgtcagcaaggctgagctggtgatcgctcgcagtgactcccctcagatcgaagcgatcagcaactcccccagcgctattaagcgctggttgaagtcgttgccgcagggctcaaggatcgcgctggaagccaccggcatttatcatcggcaactggccacactggctcatgcagcagcatacccgctctatttactggatggttatcggctcagtcgttatcgcgatggagtaggtacccgagccaagaccgacccgtctgatgccagactgatcctgcgttatttgagcaacgagcttgaggagctcaagccttggatccctgcgcatgatgccttttatcgcatccaaagcctgatacgccgtcgagcctcgctggttcatacccgagtggcgttgagccagagcttgcaggacatacctgagttgaagcaggtgagaaaacagctggatacccatatccgtcgcgttgaactgctgattacccagcgcttgaaacaggccttggcagacgtaggctgggacgcagatgcaaaacgctgcatggacattgaaggcattggtgagctgagctcaatggcgctcgccaacaccttccaccgaggtcgcttcaagagcagtgacgccttcatcgcttacctggggatggatgtcaaagtccgagactctggcaagcaggtaggccgacgaaaactcaccaagaaaggcgacccggaattacgccgcctactctacaacgcggccatggctgcccgtaaaacgactgcctggaaggagctatacgagacctatctgtcacagggactcaagcccattcaggcgctaatcaagctggcaagaaagttggcgcgcattgcctttgccttgatgcagaatcaaacggtttatcggcccaaaaccttataaaagaggttggcatgaaccatagaat

SEQ ID NO: 4806 - DNA, 1424 bp, unidentified
  source 1..1424: mol_type = unassigned DNA; note = element_74fbc22
  misc_feature 1: note = core
  misc_feature 2..93: note = LE
  misc_feature 94..1122: note = CDS
  misc_feature 1123..1424: note = RE
  misc_feature 1181..1422: note = bridgeRNA
taatggtatggactcctcctcttccctacggcatcgcgatgtgccaaagtggaagaaagtaacaaccacttaaatgaagaagaggaatccaccatgaatattacgacaatcggtttagacattgcaaaaaacgtttttcaaatacacggcgtggatgcgaatggaaaagtcgcatttcgaaaacaacttaagcgtattcaggtgttgtcctttttcgccaacctgtcgccttgcttgatcggcttggaagcctgcggcggggcgcattactgggctcgggagttgctcaagttagggcatgatgcacggttaatcagtccacaattcgtcaaaccgtatgtcaaaggtaataaaaacgatgccaatgatgcggaagcaatctgcgaggcggtgggtcgcccgagcatgcgtttcgtaccggtaaaaagcattgagcaacaagacatccagatggtgcaccgggtgcgtagcggcttggtcaaggagcgcgcagcacaagccaaccgtttgcgtggtttattgagcgaatacgggatagtcatgggtcaaggtctgacgcagctacgcaagcgcctgccggagatattggaagatggcgagaatgtcttaacgatggcggcgcggcaaatcttcgcagacttgcaacaacaactcatcgaactggataaacaagtatccgtttacggcgagaaaatcctgacgctgcatcggtcaagcgcagtcagtaaaacgctgggcaccgtccccggcattgggccgatcaccgccacggcgctgctggcttcgctgggcgatggcaaggcttttgacaaggcgcggcaagttccggcttggctgggccttgttcctaggcaagattccagcagtggtaaaccgaaactgctgggtatcagcaaacacggcgacacctatttgcgcaccttattgatccacggggccagagcagtcgtcaaagcagcggcaaaaaaagacgacgtacagagccgttggatcaacgacttggtcaaacggcgcaacgccaatatcgcggcagtggcggtcgccaacaaaaatgcccgaatcgtctgggcactactgacccggacggagagctaccacgcccctataccagccggtagctaaacaagtaaaggatgcaccacaacccatttttaaacatttataaagaggttttaacagtcactcccccagttgtgaagcatttttcaatacgatggcaaacaggtcaaaccggtgttttcaggaatccgttcagcgcatgggccttcgaggtcggtaggatgatagagatgagaacacgcggaaatccatcagggccagaggcagcaaaggcctcattaacaggccggatatatggcagcaactgcgttgactgaccgtagcgatcaaagagaaaaagcttgcaaaacggaggagtccatata

SEQ ID NO: 4807 - DNA, 1456 bp, unidentified
  source 1..1456: mol_type = unassigned DNA; note = element_74fefbf
  misc_feature 1..2: note = core
  misc_feature 3..220: note = LE
  misc_feature 221..1435: note = CDS
  misc_feature 1436..1456: note = RE
  misc_feature 7..217: note = bridgeRNA
ctaatggctctcgagcagcggacagaacagactgctctccgagccaccggcgggtgagcactgacaggcccagggccgtgagccccacagctagatcgtgcccccgccggcaggcgaggagcggacggccggtgggatgtcgtgccgagcgagcactggtccattagggcgccgcgaactcctcctggctcgaagtcgtcgccgaggggaaggagggggcgtgatcttcgtggggatcgactggtccgagagccaccacgacgtgtgcgtgatggacgctcagggccaagtcctggcccaggggcgggtgccggacggcgtggaagggctgggccggctgcacgagatgatggctgcccacgccgaggagccctcggaggccgtgatcggcatcgagatcgaccgtgggctactggtcggcgcgctcgtggccgccggccatcgggtgcacgcggtgaacccgctgtccgtcgaccgctaccgcgatcgtcaccgcacctcgggggcgaagtccgacccgggcgacgcaagggtattggccgatctggttcggaccgaccggcacctgcaccggcaggtggcaggagacaccgagctggccgaggcggtgaaggtgctcgcccgggcacaccagggcctgatctggtctcgccagcgccatctcaaccagctccgaaacgtcctacgggagttctaccccggcgccctgcaaggcttcggaaccgatctcgcatcggccgaagcgttggcggtgcttgctgccgctcccacgccggctctgggccgctccctttctgctgctcgggcggcggcggcgctcaagcggggaggacgcaaacggagggtgaccgagcgcgccaccgagatccgacagtggctgcgagctccgcagctggaggcgcccgacgtgctggcgggagcctacggggaggtcgtgcgttccaccgtggcgatcgtcgccgagatgaccgggcagatccaggcgctcgcccgtgagctcgaggagcgttttgaaggacacccggacgccgagatccttcgcagtcttcccggactcggtctggtcctcggcgcccgggtcctcgcggagttcggggatgaccccgaccgctacgccgatcctaaggcccgcaagaactacgcgggcacctcgccgatcacgaaggcctccgggcgatccaaggtggccctggctcgctttgcccgcaaccgacgcctgggtgacgcgctgcagatgtgggcgttctgctcgctgaccacctcagcaggggctcgccgctactacgacgcccaccgcgccaagggcgagacccaccgacgggcgctacggtccctcgccaaccgctgggtggggatcctccatggctgcttggggcaccggcggctctactcggagcagatcgcctggcccacgatcgaacaggcggccgcttgacagcttcggcccgtgggatgt

SEQ ID NO: 4808 - DNA, 1342 bp, unidentified
  source 1..1342: mol_type = unassigned DNA; note = element_75004d6
  misc_feature 1: note = core
  misc_feature 2..76: note = LE
  misc_feature 77..1102: note = CDS
  misc_feature 1103..1342: note = RE
  misc_feature 1116..1339: note = bridgeRNA
taatgaaatggctatcccctcacaccctgtgatcgctctctaagctttcacagggtgtctttcggaggccattgccatgaacaacgtaactattgtcgccatcgatctgggaaaacatacctttcatttgcatgcccaagatgaccgtggtcacgagctctaccacaagaagttcaatcgtgcagggctggccaggcacctggccaaccttgaaccgtgcacggtggcgatggaggcctgtggcggcgcccactatatggcgcgagaagccgcaaaatgggggcatgtgcccaagctcatagccccacacctcgttcgtccctacgtaaaaagcaacaagaacgactttgccgatgccatggcgatttgcgaggcggcgagccgcccgaccatgcgttttgtgccccctaaaaccgaagcacaacaagcgctggccatgctcaattcggtacgtgactcctacatcaaggagcgcaccgccaccgtcaatcggattcacgccgctctgttggaagtcggcatcagcctttccccaggctttcacgcgatcaaagaactgccagcgctgctcgatgaatgctcattttctgtgctgatcaaacaaatcctgctggggctgcaggcgcacttcaactacctggacgagcaggtcaaggcactggacaagcaggttgaacgccaagcagctgaagatgatctggcttctcgcctgatgacgatgccttgtgtaggcccgatcacctccagcgtcctggctgcggagttgggcagcggtcagcagttcaagtgcggccgagactattcggcctcgatcgggttggtgcccaggcaatattccaccggcgacaagaccgtattgttaggtatcagcaaacgcggtgaccgcaatcagaggcggctgctcattcaatgcgcccgagtgtatctgatggggttggatcgacagacaggcgtgctggccgattgggtccgccagttactggctcgccatcattccaatcatgtggtctgcgccttggccaacaaattggcaagaattgcctggtcgatcgccgctcaccacgatgaattcaaagcagggccaagcgcaatgaacgcttaaccctgctgtcaccgagcaccacccattggttttgcgatgctggataacagatgacgtgaacggccaaccggcctgacgactaccctgggctcccacaaggctgaaaaagcctttccactatgaagggccgtcgggcgcgattctcatcgaggcgcagggtcgccacccagacgccggatagatgaaagcaagccaagcacgcatcgaaaacagtattgcagaaatggggatatccataga

SEQ ID NO: 4809 - DNA, 1402 bp, unidentified
  source 1..1402: mol_type = unassigned DNA; note = element_750377e
  misc_feature 1..2: note = core
  misc_feature 3..86: note = LE
  misc_feature 87..1127: note = CDS
  misc_feature 1128..1402: note = RE
  misc_feature 1145..1389: note = bridgeRNA
tgatgtggtggaacggccccgccaccacagcatcagagtgctaaaacgtggtcgtctcgcaacgccacaaagtagggagccgttccgtgaagcagattaccaccatcgggctagatttggccaagcaggtttttcaggtccacggcgccgacgccgagggcgcgccaatcatcaaccggaagctgcgtcgagcagaggtgctgcgctttttcgagaagctccctccgtgtctggttggcctggaggcttgcggcggttcgcattattgggcgcgcgagatcgcagcgctcggccacgacgtgcgcttgatcccaccaatctatgtgaaggcgtttgtgaagcgaggcaaaacagacgcagcggacgccgaggctatcagcgaggcggtaacacgcaagacaatgcgctttgttccggtcaaatcagccgatcagcaggcggctgcgatggtgttgaagacacgtgcccttttggtccgtcaacaaactcaggcgatcaacgcgctccgcgctcatttgtcggagtttggcgtcatcgcggccattggtgcgaagaaggtcgcgactttgatcgagaccgtgcgtgacgagaccgactctcgcctaccgaaagccgcgcgtttcgctttgacagaaatcgccaatcagatcgagggattgacgcggcagatcgacaagctcgaaagggagatcgtcgccgagacaaagcgcgacaaggacatgcggcggctggccacgattcctggcgtgggggcgatcatcgcagcctcaatcaaggcgcttgttccggatcctgacgggttcaagtccggccggcacttcgccgcctggttgggactgacgccgaagccccattcgagcggcggcaaggagcggctgggcaggatatcgaaaatgggcaatccaatgctccgctgcctgctcatcgtcggcgcgacttccgtcctgcggcgcgtgcggggcaacgccaatgcgccccaatggctggtcgccctcttggctcgacgtcccttcaaggtcggcgccgtcgcgctggccaacaagatagcgcggattatttgggcgcttcttaccaagggcggaacatatcggaatgctggcgtggcgaacggcgcagtgatcgcctgagccgaaagatgcccaggacgaactgaccggcgcgaaagccgggcagaggcgaggtgcatgacgcagacgatgactccacgggacgaaatcccgaggcgagagaggccagcgcgacaatgcgctcacagcgcgtttgattgattagccactcgcttcgcggacttcatcgaggccagcggttgaagaccgcgctaaaaggccggacatatgaccgcaccgttcccgcgtgatgaaccgtatgaaaaaagcacttgcctgcggggccgttccacata

SEQ ID NO: 4810 - DNA, 1252 bp, unidentified
  source 1..1252: mol_type = unassigned DNA; note = element_750bdba
  misc_feature 1..2: note = core
  misc_feature 3..244: note = LE
  misc_feature 245..1237: note = CDS
  misc_feature 1238..1252: note = RE
  misc_feature 14..180: note = bridgeRNA
cttgtatgttgacgccatatgagttggtagggttatgcaccagttaccggggaggccgcccgctcctggaagcagcatcgactgacttcgtgtgtagagaggctccccgcctcattgccaacctcgaggagtatccggaagtcagtctggctgaacttcgcatcacaaggtcgaggcgacatcaaatgcgaggtcggggaaccggtgactattgtgacccaacaccagcccaggggaaaagtcgatgagtgtgcatgtagggatcgatatcgccgccaaatcctttgacatggtcagccgcagggacggcaagccctcaaaggtcgagaccttccagcaaacaccccaagggcatgccaaggtggtgaagcggcttcaggctcttaagccagcctgcgtgatcatggaagcaacaggcatctactacttggacctcgccgtcaccttggtcgaggcaggccttccggtggccgtcatcaatccccggagcttccgccactttgctgaactgaagctcagtggcagcaagacagatggcttggatgcggcgctgcttgcggaatatggcgagcgtatgaccccccgacgctgggtgccgccaacccgaacccaactggcgctgcgcgacttgggacgccagatcaaccgtctcacggcagcacgtactcaagcaaagaaccgcttgcacgctctgcaggccaaaggtgcgacgctgccattgctgatcgacgatgagcaggaaggcattgagtggctggatcggcgcatccaacgccttacgcaagcggcgcagtccatcatcgccgaatgtgaaacattggcggcccatcatgccaacatgaccgctgccatcggcatcggcgacgccaccgccatcgcgttactggctgaattatgtgtcttgcccaagacgctgaaggctccgcaggtgagtcgctatgcaggcttagatgtgcgactcacgcagtccggcaccagcgtgaaccggcccgcgcggctcagcaaagccggcaatgcctatttacgatcggctttgtacatgccggtcatgagtgcagttcgacatgatccgcgggccaaggcgttctacgacgcgttggtggctcggggcaagaaaaggatccaggcccaatgtgcggtgatgcgcaagtacctcaccggcctgtgggcctgcatgcagaatcaaacgccattcgattcgtcgttgctcttcagcgacgagcatatgaatgcttgaccccaaacggagtat

SEQ ID NO: 4811 - DNA, 1519 bp, unidentified
  source 1..1519: mol_type = unassigned DNA; note = element_7512b74
  misc_feature 1..2: note = core
  misc_feature 3..216: note = LE
  misc_feature 217..1494: note = CDS
  misc_feature 1495..1519: note = RE
  misc_feature 16..180: note = bridgeRNA
ctgatggctctaccctcccctcacgagatcgccccgagggaaagcttcgtgcgcttgtcccacgaggactgaaatgagacggcttcccttggggccggtctcggaggcctgacgcccaagagggtgtcgtcccacgaggactggtccatcagcacggcgccgagcctccacgtccgagcaccatctggccttccccacgaggaagaagggagacccatgcttggagtagggatcgactgggccgaggagttccacctggtggccctgggccggcccggcgacggcgtgatcgaggtgagccgcgtggagcacacccccgctgccatcgacgccctcgttggcaggatcgcttccctggagcccgaccccgccgaggtccgggtggtgctcgagacccgtcacggcatgctggtggagcgcctcgtggacgccggctacgcggtggtgccggtgaacccggacctggtggcccgtcggcggggtccggccaagaagaaagacgacgccgaggacgcccgcatcgcctgcctgatcgccctggaccgcttcgaggtgctcaggcccctcgtcccccacggcgagatggccggggagctccgggctatcgccagagacgacctgcgggccggcagggacgagcggaggctcctcaaccgcctgagggccgacctcatcgccacgttccccgctgccctcgcgatcgccggggaggatctgggagcccccacgttcctgcgcttgctggaacgatggcccacccaggacgccctggccgaggcgtccacgcaagagctggaggccttcgcccgcgcggcacaccacgggtggccgacgcgcttcgccgagaaggtccacgccgccctcggtgccgagcacttcgtcccccgggactacctggtgagggccaaagcagacaccatccgcctgggggtcacccagctcctcgccatcggggcccagcggcgggcgtgggagcggcgcatgggcgagctcctgctcggcgcgccgagacgaggacgggacaagaagccccgagaggaagacatggggcaggcgttccctggcggcgagatctacctgagctttccgggcctcggtgaccgtctcgccgccagggtggccggtgaggtcggcgatcatcctgagcagttctccacgccgaactcgctgcaatgctacgccggccgggccccggtcacccgccgctccggcaagagcgagctggtggtggcgtgccggctcgcctgcaaccggttcctcgccgacgcggtgcaccagtgggcgttctgcagcctggagaagtccgcatgggcccgggagttctacgacgcccagcgggccaggggcaagggccacaacgccgcgctcagggccctcgggaaccgctggctcgaggtcctgtggcactgcctggacaggggcgtcccgtacgacgaggccctccacgtggccaaccgcaaccgggccctcggacgtgcgccgaaggccgcgtgaccggggggtggttgacagagggtgt

SEQ ID NO: 4812 - DNA, 1225 bp, unidentified
  source 1..1225: mol_type = unassigned DNA; note = element_7513884
  misc_feature 1..2: note = core
  misc_feature 3..238: note = LE
  misc_feature 239..1210: note = CDS
  misc_feature 1211..1225: note = RE
  misc_feature 6..209: note = bridgeRNA
cttgtatctcgacttttgcctccttgcaggccaaagttctcgactgatcatcgagggaaggccatgaagcagagccgctccttgggcatcgagcccgcattgtagatatgctcgggccttccaccctcactcgaacagttcgaacggtatctagtgcccgtccccgacgtgagcacgcattcacaaggttgaaccgagtgctggatgatccaattcttatcgtttgaaggagaagatcatgtccgttgttgttggtgtcgatgtcgccaagcgatcgtttgacattgccaccccgcttgcaaacggtaaggtccgcaccaaggccagattggccaatgattcaaaaggcttcgaacaattcgaggcctggctgcaaacccacaccgagcctggcgcctgggtggtgatggaagccacgggcacttatcacgaggcgctggccgagtatctgcatgcccgccactatcgggtttgcatcgtcaacccagcggtaatcgcgaagtttgccgaatttgagctgcgccgcgtcaagaccgacaaagccgatgccaagaccattgctgcctatgctcagcacaagggcgactcgctgcgccagtgggaacctgagccagaagctcagcgacgcctgcgagctctggttcgccgcctggacgacttgaaggaaatgcggcagatggagcagaaccgtctggacgtggcgccgctgaccgtacaagcatcgatcaaggccgtgatcgggcatatcaccgatgaaatggagaagacgcgcaaagccatcgagcagaccatcgatgatgatccggatctgcgtcggcgacgcgacctgatcacctccatcgacggcctgggcgaaaccacggcagccttgctgcttgccgagctgggcgatccgctgaagtacgaaagcccctctgccatcgttgcgttcgccggactgaatccgatggttcaccagtcaggggagaaggttggtcaaacgaccatctcgcgcgtgggctcgtccaggttacgggcaggcctgttcatggccggtacggtctcgatgcgcttcaacccggtcatcaaggcactggcagagcggctgaacactcgacgcaaagcgtacaaacagatcgtctgtgcggccatgcgcaagctgctgcacctggtatatggcgtggtgaaatccgataggccgttcgaccctcatatcgcgcttgcgaagtgaggatcaagacggtat

SEQ ID NO: 4813 - DNA, 1425 bp, unidentified
  source 1..1425: mol_type = unassigned DNA; note = element_751658e
  misc_feature 1: note = core
  misc_feature 2..125: note = LE
  misc_feature 126..1145: note = CDS
  misc_feature 1146..1425: note = RE
  misc_feature 1186..1425: note = bridgeRNA
gaatgaaatgaacgcgtcccaccccgtggtcgagtgagaggaaaaggtggaccctcacgggccgacggcatcgaagtgcccagatggaaaatgcacgcattgtccaggcaaccggaggatccacgatgaacagtatcgctgtgggcgtcgacatcgccaagcaagtgtttcaggtgcattacatcgacccggaaacgggcgagatcgtgaacaagccgatcaggcgggctaagtttctggagcattttgccaaccgggcgagatgcctgatcggaatggaagcctgcggcggggcacaccactgggcccgacaactgatgcgattgggtcacgaagtcagattgatgccagcagcgttcgtaaaggcgttcaacatccgcaataagaacgatgccgcggatgcacgagcgatttggctggcagtgcagcagccgggcaagccggtggcggtgaagacagaaatgcagcaggcgatgctggcgcttcaccggatgcgtgagcagttggtgaaattccgcacgatgcagatcaacgggctccgcagactgatggcggaatatggcgaggtaatgagtcggggtcgggcgaagctggatgcggagattccggcggcgttggggcgacttgcagagcgtctgcctgctgcactgatcgacacgctgcgcgagcagtggaacgggttggtcagaatcgacgaacaagtcgccgagatcgaacgacgtatgagggagtggcaaaaggatgatcgcgcagtgaaggcgatcagtaggattcccggtgtcgtgctgctcacggcaacggcggcagtcgcgatgatgggcaatgctaaagcgttccggtccggacgtgagtttgccgcatgggccggactggtacccaagcaaaccggatcgggcggcaaggtgaacttgcacgggatcagcaaacgcggcgatacatacctgcgcacgctgctgattcacggggcacgtagcgtcttgtctcacgcgaacgatcccggcccttgggtcgagcagatgaaaaaacgtcggccactgaatgtggtggtcgtggcattggccaacaagatagcaagaacaatttgggccgtactggcccatgaccggcagtatcaaaaagtctacgtgaacgtaaaacccatctgaacgtgcaccgccggcgtggatgattgatgtttggcgcagggtgaatgtcgaaaggttgcgcagcaatcgagtgtgatgacaagccaggtaggaccgggactcgcaaaacctgaataaagtgaagagctgcagagctcgctaggagaatgaggtgcgagtcagcgaatttcataggggcccgcagcagttgtaccgtctgcactgaggccggatatagagccgcagcccatcctgtctgccagacacccgaaatctgttgcaaacgggacgcgttcatata

SEQ ID NO: 4814 - DNA, 1539 bp, unidentified
  source 1..1539: mol_type = unassigned DNA; note = element_7525de3
  misc_feature 1..2: note = core
  misc_feature 3..254: note = LE
  misc_feature 255..1433: note = CDS
  misc_feature 1434..1539: note = RE
  misc_feature 3..235: note = bridgeRNA
cttgtataatgaacatgtagtaaaaattcattatacttttcctttcttaataatttttactatacttaacataagacgctgtggattagttttttcacctatagctagactatttcaattgaggatataaccacagctttatgcttatttgttaattagttagataacgcatgacgttttatatagagcaaggatacatttagcatgaagctacgtggagcatagcggactaaattaaaaaaggagttgttcttatgatttatattggcattgatgtagctaaagctaaacacgattgctgcattattgattcagatggtgttattattaatgattctttacgtatatccaattcacgtgaaggttttgaattactttattcttcaatactttccgtcctacctaacaaggatatttctaacgtaaaaataggacttgaatcaacaggtcattatagcactaatctccaaaactatttgtatgctaaaggctttcacctatccattctcaatcctttagctacaaatcttttccgtaaggctcaaacccttaggaaaactaaaaccgataaaacggatgcactagttattgctaaaatgcttttctctgatgatacaaaatcctattcacctgtatcatatcaaattcaagagctaaagtcactaactagacatagatatcgcttaattggttatagatctaggcttaaactatcaattactagacttatagatataatttttcccgaattaccaaagtatgtttggtctattcatcaagtctctgtttatgctctcctatcggagttaccgagcccgaaggaaatatccaattgtcatttaactaaattgacaaaccttctgactaaatccactaaaggcaaatatagtagagcaaaagctattgaaataaaggaagtagctagcaattctatcggaactagcacacgttctttatcttttgaacttcagcaaattattaggttaattcgatctgttcaagctgaaattgatgctttagataagcaaataaaggatgttgttatagaaatagactctcctttaatgagtattcctggaatctcttatacactagcctcaataattctagctgaaattggagatatagatagattcactgatccagcaaagcttttagctttttcaggacttgatccatcaacatatcaatccggaaaatataatgctacacatacacctatggttaaacgtggttctacctacttacgttgggctatattaacagcatctagaactgtttctatgcgtgattacacttttggggattatcttgcaaagaagcaaagtgaaggcaagcattactatattgctatgagccatgtagcaaaaaaactaatacgtgttattttttatcttttaaaaaccaatacttcatttgtttcacaaatttaatttcttaattttccaagcaatgtgattgctttatttgtcatgcacttttttattgactaaaaaatataatttttttattaacttatattgacttcatatagttagt

SEQ ID NO: 4815 - DNA, 1497 bp, unidentified
  source 1..1497: mol_type = unassigned DNA; note = element_7526066
  misc_feature 1..2: note = core
  misc_feature 3..134: note = LE
  misc_feature 135..1166: note = CDS
  misc_feature 1167..1497: note = RE
  misc_feature 1197..1381: note = bridgeRNA
acatggggtaatcgcggcgcgattgtccaagctccatttataagatgatggctggcgtgggtggttgcccccggtaagatggaaattgcgggctcacgattggcaccgggcccaaacatcaagtggaggcaaccatggaccaatatatagggctggacgtttcattgaaagacaccgcgatctcgatccgggaggacgggaagcggatctggcgggggaagtgcccttcggatccaaaacttctggcagagatgatccgcaagcatgcgccgcacgccaggcgcgtcgtatttgagacggggccgttgtcgacgtggttctatcacgccctgacagccgaggggatgccggcgatctgcattgaagcgcggcacgcgcaaaaggtattggacgagacgctcaacaaaaccgatggcaatgatgcagatggcttggcgcaactggccgaagcgggcttctacaaggtcgttcgagtaaagtcatttgacagcatgctgacgcgcacgctggtcggggcccgcaaccagctcctgaacatctcaacccaacttagcaaccaaatccgcggcctgatgaagacattcggtcttatcgtccccaaaggaactggtcgggtgtttgatggcaatgtgagagagcttttggctggtaataacgaccttgcacggatcatattgcctctgcttgaggcgtggcgcgacatacgcaaacgcgcggccgatcttgatcgccagttgctcgcagtggcacggcagaaccagtctacgaagcttctgatgacgatcccaggcatcggcgccgtcacggctgtgtcctacatcgcagcgattgaagatccagaaaacttccgaacgtcgcgctcggtgggagcctggctcgggctaacaacgcggcgctaccagtcaggtgaggttgactataatggccatatctcgcgaagaggtgataatcacctgcgggggttgctttatgaagcggcgacagtgcttctcacgcgcgccagtgtcaggaccgagagcagcctcaagacctgggggcttaagctgcgtgagcggttgggctttaagcgcgctgcggtggcagtcgcccggaagcttgcggtcattatgcacagcatgctcaggacaggagaagtcttcaacgcatcggttggcgccaccgcataagcgaccgccagccttcttccctcagaacgtcaaacctcgtttgacgcactgagcgtccctgccgcggacgtcggttggatcattccgctggtgagtggctgcagctcgttcgagactgcgcgctacacataggaaggtcctacctgcgaagacccatcatacggcgacattttgtcgaccgcgcagacaaccctgctcccggcatccggatagctctgaatcagacaaacgacgctgagatgcaaccccatcgaactccgctgtcgcccctcgcaacggcgaagagagcgaatggccaaagcaaccttgactaaccggatgcgaatagaca

SEQ ID NO: 4816 - DNA, 1416 bp, unidentified
  source 1..1416: mol_type = unassigned DNA; note = element_7527887
  misc_feature 1..2: note = core
  misc_feature 3..118: note = LE
  misc_feature 119..1165: note = CDS
  misc_feature 1166..1416: note = RE
  misc_feature 1182..1411: note = bridgeRNA
agatgccgtaatgggccggcaccgggatcggctactgacctccggcgcgggtctgttcagagtggtggcgtgacgtgcggacccgggtggttcgggtccggccatcaggaggacggccatggaacactacgtcgggatcgacgtgtcgctggaactgagtagcctgtgcgtgctcgatgtggccggaaaggtgatccgggaagccaaggtcgcgagcgagccagaggcgctggtggcttttctgcgcgggcttgatctgccgatcgcgcgtgtcggtctggaggcgggtccgctttctcagtggctctatgacgggctgcacgaggcaggtctcgggccagtgctgcttgagacgcggcacgtcaaggcggcgctgtccgcaatggcggtcaagaccgatcggcgcgacgcccgcgggatcgcgcagctgctgcacatggggtggtatcggccggtgcatcgcaagtcggtgtcctctcaggagatccgggcgctgctcggcgcgcgcaagcagctgcagatcaaggtcatcgacctggagcagaccgtgcgcgggctgctgcgcggcttcgggctgaaggtcggcgacgtgagccgcggcaagctgccggcgcgcatccgggagctggccgccgggcacttcatgctggagaagatcgtcgagccgttgctggcggcgcgcgaggcgatgtggcgcgagttcgccaggctgcatcgcgaggtgctggtgatcgtcaaggaggatcaggtctgccgccggctgatgacggtgcccggggtaggcgcgttggtgtcgctgacctaccgggcgggggtggacgaccccgggcggtttgcgaagtccaagtcggtcggcgccttctttggcctgacgcccagacgataccagtcgggcgagaccgacgtcaccggttcgatcaccaaggtcggagatgctgccgtgcgcacggcgctgcacgacgcggccaacgcgctgctgacacgcgcgacgcggttcagcacgctcaagcgctgggcgttggacgtcgccaagcggcggggcatgcggagggcgaaggtggcgctggcgcgcaagcttgccaccgtgctgcatcgcatgtgggcggacgggacggagttcgtctggggcaaggacccggcggcggcggcggcaccggcggcataaccgcaaggaggcataaggttcggggcggggccaggcggcccagctcccacgaagtcccttcgccgggacgcggagacggtaaggcaggttccgttgcagtggccgggagcgatcccgtatcacgctgggtagattgctccgccggctccctcatgaagcatcatgtggcggccttgcgccgatcacgggcagaagcacgaaaccggcgactggatgcactctgagcttgacgaccaagggcccattacaga

SEQ ID NO: 4817 - DNA, 1517 bp, unidentified
  source 1..1517: mol_type = unassigned DNA; note = element_7529ed8
  misc_feature 1..4: note = core
  misc_feature 5..250: note = LE
  misc_feature 251..1492: note = CDS
  misc_feature 1493..1517: note = RE
  misc_feature 29..213: note = bridgeRNA
ctcactggtgcaccatcctggtgtcggtgatccgagagggattgctgatgcacccctggtccccgtcgggccatcgccacgttcgctcgaccttgaaggtccacgatgagttttgcgaggcccggcggcccaggacttccagaccggctacagggctatgcgccgatgagcgccgatcagtgagcgaccggctgcgaagtcccgggaccaccgggtgttcccccactgctgcaacagcgaagaaacaactatgagtgtgaccctgcacagccgtgcgtcgcgagtctgcgcgggcgtggactgggccaaagacgaccacgcgatcgccattatcgactcggaaggcaaagtcatggaccggttcgccgtcaaccacgacgctgcgggtctgaagtctctggtgcgccgactgctcaccgccggcgtgagcgaggtcggcatcgaacgcggtgatggacccatcgtcgaagccctgctccaggccgagctcaccgtgttggtgatcccacccggtcagctgaaaaacctccgctcccgctacggatcggccgggaacaaagacgaccgctacgacgcctacatcctggccgacgtcgtgcgcaccgaccgccaccgtctgcgccccttggtgcgcgacaccacagccaccaccgccctgcgcggcacggtccgcgcccgccgcgacctggtcgagcaccgggtcgccgccgcgaaccagctgcgagcccacctgcagatcgtgttccccgccgccgcaaaccttttcgccgccatcgactccgcgatcagcctcacgttcctcgaacggttcaccacccaaagcaaagccgactggctctcgcccaagcgcctgagcacctggctgtcctcggtgtcctacaccgggcgcaccacccccgacgtgctgcacacccatctgctcgctgcaccccgaggaaccaccagtaccgacgccgcaaaccacaccaagacgaccctcgcgttcgtcgccatcctgcgagcactgaacacccagatccaggccctcgctaccagcatcggcgagcagctcgccatccaccccgacgcacacatcatcacctccctgccccgctcgggaaccgtgcgcgcggcacgcctgctcgccgagatcggcgacgcccgcggccgcttccccaccgccgactcgctggcctgcctcgccggcgtcgccccctcgacccgccagtccggcaaggtcaaagccgtcaccttccgctggggcgccaacagagaactccgcgacgccctctgcgacttcgccggcgactcccgccacgccaacccctgggccgcggacctctacaccaacgcccgagcccgcggacacgaccacccccacgccgtccgaatcctcggccgagcctggatacacatcatctggcgcgcctggcaggacaacaccgccaccgaccccaccaagcacagagccctccaaacactgctcaacaccaccaccgaaaaagccgcctaaaccaccccgggttgacacagggcaa

SEQ ID NO: 4818 - DNA, 1558 bp, unidentified
  source 1..1558: mol_type = unassigned DNA; note = element_752a18d
  misc_feature 1..3: note = core
  misc_feature 4..238: note = LE
  misc_feature 239..1186: note = CDS
  misc_feature 1187..1558: note = RE
  misc_feature 73..234: note = bridgeRNA
aatcacccatggcctggcggccaccgtcggtcatgaaaatcaggtgaagtcagagtgtatatttggtaaaattgtgccgtggatcagaggtcgattcaatattggtgaaacatcccgaaacctaatctgacccactgcaacgacgaggatcgccgagtgttgccacgagcacgtgtataaaattttatctctttaggttgcatgatccacgcatacttttggcttggaggtagggaatatggatgccattcgtgaacgttgtgccgggttggatattcatcaggagacagtggtggtttgtctgctgagtggccccctggagaagagacccaggtcggtgaccgagacgtttggaaccacaacccgtgagcttttgagattacaggagtggctggagcagcagggatgtaccgagattgccatggaaagtacaggggtcttttggaaacccgtatggaacattctggagagcacctgtacgatcacgctggccaacccgcatcgtatccgcaatatgcccgggaagaagactgacgtcaaggatgccgagtggatcgccaagctccaccgttgtggcttgattgagggaagctttgtcccggacgagcccatccgcgatttgcgtgaccttacccggtatctgcgcaaacttaagcaaaacgcgacgcaagaaaagaaccggattcacaaaattctacaagatgccaacattaaactgaccacgtatgtctccgatctttttggcgtttccgggcgtgcgctactggactcgatggtgaatggcgaagtgctggatgtgcatgagatccgcaagctggttcatacccggctgaagatgaaggtgccttcccttgtggaggcattgaacggccgactgcgcctgcatcaccggaagatgatccggcgtcatttggaacatttgcagtatctggagagtgaaatccagacgttggaagctgaaattgaggaactggtgcagccatacatgaaggaaattgaactgctggataccgttccaggcgtgagcaccgatgcggcggcgagcatcgtggcggaactgggtaccgacatgtctccttttccaagcgaagcccacctggcctcttgggtgggggtgtgtccagccaaccatgagagtgccggtaaaaaaaaagtaaaaagaacaaacgcgggaaccgaggtctgaaagccgtactcgtccagtgtgcttgggcggcgagtaagtccaagaataaccggctttccgccatgtacagtcggatcgtgaaacgggcaggaaaacagaaagccatcatcgcattagcccatgcgatgatccgaatcatgtatgtgatgcttcgggataaagtcccctatacagagctcgggacggaatatctgaacaccccagagcagaccgcaaactacctgattaaaaaacttcaaaagctaggctaccaagtggaactgacgcctaccacatgataaccactttttaaaaaaatgaagttccgatttagggaatctttaaagcgaaactcactttcgagctgtgaagcggaaaagttattttcgtata

SEQ ID NO: 4819 - DNA, 1379 bp, unidentified
  source 1..1379: mol_type = unassigned DNA; note = element_753e1a3
  misc_feature 1..2: note = core
  misc_feature 3..88: note = LE
  misc_feature 89..1108: note = CDS
  misc_feature 1109..1379: note = RE
  misc_feature 1152..1366: note = bridgeRNA
tgatggggtggatgccccctgctccgcggcatcgaggtgccatagcgtggttggcgctgagcctgaccacgaaggagaggaggcatccatggagaaggttacgacagtcggcctcgacctggccaagagcgttttccaggtgcatggggttaatgcggcaggcggggtggtagtgcggcgcaagctccgccggtcagccctgctggacttcttcgcggccctgccacccacgctcgtcggcatggaggcctgtgggggagcgcactattgggcgcgcgagctcacccgcctcggccacacggtccggctcatgccgccggcttacgtgaagccatacgtcaagcggggcaagaccgacgcagcagacgccgaggcgatctgcgaggcggtgacacgtccgaccatgcgctttgtgccggtcaagaccgaggcccagcaggcgagcctggtggagctcaaggtccgcgacatgctggtgcgccagcgcacccagaccatcaacgcattgcgctctcatcttgccgagtacggcatcgtggcggcgcaggggcgcaaggtcgctgagctgatcgcggtagtccgcgacggcgacgatgcccggctgccccacttggcacgcgaggcgctgggcgaactggtggcgcagatcgaggccctggaggagcgcattgaacggcttgaccgccgcatggtccgccatgcgcgagaggacgagacggctcggcggctggccagcatccccggcgttagggcggtcggcgcgacagccctggtcgcgatggtgcctaatccacacggctttgcctcagcgcggcacttcgcggcatcgcttggcctgaccccgcagccgcactcgagcggcggcaaggagcgcctgggccggatctcccggcagcgcaatgccatgttgcgccggctcctggtcctcggcgccaccagccgcctgcgctatgcccggcgcaacccggaggcggcggactgggccacgcgcttgctggcgcgacggccctttaaggtcgtggccgtggcgctggccaacaagatggcccggatcgcgtgggccttgctggcccggggagggacctacacaacaaccgcgaccgcctaggcggtcgcgttcgagctcgccgggcgccgcgcccggcgggggccaaggtgctgaaacgacgatgacagcgagaggccggtgagccggtggcgagagaggccgtttatcgcagtgcgcccccaagcgcgttcacctgattgcccctcgttccgcgcagctcatcagggcccgcggccaggccggccgcatcagaggccgtacacatgaccgcacccgtgctctcggtgccagagttgcagattcgccttgacccgcagggggcatccacaca

SEQ ID NO: 4820 - DNA, 1488 bp, unidentified
  source 1..1488: mol_type = unassigned DNA; note = element_753e7df
  misc_feature 1..2: note = core
  misc_feature 3..238: note = LE
  misc_feature 239..1468: note = CDS
  misc_feature 1469..1488: note = RE
  misc_feature 7..235: note = bridgeRNA
ctaatgggactgcaccggttccgtctgtgatggggttggtgtccgagccgccagtggtcgagcactgcaagccgcaggcccgatggtcgaggtctacgcctagatcgtgccgccgctggttgctggggaggtgagacgaccggtgggatgtcgtgccgtcgagcactgatccattagcgcgtgcgcgatccttcccgagggctctgctttgtgatcgccagccagggagggtgcggggttgctgttcatcggggatgactgggccgaggcccatcacgacatcgagatccaggacgagaccggccggcgcctcgtccggcgccggctgcccgagggcgtggccgggatcgccgagctgcacgtcctgatcgccgatcatctcggcgacgccgacgagccgtcggtggtggtggtcgggatcgagaccgaccgcgggccgtgggtcggggcgctcgtcgcggccggctaccaggtctacgcgatcaacccgctgtccgcggcccggtaccgggaacggcacgtcacctcgcgggcgaaaagcgacgccggcgacgcgaaggtcctcgcggacctggtccgcaccgaccgggacaaccatcgacccatcgccggagacagcgagctggccgaggcggtgaaagtcctcgcccgcacacatcagaacctgatctggtcgcggcagcggcaggcgaacctgctgcgctccacgctgcgggagttctacccggccgcgctggccgtgttctccggtgagctcgccagccgcgacgccctggccgtcctggagatcgcccccaccccggcgaggggccggggactgtcgacggcgcggatcgtctccgcgctgcgccgcgccggccgccagcgcaacctcgacaagcgcgccggggagatccgcgacgccctacgcagcgaacaactccaagccgccccgctcgtcgccgacgcctacggccacaccgtgaccgccctcgtcgccgtcctcgcgaccctcgccgcccagatcgagcaggtcgaaagcgagctgggctcgtgttttgaccagcacccggacgcgaagatcctgctctcccagccaggactgggaccagttctggccgcccgggtgctcgccgagttcggggacgacccgacccgctacgccgacgccaaggcacgcaagaactacgccggcaccgccccgatcacccgcgcctccggcacccgcagagtcgtgctcgcccgcgtcgccaccaacaaacggctgcgcgatgccctctacctgcaggcattcacggcgctgaacacctcgccaggcgcgcgggcctactacgacgcccaccgcgcccgcggcgccacccaccaccaggcactacgcaccctcgcaaaccggctcgtcggcatcctccacggctgcctgcgccaccacaccccctacgacgaagccaccgcctggcccagccacagcgaacagaagatcgccgcttgacagttagaaccgtgggatgt

SEQ ID NO: 4821 - DNA, 1419 bp, unidentified
  source 1..1419: mol_type = unassigned DNA; note = element_753f3ca
  misc_feature 1..2: note = core
  misc_feature 3..354: note = LE
  misc_feature 355..1275: note = CDS
  misc_feature 1276..1419: note = RE
  misc_feature 50..329: note = bridgeRNA
ctcgtatagtatctttagataccattattcttatataaaatttaatagttactttgttcaataggcttcattaaacccatgatataattgtcccagtgtcaatcaggcaaaagttctagtcactcctgttgaactcccagagagttacttcaccaaaagtctgttcccctgacatggaagttagcttcaaaccgctggctgtttgcttaagtgattggacaaccatcttgcagtgtggtttcgcatctgtccatcttaagctggattcttatatgcgagggtgttgatgctccatggtcatgggtttaccaagccgattgaacactttaatcccaaacgaaagaaggtgattttatgaacccactttacgtcggtattgatgtgagcagcaaaaacaatgtcatttatctgatgctccctaatggtgacaagcatagttctttttcacttgcaaactcacatgatggatctactcaacttgtaaaacgaatttttacagcaatgacttctaacaacatcgactccgttctgattggactggaagcaacttctgtctatgctaccatgacgcaggaaaaggtattttccgataccttcagcaccaccgcccttgctgtctacgaaaaatttgaatccgcagaaacactggcaaagatggacttacaagaactgactgcatttattatggaaaaagggaagaaccgtttccctgatccggatgcagtagccaaagccctccagaaagctgccagaagctcctatcgtttgcctaaaaccgtgaatgattctgtaaatcaggtgcttgctatctccataacatcaatcagagcactggaatcccaaatcaaagcatttgataaagctatcacaaagcaaatggaacttttgcccaatgttttgatatccattcccggtattggtccggtactttctgctggaattatggctgagatcggagacatcaaccgttttcaaaatcaggctgcccttgctaaatatgcaggtcttgcatggcagcagcaccaatcaggcgactttgaagcccagacaacaagaatgattcattccggcaaccgattcttaaagtattatctgtgtgaagcagcattttctcttgtaagatgcgacaaggaatacagccgcttttaccacctcaaatataaagaggtaaacagatttcaacacaaacgtgccctcgcattaactgctcgtaaatttgtgcggttagtctttgcactgctcaaagacaatcgtttatatcgtccggcagaatagatttttctatctgccgatacacgaaccctgctcatttttcaaaaatacgatttgcagggcttaggtgggtgtttttgtctttttgaaacatagctgaaagtatatctttcaatattgtttttatcttgacatatcaccgctgga

SEQ ID NO: 4822 - DNA, 1177 bp, unidentified
  source 1..1177: mol_type = unassigned DNA; note = element_7542186
  misc_feature 1..2: note = core
  misc_feature 3..206: note = LE
  misc_feature 207..1154: note = CDS
  misc_feature 1155..1177: note = RE
  misc_feature 3..182: note = bridgeRNA
cttgtatggtaggacttgaagggaggaggagggacaaggttcgcttctgactgttaggcgcagtacagaccgtgggagatttcgcccctcctcctttcacccaagcgccgataaagaatgcatctggcctagaccgacgataggaacaagcctgcgcctctgggtgaacccttcaagtgttcaaaccttagcccggaggtttttcaatggcaatgcccgtcgccatccaccaaccgatcgtaggtgtagatgtcgccaaggacgagttggtgatgtatcacgccgagtcagatcaactcgagacgatccctaacaccaaagctgcgatcaagaaatggctcaaggccttgtccacacgggtggatattgctattgaggcgaccaacatctatcacttggagttcgccgatctggctcacaaggccggctgcttgatctatatggtcggtggttatgagctcagtcactaccgcaaaggtgtgaacgttcgcgccaagaccgatgctctggatgctcgcctattggcccgttacctgaagaacgaaggacaagagctaaaaccctggaggccgccatcgcccttgtatcgcaggctcgtaagccttttccggcgtcgtgcggctgtggttcaagcccgtgtcagtctgagccaagcctgggcgaatgagccgctgctcaaagccgcgttcaagcgccaagtaagcgccatgcaaaggctggaaacgctggtcgaacaaaagatccaggaagagctcaaggaagcgggcttgctggggcagctcaagcgctgcatgaaagtcgaaggtattggcctgttgaccggcgcgcgattgatcgcatcgtttcagcgtggagatttccgaaatgccgatgctttcatcgcgtttctggggttggacctgcgtatagcgcaatcaggacgaaaaaaggggcgcagttgcctgaccaagcgaggagatccggaggttcgccgcttgctccacaacgctgcaatgtcggcaaggcgcaccgagagatggaagggggtttatgaggcgttactggcccgagggctgagtacgacccaagccatggtggcgttgtcgcgcaagcttgcccgagtggtattcgctctgctgaaaagtcagagtgaataccagccaaaaagcgtttaggggatattcatgcaccatagaat

SEQ ID NO: 4823 - DNA, 1421 bp, unidentified
  source 1..1421: mol_type = unassigned DNA; note = element_7544c5c
  misc_feature 1..4: note = core
  misc_feature 5..201: note = LE
  misc_feature 202..1407: note = CDS
  misc_feature 1408..1421: note = RE
  misc_feature 4..174: note = bridgeRNA
ctccgtaagttgttaggcggcccgggagggccgggtgtggctgatggggtcttgcctgttgtggctccgaaggagtggccgcccggctctccggggcgccccgacctctgattgagatgtgcggatcggtcgctgtttacggagatgacggcggggtgttccacgggccggacgttgtcggtgccgggtcgaaggacagacgtggaacagccagaacgcgctcgggtgtgggtcggtgtggatgccggcaagggacatcactgggcggcggcggtcgatgggaccggcgcgcaggtgtggtcgaagaagatcgccaatgacgagtcggcgatcctggacgcgatcggtgaggcgttcgctctggctgaggccgtcgggtgggcggtggacatcgccgggacgtcctcggcgctgctgctggccctgttggccgcgcacggcgcccggccggtgtacgtgcccggccggacggtgcaccggatgtcgggcgcctacaccggcgaggccaagaccgatgcccgcgacgcatacgtgatcgccgagacctcccggctgcgccgggacttcaccgcgatcgacgtgcccgcccagctcgccgccgacctggcgctgttgaccacgcaccgggccgacctggtcgccgaccgggtccgcctggtcaaccggctgcgggacgtgctgaccggcgtgttcccggcgctggagcgagcgttcgactactccgctcacaagggcgcactggtgctgctgaccggctaccagaccccggccgcgctgcgccggcgcggcccggccaggctggaggcgtggctgcgcaagcgtggtgtccggggcgccgggcaggtcgccgcgaccgcgcttgcggccgcgcacgcccagcacaccaccctgcccggcgaggccgtggcggcccagatcatcgccgacctggccaccgagctgctcaccctggacgaccggctcaaacgcctcgacgcccagatcaccgagaccttccgcggccacccgcaggccgagatcatcgaatcgatgcccggcatcggcccgatcctgggcgccgagttcgtcgtcgcggccggtgacctggccgcctacgccgacgccggacggctcgcctcggcggccgggctggtgcccgtgccccgcgactcgggccgccgcaccggcaacctgcaccggcctaagcgctacagccgacgcctgcgacgcgtgttctacatgtccgcccagagcagcatcatcaagcccggccccaaccgcgacttctacctcaaaaaacgcggccagggcctcaaacacacccaagccgtcatcgccctggcccgacgacgcgtcgacgtcctgtgggccctgctgcgtgacgggcgactgttcacccccacccagccggtcacgcaggcggcttgacatcctcattgaga

SEQ ID NO: 4824 - DNA, 1345 bp, unidentified
  source 1..1345: mol_type = unassigned DNA; note = element_7546ef6
  misc_feature 1..2: note = core
  misc_feature 3..71: note = LE
  misc_feature 72..1076: note = CDS
  misc_feature 1077..1345: note = RE
  misc_feature 1114..1343: note = bridgeRNA
ttaatgagatggtccccccccaccctgtgagcgttacgctgacagggtgttttattttagagggaaccatcatgcaaaacgttgcacttattggtatcgatctcggtaaacattcttttcatattcactgccaggacaaacagggcaaccctctgttacgtaagaaattctcccgcactcaacttatccattttctcgcaacatgcacaccttcaaccgtggcattcgaatcctgcgcgggtgcacatttcatggcccggaccatcggtaagctggggcatcaggttaagctgatttcaccgcagtttgttcgtccttttgttaaaagcaataaaaacgattttattgatgctgaagccatctgcgaggcggcgtcacgtccttccatgcgcttcgtgactccccggacagaagaccagcaggctatggctgccctgcaccgggtcagggactcactaatacgggaacgggtcaaaaccaccaaccagatacatgcctttttactggagttcggcgtcagcctgccgcgcggaattaccgtgatacgacgtctggctgccgtgctggaagaaaacgactttccggcatacctggcacgcctgttgaacaggttgcacagccattatgtttatctcagcggagaaataggggaagtcgataaggagctgaaaaaccatctggcagaggatgaaaccgcacagcgcctgctgactatcccgggtgtggggccggtaacggcaagtctgttagccacacggcagggagacggtaaaaactatgccagcagccgtgattttgcagcatcaaccgtgcgggttccccggcagtacagtacgggtgggaaaacgacactgatgggcatcagcaagcggggtgacaagaatctgcgacggctgctggtgcagtgtgccagggtttttatgcagcggctggagcacaacccagggcgtctggcagagtgggttaaaaggcagcttgccagccatcattcaaacgttgtggcatgcgcgctggcgaacaagctggcccggatagtgtgggcagttacggcccatcaggcggtgttcagtaaataaaagagccaacgagaaacctcgttagctcagttaattaacacgttactttctggttttgcgacgacagataattgatgacatgaacggcatatcggcctgctgatgaatctgacataaaaaatggctccgggaagccgacggatttttaaggttcggcaggcgcggaactcatcgtggcgcgggcataactgtccaccagacgccgaatagatttacgcaagtttatcataaatcaaaatctgtgttgcaaaaacgggggtgaccataga

SEQ ID NO: 4825 - DNA, 1338 bp, unidentified
  source 1..1338: mol_type = unassigned DNA; note = element_7548491
  misc_feature 1..2: note = core
  misc_feature 3..67: note = LE
  misc_feature 68..1105: note = CDS
  misc_feature 1106..1338: note = RE
  misc_feature 1104..1336: note = bridgeRNA
ttaatgagatggtcactccctccttctcggtctatgctgagggcaggctttcattcggagaactatcatggaaaacattgcgctcattggcatcgatttgggtaaaaactctttccatatccattgccaggatcgtcgcgggaaggctgtttaccgtaaaaaatttacccgctcaaaagtgctcgaattcctggcgacatgcccggctacgaccatcgcaatggaagcctgtggcggttctcattttatggcgcgaaagctggccgagcttggacattttccaaaactgatatcacaacaatttgtccgcccattcgataaaaccaacaagaatgacttcgtcgatgccgaagctatctgcgaagctgcatcacgtccatcgatacgtttcgtgcagccccgaacgaagtctcagcaggcaatacgggctctgcatcgggtccgcgaatctctggttcagggtaaggtaaaaacaaccaatcagatgcatgcttttttgctggagtttagcatcagcgttccgcgaggttctgctgttattagccgtctgagcaccattcttgaggacagtagcctgcctctatatctcagtcagttattactgaaattacaacagcattatcattacttggttgaacagattaaagacctagaagctcagttgaaacgaaagctggacgaggatgaggtcgcaaaacgtttactgagcattccctgcgtcggaacgctaacggccagtaccatttcgactgagattggtgacggaaagcagtacggcagtcgtcgtgattttgcagcggcaaaaaggctggttccccggcagtacaacacaggcggacggacggacggacggacgacattgctaggcatcagcaagcgaggcaacaaaaaaatccgaaccgtgttggttcaatgtgccaggggattttatacaaaaactggagcaccagtctggcaaattgaccgactggatccgggagttactgtgcaggaaaagcaactttgtcgtgacctgtgctctggcaaacaagcaggccagaatagcctgggcactgacagcacagcagcaaacttacgaggcataacgagaaatacaccaatttaaacatcactcatctggttttgcggatactgattattgatgatatgaacggcccaccggcctgttgaggaacctgtaaaacggaaaggctcgctgaagccgtatattttctggaggttcatcaggctcggaactcatcgaggcgcgggaataaaatgccattcagacgccggatagattcaagcaagccaacttatcgtcacaatcggtgttacaaaaacgggagtgaccataga

SEQ ID NO: 4826 - DNA, 1554 bp, unidentified
  source 1..1554: mol_type = unassigned DNA; note = element_75489da
  misc_feature 1..3: note = core
  misc_feature 4..283: note = LE
  misc_feature 284..1447: note = CDS
  misc_feature 1448..1554: note = RE
  misc_feature 45..261: note = bridgeRNA
cacgtataattaaaaccatctcgaaaggggtggttttaattatttctcctttcctcaaaaagttatattgcaggagtagctacctgctctataatcagaacaagcactgtggatttgtatttcacaagctacggctcagactggttggaggtgactcaaaccacagtgacttgtctgaattggtaatcagttgggtaacgcttgacgtttcatttgcgtgaatacatggacaagccttctgtggaaacagcagtgctaaaaaacagatagaggaggaaaccaattgtactttgtaggaatcgacatttcaaaattcaagcacgactgcgccattgttgatgagtttggcgatgtcatcacaccctcgtggtcgttccagaatgaccgcgaggggttttctttgctcaaggagttgcttgatgccctcaatggcgaaaagaagatagggcttaaagctaccggtcattatgggcaaaatctgaagctgttcctcgaaaacaacgacttctcgttcatggagtttaatccgcttctgatcaaccgatttgttcacagcaaatcgctcagaaaaacaaagacggattccattgacgctctcatgatcgcccaatatctgatgacggtagagtacaagccctatccaccgtcattttacacgtttgaaaagctaaagtcactaacaagatttcgggacagcctgattcggcagcggagcaggcagctggttgagttgacaaacatccttgacaaggtcttccctgagttcaagccttttttcaagggacgattttcggcaacggcactgtatatcctttcccattacgcttctccggagaaaatctccaacatgaattccaagtcctacgaaccattgcggcgtctatctcgaggaagattctccatggtggattttgttgaactcaagacgctggccagaaatacggtcggttcaaccagcgactatctgcttcaggaaatggagatcaccatcgatatttacaaccagcttcaaagcaaggtggaggaaattgagctgcagattcatgactgtgtccttgcccttgctccgcctatactgaccattccgggaatcggtgcagcttctgccgcagttattctttctgaatttggtgatctttccaagttcaacaatccatccaaactgctttcctttgccggaatggagcctggatattttcaatccggcacttcagaaagcactggaaagatggtaaagcacggttcttcccatttgcgctatgccatgatgaactgtgcgcagacagtgattaacaacgagccgacttttgcggcctactacgccaagaaacgtgccgagggcaaggagcaccgcgttgctcttacccatgttgctaaaaagcttttgcgggttatttatacgcttcagacgaaagaactgtcctataatccggatctcgttcgctgacccatgatcaactttttttgaagtcctcggaagagggcttggttttctgcgcccttttttgaccaaatgaaaatttttcaattttcccttgacttcttatagttggt

SEQ ID NO: 4827 - DNA, 1311 bp, unidentified
  source 1..1311: mol_type = unassigned DNA; note = element_7562e6a
  misc_feature 1: note = core
  misc_feature 2..75: note = LE
  misc_feature 76..1098: note = CDS
  misc_feature 1099..1311: note = RE
  misc_feature 1112..1309: note = bridgeRNA
atggacacctccccatattggcttcagtgaaccatgctgtaagtgcaaaccaacagcataatgaagaggtgtcccatggaacaaattatcggaattgatctggcaaagcgagtttttcaggttcatgtcgtttctgcacaaggcgagaaaaaggcgaacaaaatgatcactcgtgaaaagctgatggcttttattgctcagcaacccttgtccagaattgtgatggaagcgtgcgggagtgccaattactggtcccgccagtttaagacattcgggcatgacgtcagacaaatcagcccgcagtatgtgtcgcccttcagaatgggaaataagaacgataaaaatgacgccaccgctattgtcgaggctgacagtcgtccgggaatgcgctatgtaccagaaaaaagtcttgagcagcaggatattcagtgtattcaccgggttcgccagcggttgatgaaaaacagaacggcgctgattaatcagattagggggctgggtctggaatacggtattgcgataccggaaggtgcatacaaaatcatgacctgtctgcccgagtatctggaagacgcggagaatgaacttaccgctctcagccgacaactgtttcacgaaatatggctggaactgcaggactgccagcaacgtatcaaaacgctggatgtacgcctggagcagataagtacacagaacgaggatacagcccggctggtaaatataccgggtatcgggccactgggggcatcagcactggcgatagcgctgggtgacagccgaagttttaataatggccgacattttgccagttatctgggattggtgcccttcgtgcccagcagcggcggtaaacccagacttttgggaataacgaagcgtggcgatggttatctgcgcggcttgcttatccatggtgcccgttccgtggtttatcgtacggttaacctcccggatgagcggtgtagtgccctccagagatggctgaagggtattattgttcgcggcggcgtgaataaagctgttgtggcgctggcgaacaaaaatgcccgggtggcctgggcattggtcaaccagagaacagagtataggaatcagtaacaatctgatttataagaagtccaacgcgttgatgtactgacaggtagaaccgactctctgtcaacctggcaaatagctcggccacagcaggccatggcgttaatgaggccagagagtacggatgttcatcagggctcacgaagccggatatatgtgtgtgactacgttgtcagaaaaaatcagcccgtgcttgcgttgggtcggtgtccatat

SEQ ID NO: 4828 - DNA, 1326 bp, unidentified
  source 1..1326: mol_type = unassigned DNA; note = element_7566e73
  misc_feature 1..3: note = core
  misc_feature 4..71: note = LE
  misc_feature 72..1106: note = CDS
  misc_feature 1107..1326: note = RE
  misc_feature 1084..1311: note = bridgeRNA
agatgtatggactccctcccctcggggaactacggttgaagttgaccaaaacctaaccaagagtccatacaatgcagaaatataatgttatagcgattgatttggcaaaaaatgtctttcaggcttgtaaattaggcccacaaggaaaggttatttacaatcgtgaaataagcagttcgaaacttaaagaacttctaattaaagagaaggtttcattagtggcaatggaatcttgttccagtgctcattattgggcgagatatgcaaaagccgctggtcatcaagtaaaagttatcaatgcccgtacagttaaaggatttcaaacaaaacaaaaaacagataagaatgatgctcttgctattgctaccgcagcatctcttcaacatattcaaagcgttagagttcaatctgtggatgagcaagctatgcaatcgatggaacgagccagaaatttagccctcactcatcagatagcccaaagtaatcatattcgtggattgctgtcagagtttggggtcattctaccccaaggactatcgtcattaagagcagggatcccgtttgttcttgaagatgcagaaaatggattaccagatcagtttagaaccatactgcttcggttgtgggagcatctgcttattcagatagaacatgtcgatgatttgactagacaactagagatagcaattagagataacgatgtgtgtcagcagttgatgaaacttgaaggcgttggtcctataggggctttaggtctagccttgcagttagggaaaggagagaacttctcaagtggaagaaatgcttcagcctgtataggattaacaccaaagcagcatagctcaggcggtaaagaacacattggacatatatcaaagagaagtgccgacatgcgactccgttcaactctttttcaaggagcgctttcagtcgttagcctggtagtgaatcgtccagcaagaacaaataaagaacagtggttaaaagcattaatagagagacgtggaaagaaagttgctgcgatagcgttagcaaataaaactgtgcgaacagcttacgctcttttaaagaatgactcagtgtatcagttagaaaaattggcttgatacaccgagtataatcaacactgagctatggaaaacaggtaagaccgaccaataaaagctagttgggttctaaggcacaatgatgccgctcctaagacttagcctattggtgcgactacattttagggcgaggtagcacctcgacaaagcccgtatataagagcgcatctcaacttgttttatgtaaactttttgttgatttaacccgggagtccatata

SEQ ID NO: 4829 - DNA, 1199 bp, unidentified
  source 1..1199: mol_type = unassigned DNA; note = element_757dcfe
  misc_feature 1..2: note = core
  misc_feature 3..206: note = LE
  misc_feature 207..1187: note = CDS
  misc_feature 1188..1199: note = RE
  misc_feature 16..212: note = bridgeRNA
cttgtcttatgcatcaggcgtcgccgtgtgcgacaaaggactgattttgccgggatggccaccccggcaaaatcaggaaggggacggatcgcttgcaggcaggtcattacggaccgaacgagagtaggatcaccccttcttttccttgcgccctgaacggatacccgaggtccggcctcggatgacaagcataggacatggaaaagatgacgcatcccgttgcggcctccaagcttgaatcgtcacccgcgtcgatcacgatcgggatcgacgtgtccaaggatcatctcgacgcgtctcgccatcccggcggcgagacgatccgcgtcgctaatacccgaaagggccagacggccttgctgcgctggatcggcgacctcactctggtggcgcgggtcgtgttcgagccgaccggcccgtatcaccgcacattggaggagcgcctggcgggtcttggcgtggtcatcatcaaggtcaacccgcggcaggcgcggtgctttgccgaggcgacgggcagactggccaagaccgatcgcgtcgatgcccggatgctggcacgctatggcgccctgctggagccggtgccgcgcccgatccgctcagatctgcacaacgatctggccgagctggtcgccgcgcgccgcagcttgatgcgcgatcgcaccgccacgctcaaccgtatcaagacgctgacaatcgatattctaatacgacacgcacgtcatcgcctgcggcagatcgaagcacaagtcacatcgctcgacgcggcacttgaagctctcgtagcggagaacgaagatctgctccgccgccgggaaatcctcatcagcataccgggcctcggtccagtcgctgcccatacaatactggccgacatgcctgaactgggcacaatggaagaaggtcaggcggcctcgctggcggggctcgctccggtcacacggcaatctggcacatggcgaggcaagagcctcattcggggtggacgggccacgttgcggcaggcgctttacatgccggccctcgtcgccatgcggttcaaccaggacctcaagcgtgtctatgaccgcctcatcgccaaaggaaaacacgcaaaggtcgccatcactgcaatcatgcgcaagctcgtcgtcctcgccaatgcgctgctccgaaaagatcgcctctggacgccaaaagccgcttgatcacaacggata

SEQ ID NO: 4830 - DNA, 1465 bp, unidentified
  source 1..1465: mol_type = unassigned DNA; note = element_75829da
  misc_feature 1..4: note = core
  misc_feature 5..239: note = LE
  misc_feature 240..1448: note = CDS
  misc_feature 1449..1465: note = RE
  misc_feature 1..221: note = bridgeRNA
ccccgttaccttcttggtgtccccgatgatggggatgctggtcgctgggctcggcatgactgactgcccctgtcgtttggatgatccggggggtgttgtcaccgggcttggtggcgttggttgaccgctgatagggacacggcccccggatgggtggtctcttcgtaacgtggctgccggctgctgacgctcgaccgcgaccggcagtccagattcgctgcggggcagggaggcccatcatggaagagccatcatcaggtcgcgggtacgcggtgttcttggggttggacgtcggcaagggcgagcatcacgccaccgccttggaccctcagggcgcacgactgcatgacaagcccctgccgcaggacgagcgggcgttgcgggccctgttcgagcagttggccacgcgggggccagtgctggtggtcgtcgatcagcccgcgtcgatcggcgcgctcccggtggccgttgcccgcgatgtgggcgtcgaggtcgcttacttgcctgggctggcgatgcgacggattgcggacctgcacccgggcaacgccaagaccgacgcacgcgacgcgtacgtgatcgccgaggccgcccggaccctgccgcacgccctacgacgggtcgataccggcgaggaggccctggccgacctcgaagtcatcgtgggctttgacgatgacctggccgccgaggtcacccgcgtaaccaaccgcatccacgggctgctgacccagatccaccccgcactggagcgagcgatcggatcgaggctgcaccacaaggcgatcctggagctgctccaccgcttcggtggaccggccgggctacgccaggccggcaaacgacgcatcgctgctgtggtgcgtccccgagcgccgcgctcccaccacgggatcgtcgaagcgatcatgaccgcgctcgatcagcagagcgtgagcgtgcccggcaccaaggctgccgaactggtcctgccgcagctggccgaccagctcagcgccctgctggcccaacgcgagcaggccgccgtgcaggtcgaggagatgctcgatgcgcaccctctttccgcggtcctgacctcgatgccgggcatcggagtcaggaccggagccaggatcctgctcgaggtcggcgacgggtcgacattccccactcccggacacctcgccgcctacgccggcctggcgcccgtcacccgcagatcgggatcctccatccgcggggaacatccttcccgcagcggcaataagaacctcaaacgcgcgatgttcctcgccgccttcgccgccctgcacgaccccgcttcccgggcctactacgaccgcaagagagcccaaggcaagaagcacaacgccgccctgatctgcctggcccgacgacgctgcgacgtcatctacgccatgctccgagacggcgctccctaccaaccccgcccagcaacagctgcttgacgaaacccatagggaca

SEQ ID NO: 4831 - DNA, 1378 bp, unidentified
  source 1..1378: mol_type = unassigned DNA; note = element_7587aa1
  misc_feature 1..2: note = core
  misc_feature 3..86: note = LE
  misc_feature 87..1118: note = CDS
  misc_feature 1119..1378: note = RE
  misc_feature 1149..1366: note = bridgeRNA
tgatgctgtggacggctcctccaccgggacgtgagtgccatagacgtgggtgctgttaaagctctcacgattcggaggagctaaacatgcaagcgatcacgacaatcggtctcgatatcgcgaagtcggtttttcaggtccatggcgtcgatgctggcggccaggtggtgctccgtcggcagttgaagcgtcgctatgttctcgcgttctttggcaagttggctccgtgcctggttggcatcgaggcctgcgcttcatctcactattgggcacgccggcttcaggcattgggacacaatgtgcgtctgatgccgcccgcctatgtgaagccctacgtcaaacgacagaagaacgatagcactgacgcggaggcaatatgcgaggcggtcagcagggccaacatgcggtttgtgccgaccaagacacctgaacagcaaagcggtttggtgcttcatcgcacgcggcatttgtttatccgacaacagacctcggtgattaacgcgatccgggctcattgtgctgagtttggcatcgtcgcgccggttgggcgccgcggtgtcgaggagctgcttaatgtcatcgccaacgcgaaggacgagcaagttccggcgatcgcccgtgcctgcgtggtagcgcttggcgcccagctacaccggatcaaacagcagattctggagttcgatcgtatgattacagcttggcaccggtgctgcgacacgagcagacgactagacgagattccgggtgtcggtccggcgctcgccaccgctcttgtcgccagcgttgccaacccgagagcattccgatcggggcgagacttctcggcctggatcgggctagtgcccaagcagaactcgagcggaggcaagccaaagctaggcagcatcagcaaacagggcgatcgctatctacgcggcctgttcacggccggcgcactcgccgtgatccgctacgccaaaatccacggcaccaggcaccgaccatggctcaccgcattgttagcgcggcggccgatcaaggtcgcagccatcgcactcgccaacaagattgccagaatggcatgggcgatgatgactagaggcgagcactatagagaacccatagcgctcgcagcataacgagatcgcgtcagtcacacctggcgtgattgaaggttgggagggcgaacagcacgtaatgcagagccgtcgatccggcgatcaggacaacccacttgtgccactgcatcttagaatgcggccttttgaccgggacctgatccgcggagggcattatggccagcggtcatgtgaaccgcgcaaacaggccgaacacatagctgcaccgaccaaggctgcaacgtgaagattccccttgccaactcgcagccgtccacaca

SEQ ID NO: 4832 - DNA, 1371 bp, unidentified
  source 1..1371: mol_type = unassigned DNA; note = element_7589d8f
  misc_feature 1..2: note = core
  misc_feature 3..78: note = LE
  misc_feature 79..1110: note = CDS
  misc_feature 1111..1371: note = RE
  misc_feature 1083..1359: note = bridgeRNA
tgatggggtggacgccccccgacggcatctatgtgccaaagtggaggtgttgaaacaccactgagggaggcgtccgtgttggaagctagcacaatcggtctggatatcgccaagaacgtttttcatgcgcacggcgcggatgagcgcggcgcgatggtgttcagtcgcaagctgaccagagccaagctgctcgagttcttcgctggtcagtctgcctgtgtagtggcgctggaggcgtgcggcggagcccatcattgggcgcgccagttacaggagatgggacacgaggtgcggctgatcccgccagcctacgtgaagccgttcgtgaagcggaacaagaacgacgcgatcgatgcggaggcgatctgcgaggcagcgcagcgccctggtatgcgcttcgtcgcggtaaagagtgaggagcagcaggccgcagggctcgtattccgcacgcgcgacctggcagtgcgacagcgtacacagctgatcaacgctatccgcgggcacctggcggaatatggctgggttgcacccactggaagggcacacatggcgatgttggcagatcttctggaagaagaggagatgacctcgaccttgccggaggccgcacggccgatgttcaagctaatggtcgacatgctggccgagctcgacaggcagatcgctgtcctcgaccgcgagattgcgcggcgggcgaaagaagacgaggcagcgcgccggctgatgactatcccagggatcggtcctgttgccgctactgcaatcctagcgctggcgccgccgattgagaccttccgcaagggtcgcgacttcgccgcctggttggggcttgcgccgcgtcagcactcgaccggcggcaaacagcggctcggcagcatatcgaagatgggtgagcgcacgatcaggcggctcctcatcatcggcggcagctcgatggtacggcaggcgacccggttcggcgcgccggcgggctcgtggctggagcggatgctcgcgcgcaaaccgcgcatgctggtctcggtcgcgcgcgccaacaagatggcgcgcatggtctgggcgttgctcacgaagaaggaagattacagagctccggcagcagtcgcggcgtaagccaaggcagcggtcagaggcgtcggggacgtaggcggtcgaaggagggtatggcacaacagtcggcgagacggggctggaagaaccagggaatggcagggcgctagccaagcgcgtaaacctgtaatggatccggtccgtgaactcccatactggcccgcagcatatggcgctgctcatcgaggccggacagatgacagcatccgactacgtgccaacacaccccgatttactgcttgcatccgaaggggcgtccacaga

SEQ ID NO: 4833 - DNA, 1383 bp, unidentified
  source 1..1383: mol_type = unassigned DNA; note = element_7595a44
  misc_feature 1..2: note = core
  misc_feature 3..85: note = LE
  misc_feature 86..1114: note = CDS
  misc_feature 1115..1383: note = RE
  misc_feature 1088..1370: note = bridgeRNA
tgatggagtggatgccccctcctgacggcatcgcgatgtgccaaagtggcgatgtttgcgcatcccacgaatgaagagggcatccatggaaaacgttagcatcatcggcatcgaccttgcaaaacgctcctttcaggcccacggcgctcgggccgatggcagcgtggcgttccataagaagctctcgcgggagaaggttctcgccttcttgggtgagcaatcgcgctgtgtcgtcgctatggaggcttgcggaagcgcgcatcactgggggcgtgcgatcagtgcattgggccacgaggttcgcctattgccgccggcctacgtcaaacccttcgtcaagcgccaaaagaatgattcggctgacgccgaggcgatctgcgaagcagcgatccgaccgaccatgcgctttgtcgccgtcaagaccgaagagcagcagggccgcgccatgctttttcgtactcgcgatcttctggtccggcagcgcacgcagctcatcaacgctttgcgtggccacttggccgagcacggtgtcgtcgccccgcaagggcctgcgaatgtgaagatactcgcggacgcggtcgaggagacgacaacctcacttccgcttctggtggtcgagctgtcgcgtattttcctcgggcaaatcgaggcgctggcgaacaagatcgccgatctcgagaaggcgacggctctcgaagccgcccgcggcgcgataacccgccgtttgcagacgatgccgggcgtcgggccgatcacagccatggcaatcgagaccttcgcgccgtcgatggaccacttcaaatgcggccgagatttttccgcctggctcgggatcgttccacggcagcattcgaccggcggcaaacagcttctggggagaacatcgaagatgggacagcgcgacattcggcgcctgcttatcgttggcgccatggccgtcgtgcgtggggcctgccggaagggggcgccggagggaacgttgctccatcgcatgttgggacgcaagccgcgaatgctcgtcgcgatcgcgctcgccaacaagatggcccgttcgatctgggccatgctgacgaaaaacgaggattatcgtattcctgtagctgcaacgatctgatgtgagaaaaacaagcagcactgcaggaatgtcaggcgtgtgaggaggtcgacgaacggtaaggtctaatgatcggtcagatccgggtctggcaaagcagcaaaatccacagagctttcagctcgtttgagtgatgtgctccggatccgcgtatctccataccggccagcggtcgatttaggccgcatctcgaggcctgatacatgaccgcacccgatcacacgacccgccgtctgaaaacttcttgcgcgaacgggggcatccataca

SEQ ID NO: 4834 - DNA, 1374 bp, unidentified
  source 1..1374: mol_type = unassigned DNA; note = element_7596e0d
  misc_feature 1: note = core
  misc_feature 2..72: note = LE
  misc_feature 73..1107: note = CDS
  misc_feature 1108..1374: note = RE
  misc_feature 1150..1365: note = bridgeRNA
tatgggatggcccgcccctccggccggctccgagttatggtgccggtgtgtttgggaggaaggagcggacctatgactatcgtgacccttggcatcgatctgggcaagaacctgaacagcgttgtggggctggacgctgaggggcgggtcgttctgcgccggcgcgtcaggcggtcgacgcttgcggaactcgccggcagtcttgcaccttgcaccgtcgccatggaggcgtgctgcggtgcccatcatgtcggtcgtctctttgccgcgaaagggcatgatgtccgactgatgtctcccgaatatgtccggccttacgtccgtgcgcaaaagaacgacgacaacgatgcggcggggatcgccgaggccgcgacgcggccgaccatgcgcttcgtggagttgaagagccaggaccggctcgacctgcagaccctgcaccggtcacgctctcgccttgtggcggcgcgcaagtcgctcgtgaaccagctccgggcgatcctgctcgagcgtgggcatacgttccggcagggacgcaaggtccttgagcgggaactcgatccattccttgccgggccgccttcggagctttcgacccgcatcgtgacgctcatcgcggacatgcgcgccgagtggcgatccctcgatgagcggattgatgccttgaacgacgacctggccgcgcatgtgcgcgccgacgatgcggcgagccggctgacctcgatacccggcatcggcgtccttggcgcaaccgcgctggttgcggccgttggagacggcgaagcgttcggtcgggcgcgcgatgtgccagcctggcttggcctcgtgccgaagcagatgaccaccggcggcaagccgcgacttctcggcatcaccaagcgcgggaacatctacctgcgcatgctgctgatccatggggcgcgtgcggcgctgccgagcctctccaaacaggcgacgcccttgggcgattggcttcgaggtcttctatcgcgggcgcaccgcaatgtcgtcatcgtggcgctggcggccaaactcgcccgtatcgcctgggcgagcctgcggcgcggcgtcggcttcgaacgtggatggggacaggccatggcggtctgaaacgaagggatcgactgcggcggattgagaacgaaagccgctgttcgacgaggttggcggaaggaggctgatggccggaagggtcgaacacccgcgtccctggaagcctggttcaaaaaacggcgcatcgacgccgagccttttatgcggaccaggacgcgcggatctccatcatggcgaggacaaacgcgccactacgccggatacgtttgtgcacgaccgaaaaaagcctgatgcaaccgacttgccaacggggcgggccatacg

SEQ ID NO: 4835 - DNA, 1204 bp, unidentified
  source 1..1204: mol_type = unassigned DNA; note = element_7599f0e
  misc_feature 1..2: note = core
  misc_feature 3..226: note = LE
  misc_feature 227..1189: note = CDS
  misc_feature 1190..1204: note = RE
  misc_feature 28..202: note = bridgeRNA
cttgtatgttcctcccggctcccacgaggtatgtaggagccagggtggagggaccgtcaagcaagcatctgcggattcgagccgacagacgagtcgagcgatccccatcccgcacacgaacgtcgataaaggatcgtacggcccccaaaggggatcgtcgatgtaggcaagctaacgtcggtgcggtaccaccccagccccttaaagatagctgggagtagtgcaaatgtccgattctctcgatattggcttggacgtggactccaaggagctcgtgccggcggtggtcgactgcaaggccggtgacaggattccgaacaccaaggccggtatcgccaaatggctcaagacgcttcctccgcggtgtcggattggcatggaagccaccggcaagcaccatgaactggtggcgcgcatggctgaccaggctggccacgtggtctacgtcatcaacccccggtcgatcaagaactacgccaaggcgaccggcgcacgcggcaagaccgatgcaatggacgctcaggtgatcgcccggtacgtgaagaaagagagcgatcgtttgcgtgaatacgtaccccgcagcgatgagcagcaacagatgcacgaccttctgcgcaagcggcagatactggtggagacccgagcgcgcttggaacagtccttcgaggtcaccaaaggcgccccaggcgaactgggagatatctttctggcaatgaccagcacgctgtcggaactggaaaaccaactgcagcagttgggccgagaaggggagcacggggcgctctacaagcgcctgttgactattccggggatcggtccgaccgtggcaccccacctggtctactacatgacgcgctggccgctggccaacgccaacgcttggatcgcctgcactggtttggaccctcggcccaacgaatctggcggtagaacgggaaagcgtcgactgtccaaacaaggcgcgccggtgttgcgccagatgctgtacatggccgcgatgggcctgaagcgctgtcgcggcgggcaaccgctctacgagcatctgtcagcgcgtggccatcccagcacggccgtattcaatatcctggccagaaagctggccaggatcgcgtggggcgtcttcaagagtggcagggattttgacccagccctgctgaaagtgggtcaagcctgcttccagcaggcttgaccacgaacataggat

SEQ ID NO: 4836 - DNA, 1538 bp, unidentified
  source 1..1538: mol_type = unassigned DNA; note = element_759c0f6
  misc_feature 1..5: note = core
  misc_feature 6..246: note = LE
  misc_feature 247..1395: note = CDS
  misc_feature 1396..1538: note = RE
  misc_feature 57..256: note = bridgeRNA
aaaaacattcatgagttttttacacccaaccctggcatgaaaatagttaccttcggttcataatggtaatgacacaaacaggatgttaaacgtgggcttttttggtggctttgaccctgtaataaaaactgtttgagtgaatttggtgttcaaccctttgttagctccacttgttagtaggatgactacgtacagaaaaatgcttattttcaaattcactcactgtttgtgatcttttactaaggagtgatttcattggaggtatttattgagaagtgcgctggactagatgtacattctgaaacaattgttgcttgtgtgataaaaggaaaacgagaaaacgatgtgtacacagaaactgaaacatttcctacgctgacaaaagatttatttcgactattaaaatggttggagagtcatgagattacacacattgccatggagagtacaggcgtgtattggaaacctgtttttaacattttagaagacttctttgatataacgttagcgaatgctcaacgaattaaaaatgtacctggaagaaaaacagatgtttcggatgccgaatggatcgctaaattattacgtcatggtttaattgaaaaaagttttgttccaccacaagacattcgtgaacttagagatttaacaagacttcggaagaaatggattgggcatttaacttcggaaaagaatcgaattcaaaaagtattagaaagttccaatatcaaactaagtaccgtgatttcagatgtatttggggtatccggtagaagacttttaaatcgattaatcgaacaaggttatgtagatgaagccgatgttgaaaaagatattcacggtaaattagtttccaaaaaacaacgtattacggattcgttatttggaacaattaatgaacatcaaatttttctcattcgtcaatcttggcatcacatagaatacttagaaaagttgatttcagaaatcgaagaacgtgtcgatcaacttctccgaaaatatgaagaagaggtacagttattaataactataccaggaattaaaaaagacacagcagcagtaattatcgcagaaatcggcgtagatatggggcaatttccaacttcacaacaccttgcatcgtgggcaggcgtttcacctggcaatcatgaaagtgcaggaaaaaggaaaagtacaaggacagtgaaaggaaatcctcatattaaatctgccatgtgtgaggctgcatgggctgtttcaagaagtcgtaatcgttggttagcaaccaaatattggtcactcgctgcacgaagaggcaagaaaaaagcactcgttgcgatctcgcatcgaatgcttcgggttatttactccatgttattaaacaaggagccttataaagaacccctaattgcctagtgtaaccaaaaccaaaaagatttatacaaagttacctcacaacaggtagctctgctttcttattggcttttttaggtcaattaaaggattaccataactaatcaagaatattcacataccgcagggattatatattttcacag

SEQ ID NO: 4837 - DNA, 1627 bp, unidentified
  source 1..1627: mol_type = unassigned DNA; note = element_75a1281
  misc_feature 1..2: note = core
  misc_feature 3..284: note = LE
  misc_feature 285..1505: note = CDS
  misc_feature 1506..1627: note = RE
  misc_feature 13..310: note = bridgeRNA
ctactacaatatatttatggttaatatcccttacatccagtaaggaattatccatcttgttgcttaagctgttagaatgtaagagcaatcggtatagcggattcctccttgggctttgcgcccgtaaataagtctgctaaccagctcttcattcgcagcattcgttttatgcaggttgagccgtcctttggaatgcgttcgtgtcacaccacagtagattgaatgggcaatgagtaaaactggtattgaccaattgctacctaagataaaggagtgacatttttatgagcatgaacgcagtaggtattgatgtttccaaacgaaagagcaccgtggctatcctacgtcccggcggtgaagttgtcgccagtccctttgatgttccccatctatcaggctgtttccagcctcttattcaacacatcagagccttaaacggccaaacacgcatcgttatggaatgtacgggccgttactacgaacctgttgcccgccaactctctcaagccggattcttcgtctgcgctgttaatccacagatcatccatggctttcaaggccagggcaatccccttcgaagagtaaaaaccgataaagcagattccataaaaatcgcacgctacactcttgataactgggcgaatttgaaacagtatactcttatggatgaactacgcacacagcttaaaactatgaaccgccagttcgatttttacatgaaacataagactgccatgaaaaataacctgatcggtctgatcgatctggcctatccgggagctaacacctacttcgacagccccgcccgtgaggacggcagccagaaatgggtggatttccttgatacttactggcatgtcgattgcgtccgcaaaatgtcctgcaatgcctttaccctgcactatcaaaaatggtgttgccgtaagaagtacaactttagccgtttaaaagctgaagaaatctacgagacagcaaaggaactgattcccgtacttccaaaggatgactttaccaaacgcatcatcaaacaggcaatacaacaattaaacgccgcttcacagaccgtggaacaactgcgtatactgatgaatgaaaccgctgctaaactgccggaatatccgattgttatggcaatgaagggggtaggcccctctctcggtccccagcttatggctgagatcggagatgtcgcacgtttcacccacaagggcgctatcacggcatttgccggagcagaccccggtgtgaacgattccggggattattctcagaagagtgtgcatgtttccaagcatggctcacccgctttacgcaaaacactgtaccaggtcatggatgttctaattaaaaccaaaccggatgatcccgtttatctattcatggacaagaagcgcgcacaaggtaaaccttactatgtttacatgaccgcaggtgccaataaatttttacgtatttactatgggcgagtgaaagaatatcttgcttctcttccggcatcggaataaccaacacgtaaaacctgtttttagaccggcatatcctggcggtcttattttgatacccacttttcaacctgtataaatttttcaatgttctttaaaatttagcttgactttttatttgcagg

SEQ ID NO: 4838 - DNA, 1245 bp, unidentified
  source 1..1245: mol_type = unassigned DNA; note = element_75b910c
  misc_feature 1: note = core
  misc_feature 2..78: note = LE
  misc_feature 79..954: note = CDS
  misc_feature 955..1245: note = RE
  misc_feature 1030..1236: note = bridgeRNA
taatgggatggacccgccgtgctcctgccccgcccagccgcaaagctggcacggggctgcaaacaccaggagcatcccatgccacgcaagaccaccagccttgaagccgttacgacaatcggcatcgacatcggccctgcccgctatgtccgtccctattcgaggggacagaagaacgacttccgcgacgccgaagcgatcgccgaggcggtgctgcgtcccaccatgaagtttgtcgcgatcaaaacggtcgaacaacttgatcttcaggcgctgcatcgggtgcgggaacgcctagtttgccagcgcaccggtgtgatcaaccagatccgcgccttcctgctcgagcgcggcattgcggtgcgccagggtctgcgagcactgcgcaccgagatgcctattgtccttgccatgacggacaagctgtcaccccgcatgatccgcatgatcgaggatctctgtacggactggcgccatctcgatgctcgcatcgcgaccgtgtcgaacgagatcaagacgttgtccgagcaagatgatggagccaagcgcctcatgacggtgccgggcattggcccaatcatctcgaccgcaacggtcgccgcgatcggcagtggcgacgtattctccaagggcagagatttcggcgcttggcttggtctcgtgccacgacagatgtcaacgggcggtcgcaccgtccttgggcccatctccaagcgcggcaatcgctacttgcggatgctgttcgtgcaggcagcccgtgccgtcctcctgcgcccacagagctgggagaagtatggcctcagatcgtggatcgaggctgcagctcgccggctcaatcggttcaagctagcgattgcactcgccaacaaaatagctcgcgtcgcctggggcgttcttcatggcggtcgtaactttgaggttagatcgatgaggaccgcgccccaagccgcatgaggctgccgccgcgtccgccatcgcaaggaaactgctcaagacaaggagaaacgcgatgtaggccccgatcgtttttcccacccaggtctgcgagagaaacagaagagatggacacccgagaactgatgaccccaagagcccttcgaggcatggccgttaatgacgtcggacgcgcgcggatttccatgatggtccggagcatgagctccaattcgaggcctgatacattggtgcaagaccgtacaccccagcctcaccgttttttcttgcaacgcacggcgggtccataca

SEQ ID NO: 4839 - DNA, 1429 bp, unidentified
  source 1..1429: mol_type = unassigned DNA; note = element_75ba03f
  misc_feature 1..2: note = core
  misc_feature 3..118: note = LE
  misc_feature 119..1081: note = CDS
  misc_feature 1082..1429: note = RE
  misc_feature 1182..1382: note = bridgeRNA
agatggggtaatcggccgacgagcttgtggatatcagaagatttagggtgctgcgcttcaggctgattggttgaacgaggtccttatacggcctcagcatcagaaggagaagcgcagcatggaccattttgcgggactagacgtatcggtcaaggagaccagcgtatgcattgtggatgacatgggcaagatcgttcgggaagtgagggttgcaagtgagccggaagctctgctgcaggttctgagcgaccccgcctatcacttaaaacggattggattggaagccagtccgctgtcgcaatggcttttcagcgcgcttgcggaagcgggcttgccggtgatttgtgtcgagacgcggcacatgcgtgcgatgttgaaggcgcagatcaacaagaccgaccgcaacgatgcacgcgggatagcgcagatgatgcgggcggggctttatcggtcggtgcatgtgaagacgttacgcagccagaagctgcggatgctgctgacccaccgcaagctgctgcaatcgaaggccattgccatcgataatgacttgcgcggtaccttgcgtaacttcggcctcaaggtgggagtggtggggacggtgaggttcgaagcgcgcatcaaagagctcgtggtcgacctccccgacttggctgtactggtcgaaccgctgctgatcgtgcggcgggtgcttcgcgagcagctcagcatcctgcaccggcgcttgctggccgttgttcgggacgacgaggtgtgccgacgcctgatgacggtgccgggcgtaggccccgtggtggcgctaacctatcgcgcaaccatcgacgtacctgcacgtttccgaaactccaaggcggtcggggcggtgttgggactgacgccgtctaagtatcaatcgggcgagattaaccgaaccggtgcgatatcacggtgcggagacgagatgatgagggtcatgctctacgaagcggcccagagcatgctcaacaccaacaagtggtcctggcttaaagcctgggcgatgaagatcgccaagcaccgcgggaaaaaaaggcgatcgtggcgctggcgcgccggttggccgtgatcatgcaccgcatctgggttgacggtaccgagttccgctggacccgagaggttgaagcaacatgagagttgcttagcatccaatgtgataggagaacactcgaactccaccgtgcggtggaatgatgtccctcgcgggacgatggatgaggtgagttcgccaacccgcttggacctaccgtcgcttgacggcaaggccgccccagagattgttctacctcgtcttcgaatcccatgctggaagggcctcggtgccgattccgaagagaagcgcgagcccgcgagcgacatcgacactggaagtggtggatagtctgaaagcgcttgaccctgatcggccgattagaga

SEQ ID NO: 4840 - DNA, 1630 bp, unidentified
  source 1..1630: mol_type = unassigned DNA; note = element_75d043f
  misc_feature 1..3: note = core
  misc_feature 4..126: note = LE
  misc_feature 127..1317: note = CDS
  misc_feature 1318..1630: note = RE
agtaattatgtaagaaaagcatagcgcagtgtatgcggtcatcctacagtttaagtaggagccgaaatttaatttttaagcgataacttcaagtttcgcaatgattaacaattaaagaaccgcgctatgccaaaaacaaatttgcaaaattcgaatgactttaccggacaaaacttttatgtaggtcttgatgtccacaaaaaatcatgggctgtaactatccgaagtctggggatagaggttgggcacttcacgcaagagccggatgcagcggggctgcatcagtatttacggcgaaattttccaggggggcagtatcattcagcttatgaagcgggtttctgtgggacaggggcccatgaagagctttgtaaggcagggatagacaacatgattgtccatgcggcagatgtaccgtctacggataagcaaaagaagaataaaacggacctgcatgacagccgggccattgcagaccatttggagcgtggcaatttgcatggtatttacgtgttaagccaggagcaacaggaattacggagtttgtttcgtttacgggaatgcaaggtaaaggataccacacgggcgaataacaggctgaaaagctttttgatgtattatggcatagccataccggaggcgatatcaaaacgcggcgacctgaccggcagggcattggcctggttagatatagaactgcagagtgctgcaggtaccattgtgctgcaagagtatatagcagaactaaagtatcagcgaaagcaattgtttcagctgaccaaaacattgagggagcaggtaatggcccatgataagcaaatctatgtcaatctgattaccattcccggtatgggcagtattacagccattggattaatgacagagataggggatttcaggcgtttcgatgatccggatgaatatagcagctacctgggcttgtacccatgggaagatagttccggcgactgtatcaaaaccaaaggaatgcagccgcgctgcaacagccatcttcgcccgctgctggtagaagcttcatggcatgcgataagaaaatcccgcaacttgtttgcttattacagcaaacatgcaggtggtaaaaatggcaaaaaggcaatcgttaaagtagcacgtaaactggccatgatagccagaggtgtggcaatatcggggcagccttaccaggaagactatcaaaagaaggacaataaacatgaaccaacgaaaaaaatgaaagccggaaggttttcttcaggcattacggaacagcatataaacaaacagccaaactacgggcgaatgtccatgcctggctgatatgctttatccggctgtaatatccctggcggttgctcctcagcagagccgcttccgtttcttgcagcaatagtaaaattattaaaaatgtttagttaaaaaaattgcatctcagcacaaacaaaagaggaaaacgcaccatcgaaaacggtattaaattacattgcgaagtattcgtacctcttttttaattcatacaattactggcggcatgaccgcatatagcagtttgagacttttttgatactgaaataaaattatacctttatgtgataaaaatatctcatacctgtcgcttgcttttctacatagc

SEQ ID NO: 4841 - DNA, 1154 bp, unidentified
  source 1..1154: mol_type = unassigned DNA; note = element_75d1fa5
  misc_feature 1..3: note = core
  misc_feature 4..213: note = LE
  misc_feature 214..1131: note = CDS
  misc_feature 1132..1154: note = RE
  misc_feature 23..191: note = bridgeRNA
gcttgtgtcttgatctaggaataaactctggggtgagaggggtggatggcaagctgcaagtccgcggtgctcaaagcacgtgtgggagccgagctgccatccacctttccactctggcctacaagcccgaacagttggacgagcagccactcgaaatcacaagcgtgggcaaagccagagcactctcacatctgagtgtaagagggttttgccatgatttcctgggtcggtatcgacatctcaaaatcaaaccttgtcgtctgggttaaaccacagagcgaaggtttcgatgtttcaaacacttcagaaggatttcttgagctgattcgacgattgagtcagtttgaagtcagtctgattttgctggaggccaccgggggctatgagcgtaatgccatggcggctctgcaaggcgcaaacttcaaggtgctcagggtcaatcctcgccgagccagatcctttgccgtggcgatgggcaagaatgcgaagactgacgctattgatgcggccgttctagcagactttgctgaagtgctgaatgcctcaagcagcaaggttatttcgcctgagcgtgaagcgctccgcgagctggttcagcagcgcgagcatttcgttcagcaacgagacgacaataagcgccgtcttcagcaagcccagctaccagccgttattgcgctgatcaaaggccatattcacttcctgcaaacgcaaatcaggcaacttgataaggccatcaatcagagcatgcacgaactggacgcagaaaaagcccagcggctcatctctgttaaaggtatcggtacggttgccaccgcgagtttgctggtttatctgcccgaactaggtgagcttgatcgccgtgaggttgcggccttggcaggtatcgcgcccttgaacgacgacagcggtaatcacagcgggaagcgacatatctatggaggcagagcccgtgtcagacgggctctgtacatgtcctgctgggttgtaatccgccatcagcccgacttcaaggcacgctacgaaggccttcgagagcgaggtaagagcgcgaaggtcgcgctcatcgcctgcatgcgtgtactgctgattaggctcaatgccatgttgcgagatggcactgagtggcggtgacgaatggcatggtgaagacagtt

SEQ ID NO: 4842 - DNA, 1430 bp, unidentified
  source 1..1430: mol_type = unassigned DNA; note = element_75d64ad
  misc_feature 1: note = core
  misc_feature 2..328: note = LE
  misc_feature 329..1150: note = CDS
  misc_feature 1151..1430: note = RE
  misc_feature 1191..1430: note = bridgeRNA
atgaaatgaacgcgtcccaccctgcggccgagtgggaggaaacggaagggtgtggaccctcacgggccaacggcatcgatgtgcctaggtggaaaatgcacgcatttccaaagcaaccggaggatccacgatggacagtattgcagtcggtgtagacatcgccaagcacgtgttccaggttcattacatcgatcaggaaacgggcgaaatcgtgaacaagcctatcaagcgggccaagtttcttgagcactttgccaaccgtgccagatgcctgatcggaatggaagcctgcggtggagcgcaccactaggcgaggcagttgatccagatgggccacgaagtcaggttgatgccggcggagttcgtgaaggcattcaacattcggaacaagagcgatgcggccgatgccaaggcgatctggctggcggtgcggcagcccggcaagccggtggcggtgaaaacggaaatgcagcaggcgatgttgacgttgcaccggatgcgcgagcaactggtgaagttccgcacgatgcagagcaacggactgcgagggctgctgacggaatacggcgaggtgatgagccggggccgcgcgaaactggatggcgagattccggcggtgctggggcggcttgcagagcgattgccagtagcgttgatcgccacgttgcgcgagcactggaacgagctggcgaggctggacggacagattgccgagatcgagcgacgcatgcgtgcgtggcagaaggagaaccgggctgtgaaggcgatcagcgagattcccggtgtcggccttctgacggcgacggcagcggtggcgatgatgggtgacgcaaaggcattcagatcaggtcgagagtttgcggcatgggcgggactggtgccggagcagacgggctcaggtggcaaggtgaatctgcacggtatcagcaagcgcggcgacacgtatttgcgcacgctgctgattcacggtgcacgcagcgttctgacacacgcgaaagatcctggcccctgggtcgagcagatgaagaagcggcgaccaatgaacgtaatcgtcgtcgcgttggccaacaagatggcaagaacgatctgggccgtgctggctcacgatcggcagtatcagaaaggctacgtgagtgtgagacccgtttgaacaggccaacaccgggttgaagataaacgtttaacacagggtgaacgtcgaaaggttgcgcagcaatcgagtgcgatgacaagccaggtaggaccgggactcgctaaacctgtatagtctgatgagcttcgagctcgccggacaaatgaggtgcgagtcagcgaatttcataggggcctgcagcagttgtaccggctgcaacaaggccggatataaagctgcagcccatcctgtcagtctgaacccacgaaaactgttgcaaacgggacgcgttcatata

SEQ ID NO: 4843 - DNA, 1560 bp, unidentified
  source 1..1560: mol_type = unassigned DNA; note = element_75df7cf
  misc_feature 1..3: note = core
  misc_feature 4..247: note = LE
  misc_feature 248..1420: note = CDS
  misc_feature 1421..1560: note = RE
  misc_feature 3..224: note = bridgeRNA
cttgtattatatatttatagtttatatatccatttttacggatatttgctatactgtgtttagatactgtggattagtttaatcctcctaccactcgatggtttcaaaaaggctctaaccacagtctctttgtacagttgttaatcagttagataccgcataacggtttatttagaacaaggttacaatcgcaaagtgccctgtgggtctaaacagtatcaaaattctattgaaacgaggttgttttatgatttatgccggaattgatgttgcaaaggataagcatgactgctttatttgtaactccgatggtgaagttctctttaatgccttcaccattccaaacacaatggaaggttttgataatctttatcaaaaaattttatcggttacagatgatttgaacaaagtaaaagtagggcttgaagccacaggacattactcatacaatctgcttgggtatcttcttgataaaggcttgccgacctttgttatcaatccactacataccaatctgtatcgaaaaagtctcaccctcagaaagactaaaacagataaggttgatgctcatactatcgctatgatgttaatgtctgatgtgaacttaaagtcctactcgaatacattgtaccataacgaagagttaaagtcactaacaagatacagatttgataaagtttctgaaagagccaagcttaaacaatccatcgcaagacttgttaacattctttttcctgaactcgaaaaggcggttccaactctacatatgaagtctatctatgcgttgctctcggaatttccgtcagctcatcacattgctgaagctcaccttacgcgactaacgaatctgctatatgaagcctcaaaaggcagatacaaccgcgatactgctattcgctttcgggatattgcaagaaactctatcggctctgttatgcctgccaaatctcttgaattaaagcataccattaagctcataaaagaacttgacactgaaatcaaagaaattgaagaagctattaaatccataatggataaaattaattctcctattctcagcattcccggcatcagttatcgtatgggagctatgataatcgctgaaatcggtgattttgataggttttcttcacctgataaaattcttgcttatgcaggtttatcgccatcaacatatcagtcagggcaactaacttctacctattcacatatggagaagcgtggttcccgatacttgagatacgctctgtttaatgcaacaaagtatgtttgccattgggattcatcttttgctgaataccttgctaaaaagcaaggcgaaggtaagcactacaacgtcgctatatctcatgctgccaagaaacttgtgcgattagtttatcatttagagaaaacagggcaactttacaaagctgtttaatctctcattccaatattttttgacgagcaactttcgttgctctatttgtcatgcaattttcaatgttcaactgattattcagactttctaaaaattttctcaagaaattctaattttcctcttgacttttaatagttagt

SEQ ID NO: 4844 - DNA, 1644 bp, unidentified
  source 1..1644: mol_type = unassigned DNA; note = element_75ee3e0
  misc_feature 1..3: note = core
  misc_feature 4..308: note = LE
  misc_feature 309..1484: note = CDS
  misc_feature 1485..1644: note = RE
aatggtatatacaaattaagctcatccagctaaacaaaatctgtatacatctcctttcttacccagattagtatcggtctgggaaaccgtgtagaattgagatcgtgaatgcgtactagaatcttataggtttgtagctttgactacgtgaggtattatctgaccgcttcgttgtatagaaattgttattagttagatgagcccttcttttattgaagtgagttcacatttcgcaccatattctttgatacttctgaaacggtgatactggtattcatcacatattaattttgaaaggagtcatttacatgatcaacattggtatcgatgtcggtaagttcaagcactgtgctacagtactcgatgattctaccggcgaagttctcatcaaacccttctttctcacaaacaatcgaaaaggatttgatctactctattctaaaacgaaacaatttattcacagaaaacattctgtaggtatggaagatactggtcattatatgatcaatcttacaaattacctactcgacaagaaatttactgtcaaatacatcaatccgagggctacctgccttcgtcgtaagggacttggtatatctgccaagaacgatagaaaagatgcgcttctaatagcagaaatgttaagtgagaagagattctggcgttccatttctgtacgttctattgaaaatagtaaattccgtgatatcactcgtctttatcatcaactccaagaacagcagaatcaagatatgaatcggctgcagagagcactagacatcgtattcccagaagtaaattcactttcatggacacgctattcaaaagcgtatatgaaattcctatcaacttatcctagcgcttcatcaattgccttagaagatattcgtattcttcgcaaggcactcaaaacagaaggaagaggcagacaatgtaaagtgaccgcagaagaaatcagagagcttgccaagaattctgttggcgaagataacatctccattgatttggaagtaacatctatcatcgctatcatcaataccagagaagagcagattcgtatgttggaaaagaaaatagaagaattcagtcacaagctaaactctcctatcatttccatccctggcatttctcatatttcaggaatgacgattcttgcggaaatcggagatatcaatcaatttcagaacacgggaaatttgatatcttttgcaggaatggatccgcttgtataccagtccggcaaatatgacgctgcacatatgcctatatccaagcacggttcaagatatatgcgcaaggcactgtatcaagccgtattcactgtctgtaaatattctccgaccttccatgactattatactaaaaaacgtaatcaaggaaaatctcatagatgtgcccaaggccattgtgcacgaaaacttctccgtgtgatatacaaacttcttagtacaaactctccctatgatcaaaatcatattcaataattgatttatcaacctacaataatcattcacatagtcaaggctacaaatgtagttgttttaactgtactctattcacgatttcaaagatcttttttgagattcatctggattttttaaatctcactattttttaaaatttcacttgtttttcttatagtta

SEQ ID NO: 4845 - DNA, 1614 bp, unidentified
  source 1..1614: mol_type = unassigned DNA; note = element_760452a
  misc_feature 1..3: note = core
  misc_feature 4..246: note = LE
  misc_feature 247..1482: note = CDS
  misc_feature 1483..1614: note = RE
  misc_feature 8..223: note = bridgeRNA
gttcgtaatataaggttaaccagtttttactggttgaccattttttatatggatctattataacagtagccggggtagaacgtctctgcccgtggggtttgaccccgtaaactaaacagttcaccccctacttgtaaaaacatgatttagctggttgggaccctagatcccgtttaacaagcgaacctgtgacattacaaggaggattaggggcaccggcaatattttttgaggaggagaattcgaatgaatccagtcgtaggtctggatgtatctaaaggggaaagtcaggtccaagcattcttggacaagaaaaagccatatcgtaagaattttaaagtagaccacacgcgagatggtttaacgacgcttcacgaatttttaaagcatttaaaggaagttacgggtcaagatccagcaattgttttggaggcaacgggacattatcatgcgcctgttgttcaatttctggaggagcataattatttattaatcattgtaaatccattggtttcttttagagcgaaaagctctaatttacgaaaggtgaaaactgatgcagttgatgcttatcttctttgtgaactttactataaggaagatttagagccttataaaaagcgaggagttcaacttttaaaccttcgtaatttaactcggcaacatgaaaatattactgggaactttattcaaacaaagttacagttccaagctgtattggaacaagtatttcctgaatacaaaggggtttttggtgagctatattcttttgtttctttacggatcctcaaagaatataagtcctcggaagatattttaaggactagtgaagacagactggcaaatcgaatagctgatttatgtacaagtcgttctgaaaagtgggcttatgaaaaagcacaaactctgaaagcagcagctgctcgtaatccttttaaaaagacactgtatcaaagtcacctattaagtatgggaatgtatattgatatgcttcttcaatttaaagagcatctatcaaagttagatgcagagatagatactctagctaaagaaattgaagaatataagattattaaatctatccctggtatcggagaaaagatcgctgccacgattatttctgaaattggggaaatagatcgatttaatcaccctaaaaagcttgtggcttttgccggtgttgatccaagtgtgtttgaatcaggtcgctttacagccagtaataatcgcattactaaaagaggttctagtcgcttaaggcacgctttatatctggctgtctgttgtgcgattagagacaaacggaaaaagaaaacaaccgatgaaatactccctagaaataagaaattgagagaattttacgataagaaacgaaacgaaggtaaaccttttagagtagcagtcatcgcttgtgttaataagcttttacattggatctatgctcttttaaaaagcagaactaacttccaagaaatagcttgataactatatctgcctatatagaacaaaaccttccaatatagttttaatggaaggttatttggcatgttcttttttattttatcatgtcttttttcagttttttattgaaaaatgttgacaaactattagctg

SEQ ID NO: 4846 - DNA, 1266 bp, unidentified
  source 1..1266: mol_type = unassigned DNA; note = element_76060aa
  misc_feature 1..3: note = core
  misc_feature 4..168: note = LE
  misc_feature 169..1128: note = CDS
  misc_feature 1129..1266: note = RE
  misc_feature 8..179: note = bridgeRNA
cttgtatattccctcctgtggcgccgccccgatcaggtaccgccacatggacagtcagctcgtctgcctacagggctccgagcccgcagagaagcctgagcgactgtccttttcatcctcttaacccgaacagttgactgagcctcgagctcgtattttcctgcaagtatgggtaccgtgatgaaccagatttcctcttccgtttatatcggcatcgacgttagcggtagcaccctcgacgttgccatccacgacaccaccgagcatttcagtgtcgacaatgaaaccgctgccatcgaccagctggtccagcgtctgatcgcgctgggccccaccctgattgtcatggaggccaccggcaagctcgagctcgccgtgctcagggcactctgtgaggccggcctgcccgctgtcgcggttaatccccggcaggtgcgcgactttgccaaagccaccggcaaacgggcgaagacagaccgcatcgacgcgttcgtcattgcccatttcgccgccgtcatcaaacccgtcgtgcgtccgctcaacgatgtgcagaccgagcagctgcaagcgctgctgctgcgccgtgcccagctcatcgacatgctcgtggccgagaaggcccgcctggagcgcgcacacgccgcggcgaaggaaagcctgaatgaccacatcaaatggctcaaacagcagctcaccgtcgcggacaaggacatcgattcgttcatgcgctcttcgtccgcctggcgccagaaggagaatctgctgcgctcggtgcccggtatcggccccggtgccgcggctacgctgatcgccttcatgccccagctcggctcgctgaaccgccgcgagatcgccgcacttaccggcgtcgcgccgttcaattgcgacagcggcaagcacaccggcaagcgtcgcattcacggcggtcgtgccatcgtgcggcgcgcgctttacatggcctgcatacctgcgctgcgctttaatccggtaatcagggccttttacgaccgtctgcgcaaggctggcaaaccgttcaaggtggccatgaccgcgtgcattcgcaagctcatcgtgacgcttaacgccatggtccataactcaacaccctggaacgcatcgacgaattaaccggcggtatagctttgcctggatgctgtgcatgaacgcgatcattcgcgtggcctgcgctcgcctgtacccaacgggaaagtcgcgctgagatccagcgctccgggaaagcttcccgcttgacttccaatacggttg

SEQ ID NO: 4847 - DNA, 1477 bp, unidentified
  source 1..1477: mol_type = unassigned DNA; note = element_7609010
  misc_feature 1..2: note = core
  misc_feature 3..175: note = LE
  misc_feature 176..1222: note = CDS
  misc_feature 1223..1477: note = RE
  misc_feature 1246..1476: note = bridgeRNA
agaatgaaatggacgcctcccacctcggccattcaagcgaagtgcgccataagagcgatggatagaaggaaaaatatttgaggggagcggaaggtggaccccgcgggccaacggcgtcggaagcgcctaaagtgaaagtctgaaggctttcaaggctaaccggaggatccacatcatgaatgctactcccaaatcggtggtcggtgtcgacacggccaagagcgtgttccagctgtacacggtggataaggaaacaggcgaagtgatcaaccagcaaatcaagcgcgcgcagttcttgcagtggttcgccaaccgcgcaccttgcctggtcggcatggaagcatgcggcggttcgcagcactgggcgcgcaagctgcaggcgctggggcacgaagtgaagctgatgagcgggaagatggtcaaggctttcgtttgcggaaacaagaacgactcggccgacgcacgcgcgatctacatggcggcgcagcagctggaagtgaaggccgtggcggtcaagagcgagggccaacaggccgtgctggcgatgcaccggatccgccaacagttagtgaaggtacgtacggcgcaaatcaacgagttgcgcggcctgctgggcgagtacggcgaagtattcggcacgggcaggaaagccttcgacagcggcatgaaagcggcgctcgatcggctggccgaacggttgccggcgccgttgatcgacacactgcgcgaccagtggaacgaattggctcgactggatgagcgcatcgtccgcatcgaggcatcactgctggcatggatgcggcaagaccgagttgccaacgcgatcttcgcgattcccggtgtcggcctgctgaccgccacggctgcggtggccgccatgggagacgccaaggcgttccggtccggccgtgagtttgcggcctggatcgggctcataccgggccagaccggcagtggaggcaaaatacgactgctgggcatgagcaagcgcggcgatgtctatctgcgcaccttgttgatccatggtgcccgagcggtgcttcggcatgccaaggaacccggtccgtggctgaagcaactgagccagcgacggccaccgaacgtggtgatcgttgcgctggccaacaagatggcgcgcatgatctgggcggtacttgcccatgagcgtgcgtatgacaaggaccacgtcagtgtgcggccgcacgcggcggcagcggcgtaaaacctaatcaacttacgaaaggatggcacgtcaccagttgcgttaggtattgatagcgatgacagacaggtcagaccgggatccactaaacctgaatggtacctggggcttttagcccgcccggagaatgaggtgtgggtcagcggatttcatcggggccagcggcgctaccgcatacaaggccggatatagaactgcgactttcctcgtctgaacaaagctgaaaaataccttgcaaaagggaggcgtccatat

SEQ ID NO: 4848 - DNA, 1411 bp, unidentified
  source 1..1411: mol_type = unassigned DNA; note = element_760b060
  misc_feature 1: note = core
  misc_feature 2..308: note = LE
  misc_feature 309..1385: note = CDS
  misc_feature 1386..1411: note = RE
  misc_feature 118..273: note = bridgeRNA
ctttaactttgcagtttgaaacaagagtccttaggaactcttaattaatttaacgttgaataaacgaagaaataggaagagaaatatcagtttttccttacctttgttgtagaaaggaaggattaactgccggaggtcgccctatcgtcccttcaaggttatgagcctatctaccgctttaggccccccggatttcaagctgcaaattccaaataggaaggtaggctcaaagcctaattaaagtaatagacattcacagctatccttcagttaatcgcttcctgtaattaaaaaacagagacaaaggtatgaaaaaaatcgtaattggcatcgacatttccaaagaaaaaattgatgcaagtgcaattgatgtgagagactgtcaactgggagtggtcagactggactatcagatgttcgacaactgcccaatggggtttcgccgtatgctggtttgggcgaggcatttaatgaagaaagcaacgttacaggatgtgctgttctgctgcgagactacaggcggctatgaccgcatcctttgcgactatctctacggcaagggccttgatatctggcgagagggcgcgctacagattaaacgtagtatgggcgtgcgcaagggtaaggatgacaaagcagactcgctgatgatagccgagtatgccatgcgccacatggataaggctgtcatatacgagtctcctaacgaaaccatccgtgagttgaaggccctttttctctaccgtcacaaacttgtgcaggaaaaggctgaaaagcaggttagggcagctcatttgactgatactgcagctaaaagcagatccatgaggtttatcctacacgatgccaggagaagcgtgaaagccatacaaaagagtataaaagagtgcgagaaacacatattggaactcattgagagcgacgaggaaatacaacggaactatggccacattgtgtccgtcaaaggactcagcatcgtcaatgccacggcctttatcgcctatagcaacaacttccgaggcatcaccacggcaaacaagatggcctcctattatggtgttgcttcatttcgagatcgatcaggctcgagcgtcgacaagaaggcctgtgtgaaatactattcttgctcgctgttgagagctaccatcacacaggctgcagaatggacagtcaaagagaatggaatttatcgcgactattatttgcgtctgaaagcagaaggaaaaccgtatggcgtcatcatcaacaacgtcaagaataaactcatccacttggtgttctcactcgttactaatgatacggactatgagcagaatcacgagtttctcagagtaaaaaggaagaccgaaaatagaaagtccactcaattagaaaatattaactaaatatatttggattaaaacataggaag

SEQ ID NO: 4849 - DNA, 1797 bp, unidentified
  source 1..1797: mol_type = unassigned DNA; note = element_760bbd2
  misc_feature 1..3: note = core
  misc_feature 4..113: note = LE
  misc_feature 114..1397: note = CDS
  misc_feature 1398..1797: note = RE
  misc_feature 1472..1738: note = bridgeRNA
ggagcattcctgtaacaaacaaaaatgagctttgaaaaaaagacgaccacacgttaaactttgaaaggactgttggccaacagaatccaatcaaaaaaacggaggtcatccaaatgaattttacacaaaacgagaaactaaatcaattgtcagaaagaagtattgtaatcggcgtggacattgctagtgaagtacattatgccagagcattcgactggagaggaatggagttaggcaaggtgttcaagtttactaacaatgcagaaggatttgaaaacttttacgcatggattgagcgactaaaaaagcaggcacaaaaggaatgtgtaatggtaggcgcagaaccaacgggtcactactggtttggtctggcatcatacctgaaggatcaaagcatcaaattggtcctagtgaatccattccatgtaaaacgcagtaaagagcttgatgacaatcatccgagtaagacagacgcaaaagatcccaaaaccattgcaaagctggtgattgaaggccggtacaatgagccgtacattccagaaggtatctatgctgagctacgaatagcaacgtcatgcagattgcggatacaaaaagagatgaacagcataaaaaaccgaatccatcggtggctaaaaatatactttccagagcatgaaaccgtatttgggaagtttgatgccacaagtagcatgatggtgcttcaggtagccccgctgccaagagacattaaagaactgggagcagagggaatcaacaagatttggagagacaacaaactgagggcggttggaatgaaaagggctaagagcctgtatgaagctgctgggaagaccatcggttgtaccgaaggagagtcttgttccagaatggaaataaagctattactccaggactacaatcacaaaacactccaatatctcgcggtcatggaaatcattaatgaactgtgtatgcaaataccagaagtggccaagttgcttgaaataaaaggcgtagggcttgtaacggtagctggttttctctctgaagtaggagatattagacgctttaagtctccaaaacagatccaaaaacttggagggctggccttaaaagaaagcagttcaggaaaacacaaaggacagacaacgatcagtaaacgagggcgatcacgactcagggcgattctatttcaggcggtgatgccattagtagctaagaacgcagaatttgcagagctacacaagtactacacgacgagaagcaagaatcccttaaagaagaaacaatcgctgatcgcattaagttgtaaactgatccgggtgttctacgcaatattaaccaaaggcataagctatgatgcacaaaagctaatccaggacattcgtcgacccgttgagaatttggcagcgtaaccgtaatcaaaaaccattctattggtaagcgtcatcacaagaatgtatctaaaccataggaaccttacgaaacaaaagagctggtagtcagtcgcataatattccattagagcaaagactcggcgaaggagcattactgacacccaatcatggataggtggaacgaaggaatttagggcagatcttagatcttgaccctgttagacatgggaggtttaccaccgtgagcaaatgggtttacaacggccaacatatgaaaagcaacagacgttagctttgccatatccattttctctgaatcttgcattctatgtagattctatcctcgatgagctgttttggtaaataagtaatcctatgaaaacgggagaaaagcaaagaaaacaataagatattatag

SEQ ID NO: 4850 - DNA, 1417 bp, unidentified
  source 1..1417: mol_type = unassigned DNA; note = element_761a68c
  misc_feature 1: note = core
  misc_feature 2..88: note = LE
  misc_feature 89..1117: note = CDS
  misc_feature 1118..1417: note = RE
  misc_feature 1160..1404: note = bridgeRNA
tgatgtggtggacggcgcccgctcttcggcatctaagtgccatagggtggttgcgccgaagcgcaccacattgaggggagccgtccacatgcaaattaccacaatcgggttggatatcgccaagaacgtgttccaggtccacggcgtcgacgcggccgagaaggtcgtggttcgcaagcaagtccggcgcggccagatattggcgttcttcgaagctttgccgccatgcctgatcggcatggaagcctgtgccacggcgcactattgggcgcgtgaactgacgaggcttggtcatcgggtgcgactgatgccggcgaaggacgtgaaggcctatgtaaagcgcaacaagaacgatgcggccgacgccgaggcgatctgcgaggcggtgcggcggccgaccatgcgttttgtgcaaatcaaatcgaccgagcagcagggccggttgatgctgcatcgggcgcgcgatcttttgatgcgacaacggacccaggtgatcaatgctttgcgggcgcatttggccgagctcggcattgtggctgcgcaaggacgtgaagggatcaaggaactgctgaagatcattgcgagcgaaggggatgcgggcttaccagtcgatgctcacgcgagcctggtggtgctggcggcggagcttcaggcgatgcagacgatgatcggatcgatcgacaaacgcatcatggcgcaacatcgctcgagcgaggcgagccagcggctggagagcatccccgggattggtgttaccggggccaccgcgatcgtagcgacggtatcggatccgaaggtctttcgatcgggtcgtgacttcgcggcctggatcgggctggtgccgcgagaagactcaaccggcggcaagcagaagctcgggccgatctcgaaacggggcgatcgctatttgcgacgcattctggtggtcggagcctgtgcggtattgcgctacgcgcgccagcagccgcagaagtatccgtggctcacgcagcttctcgctcgcaaaccgttcaaggtggtggcggtggcgcttgccaacaagatggcgcgcatcgcctgggcattgctggccaatggcggcacctatcgggcgcccgtgcttgtggcagcggcataaggggtttggcgatgggaaaatgaggttgcgtctgtgtgttcacgaactgcaagggtgatgatggcattgatgcgaaacggtcgagaccgtcgatcgggaaaacccgttatgggtcacgcgatagacgagcgcgtgtttttgtttgggacccgatcagcggattacatcagggccagcggccatggcggctgcatcgcgatgggggcaagcctccaggcgaaaacaggccgaatacatgaccgcacccgaacttcgcagaaaagtcagattccctcttgcaccgcgggcgccgtccataca

SEQ ID NO: 4851 - DNA, 1715 bp, unidentified
  source 1..1715: mol_type = unassigned DNA; note = element_761c096
  misc_feature 1..4: note = core
  misc_feature 5..273: note = LE
  misc_feature 274..1515: note = CDS
  misc_feature 1516..1715: note = RE
  misc_feature 29..276: note = bridgeRNA
ttgctactattagtttgacccccaaacagcccggaaaatccgtactgttaagtggctcagacctaagttacaatgagaggacaatcggtcttacggtgcattgcaagagcttccacgctcgtacggcaaactgtgaaccgaccctcccattgcagcgttcgatttacgcaggttgaaacaacggactcgctccgtacattcgtgtaactaagcaagctgaatcggtaatgagcagcggcggtcaccgattgaaaaaagattggaggaatctctatggcatatcaaccaataacagcagtcgggatcgatgtttcaaaaggcaagagtaccgttgctgttcgcaggcccggcggcgaggtcgtattgacaccatttgatgtctgccatacgacggaagatttgaaacggctcgctgccactttacactctgttggtggtgagatgcgcatcgtcatggagcatactggtatgtactggaggcccattgcactggagctgaaacgggctggtttcttcgttagcgttgtcaacgcaatgctgatccatgactttagtgataactctatccgaaaagtgaaaacggataaggccgattccctgaagattgctaactatgcactgacctattgggcggaactgcgggaatatacatcggaggatgaaacccgccagatgctgaaaatccagagtcgtcattatgagcgtactatgaataccagcgttgcactgagaaacggattgatctccctgcttgaccagacattccctggggcaaacagtctctttggctccgaagtccgaaccgtatccggtcacatcaagtgggtagactttgtaaaacgcttctggcataaagattgcgtggcaaccgtgtctctgagttcttttgcagacaccttccaaaaatggtgcaaaagaaccggataccgcttcagccttgcagatgcagaacgaattcacagtatcgccagaaactcggttgccacgttccccaagaatgatagtacaaaattattgattacgcaagcagtggatagcctaaacgccgtttatgatgcacttcagatgattcgaaaagaaatgcttcgacttgcagcgttgcttccggaatttgatgttgtcatgtccatgtttggagcaggcaacattaccgggccgcagcttatggccgaaattggagatgtccgaagattcacccacaagggagcgctggttgcctttgcaggtgtcgatgcaccgccgtatcagtctggtatgttcgattcaaaaaccaggcatgtttccaaacgaggctccccacatctgcgaaagacactgtttactgtttgcagtgtgatccttcagcactccaacgccaacgatccggtctatctgttcatggacaagaaacgaagtgaaggaaaacattactatgtattcatggtagccggtgctgcaaagttcctgcggatctactatgccagggtcaaggaagctctacttgctcaggaaacggaagatacctctgccgcataacaatactgtttacatagctgatgacagcagccataccgctcacggcatggttgaatgacagctgcttcgcagcaccgcagtgctacgtaaccccggcctgcaaaaaatacctttgcaggtctatttgtcatgcttatttatactggcaacaagtaagctccaatttttctcaaattggggcttgacttatatttgcaggt

SEQ ID NO: 4852 - DNA, 1388 bp, unidentified
  source 1..1388: mol_type = unassigned DNA; note = element_762635b
  misc_feature 1..3: note = core
  misc_feature 4..86: note = LE
  misc_feature 87..1124: note = CDS
  misc_feature 1125..1388: note = RE
  misc_feature 1156..1375: note = bridgeRNA
agatggagtggatggcccccgctcccggcatcgcaatgtgccaaagtgtggtcgtcatcaaccacgagcaagaggagccatccaccatgcaagttaccaccatcggcctcgatctggcgaagaacgtgtttcaggttcacggtatcgacgacgctggcattgtgattgtgcggcgctccttgcggcggcgccaggtgatgcccttcttcggcaagctggaaccctgcctgatcggcatggaagcgtgcggcacgagccctttctgggcgcgtgagctgcgggcgatgggccacgaggtgaagctgatgccgccgatctacgttaagccctacgttaagcggggcaagacggacgcggccgatgcggcggcgatctgcgaggcggtggggcggccgacgatgcggttcgtgccgatcaagtcggctgagcagcaatcggtgttggcgctgcaccgaacgcgggacctgctgatcggccaacgcacccagttggtcaacatgatccgcgctcagttggccgagttcggcatcgtaatggcgaaaggcatcgagcacgccctgcggctggtcgatcagcttgtcgaaggcatcgtgcctgacatcccgtcgctggcctgcaaggtcatgatcgccctggccgaacagatccaggcgctacagacccggatcgccaggctcgaggacgagatcagaatgggatttcgaggcaatgaactggccaagcggctggcgaccatacccggggtcggtatcatcacggcctccgccctggccgcctcggtcaccgacccgcggcgcttcacatcagcgcgccagttcgccgcctcgctggggttgacgccgagggccgattgcagcggcggcagggagcgtatggggcgcatctccaagatgtgtgaccgttacttgcgtcgtctgctgatcaacggcatgacgtcacagcttcaagtagcccggcgcaagcccgaggtgtatccctgggtcgccggcttgttggccaacggcaaatccaacaagctggtcgccgtcgccatggccaataaggcggcgcggatcgcctgggtcgtgatgacccgtggagagacctaccgcccgcgccggcctggagtggaaggtacggcatgaccaattggccgcacgaaagtacaagacctatcagcgaacgcgaggacgatgcgacgtgatggcgaaccggtcggaccggggatcgggacaacccgacgcatgtcttgggcgctagagcccgcttaagagatagggacccggtccacggacaccatcagggccagcggttcaaaagcaccgcgtcaacaggccgcacacaagaccgtacccgacagggccgccgtatcgtcaaaatgtccttgcaacgcgggagccatccacaca

SEQ ID NO: 4853 - DNA, 1573 bp, unidentified
  source 1..1573: mol_type = unassigned DNA; note = element_763fa64
  misc_feature 1..2: note = core
  misc_feature 3..288: note = LE
  misc_feature 289..1464: note = CDS
  misc_feature 1465..1573: note = RE
  misc_feature 41..258: note = bridgeRNA
cttgtattattaaattagtaagaattgtactaagataataatactttctcctttcttacctctcaattatttatacatcattaatttgatgttataattttttaaacactgtggatttgtttctcataatttacagctagactgttttaggaggctcttaccacagtttttatttatagtggtaattagttagttagcactttgatgcttcattacttacaaggctccacggatagaaacttgtggtttcacatgtgtttggtacatttgtatttggaggtgattttaatgtaccttgttggaattgatatttccaaatttaaacatgactgtttcattatgactgaaacaggggaagtcattaataattcattttcttttgataataatgactctggttttacattattacttaatacccttaagtctttagaccaatctcaaaaaataaagatagggctcgaggctactggacattatggtaataatcttaagttattcttaactgagaataactattcttttatggaattaaatccttacttagttaagaaattttcccaagctctaactttaagaaggaccaaaaccgataagcttgatgcgatgactattgccagtgttttaggtagtccaaatctaacctacgaaccctaccaaatatcatcatatcatatttcttctcttaaatcattaaccagatatagagaagcctttattaaagaacgttctttacatttagttcaattaactaacataatggatcaaatatttccagaatttaagccattttttaatggtaaatttggaactacagccatttatattcttaagaagtataaaactcctgaaagaatatctaagcttactgatgaagatattttgaagattaaaaatgtatctagaaaaatatcggcagccaagcttgttaaattacgtgaccttgctaagaacactgtaggacattcatctatttctaatcaaatcctacttaaatctatacttaatctctacactaatgtagatgatgaagtaactgaaattgaaaaacaaattgattctattatgtctgagtataagaatcatattgtttctatacctggaatatctaaatattcagcagctcaaataattggtgaagttggtgattttaaacgtttctcatcagcttctaaattattagcctttgcaggtatggaaccttctactatccaatctggcacgatggattttaaaggtaaaatggttaaacacggatctggacatcttcgttatgttttaatgaacattgccatgactattattatccataatccaactttctattcatattattctaaaaagcaccgccaagaaggtaagaaccatcgagttgccttgtctcatgttgttcgtaagcttgttagaataatttatcatttagaagtaactaatcaagattttaattcaaatcttttaaaataatacataggcttttatcagaagtctttggggtaaggggaactacgctttaattcctcttttttttatttaattaattctttaaatttagtcttgacttctaatagttagt

SEQ ID NO: 4854 - DNA, 1437 bp, unidentified
  source 1..1437: mol_type = unassigned DNA; note = element_7643b14
  misc_feature 1..2: note = core
  misc_feature 3..231: note = LE
  misc_feature 232..1422: note = CDS
  misc_feature 1423..1437: note = RE
  misc_feature 14..199: note = bridgeRNA
gtcctacctttcttgatgtgggtctgagctggtcattcgtaagatcggcggggcccaggggttccgggtatggctgtcatggagtcgccgctggatggctcagagaacttggccgcccgaaaccccgcgacgactcgaccgctaattgggagacgcgacgcgatcgctttgtaggacaacgtcggcgaggtcgtctgctgggttggtgtacgacgagctgacggaggggctgtgcccgagatctgggccggagtggacatcggcaaggaacatcaccactgcgtggtgatcgacgcccaaggcaagagactgctgtcgcgtcggatcctgaacaacgaggctgaactgctccagctcatcgctgacgtactggagctgtcgcgggatgtgctgtgggcggtggacatcaaccacggcggggccgcgctcctgctcggtctgctggtcagccacgaccagcacatcacctacatcaccggcctggccatccaccgcgcctcggccggctaccgcggccaggccaagaccgacgcgaaggacgccttcgtcatcgccgaccaggcccgcatgcgcaccgacctcggtgtcctgcggcccggcgacgagatatcggtcgacctgcgcactctggttacccgccgcaccgatctggtctgcgaccggacccggcagatcaaccgactgcgcgcccaactcctggaaatcttccctgcgttggaacgctcgttggacctgacgaagaaggggccggtcctgttgttgaccggctaccaggccccggccgcgatccgtcgcgccggtgcctccccggatcgcggcgtggctgaagaaccgcaaggtccgcaacagcgcggccctggcccggaccgtcgtggaggccgccgaggcccagttcaccgcactgcccggcgagaaactcgcggccaccatggtggcccgtctggcgaaggggtgatggcccttgatgaggagatcaccgagctcgaagcccttatcgaggcccggtttcgcgagcacccgcacgccgaggtgatccagagcctgcctggcatgggcaccatgctgagcgcggagttcctcgctgcgaccggcggcgacatggacaccttcggcaccgccgaccgcctggccggctacgccggcctcgcacccgtcccccgcgactccggacgcgtcagcggcaacctccaccgcccacgccgctaccaccgcggcctgctccgcgccttctacctctcggccttcgccagcctgcggaactgtcccgcctcgaaacagttctatgagcgcaagcgggccgagggcaaggggcacaagcaggcgctgctggcactcgcccgccgccgggccaacgtcctgtgggccatgatccgcgacggagcgtgctaccaagccacaccaccagtcacggcaacggcttgacaacgtcattgggaa

SEQ ID NO: 4855 - DNA, 1402 bp, unidentified
  source 1..1402: mol_type = unassigned DNA; note = element_7653395
  misc_feature 1: note = core
  misc_feature 2..225: note = LE
  misc_feature 226..1389: note = CDS
  misc_feature 1390..1402: note = RE
  misc_feature 12..237: note = bridgeRNA
ctacttaagactggcgcctgggtctgatcccggccaggatcgggcccaggtacccggtgggaggctccctcagcggctgcccgccgatcgttggtgtggctcactcatggcttgtgtcccaccgggttaccgtgcgggcgtggctggaaaggggtttgccctggctcgaagtagcggtgccttcctgcacggacacctgttcgttcggactctcggaaggaaaccgtgacggtcatcatcgggatggacccgcacaaacgctcggccaccatcgaaatcatcgacccgtccgccaccgtagtggcgaccggccgctatagcaccgacaatgccggctaccaggaaatgctcattgcggcacagcaattcccggagcgggtatgggctatcgagggctgcaacggtgtcggccggcacctggcacaccggctgatccacgacggtgaaacggtggtcgacgtcccggccaagctgtcggcgcaggtgcgggtattcgctaccggcaatggacgcaaaaccgatccggtcgacgcccattcggtcgcgctggccgcgctgcggtcgccgaatttgcggcgagtgcaagcagatccggaactggtcgcgctcggcctgctggtcgatcgtcgtgacgagttgggccgcgctcgcaccgaactgttgaaccggatccatcggttgctgctggaactggtgcccggcggtgccaagaggttcctgtccgcgatgcaggcccgcgctctggctgacaccatcgcaccggccgacccggccgccagggtacggttgcggctggtgttggagttgatcgatgatctcgaggtcgtcgaccgcaagaccaaagccgcggacaaggaactcaagcaactagtcctggaccgcggatcaacgctgatggatttgtatgggatcggcccgtccagcgcagcccggctgctcgcggacgccgatgacatccaccgcttcgccagccgggaccggttcgcgtcctggaatggcaccgctcccttggatgcttcatccgggcagcagcagcggcatcggctctcccgcgccggtaaccggagaatcaatcgagtcctgcatgtcatggcgatcgttcaactgcgataccagaccgccggccgcgtctactacgacggcaaacgcgccgctggaaagacctcgatggaatcgatgcgggcgctcaaacggcgcctgtcgaacgtggtctacaaccggatgctcgccgaccagcggcgacgagacacggcaggcccgggagggcactcgggaacgactatcgaatccagcgcgaccggcctgaccccgcacaccgatccttcggacaagccacaacccggacctaccagcatccagcctaacgcccaactaaccactgccccttgacataaaggggagc

SEQ ID NO: 4856 - DNA, 1582 bp, unidentified
  source 1..1582: mol_type = unassigned DNA; note = element_766a256
  misc_feature 1: note = core
  misc_feature 2..187: note = LE
  misc_feature 188..1447: note = CDS
  misc_feature 1448..1582: note = RE
  misc_feature 6..223: note = bridgeRNA
tcgtattatatggttaaccaatcatttctggttgacctattttttataggttttatgcttaaggtagccgggggaggacgtctgcgcccgtgggacactgatcccgtccgtaatactgtccaccccctccttgtagaaacatgtttgaggctggttgggacagcgatcccgtataaaaagcgaagctatgaaactacaagagatgaaggggcgtaccggcaaatctattaaaggagttgtatttaatatggatcctgttattggtctggatatcgcaaaaggcgaaagccaggtccaagcattcctgcaaaggaaaaagacttataagcaaagctttaaatttgctcacgatctacaaggacttaacgttttttatcagttttatcaagaggtagaacaggtttctggtcagcctcctgctgtgatttttgaatctacggggcattatcacatgcctgtacttcaatttctagagaatcaggatataacgtactacttgattaatccagtgatttcttatgaggccagaaaaacgagcctgcgcaaggtgaaaaccgataaagcagatgcgtttcatttaggcgagctatactacaaggaagatcttgatagctatcaaaagaagacagaaaaagcattgaatttgcgtctcttaacaagacagcatagtgcattaacagaaagctatgttgacattaagcttcaatttcaggcagctttagaccaggtcttccctgaattccaaagcgtttttagtgatctttatggcacactttcgttgaacactttagcgcattatccaaccgctttggatattcaaagggccatgccacaagagctagctgatggaatgcggcagttcggagccagacgctctaaagcatggtttttggataaagcatctcaactaaaagaagcagcaaaacgcaatccttttcaatctccagtttgtcatgggcagcttgttagcctgaacatgtacattcagatgctttttcaattccagcagcatctatccaaactaaaaaaagagatagacgcattagcgaaaacctttgaagactatgaattgctaaaatcaattcccggaatcggaaataagattgcggcaacaatcatttccgaaattggggatatcaacctgtttcaacatcccaaaaagttggtagcttttgcgggattggatccaagtgtctttgaatcaggtaaattcaaggcttccattagccacatcaccaaaaggggctcatcaagattgcggcaagtgctttattcggctgtacagtgtggtctggctaaaaatcgaaacaaaaagcttattgcctattatcaacgcaagcgcaatgaaggtaagccacacaaagttgccgtcattgcttgcgctaataagctcgttcattggattcatgccatattaaaaaacaaaaaagtatttgtagatctgtaataatgaactaacaattatctcaatattcagaaccatattgttacaatcaatatggttatttggtatgcccaatttcagtgtaacatgttttttgccacttttttagacctagatgttgacagctattagctggta

SEQ ID NO: 4857 - DNA, 1192 bp, unidentified
  source 1..1192: mol_type = unassigned DNA; note = element_766d6b7
  misc_feature 1..2: note = core
  misc_feature 3..220: note = LE
  misc_feature 221..1171: note = CDS
  misc_feature 1172..1192: note = RE
  misc_feature 63..221: note = bridgeRNA
cttatatctttcgattggttcaaacttccttgttcgatgtgctctgcggcatctcgaacagtgaacgggttgactcgccaccgcgcagcccgggtctcctgcgagttcgagctcgaacgacagcacgaggcgcgcggtggtggtctctttgttctgctgcatcccgaatggttgatcgaacacatttcgtattcataaggctgggagccggagaactgctatgagtgaacctgtctacgtgggtatcgatatcgccaaggccagcttcgaggtggccgccagtggcgaaacacagaccttgagcctgggcaacgacgaggccggccatgccgagttgtgccaggtacttgtgcctctggcaccccgcctgatcctgctggaggccacgggaggccatgagcaaggtctggccctcgcgctggccgccgccggcctgcgcgtctcggtcatcaacccgcggcaagcgcgcgacttcgcgcgctgcatgggcaagctggccaagaccgatcgcatcgacgcgcaggtccttcgcgggttcgcggagttgctcgaggcacagggtcatgagccgcgcgcgctggccgacgagcagcagcgcgaactcaccgccatggtggtgcgcaggcgccagctggtggccatgctcgtggccgagcgccagcgccttgccttggcccaccccaaggccaaggccagcatcttggtgatcatggatgccattgccgcccagcttcacgacattgacggcgagttgcgtgaacacgtgcgcgcgcatcacgccgacctggcgcgcctgctgacctcggtcaagggcgtgggcccgaccaccgccagcaccctgctggcgcagctgcccgaactgggcaagctcaaccgcaagcagatcacttcgctggtgggcttggcgcccgtcaaccgggactcgggcaccttgcgcggacagcgtcacatcttcggcgggcgcgccgacgtgcgtcgcgtcctgtacgtcgcggcactcgtgggcacgcgattcaaccccgtgctcaaagccttctacgcaagcctgctggccaccggaaaaccaaagaaggtcgcgctcgtggcttgcatgcacaagttgctcgtcatcctcaatgccatcgccagaaccaggcagccctggcgcgacgacttcgctgcggcggtttaggttaatcatccaagatggttg

SEQ ID NO: 4858 - DNA, 1347 bp, unidentified
  source 1..1347: mol_type = unassigned DNA; note = element_76755a7
  misc_feature 1..2: note = core
  misc_feature 3..66: note = LE
  misc_feature 67..1092: note = CDS
  misc_feature 1093..1347: note = RE
  misc_feature 1114..1333: note = bridgeRNA
tgatgctgtggacggctctccgcccccgcgggagcgtgagctcctgccaagcaggaggagagcgccatgggcgaggtggttacggttggtctagatatcgccaagtcggtgtttcaggttcacggcgtcgatggcgccggcgaggtcgcggtccgtcggcagcttcggcgggctcaggtgttggccttcttcgccaagcttccggcctgtctgatcgggattgaagcctgcgccaccgcccatcattgggcccgtgagctggcggcgctgggccaccaagtgcggctgatgccgccgagctacgtgaagccctacgtcaagcggcagaagaacgatgcggccgacgctgaggcgatctgcgaggcggtgacgcgtccgacgatgcgcttcgtcgaggtgaagagtccggagcagcagagcgtgatggtgctgcaccgggtccgacagacgctgatgcgccagcgcatcctgctgtcgaacaccatccgtgcgcacatggccgagtttggcctggtcgctgcgatcggccgcgaggggctcctgggcctgatccaactgatcgaagcacgagatccgcgggtgcccgaggaggccaggacctgcctggagttcctggtcgcccagctgcggctggtgaacctgcaggtgctggagaccgaccggaagatcaggaccagcgccagatcgacagaggtcgggcggcggctgatgaccattcccggcgtcgggccggtgctggccagcgccctggtggccacggtggccgagccgaaggccttcaaatccggccccaacctcgccgcctggatagggctcgtgcccaagcagaactccagcggcgggaaggagaggcttggcgggatcaccaagcagggcgaccgctatctgcgccagctcatggtggttggagccctggcggtggtccgctacgccgagcggcacggaacgcggcggccgtggctcgtccagcttctggccaagcggccgacgaaggtggcgacggtggccctggccaacaagatcgcccggatcgcctgggccatcatgaccagtggcgagaactaccgcgagccggagccagccgccgcatagatcaggcgccccggcgccgagcagtttgggaagggcaacgacggactaacgcatccagccggtcgataccgaaggacaggaaaacccacttgcgccaaagcgcctcgagcgcgtgctaatggtcgggaccggtcctcgcggaaggcattatggccagcggctctatgtgccgcaccaacaggtcgaacacatggccgcaccgatcagctcagccgaagtccagcaggcccttgccaaaggagcgccgtccacaca

SEQ ID NO: 4859 - DNA, 1269 bp, unidentified
  source 1..1269: mol_type = unassigned DNA; note = element_7675cf7
  misc_feature 1..2: note = core
  misc_feature 3..165: note = LE
  misc_feature 166..1257: note = CDS
  misc_feature 1258..1269: note = RE
ctgacttgtttgatggggctaggccgtgggggtctgcagcccctagcgtgcttaggaccctggccggtctggctcgcagtgctccttgccgccttcgggttggctccctgatagcttgcctagccggtcggggtctgccgcggcgtggctcagcagaggcttgcgatgcctgaagtcaggttgcccaccgcggcttcccatccggctagcggaaggtacctgatgatcactattggaatcgatccccacaagagcactctgaccgcggtcgccgtgcagaccgacggtgctcagctcgcgcagattcggctgccggtcaccgccggtatcaacgagcaactactgcacttcgccgctggctggcccgagcggcgctgggccgtcgaaggcgccaccggcctcgggttgggcgtagcccagcaactgagcagtgccggcgagaccgtcctggacgttccggccaagctcgccgcgcgggctcgcctgttggccactggccatggacgcaagaccgacgccctcgacgcgacctcggtcgcggccgtggctcaacacagcaccaccatgcagaccgtgacggccgaagatgacacggtgccactacggctgatctccgaccaccgtgacgacctggttaacgaacgcacccgcgcgctgaaccgtctgcatcgcttgctgcgcgaactcatccccggcggcgccaaacgacagttgtccactgctcaagccgcgggcctgctgcgcaccgtgcgcccactgaccaccgccgacacataccgcaagcagctggcccgtgacctgctcgacaacgtccgacgcctggacacccgcatcaacgcattcaccgatcagctcacggtcttggtgaaacacagccagaccggtctgaccgacatccgcggcatcggcccggtgatcgccgccaagatcatcggtcacagcggcaacgttgcccggttcgcggaccgcaaccactacgccagctacaacggcaccgcaccatcggatgcctccagcggagagcagaaccgccaccggctcagccggctaggaaaccgccaactcaacgccgccatccacgtcatcgctgtctgtcaatccagccgaccgtgccaggggcgggatctgtacctacgcaaactcagcgagaacaagacccccaacgaggcccgccgaaccttgaaacgacgattgtccgatgtcgtctaccgtcaactcgtccacgaccaccaaaaacgaacatcgaccgccacttgacatacagaggcg

SEQ ID NO: 4860 - DNA, 1341 bp, unidentified
  source 1..1341: mol_type = unassigned DNA; note = element_76916c0
  misc_feature 1..2: note = core
  misc_feature 3..70: note = LE
  misc_feature 71..1090: note = CDS
  misc_feature 1091..1341: note = RE
  misc_feature 1104..1338: note = bridgeRNA
ttaatgagatggtcagcccggtccctccttggcgctacgctgaggagggatctttagaggaggccatcccatgaacgcagtcaccgtcattggtatcgatctcggcaagcacagcttccacctgcatgcgcaagatgcagtgggccggatggtgtttcgcaagaagctgtcccgccagcagctgttgcgaacgctcgccaacgtacccgcctgtcgtgtggtcatggaggcctgcgcaggctcgcattggctggcacggcggctcgccggcatggggcatgaggctcggctgatctcaccgcagttcgtccgaccgttcgtggctgggaacaagaacgacttcggcgatgcccaggcgatctgtgaagcggcctgtcggccgagcatgcggttcgtgagtcctcgcaacgaggcgcagcagacagtctcggccctgcatcgcatccgcgagcggctggtccgggagcgcaccgccaccgtcaaccagattcatggcttcctgctcgagttcggcatcagcctccccagaggtgcagcgctgatgggccggttgcccgcggtcctcagtcacgagccgctacccccgcgccttgtggcgctcgctgtgcgactgcgcggtcacgtgcactatctcggggagcagatcaagcaggtcgagcaggaactgatgacggcattgcgcgaggacgacaggagtcgccggctgctggagatccccgggatcggccccatcacggccagcgccctggcggtcgaactcggcgatgcgcagcagtttgccaatgcgcggcagttctccgcctcgatcgggctggtgccgcgccagtacagcacgggaggcaagccgaccctgctgggtatcagcaaacgcggtgatcgcaacctgcggcgcttgctcgtgcagtgtgcgcgagcagtgatgcaacgcgccgactcgcgcaccgacgccttgggcgcatgggtcaaggcgctatcgacgcgacgtcactcgaacgtggtggcctgcgcgttggccaataagctggcgcggatcgcctgggcggtcctggcccgaggtacgcattacgaagctcgtccgcagcttgcttgatcggacgcggcaaattcgtcccgcctgggtttgcgacgtagacaacgtgatgaaacaaacggctcaatggcctggcgaacaacctgatagacagaacagcacagtgatgctgcggggtttttgaggatcgccgggcgcggctctcatcgaggagcggggaccagcatccccatcatgactccggatagatttgcgcaagccccccttgtttcggaaccggactacgttgcaaagaccgggctgaccataga

SEQ ID NO: 4861 - DNA, 1413 bp, unidentified
  source 1..1413: mol_type = unassigned DNA; note = element_7697203
  misc_feature 1..2: note = core
  misc_feature 3..167: note = LE
  misc_feature 168..1403: note = CDS
  misc_feature 1404..1413: note = RE
ctcctaccattaattactgtataactatcttataagcaggtaagatttgccccaagaaaggcagggggacttagtgcttcctgggtcgccgaacccttatttttcagtctgtcccctgcctcttggagccatgataagttgattgggccgtatgagcccttgtcactatggaggattggccggaggcactacctgtcttttttatactaccatgggaggtgtctgtcatgagtttttttgtcgggattgatgtgtcaaaagagaaatttgatgcccgttgtattgagaaacagggagagaaggcattctctctcacgtgttctatgaaccgagggggatttgaaaagcttatccttaatttgccagcggacaaggcatcgctcctcctgggtatggaatctaccgcctcgtaccatatacccctcttctcttatctcaccgcacaaggatacaatgttgtcattatcaatccgctcctcatcaataatttcgcaaagcgttccttgagaaaaacgaagaccgacaagaaagatgcctttaccatcgcccagtttttaatgcatgagaaggggtccttctctgcacaaacccatgatcacatggtaacagagcttaaggaccttgccagcagaagagaaaagcttgccgatcatgtgacctcgctaaagggtaatatgaagaatatcctttctgtcacattccctgaactcgaagatctcaccggggtcttcacgaaatcgacccttcgtctattgacagagtacccatctgcccatgccctgagggaggctgatcatactactgttgccgatatcttgataacccggtcccgaggtaggaaacctctcgcctctgtcaaggcgcttatggcattggcagcatcatccgttggtgtggcaagccctgcaaaagagctcgttctcaaacaggaagcctcactgctcctccatgtccaggaacagatgaaggagactacaaaactgctcatgagcctcttaaacaaaaagataaaacaggatatggagatcctctgttctatgaaggggataggagagaatactgccgtgaacttcctgatagagatgggaggggaagtagaggtctatgagaatgacaagaagctgatcgcagcatccggccttgatccttcaacctaccaatcaggtaaatatgagggaaagagcagaatcagcaagcgagggaatcgacatctaagaagggtgatttggctcatggcaacgaaggtcattatcaacaacaatctcttcagaacctatttcttcaaaaggagaaaagaaggactgccttataaaaaggcggtccttgccacagctcataaacttattcgagttatgttcgcaatgctgagtcgtaaaacatgttttgttgaaggggggaattaaatatagttga

SEQ ID NO: 4862 - DNA, 1612 bp, unidentified
  source 1..1612: mol_type = unassigned DNA; note = element_7698b33
  misc_feature 1..2: note = core
  misc_feature 3..289: note = LE
  misc_feature 290..1501: note = CDS
  misc_feature 1502..1612: note = RE
  misc_feature 14..309: note = bridgeRNA
ctactacaatatatttataggttataaggcactactagtatcattagtaatccctttgatctatcatgttgcttaagctgttagaatgagagggcaatggtcgggcattctcctccttggactttacgtccgtaaaaaagtctgccaaccagctgctcattcacagcgttcgttttatgcaggttgaactgctgtttcccagtacgttcgtgtcacaccccagtagattgaatcggcaatgtgtttatgctggctttccattgcgaataatctgaaggagctgatcatcttgaacgcagtaggtattgatgttgctaaaagtaaaagtgttgtttcgatcattcgacctttcggtgaagtgatttctagcccttttgaactctgccatacttctagagacattgatgaatttattcattctctttccaaacttgaaggagaggttagaatcgtcatggagtacacaggccgctatcacgagcctgtcgctcattggcttaccgatgcgggtttttatgtcagtttggtcaatccaaaactcattaaagattttggaaacaattcccttcgtaaagtgaaatctgacaaaaaggatgccgtcaaaatcgctcgttatgcgcttgacaactggaatgacctgcgacagtataaccttatggataagacaagagaccaactaaaaatcatgaaccgacagtttgatttttacatgaaacataaaacagctctcaaaaataatctcatttctcttttagatcaaacgtttcctggggcgaatactttttttaccagccctgttcgaaaagacggcagtcaaaaatgggttgattttgtcacctctttttggcatgtcgactgtgttcggaaaggctctctggctgctttcactgaacgttatcagaagttctgtacgcgtaaaggctacgactttcacccagagaaaccagtacaaatctttgaagcctctaaaaagttgattgctcttttaccgaaagataaacggacaaaaggtctgattatgcaagcgattgagcagttaaatactctttctaggactgttgagcagttgcgcctacagatggatcatacagctgcgcaattgccagaatatccgatagtcatggctatgaaaggcgtgggcccatcattaggaccacaactgatggcggagattggcgatattcgacggttttctcatcgaggtgctttgactgcttttgcaggagtagatcctggtgtgaatcaatccagcagctataatcagaaaagtgtccgaacttccaaacgcggatctgctcaactacgtaaatcactgtttcaggtaatggacgttttagtgaaaacttcgcctgaaacggatccggtttacgcatttatttctaagaagcgagcagagggaaaaccgtactacgtttacatgactgcgggtgcgaacaagtttctacgcatctactacggacgagtaaaagagtaccttgcatcacttccaggtgaggattgatcttagtttttaagcataagtcgaaaccagcgataatcggtggttctatttgtcatgccttcaattcagataaatctttattcattttcctcttgactttttatttgcagg

SEQ ID NO: 4863 - DNA, 1325 bp, unidentified
  source 1..1325: mol_type = unassigned DNA; note = element_769f566
  misc_feature 1..2: note = core
  misc_feature 3..72: note = LE
  misc_feature 73..1113: note = CDS
  misc_feature 1114..1325: note = RE
  misc_feature 1085..1310: note = bridgeRNA
agataattagactccccacacttaaccctgtggtgtaccttacatttgtatcatcacatgttggagtccattatgaaaaatactattgttggtgtcgatttagcgaagaaagtaattcaagtttgtaaaactataaaccgtacagtgcgttctaatgaagaaatgacacctgatgaatttatcttattccttgctaactcaaagcctatgacggtggtatttgaagcttgcggaacatcaagttattggaaacagcaagccttactctacgggcacgatgccaagcttatttctgccaaactcgtcgcctcagtgaggcaatcccaaaaaacggacaagaatgatgctttagcgattgttcaagctgctttgctgcccgatgttaatttcatttcagggaaatcaatcgagcagcaacaacttcagtcaaccatgcgtttaagagagctttgcagtaagcaaaaaacagcgctcagcaaccaacttattgcattattagccgagtttaatatcaactcaagcaatcgtaacggtggtttacgaggcgcgatagaatcgacccttgaagatgctagcaatggtttctcacatgaatttagaaaagcactagatgaggcctggaaactgtatttaacggtcgcagaaacacttgtaacctatgatgaatgcctagaagcatcaattgaaacccatcctgaatgcaaaaagttactgaaactagaaggtgttgggccaataaatgctatcaatttgtatattgctttgggctgtgcagaattaggttgttttactagaggaaaagatgcttccgcttgtataggattaacccctctgcaatattctagcggaggtaaaagcaagttaggctcgataggtaaacatgttaaaaacactgtgatacgaagtcagctaatcactggcgcggcagcgagtgttaggcacgttattaaacgggaagctaaaacttgtaaagaaaaatggatacaagacttagtcgataggcgtggcataaagtgcgccgcggtggccttggcaaataaaaccgtaagaaccgcttttgcaatgttaactcaaggtactgaatacaaggccaatatgatattgacctcttaacgcgttcaaacaataaaatgcttaatcgaagatgaaaatcaaccagtaaaaacagtgactcgcaaagagcattaagctcgtaaagtagatttgtttactggtccgcgtaaatatcatagagcctgggttcgctaccctattagagctcgtacataagcacgcattaattcatcgataacacattttgttgttgacagtggggagtctacata

SEQ ID NO: 4864 - DNA, 1427 bp, unidentified
  source 1..1427: mol_type = unassigned DNA; note = element_76a2c81
  misc_feature 1: note = core
  misc_feature 2..90: note = LE
  misc_feature 91..1134: note = CDS
  misc_feature 1135..1427: note = RE
  misc_feature 1191..1419: note = bridgeRNA
taatggcatggacgcccctgcttttaacggcatcagttgtgccaaagtggaagtgtcaagcaaccacttaatccagcaggagcgtccaggatgaacattacccaggttggtatcgatttggcaaaggtcgtatttcaggttcacggcatcgatgctcgaggcaaggtcggattgcgcaagcaattgagacggtcgcaggtaattgcctttttcgcccagctgccaagctgtctcattggaatggaagcctgcgcgggggcgcatttctgggcgcgaaagctcacggagcttgggcacacagtgaagctcattgcgccacaatttgtgaagccgtacgtcaagagtaataaaaatgacgcagcggatgctgaggcgatctgcgaagcggtgggccggccgaacatgcggtttgtaccgattaagaacaccgcacaacaggctctgcttgggctacaccgagcgcggcaaggatttgtcatcgcgcgtaccgcgcaagccaatcagatccgtgggttactggcagaattggggttggtgatgcccgtggggatccgctccatcgggcgcaagctaccggagatcctcgaggatgcagagaacggcctatcgggtatgagccgcgcgctgtttgctcggttgttcgagcatttccgcgcactcgatcgacaggttgatgagctggagcgagagatcaacgcgtggcaccgcgaggatacggcaagccaacgactccagacgataccagggatcgggcccctgacagcgagcgcattggtggcgagtgttggcgatgcgaaagtgttcaaaaatggtcgccagtttgctgcatggcttggacttgttccccgccaaaactcgtccggtggcaaaacgaacctgctcagcatcagcaaacgtggagacacgtacttgcgcaccctgttgattcacggggcgcgttcggtgctgctgcatctcaagcgtcgaccggatctggtcgagggctggctggcgcgagtggcggcacgccgcaattcgaatatcgccgccgttgctctggcgaacaaaaatgcacgtacagtgtgggcactgctggcacatggccgcgaataccagaccgggtaccgctcagcaaacgccatcgcggcagcatagcctcgctattttacgaaccgacatcgacaccaaactcttgacacgactttctcaccaccgattgcacaggcgtttttcaaagtgatggcatcacaggtaagaccagggttgactcaaccttataacggcacgggacttcgaaagtccgcaaaagtgatcaggcgtcaaccagcatattccatcagggccagcgactctcgacgtcgcacacacaggccgaatgtatggctgcgatctcttcttgtgaaccagaaccgaaaagaaacgcttggcatagagggggcgtccatgta

SEQ ID NO: 4865 - DNA, 1382 bp, unidentified
  source 1..1382: mol_type = unassigned DNA; note = element_76a468b
  misc_feature 1..3: note = core
  misc_feature 4..92: note = LE
  misc_feature 93..1133: note = CDS
  misc_feature 1134..1382: note = RE
  misc_feature 1124..1369: note = bridgeRNA
tgatggggtggacggcgcccgcaacggcatcatcctcgtgagaggtgtgccaagatggctgctgtcgagcactcatctgaaggagcacatccatggaaaagactgatatcgaactcaatgctgtagtcaccgtcggcctcgatctggccaagcatgtcttccaggtccacgctgtcgacgctgccggccgtgtcgtcatgtctcgtgcgctgcggcgcaaagatgtgctggcattcttcgagcgtctaccgtcgtgcctgatcggcatggaagcatgcggctcggctcatcattgggctcgcgaactggcacgttttggccatgacgtgcggctgatgccgccagcgtatgtgaaggcctatgtgcgtcgccagaagaacgacgcctctgatgcagcggccatctgcgaggcggtgacgcggccctccatgcgctttgtaccggtgcgatcggtcgagaaccaggctgcgctcatgcaccataaggtgcgcgaacttttggtggcacagcgtacgcaactgctcaatgccctacgcagccatctggccgagatcgggatcatcgccgcgcagggaccgaacaatgctcgtgctctggcggttctcatcatggaaagcaacgacatgatcccggcgatcgtacgtccggcgctgttgcctgtcgtgcgtcggctgaacgaactcgatcatgagatcggacaaagcgatcaggccattctggctctcgccagagccgatgacaccgcgcgccgtctgatgagcgttcccggcatcggtcccgtcaccgcctctgcgcttgccgcaagtatccaggatatctccgccttctcgggcccgcgtgagttcgcggccttcctcgggctaacgccccggcaaagttcatcaggcggcaaggagcggctggggcgcgtttccaagatgggaaaccgatatctgcgcaagctgctcgttgtcggcgctcacgcggtcctcttccatcgcaaacgttgcagcgatgcgttgagaagctgggccgatcgcctgatggagaccaagccgttcaagcttgtcgccgtggcgaccgccaacaagctcgcccgcatcgccttcgcgctcatgcgtgatgacgcacgctatgccgctacgccggcgtaacggaaaaacggctgaggctgcggtccagaatcgggtgacaatgacgtgatgggaacagacgaagacatatcccgaaagcctgcaacgtagtcggagctttgagctcgttctcttgatcaggccaaaggaccagcggacaccatcagggccagcggtcacagtactgcaacaacaggccggagacatgaccgcaccgcgaacgtcccattgccgaaaacaaacccttgatcggcgggcgccgtccagaca

SEQ ID NO: 4866 - DNA, 1790 bp, unidentified
  source 1..1790: mol_type = unassigned DNA; note = element_76a6f46
  misc_feature 1..2: note = core
  misc_feature 3..287: note = LE
  misc_feature 288..1544: note = CDS
  misc_feature 1545..1790: note = RE
  misc_feature 13..307: note = bridgeRNA
ctgttactataatatttgccccttggtttatggcagccagccataggcatgggacatctcgttgcctaagctgttagaataggagagtaatggtctgacctcgttctccaagggctttttacgcccgttagaaagtcagtcagccatctcctattcgcaacgttcgatttgtgcaggtagggccaagtggtagtcccacagcgttcgcgtcaccaaacagataggatcggcaatgggtaaagatggctctgtccattgcaaattttatcaggcaggagatgcacaacatgaacgcagcaggtattgatgtttccagcaggaagagcatggtcgccgtcctccggcccttcggggaggtggtgatgctgcccttcgaagtcagacacgatgcgaagagcttgagccatttggcccagacgctcaagaacttggatggggaaactcgtgtagtgatggaacacacgggccgttactacgaacccatagccaatgttctccacgacgcgggtctgtttgtcagtgcggtgaatccgctgctaatcaaggaatacggcggcaactcactgcgcaaggtcaaaacggataaggccgatgccaccaagattgccagatacggtcttgacaactgggctgatttgcgggattatactcccatggataccattcgttatgatttgaaaacgctgaaccgccagttccacctggcagtcaagcaaaagacggccacggccaacaacctcatcgcattgcaggagcagtcctttcccggcatccgcaagtgcttcaccagccctgtgcggaaggacggtacgcagaagtgggtagacttcacgcacgatttctggcacgcagactgtgtacggggcgtcagtaagaacgcctttaccgagcgataccgcaaatggtgcaaacgacatggctatagtttcaggcaggataaggttgaggatgtttacacacttgccaaatctgttgtcgttctggttgccaaatccgaggtaacgaagctccttgtccagggggcagcagaccagctcaccagcatttcccgctctgtggagatctaccgcgccgaaatgaaccgtctggcctccatgctgccggaatatccatttgtcatggcgatgtacggctgtggggattcaaccggtccgcaacttatggccgaaatcggcgatgtccgccgctttgcgactaagaaatctcttgtggcttttgctgggatagaccctgctcccaatgactctggaatcaaggtctcaaagagcaacaagaccacaaaacggggttctccttatcttcgcaggacgctgtttaacatcatggaaatctacatccgaacctctcctgcggacgagccaattttccaatttcttgaccgcaaacgagccgagggtaagccgtactacgtttacatgactgccggggcaaacaaattcctgcgccgctactacgcccaggtgaatgattacctcaaaacgcttgagccgaaagaagccgatccttctcaggaaactactgctgaaactgtgtcaacgtcttgacacaggggcggctgtgccgccccttggctactcaccagcacaggcgggatgacctgtcaaggacgccgcaggcacggcgcagccgtttatccttgactggtcggcccggcggtgctacctgcatatgctttccaatatgagccagcgccctgcggtggcttttttgtgttgctcattttgcctcctgctcagcctcaaatattttctccgtcaagctcattttgggcttgactttttatttgcagg

SEQ ID NO: 4867 - DNA, 1582 bp, unidentified
  source 1..1582: mol_type = unassigned DNA; note = element_76a72d3
  misc_feature 1: note = core
  misc_feature 2..280: note = LE
  misc_feature 281..1456: note = CDS
  misc_feature 1457..1582: note = RE
cgtataatccaatcatgttagaaaagtgattggattcttcctttctcccaggttctctgggctatttctaatccttttctgatatatttatctaggcactgtggatctgttcctatgtctgtacagctttgactggtaggaggtgactcagaccacagcttttcgtctaatactggtaattagtttgttaacgctcgacgtttagatttacgtgattacacagtcgatctctctgtggtagacaacagtgcccactataataatcaggaggttttatctaatgtctatgtactttgctggaattgatatttccaagtacaaacatgattgctgcattatagctgcagccgatcaatccatagtggctaaattcacttttaaaaacaataaagaaggattcgatcaactactcacaactattaactctttatcatcttctgaggacataagaatagggtttgaatcaacatctcattatgccctgaatcttgagcttttccttgaaaacgcctcgctaacgttcatggaagtaaatccagtcttgatatcggaatataaaaaatcgaccactctaaggcgtacaaaaaccgattctgttgactgtgaatccattgctcgctggttaatgactgttgagtacaaaccccattcaaaaggattttatcactcttattctttaaagtcattaactcgtcttcgcgacaggcttgttcgccaaaggtctttatatcttgttaaactcacaaacgttcttgaccatacatttccagagttcaagccattctttaatgaatgtttttctaaaacagctctatatctattagaaaactacggctctgctgagaacatgtctgccatgaatgaaacggactataatgaaatccgccgtatatcacatggtaaattttctccccaacagttcttagagttgaagcgcttagcagctgatactgttggcatcaataattctatatttgatgtggaacttgaaagtttactgtccctttacaaatccttggtaaaggaaataaatacgcttgaaggtgagattattaggctaatcaatgaagtccatcctcacttcatgaccattccgggaattggtcctatttctgctgcagtaatctacgcagaatacggagacatttccaacttttcttctccagcacaaatgcttgcttttgctggaattgaaccgagtgtaaatgattcaggtactgaatctcatggcggaaagatggtaaggcacggatcatctcaattgcgatatgttttattaaactgctgtcttcctttaattcgcttcgatatgacttttgcaacttattacgccaagaaacgtcatgaaggaaagccgcatagggtagctataacccatgttgcaaagaaactaataagagtaatctttgctttagaaaagcaaaacatagacttcaattctcagaaacttcgctaatatcgaataacatccatcccagacaccatctgaaatacggtgtattcagatggtttattaaagttaccctcaagtcaataaatccaaaattttctctaaaacctattgactactaatagtttgtca

SEQ ID NO: 4868 - DNA, 1152 bp, unidentified
  source 1..1152: mol_type = unassigned DNA; note = element_76aeb0d
  misc_feature 1..2: note = core
  misc_feature 3..192: note = LE
  misc_feature 193..1137: note = CDS
  misc_feature 1138..1152: note = RE
  misc_feature 28..191: note = bridgeRNA
cttgtatctctcggcttgtgacacgatactgccgcttatgaagaattggggcctgatagaccgtcggttccatggtctttcccagaccgagtgtgagcgtgggtcgtccggccctctcacctgtaaagcccgaacagttgcgagggccgttgagcccgcatttcgcaaggctgggcacgacaggaggctgcgatgagttccctcgtattcgtcggcattgatgtctcgcaggggtgcttggatattgccatccgtcccggcgcgtcgttttcgctcccgcatgaggagtctgccatcgctacattggtcgaacaactctgtgccctcggtcccaccctgattgtcttagaagcgacgggcggaatggaaatcccgctcacgagcgcgctcgccaccgccggcttgcccgtggtcgtcgtcaatccccgtcaggtgcgcgacttcgccaaagccagtgggcacttggcgaagaccgatgccctcgatgcccaggtgctcgcgcagttcgccgaggtcatgcgcccacaaccgcggccgctgccggatgcggaggcccgcgccttggccgcactgttgacccggcgacgacaactggtcgagatgttgacggccgagaagaatcgcctgctgagcgccccatcgcccatccgcacacgtctgcggacgcatatcacgtggcttgagcgagaactgcagtcgaccaacaccgccttggcggaggccattcgtcagagcccggtgtggcgtgaaaaagacgaactgttgcagagtgtgccgggtgtggggcccgtcttgacctcgaccctcttggcaagtctcccggaactcggcaccttgacgcacaagcagatcgcggccctcgtcggcgtggccccactcaaccgcgacagcggcacgctccgagggagacggacggtctggggcggacgcgcacaggtgcgcgctgtgctctatatgggcgcgatcgtggccgctcggttcaatccggtgatccgagtctgctatcagcgcttgcagcgagcgggcaaagccaagaaggtcgccctcaccgcctgtatgcggaagttgctgacgattctcaatgcgatgctgaaacatcggacgccctggcgagaggtggaggcacaccatgcttaaatctcaagacagttg

SEQ ID NO: 4869 - DNA, 1369 bp, unidentified
  source 1..1369: mol_type = unassigned DNA; note = element_76af956
  misc_feature 1..3: note = core
  misc_feature 4..77: note = LE
  misc_feature 78..1109: note = CDS
  misc_feature 1110..1369: note = RE
  misc_feature 1082..1357: note = bridgeRNA
tgatggggtggacgccccccgacggcatctatgtgccaaggtaggtgttgcagaacacctatgagaaggaggcgtccatggcagaggttatcacgatcgggttggatatcgcaaagaatgtctttcaggctcacggcgcggatgctgggggccaccaggtttttagccgacggattgcacgcggaaaggtgctggagtttttcgctggacagccaaagtgccttgtggcgctggaggcctgcggcggggcacatcattgggcccgcgagttgatacgcatgggccacgaagtgaggctgatcccaccggcctatgtgaagcctttcgtaaagcgccagaagaacgatgcagccgatgctgaggcgatctgcgaggcagtgcagcggccaagcatgcggtttgtagcggtgaagagtgaggagcagcaggcctcagcgctggtattccgcacacgggatctgctggttcgtcagcgtacgcaaactatcaacgcgatccgcgggcacatgacagaatacgggtgggtggctccgaaagggccttcctgggtgacagtgcttggcgagctgattgatgacgagggcggggcatcactgccggatgcggcgcgggagatgttccggattatgctcgacctgctcgagaaactcgatgatcagatcgctgacctcgacaaggaaattactcggcgcgcccgtgaagatgaagttgcgcgccgactgatgaccattccaggcatcggaccgattgcggcgactgcgatcgcggcattggcaccagcagcacaaacgttcaaacgtggtcgtgactttgctgcctggcttgggctcacacctctgcagaaatcaacgggtggaaagacgaagctgggtcgaacatccaagatgggcgaacgtacgctgcggcgattgctgatcatcggcagcagttcggtgatcctgcatgcgagcaggcgcggggcgcccgaaggatcatggctcgacgggatgctggcgcgcaaaccgcgcatgttggtcacagtcgcacaggcgaacaagacggcgcgcatcgtctgggcgctgctcatgaagaacgaggattacagggctccggtggcggcagcggcataagccaggcagccatcagaggtcgtcggaggacgacaagcggtcgaaggagggtatggcgcaacagtcggcaagacggggtcggaaaaccaggaaatgttcttgtgccttgagcacgctcgtctgatctggatccgatccgcgaactcccatacgggcccgcagctaatgtcgctgcactacgaggccggacagatggcagcatccgatctacgcgcaatcatacccaaattaccgcttgcgttcgtcggggcgtccacaga

SEQ ID NO: 4870 - DNA, 1852 bp, unidentified
  source 1..1852: mol_type = unassigned DNA; note = element_76c3ed6
  misc_feature 1..3: note = core
  misc_feature 4..132: note = LE
  misc_feature 133..1419: note = CDS
  misc_feature 1420..1852: note = RE
  misc_feature 1520..1789: note = bridgeRNA
aggagcttcctgtataattcaaatatagggaattctaagaaagaaggttgagaaaaaaatacctcagtgtaaaataagattactgactttgcgggttagtaaaaaatcttattaaacagagaggtatctgaaatgaagtataacacacagaacgcaaaaattgaatctattacggaaaaaacattgatagttggaattgatgtaggaagtgaaacacactatgcaagagccttcgattggcgtaattatgagtattcaaaaaagccattggaattcagtaataatgaagcaggatttgtgacatttaaagtatggatggaggaactggcagagaaatatggaaaagatgttgtgattcctgggatggagccaacaggacattattggttcaatctaggagcatacctgcaggacaacggaatgaaaccagttcatgtgaatccacatcatgtaaaaaaatcaaaagagctggatgataataatccaaacaaaaatgaccgtaaggatcccaaaacgattgcggcactggtaaatgaaggaaggttttcgtatccatatataccaacaggtgtttatgcagagatccgaagcttatcaaatctgaggcttcaagcccaggaagaaatcacaaggatcaagaatcgtattgcaagatggtttagtatctatttcccggaaataaaagacgtttataaaaatccgggagctgtgagtggtcttatgatcttgaaggtagcaccgttaccgaaagatatcgtaaaattgggagttgatggagttaaccagatctggcgggatgctaagttaagagcagctggtctaaagagggcaaagaccctggtaacggctgcggagcacagtataggaagtcaggaagcttgtgatagcgcaaggattgaattgaagatactgctgaatgattatgaaatatatcatcagcgggaagaagaattaatggagctgatagaagaaaaactgtcagaagttccatatatcgataagctgttggagatcaaagggattggaatgaagacagtaagtggatttgtagcagaagtaggagatatcaaacgatttgataatccgaaacagcttcagaaactggcaggatatgccatagtagagtgtagttcaggaaaacacaaaggtgaaagtcatatcagttatagaggaagaaaacgccttagatatgtactgtatgaagcagccatatcattgattgcgaggaatacagaatttaaggaaatacacaggtattatcaaaccaggggaaagaattcattaaagaaaatgcagtcagttatagcggttgcatgtaaagcattaaggatcttttatgcgatattgacaaagggagtaacttatgatggagcaaagatgctgcaagatatcaagagaccacaattgaaagtagcataagaaaagaagatcatcgtaaaaggatgaagaaagcagactgtaatgggaaacgtccatctaaaagatgctgttacagaaagcaagtcagtaataaaaacaaagaatgagcgagtagtcggcaggaataaattccagagggcaagaccctgacgaggagctaagctgacacccggattatggataggcagaacgaaggaagttaggacatataaagagtagatcctggtagatacgggaggtgcgttgccatagatggaagggaatatacaaggccattaaaaacagaacaaagaagacgttttgttttgtataccctaaaacagctattttcgtactggatacagagaaatatccataaaacatgctcattcatctgagataaataactaaaaaatcctttattttaaaggaaaaacaacttgactaattaggg

SEQ ID NO: 4871 - DNA, 1211 bp, unidentified
  source 1..1211: mol_type = unassigned DNA; note = element_76c4504
  misc_feature 1..2: note = core
  misc_feature 3..209: note = LE
  misc_feature 210..1196: note = CDS
  misc_feature 1197..1211: note = RE
  misc_feature 12..189: note = bridgeRNA
cttgtatctttcatcccgtggtgattagctatcaccacacgaagcagaggcagcttgatggctgcgctaaggccctgaccttgtcgagtagattaaaccctctgcttcacctctcgccagcacagacactgaacggtagccaagggcaagaccctgtatgcacaaggcaagtgggcgaagttggctaatcatcgtaacaggaggccatcatgttttatcttggtatggatgtcgcaaaggccaagctggactgtaccctgctgctcaataatgcaagcagcaaaggcaagaccaaggtggtgcataacagcaaagcaggcgttgccgatttgttggcttgggttgccaagcacaaagtttccccggaagaattacacgttgtcatggatgccaccggcgtctatcacgagcaagccgcgctggccctggtggatgccggagtagtggtttccatcatcaacccggcgcaagttaaagattttggccgtgggctggccgtgcgcaccaagaccgatggagtggatagccttgttctggcgcgatatggcgcgttgatgcaacccgctgcctggatgcctcccaccccggaagcgcacatgctgcaagccctattggcgcgccgcgatgccattgcccaagacctgcatcgcgaacgcaatcgccaggagaaagccgaggccaccgacacgccagcgttgattcggaaatcgcttgaagacagcattgtgtttctggccaagcaactagagcaaatccagaaagacgttgatgaccacatcagcaaccatcctagtctgaagagcgatatgaagctgctccagagcatcccgggggtggggccgcaagttgggggcaacatgctttcggtgttgagcaaccatcattttgggtcagccgaacaagtggcggcctatcttggactggtgccggtggagaaactatcaggcagttcggtgcgcgggcgtgccaagttatctaaagcgggcccggccagaatacgcgccgtgctatatatggccgccgtcgcggcaaaacgctgcaatccgcacgtcaaagccgtctatgagcggatgctggcgcgaggcaaatgcaagatgtccgcccttggtgctgcgatgcggaaattggtgcatctgtgttttggtgtcctcaaaacacagcaaccataccaacgcgattatgcaaaaaacgcttgaccagaaagacggtat

SEQ ID NO: 4872 - DNA, 1405 bp, unidentified
  source 1..1405: mol_type = unassigned DNA; note = element_76cbebf
  misc_feature 1..2: note = core
  misc_feature 3..79: note = LE
  misc_feature 80..1123: note = CDS
  misc_feature 1124..1405: note = RE
  misc_feature 1122..1393: note = bridgeRNA
tgttggggtggacggctcccaacggcatcgcgatgtgccagattgagcttgtcgaaaggctcaacgagggagaccgtccatggagaaggttacacgtattggcgtggatacgtcaaagaacgtctttcagctgcacggcgtcaacgcggaggagaagccggttcttcgaaagaagctgacccgcccgaagatgatcgcgtttttcaaggatttggccccgaccgtcatcgcgatcgaagcatgtggcagcgcgcatcattgggccaggccgctgagctcgtttgggcatgaggtaaaactgatcgccccgcagttggcaaaaccttacgttaagcgtgggaagaatgatgcggccgatgccgaggccctttgtgaggcgatgagccggccgacgatgcgctacgtgccggtcaagactgcagaccagcaggccgcgctgatgttggtcggcatgcgtgaccggctggtccggaacagaacccagctcgccaacgcgatccgcggctatgctgccgagttcgggcttacggtagccaagggcatatgcagggtggaggtgcttctcaccgatattgcttccgatgataccctgccagagctcgcccgggatctgtttgcgatccaccggcgcgaatatgaactgctgcaggtggagatcgagaaagtcgaagccaggctcatggaatggcatcgcaaggatgaatgtagccagcgcctttcccggataccgggcgtaggcccgatcggcgcatcgttgctgatgatgaaaacgcccgaccccaggctattcaagtcagggcgtgattttgccgcctggatgggacttacgcccaaggatcattccacggccggtcgagctcgccccggcgggataacgcgcgccggagatgagcttctgcgaagcgtactggtcaatggtgccaccgctgttctgaaacaggttcgggcggggcgcgggaggaacgcatcgccatggctccaaaagcttctggagcacaagaaacccaagctggtagccgttgccttggcaaaccgaaccgcccgcatcgcctggaagatgatggtgagcggtgaaagctatcgcgcaacgccagttcaaccagtcttggcaaaagcggcttgagagatcggcttgtcatggtgagcagatacagaatgctaccgtgctgagctgatgcgagatcttgcaggaaacgagtaggtggactgattgatcaatccgggatgcgggacactccgagctttccactggccctccgaggtcgtcttggtgtttggaacttgcatcgcgaaaaccatcttggccagcggccatgcgcgccgcatcaacaggtcggacatatgatggcaagcgatctgatcaaatacccgctcaaacctcttgcaagagggggccgtccacata

SEQ ID NO: 4873 - DNA, 1391 bp, unidentified
  source 1..1391: mol_type = unassigned DNA; note = element_76d005e
  misc_feature 1..3: note = core
  misc_feature 4..160: note = LE
  misc_feature 161..1156: note = CDS
  misc_feature 1157..1391: note = RE
  misc_feature 1179..1355: note = bridgeRNA
acatggggtaatcgcgggagcgcgtcgacctgaaaatcaatcatagccttggagggtggctgttccccgataggatggaaatacgggctcacgactggacgccaggcccaagcatcgaatggagaacagccatggaagaatatatcggtctcgagtgtcgatgaaagagacggcggtgtcgatccgccgcgacggcaaacgcatctggcgcgggaagtgcgcctcggatcccaagctcattgccgagctcatccgcaagcgggcaccggcggtcagacgcatggtgtttgagaccggtccgctgtcggtgtggttctatcatgcgctgtgcgccgaaggagtgccggcgatctgcattgatgcgcgtcatgccaaagcggctctcgatatggcgcctaacaaaaccgatgcgaatgatgccgatggcctggcgcatcttgccgaggtgggcttctttcgtgaggtacgcgtcaagggcttcgacagcatgctgacccgtacgctcgtcgctgcacgcactcggctggttcgcatcaccatcgaactttccaaccagatccgcggcgtcatgaaaaccttcggtcttgttgttccggccggaaagggaagtatgttcgagcggaacgtgcggggccttcttgtcgatcacgagcagcttgctgctatcatcttaccgcttctggatgcctggcgcagtgtccgtatccgtgccgctgacctcggacgtcaactcatcagggatgcacgcgagagccaggcctgctgccttctcatgtctattcccggcgtaggcgcgatcaccgcaacgtctttcgtcactgccgttgaagagcctgacaacttcaggaagtctcggaatgtcggggcctggatcgggctaacgacccgtcggtatcaatctggggaggtcgattatgacgggcatatatcccggcgtggcgacaatcacttgcgaggacttctctatgaggccgcgtccgtcatcttggcccgcagcaagaaagagagcgccctacgaacatggggtctccgactccgggagaggctcggcttcaaacgagccgccgtcgctgtcgcgcgcaaactggccgtgatcatgcatgcgatgctcaagaccggcgagttcttcgatccgaatgcaggagccgcggcatgaaagctggtggatagcgttcagtaactgagcgcccgagacgtccctgccgggacgtaggctgagccattccgttgatgggattgcaccgctgacccagccgagtgcgtcgtccacattgaaggctcttccaacgaagccaatgatgcggcggcctctgccgaccgcgaaaacaaccctgtaacccggcacacgcgtctcatatcaagatacttgaccccacggctgcgattagaca

SEQ ID NO: 4874 - DNA, 1212 bp, unidentified
  source 1..1212: mol_type = unassigned DNA; note = element_76d1cac
  misc_feature 1..3: note = core
  misc_feature 4..235: note = LE
  misc_feature 236..1198: note = CDS
  misc_feature 1199..1212: note = RE
  misc_feature 44..221: note = bridgeRNA
tcttgtatgttgcacctatcgcttgactgggctccagtccggcggtctactcggggacgcctgagtaggagcgcgagggagccgttccgtgtctaaggccacgagcctgccgcagagatgcgctcctcgcgctcagcgtgtggcgtccggtcgaacggtatcaaaggccgctctctcgagcgcagcctgcatacacaaggctgaccgcacacgacgccaccgaaaggagcgccccgtggaggccagtctcggaatcgatattgctaaagcgacattcgccgtggcgttgctgaccgccgatggccgcgtacggcacaagagctgcgcaaatacgccggcggggtttcgcgacctcgccacctggctgcagcggcagcacgtcacgacggtccatgcgtgcctcgaagcgaccggcacctatggcgacgcgctggccacgtggctgcatgacgccgggcatgtggtcagtgtggtcaatcccgccatcatgcacgcctatgcgcgtacgcagctgacgcgcagcaagaccgatcggatcgatgccgagctgatcgcccgctttactgcgacccagccgccgccggcgtggacgcccccggcgccagaaattcgccagctacaagcgctcgtgcgccggctcgacgcgctccaggggatgcgcacgcaggagctcaaccggctcgaggcgggggtggcagtggccgaggtccgcgcctccatcgaggcggtcctcgcgcagctggacgcgcagattgcccacgtcaagcagctgattcgcgaccacctcgatcggcatccgaggttgcgggcccagcgcgcgctgctcgtcaccattccaggcatcggtgagacgaccgctgcggtcctgatcgccgagctcttcgacaagccctacacccgggcgcgccaagccgcggcctttgccggcctcgtgccgcggattgtcgaatcgggcaccctccgtggtcgcagccgcctctcgaagatcggccccggccgcctgcgtaaggcgctgtatctgcccgcggtcgctgcgctccgctgcaatcccacgatccgggccgtccgtgcgcggctccaagccgccggcaagcctccgatggtcatcatcggcgcggccatgcgcaagcttattcatctcgccttcggggtactcaaatccggcaaggcgtaccaatccacttacgctcactcttgactctcaacacggta

SEQ ID NO: 4875 - DNA, 1201 bp, unidentified
  source 1..1201: mol_type = unassigned DNA; note = element_76d62d9
  misc_feature 1..2: note = core
  misc_feature 3..180: note = LE
  misc_feature 181..1167: note = CDS
  misc_feature 1168..1201: note = RE
  misc_feature 12..189: note = bridgeRNA
cttgtatctctctgtgataggtgtttagctagcacttatcacatcgggaagccagtgaagtatgttgctcgtcttatcagaaaatgatgttttgtagattataccctggcttcctaacctccataaaactgaatggtatccaagcgcttgacgctgcatgtacaaggggagtaaatagagatgaaggcttttacaggcattgatgttagtaaagataaattagacgtgtgttggcttcgtgatgtcaccacaaataaaaagaaaacaaaggtgttaaaaaacacctctaaaggccatgaagcattagccgaatggttacttaaaaatacaggtttaacacctcaagagattgttatcaccgttgaaccaaccggtgtttatagtgaacccttgatgtattttttacatgcaaaaggctttattttacaacaagctaatcctggtaaagcatacaagtatgctcaggccttagatttggttcacaagacagataaatcagactcgataatgctagcgaggtatggccacgacagacagtattctttatctcattggcagccagaggccaaggaattcagggagttaagagctatgttgcgtcgattggaagcactagagaaagatttacaacgagaagaaaatcgatttgaagcggctgatttttcaagtgcatcaaaacgtgtaattgaatcattagaaaacatgatttcagcgttaaaagaagaaattaataagctcacagaagagattgatgaccatattgaccgtcacccagatttaggaaaaaacagagatttcttattaactatcaaaggtgtgggtccagttatttctaggattatggtgagcttatttgccagtaaagattttaaggatgcaaagcaattatcggcttatttggggttaattcctaagatgaaagagtccggaaagcgagctggaaaaacgaccttgagcaaagaagggccgggttacataagagaaaaattgtatatggcagcggttgttgctagccagcataatccagatataagggcacagaaagtgcgcttattagccaaaggaaaaacgaaaatggaagccttgggcgctgcgatgcgaaagcttgcacaaatatgttttggcgtggtcaaaacacaaacaaattatcagcctcaagtaacataaattagtacttgagaccggtatagagagatggtat

SEQ ID NO: 4876 - DNA, 1358 bp, unidentified
  source 1..1358: mol_type = unassigned DNA; note = element_76daa93
  misc_feature 1..2: note = core
  misc_feature 3..75: note = LE
  misc_feature 76..1101: note = CDS
  misc_feature 1102..1358: note = RE
  misc_feature 1125..1355: note = bridgeRNA
ttaatgagatggtcacccccacaccctgcgagggctacgctttcgcagggtgttttgttttcggaggccatcatcatgagtgagtcagcgctgatcggtatcgatctcggtaaacacagttttcacctgcacggccaagacactgcgggccgagaggtgtttcacaagaagctcacgcgagcacagatgatgcattttttcggcaacctgccgagctgcgtcgtagtgatggaggcctgcgccggggcgcactttgtcgctcgccaactgacggcgatgggacatacggccaagctgatttctccacagttcgttcggcccttcgttaaaggcaacaaaaacgacttcgtggatgccgaagctatttgcgaggccgcatcacgtccatcgatgcgcttcgttacgcctaaaaccgcagcccagcaaaccctgtctgttctgcaccgtctgcgtgaatcgctggtgcatgagcgcaccaaaaccactaatcagatgcacggtttcctgttggagtttggtatcagcctgcccaaaggcctggcaatcatgaagcgtttggcgagtgtcttggccgagcacgagttgcccattcggttgagggtgttgctgcaacgcctgtatgagcacttcagttacctggatgagcaaatcaaggcgctggataaagagctggcgggccaactggccgacgatgatctgggtagccgtttgctgagcctgccgtgtgttggtccgatcaccgccagcctgctggctgtcgagatgggcgatgggaaacagtacaaatgcagccgcgatttcgccgcctccgtgggcctggtgcccagacaatatagcacgggcggcaaggccaacctgctggggatcagcaagcgcggtgacaagcacctgcgacaactgttggtgcagtgtgctcgggtttatatgcagaggctggaacatcaaaaaggagcgctggccgactgggttcgttcattgcttgggcgacgacactcgaatgtggtggcctgcgccttggccaacaaactggcgcggatcgcgtgggcgatagccgcccaccatacgcaatatgaaacagggccagacgccttgaacgcctgaccctgcggttgttgctgtgccacgaatcacctttcaggttttgcgatagctgaacaacagatgacgtgaacggcccaccggcctggcgaagaacctgacacaaaaatcggcttcagaagccgtcggatttttcaggatcgtcaggcgcgactctcatcgtggcgctggggcatgccccaaacagacgccggatagatttatgcaagccaaccacttcacccgtttatcagtattgcaaaaatgggggtgaccataga

SEQ ID NO: 4877 - DNA, 1362 bp, unidentified
  source 1..1362: mol_type = unassigned DNA; note = element_76ddcbd
  misc_feature 1..2: note = core
  misc_feature 3..192: note = LE
  misc_feature 193..1104: note = CDS
  misc_feature 1105..1362: note = RE
  misc_feature 1080..1350: note = bridgeRNA
cgatggggtggacgccccctgacggcatcgaagtgccaaagtggaggtgttgagcacaccacttgaaggaggcgtccgtgggtgaagttagcacgatcggcctggatctggcgaagacggtgttccaggcgcacggcgctgatgcgtcgggcgccgtagtcttccgcaagatggctgaggcgcgaccagctgttggggttcttcgccggccagccatgctgtctggtggcgatggaggcctgtgcgagcgcccattactgggcgcgcgagatagcggccttggggcatgagacccggctgatcccgccgtcctatgtgaagcccttcgtgaagcggcagaagaacgacgtggccgatgcggaggcgatctgcgaggcggcgcaacgcccgacgatgcggttcgtcgagccgaagagcgccgaggcgcaaggcgcggctgtggtcttccgcacgcgcgatctgctggttcgtcagaggacccaactgatcaacgccttgcgcggccatctcgccgagttcggtttcgtggtccggcagggacctggccacgtcagcaagctgatcgagctggtggctgatccctcttccgacctgccggtcgaggcgcgtccggtcttggtggtgatcgccgagagcctgcagtcggtgcaggcgaagatcgcggtgttggatcgcgagatcgcggcgcgcgcgaaggccgacgcgctcgccaagcgcctgatgaccatcccgggcgtcgggccggtcgtcgccaccgcgctggtggccctggcgccgccggcgtcgaccttccgccggggacgagacttcgccgcttggctggggctcacgccgaaacagcattccagcggcggcaaggagcggctgggccggacctcgaagatgggcgagcgcagcttgcgacggctgctgatcctgggcgccagctcggcggccaaggccgcggcgcgcgatggatcacgggcgagtccgtggctcgtcgggatgctggccaggaagccacgcatgctggtgaccgtggcgctggcgaacaagatggcgaggatcgtctgggcgctgatggcgcgcggcggatcctacagggctccggccgcggcggcgtaacccgtcgcggtctgaggtcgtcagggaggcaggaaggtcagacgagaggtatggcgcaacggtcagagacggggtcgggaaagccagtcaaaggtccaagcgcctcgagcgcgcctaagcggtatggacccgatccgcgatctccatacaggccagcggcagtgaacggccgcaccaacaggccggacacacggaagcacctgaacctgcgcgctcaacttctcgaaaacctcttgcatccggagggacgtccacaca

SEQ ID NO: 4878 - DNA, 1415 bp, unidentified
  source 1..1415: mol_type = unassigned DNA; note = element_76e4f35
  misc_feature 1..2: note = core
  misc_feature 3..116: note = LE
  misc_feature 117..1151: note = CDS
  misc_feature 1152..1415: note = RE
  misc_feature 1169..1410: note = bridgeRNA
agatgccgtaatgggcctccagcaggagttggctggttgggcggctgtccctcagagtgatggtgtgagaagcggggtccgagtgggtcggccccaagcatcatcgggggacagccatggaatactatgccgggatcgacgtgtcgttggaacagagcagcgtgtgcgtggtggatgcgacgggcaagatcgtgtgcgaaaccaaggtggcgagcgagccggaggcgctggtccgcttcttcgcccagctcagcgtgccggtgacgcgcatcggtctggaggctggtcccctgtcacagtggctgcatgccgggctgagcgaggcgggtttggaaacggtgctgctggaaacccggcacgtcaaggcggcgctgtcggcgatgatcgtgaagaccgaccgcaaggatgcccgcggcattgcccagctgctgcgcatgggctggttccggccggtccaccgcaagtcggctgatgcccaggaggtgcgcgccctgctggtcgggcgcaagctcctgcagagcaagttgcgcgacgtggagttcagcatccgcggcattctgcgcggcttcgggctgaaggtcggcgaggtgagcaaggggcgctttgcggcacgcgtcgaggagctgatcgccgggcacgcgatgctggaggcggtggtcggcgccatgctgacggcgcgggccggcctgcacagcgagttcatgcgtctgcaccggcaggtgctggcgatcgtgcgggcagacgatgtctgccggcggctgatgacggtacccggcgtcggagcgctggtcgcggtaactttcaaggcgaccgtagacgatccggcgcgcttcacctcatccaaggcagtgggggcgcacttcgggctgacacccaagaagtaccagtccggcgaaaccgatgtgacgggtggcgtcagtaaagtcggtgacgccatggtgcggacagtcctgtacgaggcggccaacgtgctgctgagccggacgacacgcttttcgacactgaagcgttgggcgctggacatcgccaggcgccgcggcgtaaagcgggcgaaggtcgccttggcgagaaagctcgcgaccgtgttgcaccgcatgtgggtcgatggcagcgagttccgctggggtaaggagacggcggtggccgcgtaagcggaccaccaggtaacagtttggggcaggcccggatgggtcttgcctcggtgaggtcccgtcgccgggacgcggaaaccagcgaggccgggagtagtgctgtggaagtccctgttggggtgaaccacgcgccttagattggcccgctggcttcccttatctgactgcatggtgtggcagccacggtgctgaccacggacggaagcgtgaagccggcgatgagacagtcactcggggacttgacacccaacggcccattacgga

SEQ ID NO: 4879 - DNA, 1611 bp, unidentified
  source 1..1611: mol_type = unassigned DNA; note = element_76e9904
  misc_feature 1..3: note = core
  misc_feature 4..293: note = LE
  misc_feature 294..1469: note = CDS
  misc_feature 1470..1611: note = RE
  misc_feature 46..272: note = bridgeRNA
actcgtattataaagtagtagtgtttatagaccctctccaaggtcttgatactatttctatcatagccgttctttaccttttctacaggtatggttatgatatataagatgctgtggactggtgtttcctcgctaccactttgatggttttagaaagtgtccagccacagtctctttgtttgattgttaatcagttagataccgcatgacggtttatttagaacgagttcacaactgcgaagagcgcctgtggttctaaaacagcacccaaatttatacaaaggagatttgccatgatttatgttggtattgatgtcgcaaaagacaagcatgactgctttataacaaactcagacggtgaggcgctatttaacgtattcaccattcctaacaatgcagatggattccataacctctatcaaaagatttcttctcttacaaatgatttttctaacgtaaaagtaggactggaagctaccggacactacaattacaacctcttaggatttctcatggataaaggcctccccacctttgtcataaatcccctacataccaacctgttccgtaaaagtctcagtcttagacagaccaaaacagataaggtggatgcccatacgattgctctcatgatgatgtctggagtaaacttacagtcctactcagacacatcttatcacaacgaggagcttaagtcattaacccgatacagatttgataaagtaaaggaacgggcgaaattgaaaacttctctatcccggctcgtcaatatcctttttccagaactggaaaagcttgttcccacgctccatatggtttctgtatacgcactcttggcagaattcccttcttcctctcagattgcttcctgtcatctgacacgcctcacaaatctgctggaaaatacttctaaaggacactacactaaggaaaaagccatagaaatccgaaacgcagccagacaatccatcggttcaaatatgcctgcgaaatcccttgaactaaagcatacgatcaggcttattcaggaattatcttatgagattgatgaaatagaatgctctattaaatccattatggacgacatccgttctccaatcctttccatcccaggtatcaattaccgtatgggtgctatgatcatcgctgagattggtgacttcaaccgttttagttcccctgacaagatacttgcttatgcgggactttctccgtctacttaccaatcgggtcagcttgatagctgttattcgcacatggaaaagcgtggttctcgttatcttcgctatgcgctgttcaatgcgacaaaatttgtctgcatttgggataatcagttctctgcttaccttgcaaagaagcgttccgaaggcaaacactacaatgttgccatatctcatgctgccaaaaaactggtcagagtcatttatcaactagaaaaatcaggacagctttatcataaagcagcataaaatttgactttatatctccttttagagcacctgcaaagatgctcttattgtcatgcagttttcaaggttcaaatatttctgaaaagcatttctgcaattcattcaaaaaatcttcattttagtcttgacttttaatagttag

SEQ ID NO: 4880 - DNA, 1382 bp, unidentified
  source 1..1382: mol_type = unassigned DNA; note = element_76ec493
  misc_feature 1: note = core
  misc_feature 2..70: note = LE
  misc_feature 71..1102: note = CDS
  misc_feature 1103..1382: note = RE
  misc_feature 1143..1377: note = bridgeRNA
caatggtatggaccccgcccttggcttaggctgggatgtcgaagtgtcaaccacagaacaggagacgtccatgaacatcgtccgaattggcctcgatctcgcgaaatatgtcttccatcttcacggcgttgacgagcgcggcaaagtcgttttgcgtaagactctacgacgcccgggcgttgcgccatttttcgcaaaccttccacgctgcgtcgttgggatggaagcctcgaacggcgcgcattattgggccaagaccctatccgagtttggtcacgacgtgcggttgatcagcccacaatttgtcacgccatatgtgaagtccagcaagaatgatcggaatgacgccgaggcaatctgcgaagccgtcggtcgtccgaacatgcggttcgtgtcagtcaagtcggctgaacagctggctattcaggctgttcatcgaattcgcagtcgactggtcgccagtagggttagacttgtgaaccagatccgtggcctgctcggtgaacacggcgtcgtcgttgcgcagaccattggcaatcttcggcgcgccttgccgcccattattgacgacgaagccaatggtctgaacagcattgtccgcgccctgattggcgagctgcgtgaggaattgagcgatcttgatggtcggatcacgatttacgaccgcaaaattataaatctatatcgaatgagcgaggcatgtcagcgcctcggcgaggtcgaaggaatcggacctatcacggcaaccgcacttgtcgcagccgcgggtgatggaaaatgcttcaagaatgggagacaatttgcggcatggatcgggcttgtcccgaaacaacgatcgagtggtggccgatcgcggctgttgggcatcagtaagcgtggagatcgctatcttcgcaccttgctcatccacggcgctcgcgccgcgttgggccgaactcgtggaaagcaggacccaagaagtctctggttgctgaaaatgcgggagcgacgtcacgcaaatgtggtcgccgtcgcactcgctaacaagaatgcgcggatcgcatggggcttgctcgccagtggcatgaactacgatcagcatctaacagtcagctcggcctgaccgccaccaggtgcttgagacaacaaaggagattccaaccggcaattgcaacgagtggcagtagatggcgaaacggtcgctccgtcgcttcccgaacctggtatgtggaccggcatggcgagagccaatgtcttggggccgttgaggtggaagcgcgcgaaaatccatcgaggctcgcggcctcgaaatatcgggccgcatcatgaagccggatatacgtcagcagttgtgaccgagccagagtctgtcaaagccgttgcaatcgggcggggtccatata

SEQ ID NO: 4881 - DNA, 1421 bp, unidentified
  source 1..1421: mol_type = unassigned DNA; note = element_76fb172
  misc_feature 1: note = core
  misc_feature 2..316: note = LE
  misc_feature 317..1402: note = CDS
  misc_feature 1403..1421: note = RE
  misc_feature 79..321: note = bridgeRNA
cacttccgcagaatgaggtagatgggttgcggctttgatcttcccggtgtgtctccgggcgatctgcaaccggttcggtgaggcttggcgcgttctgccgccggtccctggcttggctctgcacgcaactgaccgcgagagcgtgtcctgtgcccgaaccgccggccggggcccgacgggaggacgtgtcacccgcggggcccgggacggccgtgacttgataggagcctgacacctctgttgtcccagaagtgttctgtccgtccgtcccgggcttcgcggtgccatctcagtccgctcatggaatggagacgacatgcccacgatcgcagatgcgggaccgcccgtcaccggtggcgtcgatacccacgccgaggtgcacgtagctggcgtggctgaccagaccgggcgggtgctgggggttaaggagttcccggccaccgcccagggctatgcggcggcgctggcctggatgcgcggccacggtgatttggtcaaggtcggcgtggaaggtaccgggagttatggggccgggctggcccgctacctggctgcgcagggcatcgaggtggccgaggtgatgcggccgaaccggcaggcccggcggcgccgcggcaagtccgatgccgccgatgcgatcgccgccgcgctcgccgcgttgaacggcgaagcgtcggggcagccgaagtccggtgacggcgcggtggagtcgatccgggccctgcaggtggcccgccgcggcgcggtcaaggcccgcacccaggccggcaaccagctccgcgacctgatcatcaccgccccccagctgctgcgggagaaactggccgcgctgccttcccccgagcgggtcaagctgaccgcccggttccgtcccggcgccctgacctgcccagccgaggcggccaaggccgccatggccaccgtggcccgccgccaccaggcgctgaccgccgagatcgcccagctagacaccgccctggaagcgctcctcgagcatgccgccccgcccggtttcctggccaggacgggtgtgggcgcccgggtcgctgccgcgctgctggtcaccactggcgacaacccgggccgcctgcgcaccgaggcgagcttcgccgcgctgtgcggcgccagcccggtcgacgcctcctccggcaaacaacgtcgccaccgcctcaaccggggcggagaccgccaggccaactccgccctctggcggatcgtcttcacccgcatcgcctgcgacccgcgcacccaggcctacgtcgcccggcgcaccgccgagggcaagaccaccagagagatcatccgctgcctcaagcgctacgtcgcccgcgaggtctacaaggtcctgacggcccgcccggcaacccagccagcaccggccacacccagacagattcaatgatcacttgacataggagctt

SEQ ID NO: 4882 - DNA, 1426 bp, unidentified
  source 1..1426: mol_type = unassigned DNA; note = element_76fd535
  misc_feature 1: note = core
  misc_feature 2..61: note = LE
  misc_feature 62..1099: note = CDS
  misc_feature 1100..1426: note = RE
  misc_feature 1202..1420: note = bridgeRNA
tactggcatggtccgccgcctaaggccctcgggggtgtagaggtgaacaaggaggtgttccatggagattcgcacaatcggtatcgatttagggaagacagtctttcaccttgcagctgtcaacgcgcggggggaagtcgtggttcgcaagaagtgctcgcggactcagctgctgcgctttacatcgaaccttcgcgagtgcctggtcggcatggaggcctgcggaggatctcattttctcggccgtgctctgcgggaacaggggcatgatgtacgcctgatgccggcacagtatgtgaagccatacgtgaagaccaacaagaacgactacatcgatgccgaggcgtgtgccgaggctgtaactcgccccacgatgcgcttcgtgccgatcaagagcgatgagcagctcgacctgcagtcgctgcatcgagtgcgcgagcggtgggttgtacgacgcaccgcggtgatcaaccagattcgcggattgctgctcgagcgtggcatcacgatgcgcaagggacgccaacatcttgaagcctctctaccccgcattctggaagacgcagacaacaagttgtcaggtgcattgcgagtactcctgacacaactgcagatagagatgcagtacctgcatcgacagatcgaggaatccgacaagctgatcatacgcatcgccagcgaacttgaaccatgcaggcgcctgatcgcgatccccggaattggaccgatcactgctacggccacgatcgcagccatcggcaacggcgcagccttcaagaagggccgcggatttgctgcctggttaggggtggtgcccggtgagcactccaccggaggcaagcagcagcttactggtaccagcagacgtggaaacaaatacctgcgaaagctcttcgtccaaggagcacattccgtgctgctgcagagaacgaaacaaacttcagggctgagtatgtggctggccagtctggtagcacgcaagcgcaagcaggtggcgacagtggcattagccaacaaaatggcgcgcatggcctgggcggttctattcaaagcagaggcatatcgcccgccgctgttaccacaaccagccacagcttgacggactgcacatgacgcctggcacaagcgccaggcttggaaatcgcttcgcgattcccacatctgcgatccaacgacgacggtctaagttttcagattcctgccaggtttgctggcgaaccatgagatggcacaacggtcgatcccggcgctcccgaaacctgcactcggaaaatgcctgcaacggcagcgttactaaaaaggacgagggcgcagcgcattccattcaggccaggagttcgctactccaacagaggccggatacattcgcgcagaccaattctgtcatcctcatttttcgcttgcaaaaacggcggcggaccataca

SEQ ID NO: 4883 - DNA, 1582 bp, unidentified
  source 1..1582: mol_type = unassigned DNA; note = element_76ff73e
  misc_feature 1..2: note = core
  misc_feature 3..279: note = LE
  misc_feature 280..1467: note = CDS
  misc_feature 1468..1582: note = RE
  misc_feature 13..257: note = bridgeRNA
ctcgtatgataaagttaggttttttagggacaggatgtacctataaaccccagagtatctaaaagtatgagatactcgatttgtagatagagcgtcaccgttcacctccttgaatcttggtattcgtctaaaagaatggtgcctctgtctaataagctgtttacgaatgagttggatgttgatgactttggtcattcttcgtatctcttacgaggtagtagcgcttattagtacagggggtgaaccctatctaacatgaatagtcaaggagtgttcatcatgttctacgtaggtattgatgtagccaagtacaaacactttgcatctatcatggatcaaaccgggaaaccactcggcaagccgtttccgtttcaaaaccataagcaaggtgccgaatccttattagcttggataaaccaacacaacgcttccccggaagaaatactcatcggaatggaagccacgggacattactggctagccatttattccttcttgatagaccatggctattctgtcatcgtgttaaatcctattcaaacccacgcttggcgtaaagggactgaaattaggaaacggaaaacggatgccattgactcagtcatgattgccgatatgattcgatttgggcgatttcttgaatctcgtctcgttgatgagaaaatgtttgcactaaaacagctaagtcgattcagaaactcactggtgactaccatgagtaatctaaaacgaaaagtgatcgtggtattagaccaaactttccctgaataccaaagaattttctccgacgtttttggcaaaacatcatcccaactgctgctcgatttttcatccccaagtgactacgagcagctctctatcgatgatttgactgccatcatggaacaagccagtcgttctcggcttggtagggaaaaagctacagagctactgcacttagcctcaaattcatttggagtcaccttctgcaaagaaactttttcttttcagcttaaactgttaatggagcaaattcgattcattgatcttcaagtcactgcatgcgaaaaacaaatgtcacaattgttaattgaccttgatacgccgattaccaccattccaggcgttggccccattattggggctacgatcttaagtgaaattggagatatccttcggtttgatagcccttctaagctcgtagcttacgctggtattgatgcttctgtttcacagtcaggacaatacgaatctgtgagtatgtccatttcaaagcgtggttcttctcatctgcgcagagccttatttcaggctgctattagcgccagtaagcatgaccccgttttaaaagcctttttcgagaagaaacgtagtcaaggaaagcattactatgtttgcttaggagctgtggctagaaaattgtgccatattatctacgccgttttgaaaagtaacaacccctatcaaattcctccattgacaacttagttaatatttcccattactgtgccgaaggtttatttgagttgcccttttttagggtgaatccttctttttacactcccacttagttgccaatcatccttgacttttcatagttggt

SEQ ID NO: 4884 - DNA, 1222 bp, unidentified
  source 1..1222: mol_type = unassigned DNA; note = element_7705517
  misc_feature 1..2: note = core
  misc_feature 3..235: note = LE
  misc_feature 236..1204: note = CDS
  misc_feature 1205..1222: note = RE
  misc_feature 6..204: note = bridgeRNA
cttatgtcttggaaccagtccctgtggattggtacccttcggctgatccccggagcgaggcgggcaagactggttgtcacccaaggaatcaatcctgtaatgcagattaatcgctcgtctcacctttgccacccgttcggacggtatccaaggcctgccctgggcaagagcctgcacagataaggttgaaccggcatggtccgtagatcgccgttatcttttcaaggaggttggcatgactcatcctaccctattcgttggcatcgacgtggccaagaccaaattcgatgtggctctcttgaacgctgagggcaagtatcgcagtaaggtcttccccaacacacccgttggacatcagcagttcctggagtggctgaccaggcacgacgcccaggaagcccatctttgcatggagaccacgggcgtctacgggcgggacctggcacgctttctggcgcaacagcagatcctcatcagcgtggtcaacccggcccagatccatgccttcggcaagacagaactgacccgggccaagatggacaaggccgatgcccggctcattgcccggtattgccggatgcaccgtcctgcgccctgggtgccgccggctgaggagatcgccaccctccaggccctggttcaacgtctggaggacctcctggcactgcaaacgatggagaacaaccgactggaagccgctacagggccagcgcgggagtccgtggaggccgtcctgcaatttgttcatcagcagatcgagatgctacgcctgcagatcgagatccatatcgataaacaccccgatctcaaaaaccaacaggagttgctgtccagtatccctggtattggggacaacacggccgccaccttgctggcctttcttagccccttggagcggttccactctgccaaacaggtggttgcctatgccggcctcaatccccgcattcgccagtcgggtcaatgggcaggaaagacccctatcgccaaggcggggaatgctttgttgcgcaaatccctctacctgccggcagtggtcgccaagcggcacaaccccatcatcgcatccttttgcgaccggctattggcccgaggcaaacgccccatgcaagtggtggtcgccgccatgcgcaagctcctgcatctggctttcggcgtcctcaagtcggggaaaccgtttaaccccaaattgggagttgcataacgtcgtccaagacggtat

SEQ ID NO: 4885 - DNA, 1505 bp, unidentified
  source 1..1505: mol_type = unassigned DNA; note = element_7719b77
  misc_feature 1..2: note = core
  misc_feature 3..214: note = LE
  misc_feature 215..1489: note = CDS
  misc_feature 1490..1505: note = RE
  misc_feature 3..209: note = bridgeRNA
ctgatagcgctaccttctttcatggctgggacctccggggaacgctccgtgtgcttgtcccgcgaggactgtcatgagacggcgtcctcggaggttttagccggaggcttgtcgtcttggagggtgttgtcccgatgaggactggtttatcagcacgacgcgccgcctccggttccagttgtttcgttgccgggcgagaagggagtcgacgcatttgctgggagtaggtatcgactgggcggaatcgtttcacgacgtggcgttgggcagacccggcgagggtgtgatcgagcaattccgtatcgatcacaccgccgcgggagtaggacgacttgtggcccgctgcctggaactggaacccgacccagccgatgtgcgaattgtgctggaaacccgacacggccttttggtggaaacactggctgatgccggttttacgatcctccccgtgaacccggacctggtggcccgccgccgcggcccggctaaaaagaaagacgacgccgacgacgcccgcatctgctgcctgctggcgctcgaccagttcctggaattgcggaaactcattccccatggcgaactggctggagaactgcgcaccatcgcccgtgacgacgaacgcgccgcccgcgacgaacgccgactgctcaaccggctgcgtgcggacctgctcgcgaccttcccagccgcgctgggcatcgccggcgacgaccttggctcgccagtcgtgttgcggctgctgacccgctggccagcacacgaccagctcgccgccgtcgaccccgccgacctcgtcgcgttcgcccgcgccggcaagcatggctggccggaccggttcgccgcccgcgtcgcggacgccttggccacggatcgcctgcccgtcaaggactatctggtccgcgcgaaaacaggcaccatctcgttgaccgcgacccaattgccggctatccgcgatcaacggcggacctgggaacgccgcatggccgagttgctgctcggatcgccccgttacggccgcgccaaacagccgaaggaacctgacccgggaaaagcaatcccgggcggtgacatctacctcagcttccccggcctcggggaccggctcgccgcccggatagccggagaaatcgaagacgacatcacccagttcgacacacccaacggactgcaatgctacgggggaaccgctccggtcacacggcgctccggccgcagcgagttcatcgtcgcccgccgtctggcacacaaccactacctgggcacggctgtgcaccaacgggccttttgcagcctgtcccgcagcgtctgggcacgcgagttctacgacgggaaaatcgccgccgggaaaagccatcactcggcactgcgagccttggcgaaccggtggctggaaatcttctggcactgcctggtcaaagacatccgctacgacgaaaccgttcacgttcgcaaccgtcaacgggctctccaaccgccttcggcggcctgaggttgacagaggatgt

SEQ ID NO: 4886 - DNA, 1155 bp, unidentified
  source 1..1155: mol_type = unassigned DNA; note = element_771e82e
  misc_feature 1..2: note = core
  misc_feature 3..207: note = LE
  misc_feature 208..1143: note = CDS
  misc_feature 1144..1155: note = RE
  misc_feature 12..209: note = bridgeRNA
cttgtcttatgaattggccagctcctgtgcgatacaggagccactgcccggcacgtcatttatgacgggcagtggcgggggtcggaccgttcccctcttggtcatagcggaccgtgcctgagtatggtcgcccccgtcttttctatcgacctgaacggatacatgggctttgggcccgcatgacaagacgaggtaaggaaaagacaaatgaacgataccattggaatcgacatctcgaaagatacgctggacaccttttggctttcaaaacggaagcacaagcaatttgccaacaccaagacgggcttgagggctctcaccagctggatacgagaggcagaagtgtctttggtcattttcgaagcaactggcgtctatcatcggctgctggaaaccagtcttgcaatgcatgattttccttttgcacgggttaacccgcgtcaggcgcgccgctttgccgaaggaaccggcacactggccaaaacggatcgggtcgatgccgccatgctggcccgaatgggctctctcctgaagttgaaagctgacaaacccaaaagtgaaactcttcacaatctcaaagagttggagactgccagacaagctttgatcaaggatcgaacagctgcgaaggcacggcggagtacagcaacctatccactgctcaaaaagcagattggccaccgccagcaacagattgcgcgcgaccttgcacgagtcgatgcggcgattgaggcaatcatcactgctgatagaacgctctcacaaaaagccgacattctcatcagcattccgggcattgcgaagataaccgcatatgcgatgctaatcgaaatgcccgaactgggcagcctgagtggaaagcaggccgcgagtttggctggtcttgctccgatctcacgccaatcggggaaatggcaaggcaaagaacgtattcagggcgggcgcgctgttttgcgcaaggtcatctatttgccagctgtggtcgctacgcgtttcaatccggatatgaaagtaaaatatcaagagctgattgccaaagggaaatgcaagaaacttgcgattacagcggttatgcgcaaactcgtagtcatggcaaatgcgttgctacgcgacggtcgaaaatggaccgaaacacgggcttgaccaatacggata

SEQ ID NO: 4887 - DNA, 1580 bp, unidentified
  source 1..1580: mol_type = unassigned DNA; note = element_7734c1a
  misc_feature 1..3: note = core
  misc_feature 4..280: note = LE
  misc_feature 281..1462: note = CDS
  misc_feature 1463..1580: note = RE
  misc_feature 13..257: note = bridgeRNA
cttgtataatgtatttaggttaataaagggaacctataaccctttatatcctggcatattatacaaaagcatgtataatatacctaatcagatagagtgatgccgatgtcctccttgaagcacaacttcgtacttgaaagactggcacctctctcttttaaacagattgcgaataagttggatgttggctataatctggcactccggatctagcacaaggcggtgacgtttttaagggctgaggaactatctgaaataatagaacagaaggtgccccagtatgccatttttaggaattgatattggaaaaaacacacatgttgcttctctcgttaatgcggatgggaaaaccttatttaaggctttttccttttccaatacaatggatggcggtgacagcctgcttgcgaaactttccgattatacgccggattccatccagatcggtatggaagcgaccggacattattggctgtctctctattcatttttgctggatgccggttattccgttcatgtcgttaatcccatccagacggatggctggcgcaaggggacagaaattcgcaaacggaagacggatatcatcgattcgttgctcatcgccgacttgatccgttatggtgattttttagagacatccctggccaatgaggataccctggcacttcgaaatctttcgcgcttccggggctacctggtttcatccatcggggatctcaaacgcaagaccattgctttgttggatcaggtctttcctgaatatcaaagtgtcttttcggatgtctttggccagacttcaaaagaattactcttgcattttcaaacagccgatgatttcgtggcaatctctgcggatcagttggaaggcgttttggataagatgactaagaaatcttttgcacgtcgtaaggtacaggaaatctcccagctggccgggcattccttcggcctttccttttgcaaggatagtttttcccttcaaatccggatgcttttggaacagatccaattcattgaggaacaagtccatgatgtcgaacaggaaatcagtcagatcatggataaaatggattcacccattctcaccatcccagggattgggctggtgaatggtgctgttatcctgggcgaaatcggtgatatttctcgtttctcaagtccggtcaaactggttgcctatgccgggatagatgcctctgtcagccaatccggccaatatcaatccaccaataataaaatgagcaagcggggttctccatatttacgcaaggctttctttcaagctgctctggtggctgcttttaacgatcccacctttagtgctttttatcagaaaaagcgggccgaaggcaaacatcatctgacggccattggcgctgttgccagaaaactttgctatgtgactcatgcaattctaaaaaacaatacaccttacgtggttcaaacgccgaaagaataatttccctcgcttcactccataaaaaactgaggcttttttgtcatgccttcttttgtatttttatccatcacttctttcttattttctttcagatttagcttgactttttatagttggt

SEQ ID NO: 4888 - DNA, 1561 bp, unidentified
  source 1..1561: mol_type = unassigned DNA; note = element_77366cb
  misc_feature 1..2: note = core
  misc_feature 3..174: note = LE
  misc_feature 175..1269: note = CDS
  misc_feature 1270..1561: note = RE
ctcgtataatatttatataataatttactaattactaatctattttaaattttatgtaatatactattattagatactgtggattagtttatcactcctaccattttaatggttttattaaggctctaaccacaggctctttattcatttgttaattagttagataccactttgatggtttatttagaacgaggttacaatcttaaagagttaccgtggtctaaaacagtatcaaattcttttttattcaaggaggcttgtatgattttagttggagttgatgtcgcaaaagataagcatgattgctatattatgacttctgaaggagaagtattattcaaatcatttactattgctaataacatggaaggctttaatcagctttatgagaagatattatctgttatagataatttcgataatgtaaaaataggacttgaagccacaggacactattcttacaatatcttgggttatcttcttgataaaggtctgactccctatgttatcaatccgttacattcaaatctttatagaaaaagtctaagccttagaaagacgaaaacggataaagttgactcccgcatcattgcaagtatgttaatgtctgatgtgagcttaaagccctattcaaatacattataccacaatgaagagttaaaatcactaactcgttatcgttttactaaagttcaagaaagagcaaaactcaaaatttctatatcaagacttgttacaattcttttccctgaacttgaaaaattggtaccaaccttacaaatgaactctatttatgcacttttatatgagtttcctagtgctcatgcgataagtaaagcccatttaactagactaacaaatttacttaatacaacctctaaaggtcattatacaaaagataaagctgtcttgattcgtgaagccgcaaagaactccataggttcgaatatgcctgcaaaatccttagaacttaaacatacgattaagctaattaaagaattaacttctgaaatcaatgaaattgaagaagagataaaaattattatgaataaaatcaattctccaatattgacaattccaggaataggtttatcaacaggagctcaaatattggcagaaataggagattttaaaaatttttcttctcctgataagttactagctttcgcaggattatctccatcaacctatcaatcaggtaatatgtattcttccaatgcgaagatggaaaaacgaggctcaaaatacctaaggtttgctttgttttaatgcagccatctatgtaagctattgggaaccaacattttctcaatatttgaaaaagaaacgagtagaaggcaaacattattatgtagcaatatctcatgtagtaaaaaaattagttagacttatttttcacttagaaaaaacaaatgaaagatacagtacagtagtctaattgttcataaattttaatactgtcaaaaggttctaactaaaccttcattttgtgatgtaaatttctaaattaacaaatttaaattaaatttttttatttttgatttgacatttaatagttagt

SEQ ID NO: 4889 - DNA, 1455 bp, unidentified
  source 1..1455: mol_type = unassigned DNA; note = element_773c8ae
  misc_feature 1: note = core
  misc_feature 2..156: note = LE
  misc_feature 157..1203: note = CDS
  misc_feature 1204..1455: note = RE
  misc_feature 1227..1453: note = bridgeRNA
gaatgaaatggacgcctcccgccaagactctgggtaccgataggcaaacgtgatgcggggaatgtggtggaaaggtggatcctcgcgcgccaacggcatcaaagtgccctagagtgaaagcgcagtactttcgaggcaagtcggaggatccacatcatgaatgctacgccaaaaccggtggtcggggtagatacggccaagaatgtcttccagctgtacacggtcgacaaacagtcgggcgaattgatctgtcagcagctcaagcgtccgaaatttcttgcatggttcgtgaatcgggaaccatgcgtggtcggcatggaagcatgcgggggctcgcagcactgggcgcgcaagctcaaggagcttgggcacgaggtcaagctgatgcgaccgaaaatggtgaaggcgtttgttcccggcaataagaacgatgtcgccgatgcccgcgctatctggatggcggcccagcaacctggcgtgaaagctgtggccgtgaaaacagaagaacagcaagcagtgattgccctacatcggatacgccagcagttggtgaagagccgcattgcacagtgcaatgaattgcgtggcttggtgggcgaacacggcgagaccttcgctgttggccaggcagcgttcgacgctggtctgaaggccgccttggcgcggttagcggaacgtttgccatcgttcttcatcgacaccttgcgcgagcaatgggaggagatcgccaagcttactgaacggattgccaggattgaagcaaggctcagggcttggatgcgtcaagaccgtgctgcgcaagcgattgcgcaaattcccggcgtgggggtgctgacggcgacggcggcagtggcaacgatgggcgatgccaaagcattccggtctgggcgtgaattcgccgcctggatcggcctggtaccggcccagaccgggacaggaggaaaagtccgactgctaggcatcagcaagcgaggtgattcctacttgcggatgctgttgatccatggcgcccgatccgttctgtatcacgccaaggaaccaagcaagtggttgcagggcatttgccagcgacgaccgtccaatgtcgttacggtcgcgctagcgaacaagatagcccgcactatctgggctgtattagcccacgaacggacctatgataaggaccacatcagcatccgcccaggaatgacaacgacgatatgaacagcacgaacgctggaaccaactcacacgccacaggttgcgatcggtagagatagcgatgacagactggttagaccgtacccctttaaacctggcgtactccaaggacatcaagtccgcagggaggatgagggatggggtagcggagttcatcgaggcccgcggctcgccgcactcaaggccggatataggactgcaactttctcgtctgacctagctaaatttaccttgcaaaagggaggcgtccatata

SEQ ID NO: 4890 - DNA, 1446 bp, unidentified
  source 1..1446: mol_type = unassigned DNA; note = element_773d176
  misc_feature 1: note = core
  misc_feature 2..126: note = LE
  misc_feature 127..1173: note = CDS
  misc_feature 1174..1446: note = RE
  misc_feature 1207..1440: note = bridgeRNA
atggtatggacgcctcccgccgcatccccgaggccggagcgcgtcggttgggtggggcctcgcatctgacggcatcgagtgccaaagtggaagctctatccaaccactgacgaaggaggccccgccatgaatgctacgacgtacgccgtggacatcgcaaagagcgtcttccacgtgcactgggtcgaacccgagaccggcgagatccacaaccgcaagctgagccgcgccaagttcagcgccttcatcgcccaacgccagcccgggcgcatcgtgatggaggcctgcggcagcgcgcactactgggggcgtaccttcatggcgctgggccaccaggtcgagctcttgcccgccttcgaggtgcacaagcgtgtgatcggcaacaaggacgactgcgccgacgcggccgcgatctggctgaccgcgcagtcggccacggtgcggcgcgtgccggtcaagaccgtccagcagcaagccgacctgacggtgcatcgagtccgctctcaactggtgcgcgagcgcaccgcgcgcgtcaacgcgctgcgcgggctgctctacgagttcggggtggtcatgcccaagggacggcggctggggttgcgctggctggccgacaatcgcgctcagatcgagcagcgattgcccgagcggatgcagcgcttggtgcagctgcaactcgacacgctgcgccagctcgatgagcacatcgaggtgctggaggccgaggtcaaggagatggtgagcaccagcgagctggccaggcgcctgatcaaggttccgggcctgggctgcctcagtgccagcgcgggggccagtctcgtgggcgacgcatcgggatggcgcaacgcacgccagttcgcctgctgcctggggttggagcccagccacgtcggcaccggcggcaaggtgcgcatgggacccatcagcaaacgcggcgatgcgtacctgcgaacgctgctgatccacggcgcacgcaacctcgtgcgcacggccgccccatcgcagtggatcgccaggatgctcgagcgtcgaccgttcaacgtcgtggccaccgcggtcgctcacaagctggcccgcatcatgtgggcgatggccgcgcacggacgcgaatacgatccgaactggctatcccaagcgccacacgccaaggcggcaagcaccgccgcggcgtaggcatccaaggaatcgaatggcacaaactgcctgaacgagtgcgcgtgcgagacgacgagacgatggcgtagcggtcagaccgtgggctggtaatgctgggcgaaactcagggcgacttcggtcgagcccgtcagtgagatgagcaccagcctcgcgactcaccatcatggccagcagcgcaggctgcgtacaaaggccggatataaggggtgcaatgaacccgccgcgtcgcaagctcaacagctcgcttgccacaagggaggcgtccatata

SEQ ID NO: 4891 - DNA, 1174 bp, unidentified
  source 1..1174: mol_type = unassigned DNA; note = element_773ee7a
  misc_feature 1: note = core
  misc_feature 2..200: note = LE
  misc_feature 201..1157: note = CDS
  misc_feature 1158..1174: note = RE
  misc_feature 6..205: note = bridgeRNA
cttgtatgttctcaggcgaccggcacggtaaggtactgagggcgcatttagggacttgggcggtgccgtgcagcctgtttcaagcatgggtcttgagcccgacgctgagtatatcgcgcacggcgctgtgccggtctttcaatcccgaacggttacctgagttttgaagctcgcatctgcaagcaagggaggtaaagaccatgtttaagtctgtatgcatagggatcgatgtcgccaaggcgcatgtggatgttgccatggatgtagggggcgctgtccagcgccatgctaacgacgtcgacggacatactgctgtagtggcagccttgtcgaaggacgcagtggcgctgatcgtgatggaagccaccggcgggtatgaagccgagctggcctgtgcgctgcaggcagcggggctgccggtggctgtgatcaacccgcgacaggcgcgcgatttcgccaaagcgatgggccatttggcgaagactgatcgactggatgctgcgatattggccgcgctagcggcggtgatcgcgcgccgacctgacgccatgcgcttcgtgcggcccttgccggacgccgagcgacaacgcctgatcgccctggtcgcacggcggcgccagttgctgtcgatgctcacgtccgaacgattgcgcctggctacggcacatcccgccgtacgtgcttcgatcaacgcagcgattgaggccatccgcaagttgctagacgatgccgacagcgagctcgtccggcatgtcgacgagcatcacgccgccgccgaggcactgttgcgatcggtgtctggcattggcccgacgaccgccgctacgctgatcgccgaactgcctgaactcggccgtttgaatcgacgccagatcagcgcgctggtgggcgtggccccaatgaaccgagactccggccagaagcgcgggccccgcactattcaaggcggtcgcgcccaggtgcgtcatacgctctacatggcgacgctaacggcggcacaccataatccggtgatacgtaacttctataaacgccttgtcaccgccgggaaactaaagaaagtagcactggtggcgtgcatgcgtaagctgctcaccatcctcaatgcgatggtgcgagatagcgcatccttcaatcctaattatgccaagacttgacaaacaacacggttact

SEQ ID NO: 4892 - DNA, 1592 bp, unidentified
  source 1..1592: mol_type = unassigned DNA; note = element_7742f1c
  misc_feature 1: note = core
  misc_feature 2..263: note = LE
  misc_feature 264..1505: note = CDS
  misc_feature 1506..1592: note = RE
  misc_feature 80..263: note = bridgeRNA
actcccatgtcctgcacacttgacaccaccataaatgaaaccttttgggcaagtctgggtttgcaattgttattttctggccgtatactataagcaacggcaaagatcgatgttattttgggcctgtagcccgttaactaaactgatttttggcttcctcatttgcaccaccatctgtccagctgtttgtgcagcaaaaggacgtacagtaaaatgataagagacaggaagccatgccgtaaattcttccaggaggtgtcactatggaaaaagtttacgacaagtgttgtggtattgatgttcacaaaaaactcatcgtggtctgctttaaatgcggcaaaaagcaggaagtacgggagtttggcgcaacaaccagggagcttcttaagcttgccgactggctgggcagcggcggctgtgaaatggtcgccatggaaagcacagcttcttattggaagcctctttataacatccttgaatcttccggcctgaatgccatggttgtaaatgcgcgccacatgaaagctgtgccgggacgcaaaacagatgtcagggatgcagaatggattgctgacctgctccagcacggcctgctccaggccagttatatcccggataaggaccagcgggaagtcagggagcttgtccgttaccgcaaaagcctggtcggggagcgcaccagggaactcaaccgtctccagaaaatgctggagggtgccaatatcaagctttccggcacggtatctgacattaacggaaagagcgccagaagcatcctggagcacatccttaccggagagtcctttgatgatgccaagtacgatgaaatgtacggcaataagataatcgcccacaatctcaaagcgacaaaggagcagattatcgatgacctgaatggcatcatgtccccgctgcagcggaaaatgatgcgtacgctgctgaagcatctcgatgagctgaacagccatatccatgagctggatgatgacattgacagtttcatgaagccagaagaaaagcaggcttccgcggcgatccaggatgtcaccggcataggcaacaccagcgcacaggcagtgatctccgtcataggcacagacatggggcgctttccggatgatgcgcacattgcttcatgggcggggctgtgccccggtgacaatgaaagtgccgggaaacggaaatccgggaaaacccgtaagggaaatgcccttttgcgggagacgctggtcaactgtgcacatgctgcagtaaaaaacaagaaatcctatttctacgcacagtttatgaggataagtgcgcaccgtggaaagaaacgtgcatatgtggctgttgcacattccatgttggtcgcaatataccatatcctgaaggatggtgtggttttcaaggatctgggtgctgattattataatcaattcaataaggaacgcaagattaaagcgtacctgaaaaagctgaaagcgttaggctgggaagattctgccgcaggacaacctgcctaatcatacatgagagtctaaaagactcaaaaatatactataggggtagtctgcgcttttttagctaaaacaaaggttaggtttcacagt

SEQ ID NO: 4893 - DNA, 1475 bp, unidentified
  source 1..1475: mol_type = unassigned DNA; note = element_774a361
  misc_feature 1..4: note = core
  misc_feature 5..247: note = LE
  misc_feature 248..1465: note = CDS
  misc_feature 1466..1475: note = RE
ctcactggtccaccatgtctgtgttggtggcggtcatgctgccgacgcacccctggtcccatcgggccatcgccaacatcgctcgcggggttgatcgccacgatgagttctgcgaggtccggtggcccaggacgtgccgactggcaatagggctgagcgccccagagcgccgatcagtgagcgaccggcagacacgtcctgagaccaccgggtgcatccacactgctgcaacagcgaggaggctgacatgcatgattccatccccgacgcctacgccggtgtcgactgggccgtcgatgcccacgccgtgtgcgtggtcgacgttgctggccgggtcgtcgtcgagttcgacgtcgagcacacggcggccgggctcgatcagctctgccggtgcgtcaagcacgccggtgcacggcgggtggccatcgaacgacccgacggcccggtcgtcgacgccatcttcgaagccggcttggaggtggtcgtcgtgtcgtcgcggtcggtcaaagcgctgcgcgagcgttacggcacttcgggcaacaagtcggaccgctccgacgcctacgtgctggccgactgcctgcgcaccgacgggcaccgctggcccagcctcgagcctgacggcccggccacggtgacgctgcgcgcccatgtgcgggcccgcaaagacctcgtcgagcaccgggtcgctgtcgccaaccagctgcgcgctcacctgcgggtcgtgttccccggcgccgtcgggctgttccgcgacctcgacagccagatctcgctgcgcttcctgcaacggttcccctccgccagccacgccgcccggctctccccgaagcgtctccacacgtggctgcagaccagccactacagcggcgccaccagcgcagccgagctgcaccgacgactcctcgacgcacccgccggcgtcctcggcgacaacggcgacgcccgcagcaccgtcaccctcacctacgtcgccgtgctgaacacgctgcgcacccagatcaacgagctcgacacccgcctcgaggtgctgctcgacgcccaccccgacgcccacatcttccgctccctgccccgctgcgcgaccatccgagccgccaccctgctcgctgagatcggcgactgccgggcccgcttccccgaccccgagtcgctggcctgcctcgccggggtcgccccctccacccgcaccagcggacgacaccgctctgtcaccttccgctttgccagcgacaagaagctgcgcgacgccatctgcgacttcgccggcgacagctggcaaggcaacgcctgggccgccgcccgctaccgccaactccgagccgacggcaaaacccacccccacgccgaacgcatcctcgcccgcagctggacccacatcatctggcgctgctggcaagaccacaccacctacgacccgacccgccacggcgcccaccaacgcctcctcgacacggcagcttgacatagggcta

SEQ ID NO: 4894 - DNA, 1440 bp, unidentified
  source 1..1440: mol_type = unassigned DNA; note = element_774e085
  misc_feature 1..4: note = core
  misc_feature 5..226: note = LE
  misc_feature 227..1426: note = CDS
  misc_feature 1427..1440: note = RE
  misc_feature 12..209: note = bridgeRNA
ctcattggatgagtatggggacgcgggtcaggttgacctgttcgtcgggaacggcgagggacggcctcgatgtctcgccacttgatggcctgtttgagctggtcgccctcgtcgttgccgggaggcgtgatcggcgcgagagagcagccccaaacgagggccgaacaatgaggaaccgactgtcgacccggccaccagcggcgatgtccggccgggaggtcaacgaatgttctgcggatgggattggggttcaacgattcacggggtgtgtctgctcgatgacgacggcgtgacgatcaagacctggatggtcaagcacaccgacaccgagctcgcggcactgtttgccgagctcgcccaactgggcgacccggcgctgatcccggtcgcgatcgaacgcggtgaaggtctggtcgtcggactgatcgcccgggcgggccatcccgtcctgatggtcgagcctgcagccttcaaggcctcgcgtccgcggtggggcgcagccggcgcgaagtccgacgccgcggatgcgttcatgctcgccgactacgcccgcaccgatggccaccggttgcgccgggtggaacccctggcacaggccacgagggagctcgccgccttggtccgggcacggacctccttggtcgaggcacgcaccgcagcgtcgaaccagctgtgggccatcctcgccgagcactggcccggcgctgcgctggtcttcgcgaagctgacatcgcagatcgcgttggcgttcttggctgactaccccacgccccggtcagcggcacggcttgggcagggacgcatgcaccagttctgccgccggcacagctatcgaggcggcaagtcccccgccgagttggtcagtcggctccgggcagcgcccgccagcgcggatccgatcgcggagaaggtgctcgaggcgatcgttcgctcctccctcgcccagatcggcctgctcaacgccgagatcactggtcttgaacgccagctcgcagacgccttggccacgcatcccaagactgcgttgctcaagacgttgccgcgcgtggccaccgtgagcctcgccgcgctgatcgccgagataggaccgctgctggagcgatgcgagaaccccgaacaggtcgctgccatgtgcggcgccgcgccggtgaccaaggcatcaggcaagtcccgcgacgtcgggttccgctacaccgcgaacaagccagcccgcgtcgccatcacgagctttgccgacaactctcgacactgctccgcatgggccggcgactcctaccgtcgagcgcgagcgcgtggtgctcgacacccacacgccgtccggatcctcgcccgaggctgggtgcgcgtgatctgggcatgctggaccaccgacaccgcctacgacccctcccgacaccgcggcgaacagcggcttctcgctgcgtgacttgacctagagag

SEQ ID NO: 4895 - DNA, 1384 bp, unidentified
  source 1..1384: mol_type = unassigned DNA; note = element_7751f1a
  misc_feature 1..2: note = core
  misc_feature 3..89: note = LE
  misc_feature 90..1112: note = CDS
  misc_feature 1113..1384: note = RE
  misc_feature 1092..1371: note = bridgeRNA
agatggggtggttgccgccatctcccgacggcatcgcaatatgccaagaatgcgcagtgtagagaccacgcaaaagaaggacggcaaccatggacgaaggtactatcatcggagttgatctggcaaagaacgtgtttcagctccacggcgcgaccgcggacgggtcggtcatcttccgaaagaagctctcacgcccgcaattccatcggttcatggccggtcagcctgcatctgttgtcgtcatggaggcgtgcggtggcgcccatttttgggcgcgcgaactggaggctctggggcaccaggtcaagctgatttcgccacaatacgtgaaaccatttgtgaagaggcagaagaatgacgccgccgacgctgaggcgattgtcgaggccgcgctacgtccatcgatgcgcttcgtagaaccgaaatcggaggtgcaacaggcgagtgctgttttgtttcgtttccgggagaagctggttaaacagcgtaccgagctgatcaacgccatccggtcctatttgttcgagttcggacatgtcattccaaagggaccccgacatctgagacgggtggcggagctgatctcgaatgacacggggacgctgccggatgacgttcgggaaatctgcggcgacctgctggacgaaatcaggcggaagaccgaacggattgatgaagcactgaagcagatccatgccaagtcccggcaacaagaaacgttgcagcagctacaaacgatgccggggctcgggccaatcacggccgtcgcgattgaaaccttcgcaccgccgatggagacgttccggcggggacgggacttcgccgcctggctggggttggttccaaggcagaactcgaccggcgggaaacagcggttggggcgcacatcgaagatggggcagcgcgatatccgacgccttctgatcatcggcgcgatgtcagtggtgaactgggcctctcgaggtcatggtgtaacgacggggtggttggcttccatgctggccagaaagccaagaatggtcgtcgccgttgcgttggccaacaagatggcacgggccatctgggcgatgttggtcaagcgcgaagcatatcgagcgccagtgacggcatgaaacagcgccctaactgagaaaggtaggcaaaaaggaatgtgaggaaggcaatgccccatatgggcacaatgatcgaacagatcagggtcagcgaaaccagcgcaaagttaaggacaaagaagtccggattttagttttggggctgacccgcggatctccatatcggccagcggcgcttgtaaggccgcacgaaaaggcctgacacaagctcgcactcgatcacatgctcagaaaggcaatgttctccttgcatgggaggcggcaaccacaca

SEQ ID NO: 4896 - DNA, 1350 bp, unidentified
  source 1..1350: mol_type = unassigned DNA; note = element_77551e9
  misc_feature 1..2: note = core
  misc_feature 3..77: note = LE
  misc_feature 78..1112: note = CDS
  misc_feature 1113..1350: note = RE
  misc_feature 1147..1345: note = bridgeRNA
tgatgtgatggacgccccttcctaaggtaggaagtgccatacttttactaactgcattaatccgagagtaacattacatgaacacgatcagagttgttggtgtcgatatcgccaaatctgtatttcaggtatgcgtctggaatgttgatggatccgtcgcatggaataaaaaaatctctcgttccaaattgctggataccatccaacagttcgaacccggtacacttattgcgatggaggcctgcgttacttcgcatttcagggggcgaaccttcgccgctatgggttattgcgccagacttatcccgacacaacacgtgaaagcttttgtccgcagccagaagaatgatgccaatgatgcgctggcaatttgtgaaactgcattccgccctggtattcactttgtttcggttaaaaccacggaacaacaggatatcaaggcacttcgaaatacacgccaactgatggttgagcagagaacggcgctggctaaccagcttcgttctctgctcgctgaatatggtctcattacccctgttgggagccagtgtctccagcagcacctgcctgaacttattgaagatgcgtcgaatgagttaactttcactctccgccgtttactttattcattgcgggaagatatgcaggcactgaatgaacgcgtcaccggtctggacaaagaaattgctgcattgtcttcacaacagacaacatatcgccatttattaacgatctcgggagttggcccgctcatcgcggcggcatttatcagtgaagtggatgcaggacaattttccagcggcagagaattatccgcctggtgcggcctggttccccgacagcacagttcgggaggcaagcaacgattatcctccgtgacaaaaaatggcaatcgtagtctcagaacattaatcattcatggtgcgcggtctgtaatgcgctgtgtgaaaaagcgcgatgacaatctgggcctttggctgcaaaggcttgaggcccgtcgagggttcctgaaaatcacggttgcgctggcgaataaactgacgagaattatctggcgtgttttgaccgatggtgttgattttaatatgcagaaggccgttgcgatgaattaactaaaaacaacaatttacagaaaacatttttaactgagtttgcaggcactgataagaaaacggctaccgtccctgtaatagcctgaagttgacctgggtaatcatataccggtgtagtgataaggaaacagggctcagataacatcatggcgagggtaaattaacccactaataacgccggatatatggtcgcaaaccgtatcgaaccagtacttgtaacacctgaggcgtccatata

SEQ ID NO: 4897 - DNA, 1531 bp, unidentified
  source 1..1531: mol_type = unassigned DNA; note = element_775cc71
  misc_feature 1..2: note = core
  misc_feature 3..238: note = LE
  misc_feature 239..1417: note = CDS
  misc_feature 1418..1531: note = RE
  misc_feature 3..217: note = bridgeRNA
cttgtattatagagtcgtagcgttatagacctattttcaggtttgtgctacaatgcagaggatgctgtggattggtgactgtcccctaccgcatagacggtttcaattaggctccgaccacagccctttgcagagttgttaatcagttagataccgccagacggtttatgttgaacaaggttacattgcaaagtgtcctgtggacgcagcatcataaatcatctatggaggtatcgttatggtttgcgttggaattgatgtggcgaaggacaagcacgactgcttcatcctcagctcggaaggcgaggtgctggccgacgtgtttactgtcgagaataaccgagaaggcttcggcgttttgttgcagcggattcgatcctgcaccctcccgacagacaaaataaaggtagggcttgaggctaccggacactacagctacaacatcctcgggtttcttcttgacaaaggtctggccacctacgtcattaaccccttgcacaccaatctctaccgaaaaagcctcagcctcagacagacgaagacagatcgtattgatgcacggacgattgcaagtatgctcatgtctgatgtggacctcaagtcctacacagacctatcataccacaacgaggagttaaagtcactaacaagatatcgttttgacaaagtttctgagagagctacgctcaagcagtctgtaactcgtctggtcaatatcctgtttccggagctggaaaagctggtcccgacgctccatatggtgtctgtctatgccatgctcagcgagttccccggcgcaaaacagattgcagaggcacatctgacgcatttcaagaccgtgctttctgaggcatctaaaggccggtacgaccgcgaaaaagccgttgcgatccgtgatgcggccagacgctccgtcggctccgtcatgcctgccaagtcgctggagctcaggcataccatccggttgatccgagaactggacaaggagattgaggaagtcgaagcggagatcttcactatcttcgacagcatgcagtccccgattaccacgatccccggtatgggaccgcgcatgggagcgatgatcctggccgaagtcggcgacttctctcggttcgattcgccggataagctcctggcgtacgctggtctttctccatctacctaccagtccggcaagctcaacgccaccggcgcttatgcccacatggagaaacgaggctcgcgctatctgcgctacgccatctttaacgcaacgaagttcgtttgtatgtgggattcgacattcaaggcttacctcgcccggaagcgtgccgagggtaagcactacaatgttgcaatctcccacgctgctaaaaaactcgtgcgcttgatctacgccatgcagaggtccggcaggccataccagccagcttgatctcttgtcaaataaccctggcgtcttagcggacgtcagttttggtgcgcctttttgtaccaactaccaattcacaatctttctgcttttggggcttgacttttaatagttagt

SEQ ID NO: 4898 - DNA, 1507 bp, unidentified
  source 1..1507: mol_type = unassigned DNA; note = element_7762628
  misc_feature 1..4: note = core
  misc_feature 5..105: note = LE
  misc_feature 106..1215: note = CDS
  misc_feature 1216..1507: note = RE
  misc_feature 1233..1435: note = bridgeRNA
agacgtcatgttcgcgggctgagccggtggcccgccctttcgtgcaggtaagaacgagggttgctcgggcatgccgagccgagcctcatgcacggagggcggaccatgggaaagtatagcgaagtcttcgtggctttcgacgtcgccaagaagaagcacgcggtcgcgatcgcggaaggagggcggacgggagaagtccggtttctcggcgacgtcgagaacagcccgttgccgatcgagcggacgatcaagagactggcaggtcgatacgaccggctgcatgtctgctttgaagccggaccaacgggatatgggctttatcgccaaatccaagcgctcggccacgaatgcatggttgtcgctccggctctgattccgaaacggtcgggcgagcggatcaaaacgaatcgacgggatgcggttacgctggcgcggctgcatcgggccggcgaactgacgggcgtgtgggcgcctgacgccgctcacgaggccgtgcgcgatcttgtccgcgcccgcgaggccgcggctgacgatcttcgtcggaagcgccagcagttgctctcctttctgttgcggcacagccggatttacagcggaggcggccactggacgatggcgcatcggcgctggcttgccagccagaagttcgaacatgccgcgcagcaaatcgtctttcaggaagccatcgatgcgatcgaggacgcgctccaacgcctgcgtcggctcgaggagcaactcgctctcatcgtgccggaatggtcgatggcgccggtcgtggaagcctaccaggcgatgcgtggcgcctcgtttctcgtatctgtgacttttgccgccgagatcggcgatgtgcgccggttcgatacgccaagaaagctcatggccttcctcggtcttgtcccagcggagaggtcgaccggcgatacgatccgacggaagggcctcaccttagcgggcaaccggcgggcgcggcgggcgctcatcgaggcggcctggacataccgctatcccgcgagagtcagcgagaccttgagagcgcggctggaggggctgccgaagcccgtgcgcgacatcgcctggaaggcccaggtccgtctgtgcgctcgttatcgtcgcctcagcgccacagggaagaagctgcctgtcgtcgtggcggcgatcgctcgagagatggccgcgttcctgtgggccatcggacgcgaggtcgcgccagcgtaagggcgacgctctttttcccgccgctgcgcagagccgggagtggagcacgaaaggtggggaactcccgtccctagttatgtggccgggttcgcgcccgacgcccgtcctctagaccgaggaaagccccgagacgaagacacggaaggcggtaaccaacccgcggataagagtctgatcaaccgtcgtctctcgctccactcccagccttgcgcagccatgcctccttttgccgacggctgtctcgccccagccggcgctcaaccgcgctttctcgcttgaccgcgaacataag

SEQ ID NO: 4899 - DNA, 1369 bp, unidentified
  source 1..1369: mol_type = unassigned DNA; note = element_7765657
  misc_feature 1: note = core
  misc_feature 2..294: note = LE
  misc_feature 295..1353: note = CDS
  misc_feature 1354..1369: note = RE
  misc_feature 10..289: note = bridgeRNA
ctgtaagtctctgaggtggctggcctggggtcggctggcagggttggtgctggtgctccgcttggtcgtgactcttgaatcgcttggcctctcgcctctcggggcggggtgcctttcccaggatctgtccgggcaggtgggtgccggcgccgaccctgctcactccgatggcttgatcagaagcttgcccgaccgttgacggcggtcgtggcccattacaggcctgcctcgaggtgaccttcccgggtcgacgccagcagtgacgtcaacccaacggagaggatcacggtcactatggctatcgtcgcaaacacgttcgcgtatgtcatcggcgcggacacgcattccagaacacacaccctcgccgtgctggatgcgggaaccggcgcgaggctcgacacgcagacgttcccgacgactcctgcggggctgtcccgcgcggtcgcatggatcgtgcgccgcaccagcggtctggctgacgttctcgttgcgatcgagggcgtcggctcgtatggcgcaacgctcgcgagagcatgccaggaggccggctaccgagtcgttgagtcgttcccgacgctggcgcgtgaacggcggggacggggcaagagcgacgagatcgacgcggagctgatcgcccgctccgtccttcgtgtcgatgtcgacaagctccgtgacccgcgtcaggacgagggtgttcgtgctgcgttgcgggtgctgatcagcgcccgcgacctcatcaacctggaacgcacccggtcgatcaacgcgctgaccgcgctgctgcgaacggtcgatctcggtatcgatgctcgcgcgtcgctctccaaggcgcagttcgcgatgatcgggtcgtggcgcgcccggcaggaagtcctcgcctcagcgacagcccgccgcgaagcggtccggctggccaggcgagtgactgcctgcgacgacgagcttgtcgcgaatcgcgccgagatcgctgccctggtcgccgccagcgaaggtgccttcctgctggacgagccgggtattggcgcgatcaacgcggcggtgatcatcgtcgcctggtcacatcccggccgggttcgctccgaggcagcgttcgccgtcctcgccggagtgagtcccgttcccgcctccagcgggaacacgacccggcaccgtctcaaccgcggcggcgacaggcgcttgaaccgcgcgctttcgtcgatcgcgctgacccgcatgtcccatcacccgcccacgcgcgcctacgtcgatcgacgacgtgcccaaggccgcacgacaaaagagatccgacgatcactcaagcgatacatcgcccgacaggtctaccgacgcctggcactcacaactaggacttgacgtgacatagaagcat

SEQ ID NO: 4900 - DNA, 1436 bp, unidentified
  source 1..1436: mol_type = unassigned DNA; note = element_7767200
  misc_feature 1..2: note = core
  misc_feature 3..121: note = LE
  misc_feature 122..1015: note = CDS
  misc_feature 1016..1436: note = RE
  misc_feature 1186..1389: note = bridgeRNA
agatggggtattcggcttgagccagcctccgaacgacggagtgaatgtgctgtccctcgagctgaaggtgtaacgttgccctattggacctaaacacgaacctcacgaaaggacgcgcagcatgaaatattatgccggactcgatgtgtcggtgaaagagacctccatttgcattgttgatcaaacgggcaaaatctgccgcgaggtgaaagtcaccagccatcccgacgatctcatcgcggtacttaaggatcctgcctggaacatggagcggatcgggcttgaggccgggcccctgtcgcaatggctgtttgaaggtctggccagggccggcctacccgtgatctgcatcgagacccgccacaccaaggcgtttctaaaagcgcaaccgaacaagagcgaccgcaacgacgcgcgcggcatcgcgcagatgatgcgcgtgcacttgtatcgggcggtgcgtgtgaagacgctgaccagccagaagcgtcgagcgctgctgacggcgcgcaagctcttgcaggacaaagcaatcgccattgagaacgacctgcgcgggctgctgcgcaactttgggctcaaggtcggcgtggtcggatccgcgaagttcgaggcgcgcattcgcgagctcgtcgagggcacccttgacctggtcgagattgtcgagcccttgcttgacgcgcgccggaagctgcgggagcactttgcgaccctgcatcggaagcttttgatgatcgcgcgggacgatgaggtctgccgactgctgatgacgatcccgggtgttgttgctgtggcctataccgcgacaatcgacatccctcagcggttcaaaaactccaaggcagtgggaccgatcctgggactgacgccagtgctcaaccagtccggtgagagtcaccgcgtcggccgcgtctccctgtgcggcgacggcatgatgcgaaccttgctttacgacgctgcacaggttcttctcaatcgggtggcaaagtggtcgtggctgaaggcatggcgatgagcgtcgccaaacggcgcggcctgcaaaaagccatggtggcgctggcccgccgtctggcggtaatcatgcatcgcatgtggagcgacggcactgaattctgctggtccagggagaaactcccggccggcgcctgactggcattcgcaatcgagatcgccgccgaggctggacgcatacggtcgccggcggaaagatgtcccttgcgggacggaggataggcgagttcgcacacaggctgttcccgggccattgtcctggcttaagggacgcgccggagattgttccgcttgttccatctgatcccatcgtggaagggccagcgagtgccgattccggagagaagcgcgagcccgtaaggacacatctgtagatgtcgatgacataagctggaagtgcttgacctcgacacgccgaatagaga

SEQ ID NO: 4901 - DNA, 1161 bp, unidentified
  source 1..1161: mol_type = unassigned DNA; note = element_7767b72
  misc_feature 1..2: note = core
  misc_feature 3..207: note = LE
  misc_feature 208..1149: note = CDS
  misc_feature 1150..1161: note = RE
  misc_feature 14..213: note = bridgeRNA
cttgtcttatgacttttccgctggttttaggcattaagggatgcccgatccggggtggccaccccggatcgggcggaaggggatggatcgaatccgtctcggtcgtggaggaccgtcgattagtgtgatcacccctttcttttccaccagacctgaacggaaaccagggcttcgggcccggatgacaagagtaggacagcggaaaagatggacaatcccataccccaaaccatcggcatcgacatctcaaaagcgacgcttgatgtatatgctcatcctgcaggctgcgagcggcagttcaccaataccgccaagggccacaaggagctgatagcgtggctcgggcaatggttgatcgatcggatcgcctatgaggctactggcgcataccaccgacagctcgagcaggctttgtcggatctgccatgcgtcaagctcaacccggctcgcgcgcggcggttcgcacaagcgattggcactctcgccaaaacggataaaattgatgcggtaatcctggcccgcatggcgacgacactccagcctcccgtgcgcccagccaatacgccccagcaggccaagctcgccgaattaatcagcgctcgtgatggcttggtccgcgataaaattgcgcttcaaaatcaagcgaagaacctgacgctgcctctcctcaagcgtcagcacaaaaagcgtttggatcagatcgaacggcatatcgaacaggttgatgccgagcttgcgacgatcattgcggctgactcagagttggcgcgacggcacgaaatcatctccagtattgccgggataggcacacgcaccgccgaccagctggtcgcgaccatgccagagttaggagcactcgatcccaaacaagccgcttcccttgcaggcctggctcccgtcacccgacaatcagggcaatggaaagggcgcagcttcattcaagggggacgggccaacgtaagacgagcgctttacatgccggccctcgttgccgcccgctacaatccagacctcaaggcaaaatatcaaagcctcgtcgcggccggaaaaccggcaaaggtcgctctagtcgcccttatgcgaaagctcatcataatcgccaacgcgctcatcaaagaaaaccgcctttgggtcgaaaagcgggcttgatcacaacggaaa

SEQ ID NO: 4902 - DNA, 1507 bp, unidentified
  source 1..1507: mol_type = unassigned DNA; note = element_776db52
  misc_feature 1..2: note = core
  misc_feature 3..216: note = LE
  misc_feature 217..1485: note = CDS
  misc_feature 1486..1507: note = RE
  misc_feature 5..209: note = bridgeRNA
ctgatgggtctaccttcccttcgcacggtggatcccggcagggagcgctttcggcgcttgtcccttgaggactgatgtgagacggcgcccctgccgggccccggcgaaggcctgacgcccaggagggtgtggtcccacgaggactggttcatcagcacgacgcagcgccttcctggtccgccgagcacaatgctctcggcggaaggagacacgcgggtgctgggaatcggcatcgactgggctgaagagttccatgacgtcgccctcgggacagtcgagaaaggagtgatcgaacagtttcgcgttcagcacggcccggacggtgtcgccgccctgatcgagcgcgccctgcgcctggaaccggacccggccgaggtccgcgtggtcatcgagacccgccacggcctgctggtcgaggcactgctggatgccgggttcaccgtgctgccggtcaaccccgacctggtcgcgcgccgccgcggcccggcccggaagaaggacgacgccgaggacgcccggatctgctgcctgctcgccctcgaccgccaccaaaccctgaagacgctggtgccgcacggggagatcagcggtgagctgcgcgcgatcggtcgcgacgacgaacgcgccgcccgcgaccaacgccgcctgctcaaccggctgcgcgccgacctgcagaccacctaccccgccgccctgaccctcgcgggcaccgacctcggcgccccgacggtgctgcggctgctgcagcgctggtcgacccaggccgaactcgcccaagcctcccgcgacgaactcgaggcgttcgcccgcgcgggccgccacggctggcccgcccggttcgccgaccgtgtcatcgacgcgctcgccgcgccgtcgttgcccacccgggactacctcgtgcgggccaaggccgccgcgatccgcctggccgcggtccagctgctcgcgctgcacgaggcccgccgcggctgggaagcccgcatgggcgagctcctgctcggcggacgccgcaccggccgcgatcacatcgtggaggaccccgacccggggaaggcattcccaggcggggacatctacctgagcttccccggcctgggagaccgcctcgcagctcgggtcgccggtgagatcggcgagcacatcgaccagttcgactccccgaacgggttgcagtgctacgccggccaagctccggtcacccgacgctccggcaagagtgacttcgtcgtcgcccgacgcctcgcgcacaaccgatacctcggcgccgccgtgcaccaatgggcgttctgcagcctcacccgaagcggctgggcccgcgagttctacgacgccaagatcgccgcgaagaagggacaccacgccgccctgcgcgccctcgggaaccgctggctggagatcctctggcactgcctgaccaagggcatgctctacgacgaaaacgtccacgtcgccaaccgcaaccgcgccctcggacgagcagcctgacccggaggttgacagagggtgt

SEQ ID NO: 4903 - DNA, 1621 bp, unidentified
  source 1..1621: mol_type = unassigned DNA; note = element_776e302
  misc_feature 1: note = core
  misc_feature 2..253: note = LE
  misc_feature 254..1492: note = CDS
  misc_feature 1493..1621: note = RE
gactcatgaaagattttcacagctgtgaatgaaaataacgcaagtgcgtcggatcatggtgtctgctatactggatatagcaggcgaagtccggttgtaccttggcggaaatgccaccccgtttgttcaacgtggacgaattgcccaagagaacagcagtatgttgcaccacggaagtggagagcacgagtagcaagattcggataccaacccgggcaattcccaagcctgcaatacgacaggaggggatctcatgcaagacattttgacctgtgccatgggactggacgttcatcgggatatcatcgttgcctgtctggtcaaaggtgctgtggatgccgagccggaggcagaaacacgcaccttcagtacgctcatcccagaaatgcagaaactacgggactgggtcatcgaatccgaatgtcggaacattgccatggaaagcaccggaatctactggcagcctatttacgagatgctggaatcctgttttgacggcgagatcagcattcttgttgtaaatgcccgacacatgaagaatgtgcctggacgtaagactgacatgaaggatgcccagtggatcgccacattgcttagggcgggattgctcaaaggcagctttatcccggataaagcattccgagagctgcggcatctgacccggtatcgcaagagcgttgtccatgacattacggcacaaaagaaccggatcgataaattcctgcaaagttccggcttccgcttcactgcattcctttcggatacctttggtgcttccggaagaaacatcattcggcatcttattgagcacggcagtattgaccgggaagcattggataagtgtctgaagaccaaaaccagaaaccgaattgacgagatactcgttgcactgaatggatcactttccgagcatcagcgcagattcctgaatatggtgtttcggcatctggaagatttggaagcacataagcatactgttgaggacgaaatcaccgaggaagtcctgaaacatactgatgcactgaatctcctttgctccattcccggaattgatgtcactgcagcagctgctatcattgcggaaatcggtactgatatgagttcattcccggattcccaacacatttgctcctgggcgggactgagtccaggcaacaacgagagtgctggtaaacgaaagagcgtccatatcaataaaggcaatccttatctgaagagcatgctgtgcgaggtcgcgtggatcatggcatctcaccgcaagctgtatctttccggctggtactggaaagtgaaacagcggaagggagcgaagcgggcaacgattgcgttggcccggaagatcctttccatcatctacaccatgctgaaaaccggaactccctataatgaggaatgctttgaacagcgcagactgcgatgcgaacggaaacgtgcaaaccgcttggtgaatgaattgcagaagctgggctacgtagtggtagcacccgactgatgcttactcccatattgctccgccagcgacaggcaaggcctgccgctatttgtgctgtgaatctttcatctatgaggcgttgaaaaacgctttgtcaaggttcacgctacgacttattttcgtagcaag

SEQ ID NO: 4904 - DNA, 1390 bp, unidentified
  source 1..1390: mol_type = unassigned DNA; note = element_777c640
  misc_feature 1..2: note = core
  misc_feature 3..68: note = LE
  misc_feature 69..1139: note = CDS
  misc_feature 1140..1390: note = RE
  misc_feature 1159..1378: note = bridgeRNA
tgatgtggtggacggcgcccgctcccggcatcgcagtgccataggatggttcgtcggagacgaatcacatgagggagccatccacatgcaatttaccactattggtttggatatcgccaagaacgtgtttcaggttcacggcatttgacgcagccgagaaggtcatcgtcaggaagaaacttcggcgcggccaagttatagctttcttcgaagctctggcgccgtgcctcatcggcatggaggcctgtgccacgtcgcatcattgggcgcgtgagttgacgaagctgggccacgaggtccgtctgatgccagcgaaggatgtgaaggcctacgtcaagcgcaataagaacgatgccgccgacgcggaggcaatctgtgaggcggtgcggcgcccaaccatgcgtttcgtacggattaagtcggccgagcagcagggccagttgatgctgcatcgagcacgcgatctgctgatgcgccaacgcacccagttgatcaatgcattgagggcgcatttggccgagttcggcattacggctgcacaggggcgcgaagggatcaaagagttgttggcgatcgtcgcacaggaagagggttcacgcttgccggtcgacgcccacgccagcctgaccgtattagcggcgcagcttcaggctgtgcagacgatgatcgggtcgatcgagaaacggatcgttgcgcagcatcgctcgaacgaggcaagtaagcggctggagaccatccccggtatcggcgtcgtaggcgcgactaccatcaccgccgtcgtcacggacccgaaggcattccggtctggtcgtgattttgcggcctggatcgggatcgtgccgcggcaagattcgaccggcggcaaacagaagctcgggccgatctcaaaacagggcgaccaatatctcaggcgtattcttattgtcggagcccattctgtcttgcggcgtgcgcgccagcagccggacaagtatccctggttcactcaggcttctcgctcggcgaccgttcaaggttatcgcggtcgcgctggccaacaagatggcgcggatcgcctggcgtttgctggccaggggtgggacctaccgggcgcctcaactcgtggcagtctaacaaggagctcggcaatgggaggatgaggttgcgtccgagcgttcacgaactgcagggtgaagacgacattgatgcgaaacggtcgagaccgtcgattgggaaaacccggaaggtgccacgcgagggaaagaacgcgtgcttttgtttgggactcgatcagcggatcacatcaggtccagcggccaaagtggctgcattcaaaggccggatacatgactgcacccgaacgcttcgctgaaacgtcagattcctcttgcaccgcgggcgccgtcacaca

SEQ ID NO: 4905 - DNA, 1595 bp, unidentified
  source 1..1595: mol_type = unassigned DNA; note = element_777f535
  misc_feature 1..2: note = core
  misc_feature 3..249: note = LE
  misc_feature 250..1473: note = CDS
  misc_feature 1474..1595: note = RE
  misc_feature 11..269: note = bridgeRNA
ttagtaccataaatagtgtaagaaagaattatcctttcttgcactattttttatataatgaaagggtagagcaacgagtctttttttgggctagtacgtccgtgcataaaactgttgcctgccgactcattatatgtattcgattaagcaggttgggctaatacgtccgtgtcacatgctaaaatgagtggaaatgggtgcaggtaggattctacattatctattttaaaagaatagggagggaagaaaatgatatctataggtattgatatttctaaagacaaatctactatttgtgctcttaaaagtggtagtgagaccatttggaaaccctttgatttaaggcatttacaaagtgatatgcaaagcttcatatccaaacttgaagttttaacaggagaactacggatagttatggaagctacaggaaagtaccatttaccaatactgtactcattaaaatcaaaagggtactttgtgacagtagttaatcctttaaagatgaagcaattctgccgttcaatgagctttcgcaaggctaaaaatgacaatattgattcaagattaattgccgagtatggactgatttattggcataaactagaagaatataaattagatagagaagtttatcagaacttgaaacacttaaatcgttcctatcatcattatatgaacttgaggattagtcaaatgaattttttagatactttcattgatcaagtctttccaggcttgaaaaagcttttgcctcatggctcaggagattttagcaaggataaattattagattttttagaagtttggtggcataaggatgttgttattagcaaagacgaagaaaaatttattaaagattatcaaaagtgggcaaaagaaaagagataccatcctaatgccaagaaggcacaagctatctacaaggtcgctttagaaggtatctccactcagccctcaaatagcccatacattaaagcggacgtttatgagagcattcagttggttaaaagaattaaccaaagcctcaattgtattttatcacaaatgttagatcttgccgagcctttagaagaatttcaggaagcaaagaaattttctggtatatcagataagctggcagttcagataacagctgaatttggagacttgagcaaatttagaaacaaaaagtgtttaatatctttcgttggcattgatgctccaacatatgaatctggggattttaaaggtaatcggcgtaaaatatctaaaagaggtaatgctattcttagaaaggttggctatcaggcaatgaaatgcatgatgagtgctaaaaaccctgaaaatccagtatattgttatatggtaaagaaagaagaagaaggtaaggccaagaaagtaagtaaatttgcaggcttaaacaagtttttgagaatttactatgccagagttatagaggcaaaagaagaaaaaacatctaaaaaagcagcataataatcatacttaatttaaaatacaaataagccgaatcaaatgtcggcttatttgttatgtctaaatttaaatattaaaaactgggcaaatgataaaagttgtccttgacttttgttagcagg

SEQ ID NO: 4906 - DNA, 1725 bp, unidentified
  source 1..1725: mol_type = unassigned DNA; note = element_777fc4c
  misc_feature 1..3: note = core
  misc_feature 4..67: note = LE
  misc_feature 68..1228: note = CDS
  misc_feature 1229..1725: note = RE
  misc_feature 1268..1487: note = bridgeRNA
aagatactatggggtggcggcgaggaaattgcatccattgtcgctgatgtgaaccgatggagcccccatgcaaacgccgaacgacctgagccaatcccgtatcgtcctgaaacaggacaccacactgatcgcggtgatcgaaatgagcttgtcaagctggctcgttgccggcatcgtgcctggcgtcaagcgccagccattgaagaagctcccggtcgacgagagcgcattgctgaagcttctcaatcgctggcgtgaggaagcggagaaagcgggacgcaagatcgaacgcattgcagttgccttcgaggccggccgggatggtttctggctggcgcgctggctcagagcacgcggcatcgaagcccacgttatccacgcatcgagtgtagcagtatcgcgtgaacaccggcgcgccaagaccgaccgtctcgacaccgagctgctcaaacgcgcctttctcggttggctgcgcggcgaacgtgatcacagcaagatggtcgcaatcccgacaatcggggatgaagatgccaagcgacccaaccgcgagcgcgagagtctcgtcggagagcaaactcggattgtcaaccggatgaaagcagcgttgagccggctcggcatccgcggcttcaatcccaaactgaagaaggccgccgagcgcctcgaagatttgcgcacgcccgaggatgagccaataccgcccaacacgttggctgagctgcgtcgcgatatggagcgccgtcggctcgttcgcagtcaaatccgagacatcgaggatgctcgcctggggcgtctcgagaaagcccccggcgatggaccacacgcaatggtgcgcctgttggcgcgcgtgatcggggttggcatcgagacagccgacatgttggtgcaggaggtgctgtcgcgaaacttgcgcgaccgtcgggcggtggcgcgctatgggggcctcaccggctcgcctgacgagagcggcaagaagcgtcgcgagaaagggctggctcgatccggtaacgcgcgagtccggcgcggcatgatccaactggcatggcggtttctgatgttccagaaggacagcgccttggcgcattggttttatgcacgcacgaaacaagcacctcagacccgcaagacaatgattgtggcgctggcacgcaagctgctgatcgccctgtggcggctcgtgcgggagggcgtgatcccggagggtatcgtcctgcgtccagctttatgagcggagttgcatagaaatcttccgacagtttcggcccgccccgcttcaaacgcgagacgatgccgatgacggttcgaggtggcggggtcccgattgccccccttggctttcatgccgggaaaaagaatgggtccgccgcctcggagcttcgccgccgatgcgcatgagtgcatcatggttcgggtcctggacccaccggatacaaggtcgtggcgcgattgatccgcgcccggaaagcgggctcccctctgatcgtcatcccgaccgcaccaacggtgccgtcgtgctcgaagctgtcaaggtgtggcctggcaagggcacagtacgacgcaaggttggagcgacggccaaccttgacagctcctgcgcgcgccggccttgcaatactgcgggtcggggcgaagaaacgggattccaggtcgaacaaagaaaccgatcgataaagcgagaaagaaagatcgccgctctcaaaccgcttgacaataaagaccccatac

SEQ ID NO: 4907 - DNA, 1383 bp, unidentified
  source 1..1383: mol_type = unassigned DNA; note = element_7783216
  misc_feature 1..2: note = core
  misc_feature 3..166: note = LE
  misc_feature 167..943: note = CDS
  misc_feature 944..1383: note = RE
  misc_feature 1142..1378: note = bridgeRNA
agatgcctaatgggccggcgtctcacgagtagccagttgggtagctttccctcagaataatgatgttttggaacgaggttcgagcgatcggcctcaagcatcataagaggaacagccatggagtattatgcaggaatcgacgtctcgctgaaagagagcagtgtgtgtggtcgacgcgacgggtaagctgtttcgggaggttaaggtaggcagcgagccagaatgcctgctcgggtattttgatcaattggactttctcgtagagcgcatcggccttgaagcagggcctttgtcccaatggctgtatgcggctctcgttgctgcggggcatgatgtggttttgctggaaacgcggcatgtgaagatggcgttttcggcgatgactgtgaagaccgaccgcaaggatgcacgagggatcgcgcaactgctccgcatgggatggtatcgtccggtccacgccaaatcgtcgccagcccagaacactcgggctctattggtcggccgcaagcttctgcaatacaagctgctcgacgtcgaactcagcatccggggtatcatgcgtgactatggattaaaggtcggcgaggtcagccgtgggcgcttcgaggcgcgcattcgcgaactgattgcagggcattcgacattatcgatggtgattgatacgatgctgacggcgcgagcagcgctatggggcgaatttacgaagctacatcgtgagatgcttaggatcgcctgcgctgacaaggtttgccagcggctgatgagtgcgccgggtgtcggtgccctggttgcgctgacctactgctctgcggtcgatgatcctgtccggtttgaaaagtccagcacggtaggcgcctattttcggctgacgccgaagaaatatcaatccggcgcgaccgatcgcgatggcggcgtcagtaaggtcggcgaggcgacggtgtgaaccgcattgttcgcgtccgcgggcgcgcgcttttccagtctaaagcgttgggcgctcgatgtagccaagcttcgtgggatgaagcgtgagaaggttgcccttgcacgcaaactgagtgtcgtacttcactgcatgtggatggatgcggtggacttccgctggagcgcaagccctatggcggcatgagtagagactatgtgatcgatgcaggcaagtataaggtttgcatctgatgaggtcccgtcgctgggacgcaggcttggaaaggtcgtgtgtagtgctgtgactgcttcggcgaagcacgcttcctagattgacctgccggcgttttgatctgatggcctagtgtggcagtcttcgtaccgaccacggacagaagcatgatctcagcgacgagataatcattcagagggacgtgacgaacaaaggcccattacaga

SEQ ID NO: 4908 - DNA, 1437 bp, unidentified
  source 1..1437: mol_type = unassigned DNA; note = element_7789ed0
  misc_feature 1..2: note = core
  misc_feature 3..120: note = LE
  misc_feature 121..1158: note = CDS
  misc_feature 1159..1437: note = RE
  misc_feature 1187..1384: note = bridgeRNA
agatgggatattcggcttgagccctatctctggcagcagcgactaaggtgctgcgcttcgagctgatgatagaacgtggtctgtatgagcagccacaagcatcaggaaaggaagcgcagcatgaagtattatgccggactggatgtttctgtgaaagagacggcgatctgcattatcgacgaaacggggaaaatttgccgcgagttgaaggttacgagccatccagacgatctcgtttcgactcttaacaatcgggcatataaccttgttcggatcgggcttgaagctggtcctctgtctcaatggctattcagcggtttggctgaagccgggttgcctgcggtttgtattgagacccgccacaccaaggctttcttgaaagcacaggtcaacaagaccgatcgcaacgatgcccgcggcatcgcgcagatgatgcgggtcaatctgtttcgacccgttcacgtgaagacgttgacgagtcagaaacgccgcgctttgctgacagcacgtaagcttttgcaggagaaggcgatcgctatagagaatgatatccggggattgttacgcaacttcggcctgaaggtagggatcatcggaacgatcggtttcgaagctcgcatttgcgagctcatcgacggaacgcctgatcttggcgaaatcatctcgcctctgcttgctgccagagaaaagctacgcgccgagttcgcgaagttgcatcggaaagtcctggatctggtgcgcgaggacaacacccgccgacgccttatgacaatacccggcgttggccccgtcacctcgcttgccttcgtcagtagcatcgatgttccagcccgtttcaagaattcccgtgcagtcgggccagcactcggtttgaccccggtgctcaatcagtccggggagagccatcgtgtcggccgcgtttccttatgcggcgatgacatgatgcgtgctcttctctacgaagcggcacaggtcatgctgagccgtgtgaagaaatggtcatggttaaaggcctgggcaatgaatattgcccgaaggcgtggtcgatcgaaggcgatcgtagcgctggcaagacgattagccgtgatcatgcatcgtatgtggagtgacggttctgaattccagtggacacgggataatgaaacaatacccgcctgatttggcgccgcaaccgacgaagtaaagctttggaattccgctgaccggcggaacgatgttctttgcgggacgatggatgaggtgagtgcgctttgggtcttgtgccggtcgctacgacggttaggacgtgagtcagattgcaccgcttcgttcttctgatcccatgatgggaaggccagggagcctatcccgaagagaagcaagggcccgttaaaggacatcaaaggccggcagttggaaagcttcaaaagtgcttgacgcaactatgccgaatagaga

SEQ ID NO: 4909 - DNA, 1358 bp, unidentified
  source 1..1358: mol_type = unassigned DNA; note = element_7792eba
  misc_feature 1: note = core
  misc_feature 2..69: note = LE
  misc_feature 70..1095: note = CDS
  misc_feature 1096..1358: note = RE
  misc_feature 1120..1352: note = bridgeRNA
gaatgacatggattccccctcccgaggatctgccacactcatgtggtcattgcttaaaccggaggcaccatgtctgattattcttattttggcggtatcgacttagctaaaaatcactttagtattcatgtcgttgacgtaaaaggtaaagtcgttctgcacaagtcggttagccgctctaaattgctcactaccatatcaaaccttcctcatatgtgcataggcttagaagcgtgcggtggagcgctttactgggcaagaactctcaacaaacttggtcacgacactcgcatcatggcagccaaatatgtcgatccttatcggaccaaaggaaagaatgacctcaatgatgctgtcgctatctgcgaagccgttcaacgtccttcgactcgcttcgtcccgataaagtctcctgagcaacaagccatactgtcgatacaccgcatgagagagcactgggttcgtgagcgcactgccatcatgaatcgcatccgtgcactactatcagagtttggtcttgtcatccctgtcgcgcgctcatctctaatgaagcaagttccactcatgcttgaagacgccaacaatgaactgcctcaactagcaagagcggtgctgcatgatgcttatctgcatctcaacgctctcaatcagcgtatcgcagatactgagcaggcattcgaagccttcgcaaaggtcagtgataacgtacaacgcatcatgaaagttcgtggcattggacctcaaactgctactgcgattttggcgtcaattgttaatggcgctcagttcgacaagagtcgagacttctcggcctggcttggtctggttcctaagcaatacacaactgggggtaaaccaaggttaggtcgaattaccaagcatggtgacaaatacctccgcacgcttttagtccacggggcaagaaccgtcattgccaacttaggagataagcaagacaggcttagccaatggtgtcgaggcgtattagagcgaaggggtatgaatcgcgctgtggtcgcattggcagctaagaatgcgcgaatcatctggtcactgttacacaatcaaacggaatatgagaactatgctgcctaagtaaaaaacttaaacagcataagagttaacccacagggtcattgcagacgctaatgatggagataggttaagaccacatgcggagagcctggtaatttggcggacacttttgatgtcatctaacgaataaggcaccgctgtcgcgcaaagtcatcagggccacgatgttgcgaaccatcaataagtaggccgaatgtagagcggcagtccaaaacccatcacttgaagtttagcgatgtttgacaaccgggggaatccatgta

SEQ ID NO: 4910 - DNA, 1535 bp, unidentified
  source 1..1535: mol_type = unassigned DNA; note = element_779d4a0
  misc_feature 1..2: note = core
  misc_feature 3..241: note = LE
  misc_feature 242..1417: note = CDS
  misc_feature 1418..1535: note = RE
  misc_feature 3..219: note = bridgeRNA
cttgtattatagagtagtagtttttattgtccctctccaaggacatatgctacactgtaagggatgctgtggattggtttcatcgtcctaccacaagatggttgaagaaaggctccaaccacagccctttacagtattgttaatcagttagataccgccagacggtttatgtggaacaaggttacaagagtaaagtgtcctgtggaaccagcatcaaataaacataccggaggtattccttatgatttgtgtgggtatcgatgttgctaaggacaagcacgactgcttcatcctcagctcggaaggtgaagtcctggcagatgtcttcactattcctaacaacgcagaaggctttggcatcctgctgcaaaccattcgccgctgtactcgtccggcagacaaaataaaagtaggacttgaggctaccggacattacagctacaacatccttgggttccttcttgactgtggcctgccaacctttgtcataaacccattgcacaccaacctgtaccggaaaagtctgagccttcgcaaaaccaagactgaccggatcgatgcacgaaccattgcaactatgctcatgtctgatgtggacctcaagtcctacacagacacatcatatcacaacgaagagctaaagtcactaacaagatacagatttgacaaagttcgtgagcgggcaaagctgaaatgctccgttgcccggctggtctgtattttgtttccagaactggaaaagttggtgccaacaattcatatggcttctgtttatgcacttctcagtgagtttcccggagcacatcagatttctgaggcacacttgactcacttgaagtccgtgctgtcagatgcttccaaaggccgctatggccgggagaaagcagttgagattcgggatgctgccagaaactccatcggctccagaatgcacgccaagtccctggagttgaagcataccattcggctcatccgggagttggatgcagagattgaggaaatcgaatctgaaatcaattcaataatgggtgaaattcaatctcctattactaccatccccggcatcagcacccgaatgggagccatgattctggctgaggttggtgacttttccaacttcgattctgccgacaagattctggcttatgccggcatgtcaccgtctacctaccagtcaggacagcttaccagcagtcattcccacatggagaagcgcggctcccgatacttgcgatatgccatctttaatgcaaccagatttgtctgcaattgggaccctgcatttgctgcctaccttgccaaaaaacgtgctgaggggaaacattacaatgttgccatatctcatgctgccaagaagcttgtgcgcctaatctatgccatggagaagtcccaacagccatacagacaagctgcataacaaccgcaacaatcttttctcagagcgccgcagcgacgctctgcttgccatgccttttttcgataggcccaacaatctgcaaatttctcattttgtggcttgacttttaatagttagt

SEQ ID NO: 4911 - DNA, 1233 bp, unidentified
  source 1..1233: mol_type = unassigned DNA; note = element_77a91fc
  misc_feature 1..2: note = core
  misc_feature 3..225: note = LE
  misc_feature 226..1218: note = CDS
  misc_feature 1219..1233: note = RE
  misc_feature 31..187: note = bridgeRNA
cttgtatcttcagtttcgaagtctcgagcttctcggtgtagacgaggagggcgttccgggaaggccgtttcggctagaagccatgagcttgttcgttagattggccccccgccctcttcgtctatgccgtggagtatccgaggcacaaagcctgcatccacaaggctggtaggcggaggtgcagggtcggggggcccggagcggacaatagaacggaggaggcggatgagggaagaaacggaagcagggatcgacgtgagcaaggacgtgctcgatgtcgctgtccgccggcatgacggcggcctggagacggggcgcttcgagaacgatgccgccggccaccgcaccctggtgcgctggctgaccaagcgcggccgtcgggtgcgggtggtgctggagtcgacgggcacctacagcctggacgtcgccgtggccctgcaccgggcccgcggagttggcgtcatggtcgccaacccccgggcgatcaagcagttcgccggcgcgctcatgcagcggtcgaagacggacctgacggcggccgcggcgctgcgggagtatgccgcgcgcatgcccttcgtcgagtggcggccgcccgccggcgaggtgctggccctgcgcgggattgcgcggcggatcgccgccttggtcgtcgagcgaacccgggaacgcaaccggcttcatgcgctgcaggcgaccgcggaacgggtggccgtcgtcctcaatgacatcgaggtgaacgttcgccacctcgagcggcgcatcgagctcctcaccgccgaggccgttgccctggtccgcgagcatgtcacgctccaccgcgcgttcgagcgactgacatcggtcccgggaatcgccacgcacagtgcggtgcagctcttgcccgagctgctcgtgctcccggacgacatgaccgtgcgccagtgggtggcgcacgccggcctcgatccccgcgcctgtcaatccggcacgtccgtccacaagcccgcgcgcatctcgaaggtgggcaacgcgcacatccgccgcgccctgttcatgccggcgctcgtcgcggtgcagcacgacccgcatgtcaaagccttcttcgccaaactcgtcgctcgtgggaagaagcccatccaagcgtacgtcgccgtcatgcgaaaactgttgcacgcgatctacgggatgttcgcgaccgagacgaccttcgtcggagagaagttccatgccgtcgcttgacaacggagagagtat

SEQ ID NO: 4912 - DNA, 1345 bp, unidentified
  source 1..1345: mol_type = unassigned DNA; note = element_77ae454
  misc_feature 1..2: note = core
  misc_feature 3..70: note = LE
  misc_feature 71..1075: note = CDS
  misc_feature 1076..1345: note = RE
  misc_feature 1113..1343: note = bridgeRNA
ttaatgagatggtcacccccaccctgtgggcagtacgctggcagggtgcaattcttcagagggttccatcatgcaaaccgcgacgcttattggtatcgatctgggtaaatattcctttcacgttcattgccaggatcggcaaggtaatgccttgctacgtaagaagttttctcgttctcaacttgccacctttcttgcaacctacccggcctgtaccgtggtaatggagtcctgtgccggggcacattacatggctcgaaccgtatctcagctgggccatcgggttaagttgattgcgccacaatttgtccggccgtttgtcaaaagtaacaagaacgattttgttgatgctgaagctatctgcgaggcagcttcccgaccttctatgcgttttgtaacgcccagaacagaagaccagcaggccatgtcagctctgcaccgcgtcaggagttctctgatacggaagcgtgttaaaactaccaaccagatgcatgctttcctgctggaatttggtatcagcttgccacgcggcagtgcagtgataaaacgccttccctcggtactggaggaaaatggtatcccaccttacctggaaaggcttctggcaaggctccatacgcattacggctatcttagtgagcaaattaaagaaatcgataacgagctgaaaacacacctcaatgaagatgaaacagcgcaacggctgcttactatccccggtgtcgggccagtaacagccagtctgctggccacacgtctgggcgacggaaaaaattatgccagcagtcgtgattttgctgcttcaacaggacttgtccccagacagtacagcacgggcggaaaaccgacattaatgggtatcagcaagcgagggaacaaggtgttaagaagtttacttgttcagtgtgcccgggctttcatgcgacggctggaacataattcggggcgtctggcggagtgggttaaaaagcagcttgccagccaccattcgaacgttgtggcatgtgctcttgcaaacaaactggcgcgtatagcatgggccgttacagcacatcagacagagttcagtaaatagaaaatacaccttaaattgattttgtatcaatcaattagaaagttactatctggttttgcgaagactgattattgatgacatgaacggcatatcggcctgccgatgaacctggcatatcaaatggctctctgaagccgacctgtttttaaggttcagcaggcgcggaactcatcgtggcgcgagcagttgctgttcaccagacgccgaatagatttaagcaagcctgtcataagtcaaaatcagtgttgcaaaaaggggggtgaccataga

SEQ ID NO: 4913 - DNA, 1501 bp, unidentified
  source 1..1501: mol_type = unassigned DNA; note = element_77c2eef
  misc_feature 1..2: note = core
  misc_feature 3..299: note = LE
  misc_feature 300..1481: note = CDS
  misc_feature 1482..1501: note = RE
  misc_feature 14..231: note = bridgeRNA
ctaatcagttctgggagtgagccatccggcaaactcctggtggtagccgaccggcaggtgagcactttcgttccctggacttcgagtcctgacgaaagaccgtgcccctgccggtaggccgggagaagtaatcgctgctgggatgtcgtgcccgcccgcccgtgcgggggcgtgagcactgcttgattaggtcgctgatagttctcctgctggctacgcgaaggtggtgatcggtatcgagaacgggagagccgttgagactgttcgtaggagatgactgggccgaggatcaccacgatgtggaggtgatggactcgacgggtcgccgtctggccaaagcgcgtgtacccgagggtgtggcggggatggcgaggctgcacgcgatcatcggtgacctcgtcggcgacgaggacaccgacgaggtcgaaatcctggtcgggatcgaaaccgaccgcggcccctgggtgggcgcattggtcgccgccggatacacagtgctggcggtgaatccgttgcaggcgagcaggtttcgtgaccgcctcggggtgtccggggccaagagcgacgctggcgacgcgcacgtgctggcggacatggtccgcacccactcccacgaactgcgccccgtcgccggggactccgcgcgcgccgaggccgtcaaggtcgtggcccgcacgcacaagacaatgatctgggaacggacccgccacacccagcggctgcgccacgccctgcgcgactacttccccgccgcactgaccgctttcgaggacctcgacgccgccgacaccctggaactgctggcgaaagcacccaccgcggcccaagccgctcggttgacgatcgctcagatcagcgcggtgctcgagcgcgcacgccgccgcgacgtcgcagccaaagctgcgatcatccaggccgcgctgcggtccgagcagctcggccaacccgaggtcgtaacctcggcctacgccgcgtcggtgcaggcactgctggcggtgctgggcgtcctcaacacccagatcaaaaccctggaagggcaggtcgatgcccattttgggcagcacccggccgctgagatcatcttgtcccagccaggattggggccgatcctcggtgcccgggtgctcgcagagttcggcgacgaccccacccgctacgccagcgccaaagcccgcaagaactacgcgggaacctccccgatcacccgcgcgtcgggaaagaagaaagtcgcgctggcccggttcgtgcacaacgaccggctcatcgacacccttcacgcccaagcgttcagcgcgctgctgcgatccccaggcgcccgcgcctactacgaccgacaaagagcccgcggcgccggccacaaccccgccctgcgtcaactcgccaaccggctcgtcggcatcctgcacggctgcctcaaaaccagcaccctctacaacgaatccacagcctggccacagctggccgagacggctacaacttgacattcaagctcctgggatgt

SEQ ID NO: 4914 - DNA, 1285 bp, unidentified
  source 1..1285: mol_type = unassigned DNA; note = element_77c7ac7
  misc_feature 1: note = core
  misc_feature 2..289: note = LE
  misc_feature 290..1240: note = CDS
  misc_feature 1241..1285: note = RE
  misc_feature 57..246: note = bridgeRNA
cctttgttcttaaaccttgtaattatcatttattgatgattgttggaaatggggggggctggggggtgttaacaatcaaaaactttgttgaaaacgttattgtaaaagacaggggtgaactattccccagactagtttaaagaacttagtccagtattagtcccctgcttttatattgcccaaggcccaactaggatagtatctcgacccatcaaaggtttttggcaaaggcaattttaaccgttaaaatgattgattatggaaaatttcaaatgtggtttgggcgtagatgacacttgacatttgttgtgcagagcaacagctgcacattaaaattgagaattccattaagggattttctgatctgaaaaaatggtcaaaagcaaataaaatcgatttgcagcaaacctttgttgtgatggaatttactggcgggtacgagtaccggttcattcaattttgtgaatcaatatcgattgcgtattgccggatatctggcttagaaatcaagagatcgatgggaatgacaagaggcaaaagtgacaaggtagactcctttcgcatcggacagtatggcgaagaaaagataaaaaagctcgaacaggctaaaccattggataataatgtactgcagcttaaacaattactatccttccggaaaagactggttagggaaactgccggcctatcagcaacggttaaagaaagaaaacatatttatggatcaaatcagaaggatccgatcataaaagttgcaagtgaaaagataaagacgaaccagaaatatgttaagctgattgaggaagagataacaacgttaataacagctaatccaactatgctgttcaactacaggatacttagaagcattaaaggcattgggccgataaacgcctggatgacgattgcttacactgaaaacttcgtcagctttactgatgcccgaaaatatgcagtctttgtaggagtcgtctcttttgaacatacttcaggtactagcgttaatgggaaaaaacgcataagtcagatggctaataaagaattaaagcaagagcttaaccaagtggcaaaagcggccataacccatgatgctgaaatacgtagttatgcagaacgcaagcttaaaaataagcactataaaatcattctaaacaatgtaaagtttaagcttattttaagaatgttctcattagtcaagagaggggaattgtatgttgaaaactatagaaaagcagcctgaaaatatttatgaacaatgatttggatttgtgcttaacctagaata

SEQ ID NO: 4915 - DNA, 1152 bp, unidentified
  source 1..1152: mol_type = unassigned DNA; note = element_77c9e5d
  misc_feature 1..2: note = core
  misc_feature 3..207: note = LE
  misc_feature 208..1140: note = CDS
  misc_feature 1141..1152: note = RE
  misc_feature 12..210: note = bridgeRNA
cttgtcttatgatttttaagcttcatctgcgaagatgaagccctggctacaccaagcttggtgtagccagggcggcggctggatcgacataggctgggtcgcaagggaccgttttaaagtatgatcagccaccgtcttcgcatgaggcctgaacggatacagagcggcgcgaagccctctacgacaagcataggacacgcgaagacaatgaaagatagcatcggaatcgatatttcaaaagccactcttgacgtccatcgtctgaagactggcgagaccgcgcaatttgccaattccccgaccggtctgcgtgccctgcaccgctggatcgggacgcagatgcccgacattgttgtctatgaggcaaccggtgcctatcaccgtgcccttgaatgcagtctgtcgggcaaactgcctctggtgaaggtcaacccgctacaagcgcgctattttgcgaaagcctgcgggacacgggccaagaccgacactctggatgcgcagatgctcgcgacaatggggaagtcgctcaacctctccccggatatgccaatcgacaaggaccagcatgttctcaaggagttacaggtcgcccgcaaggcactcatcaaggagcgtacccggcttgggaaccgtgagaaaacacaaacctttccgcttctgaaacgccagtccaaagcccgcctcgaccaaattgcacgtcagctaatgcaactcgaagaagccttgctggccttgctcaaacagtccccgaaaaaggcacgggcatttgatattctgtgctcaatccccggtcttggccccgtcaccgcgatgaccattctggtcgagtgcccggaaatcggcaccatgacccgcaaacagatcgcatccctcgtcggccttgccccgatggtccgacagtcggggcaatggcgcggcaaggcattcatccagggcgggcggaaatttctgcgcgatgcgctttatatgcccgcgctcgtcgccgcacgctacaatccggatttgcggcagaaataccaaaccatgacaaaagcgcaaaaacctgcaaaagttgccttgacctgtttgatgagaaagctcatcgaactggcaaacgccctgatcaaacaggacaggaaatggctgccaaaaactgcttgatcaagacggata

SEQ ID NO: 4916 - DNA, 1366 bp, unidentified
  source 1..1366: mol_type = unassigned DNA; note = element_77cef68
  misc_feature 1..3: note = core
  misc_feature 4..75: note = LE
  misc_feature 76..1101: note = CDS
  misc_feature 1102..1366: note = RE
  misc_feature 1077..1353: note = bridgeRNA
tgatggggtggacgccccccgacggccttgatgtgccacagtggaggtgttgaacaccacttgaaggaggcgtccatggaagaagttaccacgatcggtttggatttggcaaagcaggttttccaggctcacggtgcagataggtctggtgccgtggtattccgaaagacactacggcgacataaagtgctggcgttttttgcatcgcagccaccctgccgtgtggcgatggaggcgtgcgggggagcgcattattgggcgcgcgagatcaggaagctgggccatgatgtaaggctgattgcacctgcctttgtgaagccctttgttaaacggcagaagaatgacgctgctgatgccgaggcgatttgcgaagctgcccagcgaccgacgatgcggttcgtcgcggtcaagagcgaagcggttcaagcaagtgcgacgatcttccgcacacgcgatctgctggtgcggcagcgaacccagaatatcaacgcgctacggggccatctggctgagtatggactgatcacaaggcaaggcattggccaggtctccaaactgatcgacatgatcgacagcccagcgtgcgaactgccagatgccgcgcggtcgatgctcagggtactttcgggcatgatcgaggtgctggagagccaggtaaagctgctcgatcaggagatcgccaggcgtgccaagaccgaagatgtatcgcgccggttgatgaccatccccggtatcggtccgatcacggcaaccgcgcttgccgctctggcgccgccacccgaagtattccgcaagggacgggactttgcagcttggctcgggctgacaccgctgcaaaaatcaaccggcggcaagcagaagctgggggccacctcaaagatgggagagcgaaccttgcgacggctgctcatcatcggggccagcgcggttgtatgtcaggcgacaaggcgaggcgcacagccaggttcatggctcgcacgaatgctggcgcgcaaaccgcgtatgctggtcatcaccgcgcttgccaacaagatggcgcgtaccgtctgggcgctgatagcgaagaacgaaatttatagagctccgctcgtggcagcatagtacccgccacaagcgcgagggtgtcggcagatgtaggaaggtcagatggaagatatggcgtaacgggcgacgagacgggataggcaaaaccagatagggtcaaggtgccaaccaagcacgcagtcctgatatggagccgatccgcgaactcccatacgggccagcggcatcaataaagccgcatcaaaggccggacagatgtcagcacccgactacacgccatgcctcccaaattaccccttgcatcttacggggcgtccacaga

SEQ ID NO: 4917 - DNA, 1439 bp, unidentified
  source 1..1439: mol_type = unassigned DNA; note = element_77cf59e
  misc_feature 1..2: note = core
  misc_feature 3..218: note = LE
  misc_feature 219..1424: note = CDS
  misc_feature 1425..1439: note = RE
  misc_feature 13..206: note = bridgeRNA
gtcctacctttcaagggtggttgctctggtcattcgtaagatcggagggcccgggggttctgggtatggctgtcattggggcgccgtagggatggctcaaggaacttggccgcccggagccccgcgacgactcgaccgccaattgggagatgcgactccgatcgctgcgtaggacgacgtcggcgaggtcgtctgcgggatcgatgtagggcgagctggtggaggggaacgtgcccgagatctgggccggagtggacatcggcaagacgcattaccactgcgtggtgatcaacgcggacggcaagcgtctgctgtcccgccgggtcgcaaatgacgagagtgaactgcttgccctgatcggcgatgtcctggagatatccgccgacgcgctgtgggctgtggacctcaatcacggtggtgccgcgctgctgatcggcctgctggtcagccacggccagccggtcgcctacctgaccggtctggcggtccaccgtgcctcggccacctacaagggcggcgaggggaagaccgacgcgaaggacgccttcgtcatcgccgaccaggcccgcgtccgtcgcgatctgggcctgttgcggcccggcgatgagatcgccgtcgacctgcgcacgctgaccacccgccgtctggacgcggtcttcgaccgcacccggcagatcaaccgtctccgcgcccaactcctggagatcttccccgcgctggaacgtgccctggaactgacgaaccgggggccggtggtactgctgaccggctaccagaccccggccgcgatccgtcgagcaggcgcgagccggatcgagacgtggttgaagaaccgcaaagtcaggggtgccgccgcactggcgaagacgaccgtggaggccgcccaggcccagcagaccgcgctgcccggcgagaagctggccgccgccatggtggtccgcctcgcgaagggggtgatggccctcgatgaggagatcgccgagcttgacgccctgatcgaggtcaagttttgcgagcatccgcacgccgaggtgatccgcagtctgcccggcatgggagccaagctcggagctgaattcctcgccgcgaccggtggtgacatggacgccttcggcagccccgaccgcctggccggcttcgccggcctggcccccagaccacgtgactccggccgtgtcagcggcaacctgcgccgcccccggcgctaccaccgtggtctgctgagaaccatgtacctgtcggccatggtcagcctccagtgctgccccgcctcgaaggcgttctacgaccggaagcgaggcgagggcaagggccacaagcaggccctgctggctctcgcacgccgacgactcaacgttctgtgggcgatgatccgtgacggagagtgctttcacacttcacctcccgtcacgagagcggcttgacaacacgattggaaa

SEQ ID NO: 4918 - DNA, 1210 bp, unidentified
  source 1..1210: mol_type = unassigned DNA; note = element_77d9ea5
  misc_feature 1..2: note = core
  misc_feature 3..208: note = LE
  misc_feature 209..1195: note = CDS
  misc_feature 1196..1210: note = RE
  misc_feature 12..188: note = bridgeRNA
cttgtatctttctctccgtgatggttagctaccatcacacgaagcggaggaagcttgtcgggctccttaaggctagaccttgttttgtagatcaagccctctgcttcacctttcgccagcatagacactgaacggtatccaaggggtgaaccctgtatgcacaaggcaagtgggcgaagttggctaacattgtaacaggggggtcatcatgttctatctcggaatggatgtagcaaaagccaagttggattgttgtttgttgctggatgaagccagaggcaagcgtaaggccaaggtggtgagtaacaccaagtcaggcttcgttgatttactggcttgggttgccaaacaaaacgtttccccagaagaattgcatatcgtcatggaagccaccggcgtgtatcacgaacaagctgccatggcgctggccgatgcaggtgtgagggtctccatcgtcaatccggcacaggtcaaggatttcgggcgtggcttggcggtacgcaccaagaccgatggcgtggacagctttgtgctggcgcgttatggcgctttgctcaagcccgctgcctggactccacccgccccggaggcacggatgctgcaagcgctgctggcgcgacgcgaagccgttgcacaagacctgcaacgcgagcgtaaccggcaggagaaggccaatggcaccgacaccccggagcggatacggcaatcccttgcggacagcatcgagtttctggtcaagcagcttgccaggctgcaacaggaaattgacgagcacattggccggtatcccggcctcaaggacgatctggacttactccaaagcatcccggcagtcggcccgcaggtgagcagtaacatactctcggtgatgcatagccacgacttcggttcagccgaacaactggcggcctatttggggttggtgccagtggagcggcagtcgggcagctcggtgctagggcgtgccaggctctccaaggccgggcctgccagaatacgcgccgtgctgtatatggccgccatcgtggcgacgcgctacaacccgcacgtcaaagccgtctatggccgcttgcttgcccgaggcaaatccaagatgtctgccctcggtgctgcaatgcgcaagctggtacacctgtgcttcggtgtaatcaaaacacgcaaaccttaccagtcagattatgcaaaaatcgcttgaccggcaagacggtat

SEQ ID NO: 4919 - DNA, 1482 bp, unidentified
  source 1..1482: mol_type = unassigned DNA; note = element_77dfd89
  misc_feature 1..2: note = core
  misc_feature 3..237: note = LE
  misc_feature 238..1461: note = CDS
  misc_feature 1462..1482: note = RE
  misc_feature 7..230: note = bridgeRNA
ctaatggggatcggccatctcgttcgttgatcgggcgaggatggttttgagccgccggctggtgagcactgtcgtcccctggaggtgggattcctagcgttagatcgtgccccggtcggttggtcaggactgcagaagcgctcctgggatgtcgtgccgttgtgagcactgatccattaggacgctgcacgtagtcctttggctcgtggtctgcgatcaaagggagggcttgacacgatgctgttcgtcggagacgactgggcagaagctcatcacgacgtgtgtttgatgaacgacgcgggtgaggtgctcgctcggcgacgggtatctgaagggcttgcggggatcggggtgctgcacgaactcgtcgccgatcatgctgaggatccgaacgacgtggtgatcggcatcgagaccgaccgcggtctctgggtccaagcactcgtcgcggcgggttatcagctctatgcgatcaatccgctcgcggtggcgcgctatcgggaccgccaccacgttgccggcgcgaagtccgacgccggtgatgccaaggtgctcgcggatctggtgcgcacggaccgtcataatcatcgcccgatcgccggtgacagcgatgaagttggtgcgatcaaggtgctcgcacgcgcgcatcagaacctgatctggtcgcgtacccgacagaccaacgcgatgcgcagcgcgctgcgtgagtattacccggccgcgctggtcgcgttcgacgatctggccagcaatgactgcctggccgtgctcgcgaaagcgcccacgccgcaagccggagcgcgtttgtcgatcggtcagatcagcgctgcgctcaaacgcggtggccggcaacgcaacatcgatcgacgctcacgagaaatccaacacgccctccgcgccgatcagctcaccacatccgagatgatcagcgacgcgttcgccgcaacgacgaccgccgcggtcagcgtcatcgccgaactcaaccgccagatcgccaaactcgagcacacgctcacccaacgttttgagcaacacccggacgccgacatctaccgctccctgccaggactcggtgtcatcctcggcgcccgcgcgctcggcgagttcggggacgaccccgagcgttacgccaccgcgaagtctcgcaagaactacgccggcacgtcacccctcaccgtcgcgtccggcaagaaacgtgccgtgctcgcacggcacgttcgcaaccgacgcctctacgacgcgatcgatcactgggcattctgtgcaatcagcgccagccccggcttccgcgccttctacgaccaccgacgcgcccgcggcgacctccaccatcaagcactccgagcgctcggcaaccgcctcgtcggcatcctccacggctgcctacaaacccgaccccactacgacgaacacaccgcctgggcccaccgaacccacacacccgacaacatcgcagcttgacaccaaccgcgcttgggatgt

SEQ ID NO: 4920 - DNA, 1351 bp, unidentified
  source 1..1351: mol_type = unassigned DNA; note = element_77e305f
  misc_feature 1..3: note = core
  misc_feature 4..82: note = LE
  misc_feature 83..1036: note = CDS
  misc_feature 1037..1351: note = RE
  misc_feature 1124..1340: note = bridgeRNA
tgatgatgtggacgcccccgcgccggcggttgccgctatgatgccggccagttaccccgcagcaataagaggagcgttgacgatgcagatcacgaccgttggattggatttggccaagagcgtgtttcaggcgcatggtgtcgatgaggcaggcggaaccgtgctggtgaaacggctgcatcgcaagcagatgctgcccttcttctcgaagctgccaccctgcctaatcggaatggaagcgtgtggcacagcgcaccattgggctcggacgctcgccgccatggggcacgaggttcggctcattcccccatcgtacgtgaaggcctatgtcaaacgcggcaagagcgacgcgctggatgccgaggcaatctgcgaagccgtgcagcgcccgacgatgcggttcgtgcctgtgaagacggtggcgcagcagagcattctcatgacgcatcgcgcgaggtcgctgctcgttcgccaacgcaccatggttgcaaacgcgttgcgggcgcatctggctgaactcggctttgtcgccaatccaggcattgccaatctggcaaagttggcgcagcaagcgctgtctggcgagagcagcttgccctcctatgcccggaccacgctggacattctgatccggcagatcctggtgtttgccgatgagatcgctgcgctggatcagcaacttctcgcttggcatgccgacagcgaggccagtcgcaggctttccgctatccccggcctcggcatagtcacagccacggcggtcgccgccaccgtcaccgatcccgagcaattccgctccggcaggcaatttgccgcctggctcggcctgacgccgcagcagtgttcgaccggaggaaaaacccagctcggcggcatctccaagcagggagaccgatacttgcggaggttgctcgtcgtcggcgccaccgccgttatccgtcatacgaaggacaaggcaacgcccatggcgaactggatcagaaagctcctggagaaaaaagccgttcaggctggtctccgttgccctcgccaataaactcgcgcggatcgcatgggtcgtgctgacccgcaaggaagcctatcgggcccatgaaatgatcgcctgagttcaatcccagagaaccggaattggtaacggcagtcgatgatgtgtaacgatcgagccaatggtgaggccaacccgtctgattcaatgcgcttcaaacgcgcgccagcttgatcagggtcctcatcggcggatttccatcagggccagcggtcaaacttcataccgcacaaacaggccggacatatgaaagcaaccgatcaaaccacccgacaaaaagcccttgccatagggggcgtccacata

SEQ ID NO: 4921 - DNA, 1232 bp, unidentified
  source 1..1232: mol_type = unassigned DNA; note = element_77ea57b
  misc_feature 1..3: note = core
  misc_feature 4..211: note = LE
  misc_feature 212..1141: note = CDS
  misc_feature 1142..1232: note = RE
  misc_feature 12..195: note = bridgeRNA
gcttgtgtctttgatcagggtaatgtctggggtgagaggggtggatggcaagctgaccattcgcggtgcccagagcacgtgtgggagccaagctgccatccactcttcccgctttggctcaaagctcgaacagttgactgagtccgacctcgaacaacaagcgtgagccaggccaaagcgcctctcactctttatcctagaggttttactcatgtccgcctatgccggaattgatgtttccaaggccacgctgcaggtcgcactgtttcccaaagccgatgatctctgcgtgcctaacaccgaagaaggtctcgccagcatcgctgagtacctcagcgcccatcaggttgaacgtgttcttgttgaggccaccgggggttacgagagactgtcggtaaagctgctggctaatgccgggttcaaggtccagcgtatcaaccctgtccgctcacgccagttcgcgctggccatgggcaagcgcgccaagacggccccgatcgacgcgcaaatgctggccatgttcgcctccagcttggaggaaaaggggttcgccaagcctgacgaggagcgcgaagtcctgcttgaactggtcaacttgcgtggcaacctgcttcaacaacgtgatgacaaccggcgccgtatcaaacaggccgtactgccctgcgtggtggaaatctacctcgcgttggaagccagccttaaagtgcagatcaagtcggtggatcagcttgtcgctgcacaaacccgccgggtcgactcagaactgctgcaacggctagaggctgtaaagggcgtgggggccgtgacaatcgccagcctcttctgctacctgcccgagctgggcgacctgagccgtggacaaatcgctgccttggctggcgtggcgccgtacaacaacgacagcggtaccaagaccggtaagcggcagatctacggtgggcggtcgaaactgcgccgtgcggcctacatgtgcgcgctggtgatggtgcgctacaaccccgatttcaaggagcgttatgcgaggctgcgtgccaaaggcaagtgcgcgaaagtggccctggtagcctgcatgcgggtgttgctgatccgcctgaacgccatggcgcgcgacggaacaccatggcgtgatcaggtggtttgaatggggggcgggcgttgcccgccatcgcggaatctatccgcgatgacatcatgaaaatgcccgttcatcggggagcgatgaaagacagttg

SEQ ID NO: 4922 - DNA, 1364 bp, unidentified
  source 1..1364: mol_type = unassigned DNA; note = element_77ea6b8
  misc_feature 1..2: note = core
  misc_feature 3..78: note = LE
  misc_feature 79..1104: note = CDS
  misc_feature 1105..1364: note = RE
  misc_feature 1080..1351: note = bridgeRNA
tgatggggtggacgccccccaacggccttgatgtgccacagtggaggtgttgaagagcaccacttgagggaggcgtccatgggagaggttagcacgatcgggatggatctggcgaagaatgtctttcaggttcacggtgccgatgcatcgggagcggtgctgttccgcagaaagctgcggcggcaccaggtgctcgcattctttgcagctcagccgccctgcatggtggcgatagaggcctgcggcagcgcgcaccactgggcgcgcgagatcggccggctcgggcatgccgtccggctgatcccgccggcttacgtcaagccttttgtgaagcgccagaagaacgatgcggcggatgccgaagcaatctgcgaggcggctcagcgcccgaccatgcgcttcgtggcgcccaagagcgagcagacgcaagccgccgctctcgtgttccgggcgcgtgatcttttggtgaagcagcgaacccagatcatcaatgccctgcgcggccatctggctgagttcgggatcgtggcggccaaaggcccggctcgcgttccacaactcatgctggctgtggaagatccagccgagccgatcccggagatcgcccgaccggtcctccagatgctgatcgagacgctccatcggctggacgaacagattgcaggcctggaccgcgaggtcgcccagcgagcgaaagagaacgagacggcgcggcggctgatgaccattcccggcgtcggcccagtgaccgcggtggccctggcggcgcttgcgccaccagccgacacgttcaagcgcgggcgggacttcgccgcctgggtggggctcacgcccttgcagcactccaccggcggcaaacagaagctgggtgccacctcgaagatgggcgagcggaccttgcgccgcctgctgatcatcggcgcgagtgccgtcgtccggtgggtggctcgcaatggggctccggcaggctcgtggatggcgcgcatggtcgcgcgtaagccgccgatgctggtgcgggtggcgctcgccaacaagatggcccgcatcgtctgggctctcatggcgagaggtggggtttatcaggctccagtcgtggcggcataagtcgtcgcggctgtggggccgttggggcgtgggaaggtcagaaggagagagatggcgcaacggtcaacgagacgggatcgggaaaaccagctttgcgacacgagcctcgagcacgtggttctgatttggacctgatccgcgaactcccatccgggcccgcggcatgtgagccgcagtaaaggccgcacacatgtcagaccctgaccacgcgctgcaccgaacctgaagattcttcttgcgtcacacggggcgtccacaca

SEQ ID NO: 4923 - DNA, 1448 bp, unidentified
  source 1..1448: mol_type = unassigned DNA; note = element_77f23cd
  misc_feature 1: note = core
  misc_feature 2..220: note = LE
  misc_feature 221..1249: note = CDS
  misc_feature 1250..1448: note = RE
  misc_feature 15..232: note = bridgeRNA
ctgattgatacttggggcgcgttgcggggtgttcccgtagcgtcgaggcgctgactggttggctctctaagtgcctgtcacccgttcgggttggctttcgaacgaggtgcctgccggttggtgtcctcgactgtggcgtggctcgaaagaggcgagagcacatttcccgaatcaggtttgcccgctgcggtctccatatccgagtaggaaggccgagcgtatgaatgtgatgattggtattgacccgcataaggggtcccataccgcagtggtgatcaacggtgatgaggtggtgatcgaggagatccgtgtccgggcttccgcgaaccaggtggtggagctccaggagtgggcggcgggattcgaggatcggtgttgggcggtggagtcagcccgcggcctggggtatttgttgtctcagcagttggtggcagctggggagcgagtgctggatgtgccggcgatgctggcctcacgagtgcgagtcctgggttcggggaagtcgcagaagaacgaccccaatgatgctcggtcggtggcgatcgccgccctccgtcaccagggtctgacaccagtggttgtggatgatcactcccgagtgttgggattgttggcgaagcgacatcgtgatctctctcggctcaagaacaaggcagcgtgtcgcctccacgccctgttgggggaactcaccgccggcgggttggcctcagaaatgaccgtaaacaaggccaattcactgctcgaggccgtggtggtgaccgatgaggtgacccggcaacgagtggtgatcgctaccgaactggttgatgacattgcccggttcaacacccagatgcgagcctccaagcaacgaacccgcaccgcggtcgctgcgtcggggaccagcttgtgcgacatcaggggcatcggcccaatcggagccgcggtcatcctcggcacagtcggtgatgtctcccggttcccgactcctgggcatttcgcctcctacaacgccactgctcccatcgatgcgtcctcgggaaaccagagtcggcatcgacttaacccgaggggaaaccgcaaactcaaccatgccctgcacatcgcggcggtctcccaactccgacaccccagccagggccgcgactactaccagaagaaactcacggagggcaagaccagcaaggaagccatccgtgcgctcaagcgacggatctctgacgtcgtttaccggcaactcagagccgacgccaagcgaatcatcagctgagtcattagtgggtccgggaggacacccagggacgactctgaatccagcgtggccggctcacaccctgatacaccggcacttcggataagtcacttcccggacccaaccccaacactacgccccacccgaccacccaggacggggcaaactcgtcgcgcccaccagcacccgaaaacaaccacttgacacaaagaggctt

SEQ ID NO: 4924 - DNA, 1415 bp, unidentified
  source 1..1415: mol_type = unassigned DNA; note = element_77f89a0
  misc_feature 1..2: note = core
  misc_feature 3..87: note = LE
  misc_feature 88..1116: note = CDS
  misc_feature 1117..1415: note = RE
  misc_feature 1159..1402: note = bridgeRNA
tgatgtggtggacggcgcccgctcccggcatcgaagtgccatagggtggtggcgtcgaaacgcaccacattgaggggagccgtccacatgcaaattaccacgattggtttggatatcgcaaagaacgtgttccaggttcacgggattgatgctggcgagaaggtcatcgttcggaagcaacttcggcgcagccaggtactggcgttcttcgaggcactgccgccgtgcctagtcgggatggaagcctgcgcgtcatcccactgttgggcacgtgaactcacgaagcttgggcaccaggtgcgactgatgccggcaaaggacgtgaaggcttacgtcaagcgcaacaagaacgatgcggccgacgccgaggcgatctgcgaggcggtgcgacgcccgaccatgcggttcgtgcaaatcaagtcggtcgagcagcagggccggttgatgctgcatcgcgcgcgagaccttttgatgcggcagcggacccaactgatcaatgccttacgggcgcacatggcggagctcggcattgtggctgcgcaagagcgcgaaggggtcaaggagctgctgaggatcattgcgagcgaacaggatgcgcggttgccggtcgatgctcacgcgagcctgattgtattggcggcggggctgcaggcgctgcagacgatgattggatcgatcgagaggcggatcattgcccatcttcattcgaacgaagcaagcaagcggctcaggagcatccctgggattggcatagtgggtgcgaccgctattgccgccaccgtgccggatccgaaggtttttcgatcgggtcgtgactttgcggcctggatcgggatagtgccgcggcaagattcgaccgggggcaaacagaagctcggaccgatctcgaagcaaggcgaccaatatctaagacgcattctggtggtcggagcccatgcggtgttgaagcgggcgcgccaccaaccggagaagtatccgtggatcacacagcttctcgcccgcaaaccgtacagggtcgtggcggtggcggtcgccaacaagatggcgcgcgtcgcctgggcgttattggccaagggtggcacctatcgagcacctgcacttgcggcagcggcctaactggtcaagcgatgggaggatgaggttgcgtctgtgcgttcacgaactgcaggggtgatgacgacgttgatgcgaaacggtcgagaccgtcgatcgggaaaacccgtaacgggccacgcgatagttgagcgcgcgcttttggttgggacccgatcagcggatcacatcagggccagcggccaaagtggccgcatcgcaacggggcaagcctcgacgcgaaaacaggccgaatacatggctgcacccgaacgcttcgcaaaacgtcagattcctcttgcaccgcgggcgccgtccataca

SEQ ID NO: 4925 - DNA, 1294 bp, unidentified
  source 1..1294: mol_type = unassigned DNA; note = element_77f93cd
  misc_feature 1: note = core
  misc_feature 2..67: note = LE
  misc_feature 68..1090: note = CDS
  misc_feature 1091..1294: note = RE
  misc_feature 1103..1280: note = bridgeRNA
taatgggatggactacctcctcccgctgcggttaactgtacgaaatgtgctcaccaggagaatcaccatgaatatcgtatttctgggtattgatctggctaaaaatgtttttcagctctgcgggttaaaccaggccggcaaaccggtttatacgaaacgcactggccgaaaagaattgctccagacgctggcaaatattcctgcatgtctgattgggatcgaagcgtccaccggggcattttactggcagcgtgagtttgagaaactggggcataaagtaaaggtcatcagtcctcagtatgtaaaaccctttgtccgcgggcaaaaaaatgatggtaatgatgcacaggccatcgcagtagctctgatgcaaccgacaatgcagttcgtgccgccaaaaagccccgaacagcaggatatccaggctttacaccgggcaaggcagcgtattgtcaatcaccgcactgctacagtctgtcaaataagagggctgttacttgaccgggggatccccattggcagtgctgtctccagagctcgccgtgctattcctcttatccttgaagatgcagaaaacggtctaagttcccgtatgcgcaaaacaattgccgaactctatgatctctttaacgatcttgagcgtcggatccatttttttgataaggaaattgaaacagtattcaggcaatcagaagcctgtcagcgtatcgccaaagttaaaggcattggtcctaaaacggccacggccgttgttgctgctattggcaaaggaactgaatttaagaatggtcgccactttgctgcatggctgggtctggttccacgccagcattcgagtggcgacagacaggtgctgatgaatatgacgaaaaaaggcgacaagcatctgcggacactttttattcatggtgcccgcgctgtcgtcagggttgccacgaataacaatgatggtcatatgaatcagtgggttaaccagttaaaggaacggcgcgggtttaataaaacgaccgtggcggtcgctaacaaaaacgcgagaataatctggtcgatgctgagaaatgataccgggtatcaggtagtgtgtaattaatcccctgccagcaaaagttgcagcgtactgagaaatgatgacaggttgcacctgcacaatcggaacctgatttttatactggcctcagaggccgtccagttgttgaggctacccatttgggcacagattttcctgatgccggatagatgtaagcaacaacccaaaaccagattcagtacttgcaaaacggaggtagtccataga

SEQ ID NO: 4926 - DNA, 1156 bp, unidentified
  source 1..1156: mol_type = unassigned DNA; note = element_7804c80
  misc_feature 1..2: note = core
  misc_feature 3..205: note = LE
  misc_feature 206..1144: note = CDS
  misc_feature 1145..1156: note = RE
  misc_feature 37..211: note = bridgeRNA
cttgtcttatgacttttcgtgccgattgggagagattggcatcgccgccgggaggttcccgctcccggacggcgacgagggtcggatcgtcaggacgctggaggatatggctccgagttaaagtttgatcgccctcgtctttcccattggcctgaacggatacacgggcgctgagcggcccgcatgacaagcagaggcaggaaagatgatcaatcataccatcggcatcgacatttcgaaagacacgcttgatgttcacattcaccccagcggtgaagaccgccgctttaccaatgacgccgaaggcttccgcgcgcttcgggaatggattggtgaacgcagcgtagagcgcctcgtcttcgaggccacgggcgcgtatcaccgggccttcgagcaggccatgggccagaccggtctgcccatttgcaaggtcaatcctcgccaggccaaacgttttggcgaagccctcggtgttctcgtcaagaccgaccggattgatgcacgcatgctggcccggtttggggttctcattgaaccgccgatccggtcggcgccgccggaaattcttctgcaattgaaggatctgcaggttgcacggacggcactcatcaaggatcgcactgctgcgaaaaaccgggaaagatcgcttcaaagcccattattgaagcgtcagtcttgccagcgccttgcgcagatcgaacgccacctggctgcgattgaggccgagatggtcagccttgtcggaggcgatccggacctggcgcggaagttcgagatcatcacctcgatccccggcctggccgagcgttcggcacttgccctgatcaccagcatgcctgaactcggcacgcttgacggccaggctgccgccgccctttcggggaccgcgcccatgacccgccagtctggcaagcgcatcggcaaggcctgtatcacgggcggacgttcccaagtccgccagtcgctttacatgccagcccttgtcgccgcgcaccacaacccggactttgccaccaagtacaaggatctcaaggcgcgcggcaaacccgctaaagtcgccctcacggccatcatgcgaaagctcatcatccttgcaaacgccctgatccgcgatgatcgaaagtggtctccaaaaccagcttgaccaagacggata

SEQ ID NO: 4927 - DNA, 1352 bp, unidentified
  source 1..1352: mol_type = unassigned DNA; note = element_7804ee1
  misc_feature 1..2: note = core
  misc_feature 3..224: note = LE
  misc_feature 225..1202: note = CDS
  misc_feature 1203..1352: note = RE
  misc_feature 47..212: note = bridgeRNA
gtcgtacatttgtacggtaaaaaaattttcgataaatttatctatagaaaacaggatacacaagcatggaaaaaggcagatcaatgggtggcaaaccccgtctcaaacgttcagtccccatgctttacatctaaagactggatagttcgttggggctacttttagaccccgtgtttgcgacgaaagtgcaacagatgtaactcctgacgattaaaatttaagatatgacatacgttggaatagacatcagcaaatcgtcctttgtggcagctttcccacaagagaaaggctacaacaccgaaacattcgccaatgatgccaaaggaattcgcaagttcatcggcaagctatcggcagatacccatcattgtgtgatggaggccaccggcaactacggcttgttgttgctgtatcttcttgacaaggcaggaatcacagccagtcttgtcaatcccaagaagatcaagaactactcgcgaatgataatgtcggtgacaaaaaccgatgatatggatgcccgtctgatagccgagttcggtgagaagatgacccctgcgccttacaagcttccgtcagaaacgctcatgcttctcaagcaaaagaagacagtaatccgccagctccaaaagcaactcacggccaccaggaaccttcagtcttctcttgaaccactgcctgttaaggataagaagtgtcttgcatcattgaaacagacaatcgcgtttacagagaaacagatcaggcatcttgaagaagagcttgtacagaccgccgggagtgtttttgaaaagcagctcaaggctctgacctctataaaaggcatcggagtgacactggctaccgctctgattatagcgaccggaggattctccagctttgacaatgccaagcagctatcccgttatatcggtatctgtccgaccattgagcaatccggctccagcatcaacatccggggacacatcaaccggaacggagatgcaaatctcagatcaatgctgtatatcgcggcatggtcggcaagccaacataacaaggcgtgcaaggaatgctaccaacgattacgacaacgcggcaaatccggaaaactcgccatgattgccgtggcaaacaaactcgtcagacaggctttcgctgttgcgacttccaacacgtcatacatcgatggattcgtctctacgaaacctgataccgccgtctaaaacattcctctctccttctggagggggatgccacagcggcgggggcggcctaaaccgcccccgagagcggacagcggcaagaccattttttcaaataatctaaggtagatgcaatttttgcctcattttatttggattttaatatagttc

SEQ ID NO: 4928 - DNA, 1382 bp, unidentified
  source 1..1382: mol_type = unassigned DNA; note = element_780a77c
  misc_feature 1..3: note = core
  misc_feature 4..85: note = LE
  misc_feature 86..958: note = CDS
  misc_feature 959..1382: note = RE
  misc_feature 1086..1369: note = bridgeRNA
tgatggagtggatgccccctcccgacggcatcgcaatgtgccatagtgatgtttgcagcaacgtcactcagaggagagagcatccatgaaggaagttagcattgtcggccttgatcttgcaaagcgtgtatttcaagtccatgcggccagtgccgatggcggttttgttctccgcaaaaaattatctcgcgtccatgtaatggctttctttcagaggcttccgagttgcaccgttgcgatggaagcatgtgccaccgcccattattgggctcgtgaaattggcaagctcggccatgaagttcggctgttgccgcctgcttatgtgaagccgttcgtaaaacgacaaaagaatgatgcggcggacgctgaagctattgtagaggcagccatccggccctcaatgcgtttcgttgcaccaaagacagagaagcagcaggctgcttgcatggtttttcggacgcgcgatttgttcgtccgtcagcgcacgcagcttatcaatgctcttcgcgcccacttggctgaacatggtgttattgcaccccagggaattgcgaacctcgctgctttgatggggatcgttgacgatgataataacggtctcaagcgcgtggtcgtagagactgcccgactttatcttgagcagattgatctgcttagctcccgcattggcaatcttgagaaagcaatcaagtcagaagctcgacaatccgataacactgcgcgcttgatgtctatgcctggaatgggccctatcactgccatggccattgaagcctttgctcctactatgacagcgtttcgaaaaggacgagattttgcggcatggctcggtctggtgccaagacagcactcgagtggcggcaaacaggtactgggcagaacgtcaaaaatgggacagcgcgacattcggcggcttttaattatcggtgcaatgacagtaatcagatgggtgccgtaaagcaccgccagagaactcgtggcttgggaaaatgttatcacgcaagccgcgtatgctcgtcgccattgcacttgcaaataaaatggcgcgcagcgtctgggcgatgatgacaaagaatgaggaatttaaagtttccgctctcgcctctgcataagcaaagatagcagtgttgtagcgagatcggatcgtcggcgtgtgaggagatcagcgaacggtaaggacagagattggaaagacggactggaaatgcaaccgggtcagtgagcctcgagctcgtagaactgattttgcgccagctccgcttagctccataccggccagtagtcataaaaggactacagtaaaggcctgatacatgaccgcatccaatcacacgttgaaaccgctcgaagaaaagccttgcatgaacgggggcatccataca

SEQ ID NO: 4929 - DNA, 1355 bp, unidentified
  source 1..1355: mol_type = unassigned DNA; note = element_7814589
  misc_feature 1: note = core
  misc_feature 2..311: note = LE
  misc_feature 312..1340: note = CDS
  misc_feature 1341..1355: note = RE
  misc_feature 20..278: note = bridgeRNA
ctgtgagtcttggcatgtcggtaccggctgtgatggctggggccggccagggttggtgcctggtggcgccgggtgactcctagcgtgcccgaccgtctttccggcgtgtcttgctaatgacctgtccccggtgccgccggcaccggcctggtcaccctcgactggcctgatcaggagcttgtccggccgttggccgtgactcatcacaggattgccgcgggagttccctccaggccggtgccgcccttccagcatggcaccgaggaggagatgacagtgagccttaccgggacaccgatctgatcatcggggtggacactcatctggacacccataccgcggctttgtgcgacgcccgcgggcgtgcggtcgcgcggctgcaagtgcccgccaccgcggcgggatacgcgcagctgctggcctgggcgcggtcggccgcgggaggcagccgggccgtgtgggcggtcgaagggacccggcactacgggctgggcctggcccggtacctggcatcgcagggccagcaggtgaccgagatcgacaacacccggcacgtgggcaagcgccgggccggcaagagtgatccgatcgacgccgtccgggcggcccgcgaactgctggcccggccgcatgctgcccagatgcgggccgacggcgaccgcgaggcgctgcggctgctgatggtcgaccgggacaacgcggtccagtcctgcaagaccgcccgcaccgtgctggccgccgtcctggtcaccgcgcccgccgagctgcgcgagcggctgcggcagctgccgcgcacccggcgggcgcagcagtgcgcggcgctggcctgcccggcacaggccgaccggcagaccagggtgctgcaccagaccctgatccggctcggccagcgcatcaccgccctggccagcgaggccgccgagctggagacgcagatcgctgccatcgtcgaagacatggccccgggcctggtcgccgccgagcccggcaccggcgcgctcagcgccgcccagatcctgctgtcctggtcgcacgccggccggatccgcagcgaagccgccttcgccatgctgtccggcaccgcgccggtcccggtgtcctccggccgcaccgaccggcaccggctcaaccggctcggcgaccgccagctcaaccgcgccctgcacatcgtcgccgtcaaccggatgcgctgccatccccccacccaggcctacgtccggcggcgcctagccgaaggcaaaaccgaacgcgacatccgccgctgcatcaagcgctacctcgcccgccacctctaccgggccctgaacaaacaactgaaccaggcagcgcaacagacttgacgaatataggagcgt

SEQ ID NO: 4930 - DNA, 1312 bp, unidentified
  source 1..1312: mol_type = unassigned DNA; note = element_7815827
  misc_feature 1: note = core
  misc_feature 2..185: note = LE
  misc_feature 186..1292: note = CDS
  misc_feature 1293..1312: note = RE
  misc_feature 1..222: note = bridgeRNA
ctgcgatgatcccggcggtcacggtcggggtctgacccttccagccaccggccttttgcctggtatctgatctgtcggctcgggccgtgaccagccttccacgcgcccgaccgggcgaacgtgacctgatcaggagcctgttcgcccagacccgtcgcagtgctgtccgcccgcccggccggcgcgtgccatccaccacccgtatctgtcgagcaggagggacggcgattcctaccatcgcacacacccagccggcgcgcctcacggtcggggtcgacacccacaaagacgtgcacgtggcctgcgccaaggaccagttgggccgccgtctggcgaccacactggtggcgaccaccagcgccggctacgccgagctgctgggctgggctggcacgctgggccaggtcgaggccttcgggatcgagggcaccggctgctacggcgccgagctggcccgcttcctccgcagccgcgggcagcgggtggtggaggtcaaccggcccgaccgggccgcccgccgccgccatggtaagtccgacccggtcgacgccgaggccgccgcccgcgcggtgcaggccggcgaggcgaccgggctgcccaaggccggcgatggtgcggtggagatgttgcgggtgctccgggttgcccgccagacggccatgcgggcccgcacccaaaccatcaacgcgctcaaggccttggtggtcaccgcccctgacccgctccgccggcagctccgtgacctgcccacccggcaactggtcgcgacgacggcggcgttccagccggacaccccggcaaccccgaccatggccacgatggtggcgcttggcgccctcgcccgccgctaccaggccctggacggcgagatcacgatgctcagcaagcagctgcaccggctggtcggcctggcggcacccgccctgctggcggtgttcggtgtcggccccgagaccgccagcgcgctgctgatcaccgccggggacaacccgcagcggctgcactccgacgccgccttcgcggcgctgtgtggcgcctcaccggtcgaggtgtcctcgggcaagacggtgcggcatcggctgaaccgcggtggtgaccgccaggccaacaatgccttgtggcggatcgtcttggtccgccttcgcgccgggcacccaccgaccgttgcctacctgcagcggcgcaccgcccagggcaagtccaagcgagaggtgatccgctgcctgaagcgctatgtcgcccgagagatcttcgcggtgctccaaacaatggccgttcaggcggccgcatgacttgaccccaataggagcgt

SEQ ID NO: 4931 - DNA, 1450 bp, unidentified
  source 1..1450: mol_type = unassigned DNA; note = element_781ecd6
  misc_feature 1..2: note = core
  misc_feature 3..203: note = LE
  misc_feature 204..1403: note = CDS
  misc_feature 1404..1450: note = RE
ctcatatctttacattattatatcaaaatcttatctttggatataaactattgataaacagaactaagttgcaaaattctatcggggcgaaatacatcattgatgatattgtaaacactaggtaaatcctcttagttttaattacattttaagtcacaatagtacttaagcactttattttagataaagatgctgtataaaaaatgagcaaagaccagtgtaattttttgtttattattctaaaatatggaattatgaatttaaagtattctgtgggactagacgtttcaagcaaaaagatcaatgcttgtatgagttgtattgatgaaaaacaaaaagtaattgtaaaatcaagtactgtaatttccaataataaaaaaggatttaaaattttacaagattgggtattaaaacacgtaaaggaaaatgttccagttgttgtatgtatggaagctacagggatttatcatgaaaattgcgcttattatttatttgaaaaaggattttcggtttctattattttacccaataaggccaaaaagtatttggaagcaattggattaaaatcaaaaaatgatagtatcgatgccaaaggattgtcccagatgggagccgagcaatgtttggatacctggcagcctatgggaacatttttttatgaattacgactatataccagacaacatcaaaatgtaaccgaattaaaaacggttttaaaaaatcaattcgatgcattaagttttgccatgcatcaagtcgatccagtaacaaatcaattaaaagaaaccataattttatttgacaaacagctgaaagaattggagaaagtaatcaacaaccacataaaatcagatgcaaaaatagctgaacgtgttgctaatattttagaaataaaaggcattgggattttaactttagcaacaattttagccgaaactaatggtttcgaactcttcaacaactacaaacaattggtttcttacgcaggttatgatgttgtagaagcccaatcaggaaccagggttggaaaaaccaaaatatcaaaaaaaggtaattccagaattagaagagcaatgcacatgccatcacttgttgttataaaatgcgaagtaaaaccatttaaggaaccatttaaggaactatttgaacgaacttataataagcacggaatcaaaatgaaaagctatgttgccgttcaaaagaaattactgacaatgatttattatatgtggaagaaaaaggaacgctttgaaccaaattatataaaaagcatccaagaaaaggagcagaagtctttctctatgtttgcctttgaaaaaggcataaaaaacagccccaataaaattgaggctgcacaaggtaaacatccagtgaatgatcacagtaagtttcctctctgttaaaacaaagataaaaaatattaaaattaattaggtaattaagatagtac

SEQ ID NO: 4932 - DNA, 1377 bp, unidentified
  source 1..1377: mol_type = unassigned DNA; note = element_7821b5d
  misc_feature 1..3: note = core
  misc_feature 4..87: note = LE
  misc_feature 88..1110: note = CDS
  misc_feature 1111..1377: note = RE
  misc_feature 1145..1364: note = bridgeRNA
tgatggtgtggacggctccaccccgacggcatcgcaacgtgccatactggtgctgtcgcaacccaacagagggaaggagccgcccacatgaagattacaacactcgggatcgatctggccaagtctgtctttcagcttcacggcgttgacgcagctggggccgtcgtcttgcagaagaagctgcgacggggttcggtactcgactttctcggcaagctggagccctgcctgatcggaatggaggcctgcgccacatcgcaccactgggcgcgcgagagcgcggcgcttggtcatgatgtcaggctgatcccgccggcctatgtgaagccctacgtgaagcgccagaagaacgatgcggccgatgcggaggcgatctgcgaggcggtttcccggcccaacatgcgctttgtgccgatcaagaccgaagagcagcagagtgtcctggtcctgcaccggtcgcgcgacctgctgatgcgtcaacgcacgatgatgctcaatgcgatccgggcacatctggccgagttcgggaccatcacagcccaaggcccaagcaaggttgtcgagcttgtcgccaagcttgggagcgaagaaaccttcgcggtcccggagatcgcacgggtcgggcttttggcactggcggcgcaacttgacagcctcgcgacagcaatccgggacatcgagcgtcaacttctggcctggcatcgacagaacgcagccagccagcggctcgaaaccatcccgggcgttggcatcatcaccgccacggcactcgccgccagtgtgcccgatccgtccgtcttcaagtcgggtcggcagttcgcggccttcctcggccttgtgccacgacagaactcgtccggtggcaaagatcgcctcgggcacatctcgaagatgggcaacggttatctgcggcgcttgctggtcgttggcgcgacctcggtgacccgacgggcagaaaccaacgacacccgaacaggtgcctgggtacggtcactcctcgggcgaaaaccgacccggctcgtgaccgttgccatcgccaacaagaccgcgcgcacggcatgggccatgctggcccgtaacgaagactaccgagcctctgcaatggcttgaacaaacccaaaccgtagcagccgccggctgtcactccggaatgcaagggcagatgtgagtgatgatgatcaaccgggaccgctgccgggacaccccgaggtgctgtcagggcttcacagctcgctcgtcagatcgggacctggtttgcggacttcatcagggccagcggtcactagcgccgcgtcaacaggccggacacatgaccgcaccccgcaaagatcaacagaagctcaaatccatccttgcactaacggagacgtccacaca

SEQ ID NO: 4933 - DNA, 1427 bp, unidentified
  source 1..1427: mol_type = unassigned DNA; note = element_7823c38
  misc_feature 1..2: note = core
  misc_feature 3..133: note = LE
  misc_feature 134..1153: note = CDS
  misc_feature 1154..1427: note = RE
  misc_feature 1190..1426: note = bridgeRNA
gaatgaaatgaacgtcccccacccatcgccggtgaggaaatgcaggaggtggatccttcacgggccgacggcatcagagtgcccaaagtaggagatcatgacgatttccccaaggcaaaccggaggatccaaaatgaactatacgacagtcggcgtagatattgccaagagcgtgatgcagttgcactgggtcgatccggacacgggcgagatcgtaaacaaagcgatcaagcgggcggcgtttcttgagcactttgcaaatcgcgctccctgcctagtcggcatggaagcctgcggcggtgcacagcattgggcccgacgactgatcgagatggggcaccaggtaaagctgatgcccgcgaagttcgccaaggcgttcaacattcgcaacaaaaatgacgcggccgatgcgcgggcgatctggatggccacgcagatgcccagtaaagctgtcgcggtgaagacggaggcccagcaagccgtattggcactgcatcggatacggcaacagaagctcaagtttcgcacgatgcaaatgaacagcctgcgcggtctgctgacagaatacggcgaagtcatgggcaagagtcgagcggcgctggacaaggcaatcccgggcgtgctggaaaaactcgccgggcggctgcctggaatgctgatcgaatcattacgcgaacagtggaatgatctcgagaacctcgacagacagatcgccgacattgagagacgcttgcagacatggctgaaagatgacagggcttgcaaagccattgctgcgatacccggtgtaggtcttctgacagcgactgcggctgtcgcgaccatgggcgacccgaagtcattcgcgaccggtcgagaattcgcggcgtggcttggcctggtgccgaaacaggtgggtaccggcgggaaggttgttctgttgggaatcagcaaacgaggggatacgtatttgcgaacgctactgattcacggcgcgcgcagcgttctatcgcatgcgaaggatccaggcccatgggtagctcagctcgttaaacggcggccctctaatgtagccatcgtggcaatagccaacaaaatggcgcgcacaatctgggcggttctcgctcacgggaatccgtatgaaaaaggttacgtgagcgtaaggcctgcatgaccagctggggctgaacagaggaataacctttgcagggtgatacgtcgaaaggttgcgttggcaatcgggtgtgatgacacgacaggtcggaccgggactcgccaaacctggattacagagagagctttcagctcgtcgacggaatgaggagcgagtcagcggatttcatcggggcccgcagcgaaacaggctgcaaaaaggccgaatgtagagctgcaaccatcctgtcagtcagaacaaacgaaaaccattgcaaacgggggacgttcatgta

SEQ ID NO: 4934 - DNA, 1568 bp, unidentified
  source 1..1568: mol_type = unassigned DNA; note = element_78250cb
  misc_feature 1..2: note = core
  misc_feature 3..160: note = LE
  misc_feature 161..1423: note = CDS
  misc_feature 1424..1568: note = RE
ctcgtattatatagtagtagtgtttatagtccctctccaaggactgtatgctatactgttagagacactgtggattggtttttttctcctaccactcgatggttatagaaaggctccaaccacagtctctttgtatatttgttaatcagttagataccgcatgacggtttatttagaacgaggttacaatcgcaaggagtcccagtggttccaaacagtgtcaaatacatttcaaaggagtattgctatgatatacgcaggaattgatgttgctaaggataagcatgactgctttatcactaactcagatggtgaagtactttttaaagcatttaccattccaaacaacctagatggttttgatgagctttatcagaaaattcagtctgttacagatgatttaaccaaagtaaaagtaggccttgaagccactggacactacagttataacatcttgggatatcttcttgataaaggtctaaccacctttgttatcaatccgttacataccaatctttacagaaaaagtctaagccttagaaagacgaaaacggataaagttgatgcccatacgattgctacaatgctcatgtctgatgtgaacttaaagtcctactcagacacatcttatcacaatgaggaactgaagtcactaactcgttatcgctttgataaagtgaaagaacgggcaaaactcaaacaatcaatttctcgtctggtagcaattctatttcccgaattagagaaattggttcccacccttcatatggcatctgtttatgacctactttttgagctgtcaagtgtatccgacatcgcttcagtacatttaaccaggctgacaaacctcctaaacacatcttcgaaaggccactatggtaaagatacggctattcttttcagagaagctgcaagaacctcgattggctctcatatgcctgccaaatctctggaactaaaacataccatccgcctgattcgggaattagattccgagatttctgaaattgaatcagaaatcaaatccatcatggataaaatcaactcaccaattctaagcattccgggtattaactaccgcatgggttctatgattattgctgaaataggtgatttcaggagatttgattctcctgataagatacttgcttatgcaggattatctccttctacatatcaatcaggtcaattggaatcatcgtattcacatatggaaaaacgtggctccaggtatcttagatatgctttgttcaatgcaacaaaatttgtatgccattgggatccgacttttgctgcttatttagagaaaaaacgctctgaaggtaagcattataacgtagccatttcacatgctgccaaaaaacttgtcagagtgatttatcagctagaaagatctggacaatcctatatcaaagcagcttagatctcttaatataaatatctcctttttgagcatccgcaaagatgctctatttgtcatgcagttatcaatgttcaaatttgcttgaaatgcatttacacaattcattcaaaaagtttgaagttagtcttgacttttaatagttagt

SEQ ID NO: 4935 - DNA, 1366 bp, unidentified
  source 1..1366: mol_type = unassigned DNA; note = element_782beb4
  misc_feature 1..2: note = core
  misc_feature 3..82: note = LE
  misc_feature 83..1108: note = CDS
  misc_feature 1109..1366: note = RE
  misc_feature 1085..1353: note = bridgeRNA
tgatggattggatgcccctcctgccggttcattattgaaccgtccgagctgcttcagctcgtggattttgcaggaggataaaatgtctgaagttttcattgtcggcgtcgatttggcgaagcgcgtctttcaagtccatggtgcgacagcaaccggtgacgtgcttttccgaaagaagctgagccgcgctcagttcgccaagtttcttggtgatttgccagcgtgtatagtcgcgatggaggcatgtgcttcagcgcactactggggtcgagaggcccagttggcaggtcacgaggtgcgtttggtgccggctgcttacgtgaagccgttcgtcaaacggcacaagagcgatgtggttgatgccgaagccatcaccgaagcagcgctgagaccatccatgcggtttgtacaggtaaagacgccagagcaacaatctcaggccatgctgttccgaaccagagagatgtttgttcgccagcgaacccagacgatcaacgcgatccgggcacatcttgccgagtttggaattgtcctgcggctcaggattcgcaatccagatacctttgctcacgagatcgaagaaagagctgcagggttgccagaactggctcggtctttggcgcaacgcctactggaacagatcgcaacaatcagcgaacaggtctctgcgctcgatgtggaaatcaaggtacatgccaggtcttcgcatgatgcgcgattgatgcagactatgcccggtgtgggcccaatgtcagcgatggcagttggagctttctgccctcccgccaagaactttcgtagtgggcgcgactttgctgcttggctgggtcttgttcccagacaacattcgaccggcggtaaagagcggctcggccgcgtcacgaagatgggccaaaaggatgtgcggcgattgctcatcatcgctgcgatgtccgtgatcaactcaattgaacgacgaaagcgttgtgtcgagccctggctcacccgtatgcttgaaacgcgccccagaatggttgtggccgtcgcattggcaaatcgaatggcacgccggctttgggcgatgttggcaacaggccaacaatatcgaattccgggcgctgctgcgtagggcaaaacccggataccggcaggtatgtgaggacgaaaggatcgaataaggaaagcggatcgacgagatcgaatttgggaaaaccagtgcaacccttcgtggctatgagcccgataaactgatttggacccaggttcgcgcatctccataagggccagcggtcacatgcgccgcacaagcaggccggacacgtgacagcacccgatcatgctatccagacctcgagacatccctctcatagaccggggcatccacacg

SEQ ID NO: 4936 - DNA, 1260 bp, unidentified
  source 1..1260: mol_type = unassigned DNA; note = element_7834120
  misc_feature 1..3: note = core
  misc_feature 4..210: note = LE
  misc_feature 211..1224: note = CDS
  misc_feature 1225..1260: note = RE
  misc_feature 2..200: note = bridgeRNA
tgcctttagtttgtatttcaaatatatatacaataaattaactgaaaaggaaacgggtgaactaaaacgttttgtaggttcgaagatctaatagccgcattagtcccgtttcctttcatcagacttgtcagagccattggaatgataggcttcaaggcctgctaaaggcaatcgcacaataagttttttattcatgttaaaaacgaaattatggaaaaaattaaagaagtaaaacggtttgtagaaagtgttggtattgatgtttcaaaactaacgctagatgtatttctttacaacaaaaagaatcatcgtcaattttcaaatacggccaagggctttttagagatgcaaaaatgggttaagtcggaacagcatagtttaactgatttaatttattgctttgagcataccggctggtattgtcttttactcagtcaatatttacatgatcatgggatgtattactgctgtattaatccgatagaaataaaacggtctatgggatttaaaaggggcaagacagacaaaacagattcctatgagattgcaagatttgcctggttaagaagggaggagttaaaggcatcagttccacttcctataagtttactggaactgcaaagacttatgagtgtgcgggagcaatttgtgaaacaaagcacttcacttaaaaatttagaaaagggcttattggtaactcttgaaaaaatcactggagatatcggtttgaaggctgttaggcaatctataaaacaacttgaacagcaaatacagaaaatagaaaaagcgatggaggaattgatagcaagcgaacccaaaatgaaaagcaattacaaactgaccaagagcgtaaaaggagtgggtcgaatcctggcaatacaaatgcttttgcatacgcataactatacaaggtttgaagaatggcgacagttttcggcctactgtggattggttccatatcccttccaatccggaacaagtatacatggaagaaaacgcattcatgcaattagcgatataaagatgaaaagtttattatctatgtcagcaataagtgcaatacaacatgattcagaacttaagatttattatcaaaaaagagtggaagaaggaaagccaaagatggtagtactaaatattatcaggaacaaaattgtatccagagtatttgcaacagttaaacggggaacaccctatgtggagataaataaattcgctgcttaaaaataattgcgaaaaaacttgtttttgatcttggaa

SEQ ID NO: 4937 - DNA, 1369 bp, unidentified
  source 1..1369: mol_type = unassigned DNA; note = element_78373ae
  misc_feature 1: note = core
  misc_feature 2..66: note = LE
  misc_feature 67..1110: note = CDS
  misc_feature 1111..1369: note = RE
  misc_feature 1139..1360: note = bridgeRNA
taatggaatggtctgcccctcctgccgagcatcggcatactgaggtttcttcaacgggaggccgccatgagcacacaagctgttcgcgtcatcgggattgatctcggcaagaactggttccatcttgtcggcatggacgatcggggccatccgttgtttcgcaagaagctcaatcgcacgcagctcgcggagttcgccgctacgtcgtcggcgtgcatcgtcgccatggaatcttgtcccggctcgcaatactggggacgtcgcttccagaatgccggacacacggtgcgtgtgatcccagctcagttcgtgaagccctacctgaagtcgaacaagaacgacttcaacgatgccgaagcaattgccgaagccgccagccgcggcaccatgcgaacagtgccactcaagtcggtcgaccagttggagatgcaagccatgcatcgtgtccggcagcgcttcatcgtcgaacgtaccgctgccgtgaaccagatgcgtgccctgctgctagagcgcggcatcgtggtcccgatcggtcgcgcccttttcgcacgcagtttgccgcgcattctggaagatgcagagaacggcttgtcgatcaggatgcgccagctcctgcagcggttgcgggaacgctggcaggggctcgataaggagatcgattcggtttccaccgagatccacgagatcgccaaggattccgagttgtgtcgtcgcgccatcacggtgccggggatcggccccatcattgcgagcgccatggtcgccgcagtcggtagtggccaagcgttcggcaaggggcgcgaccttgctgcgtggctgggactggtccccaaacagtattcgactggcggcaagtccaatctcggcggcatcagcaagcggggcaacagttacttgcgcatgctcctgatccagggtgcgcgtgcactgatgatccacatgaagcgtgagcgatctcgcatggggcaatggttccaggaaatcgagaagcgtagccatccacatgtcgcgctgatcgctctggcgaacaagatcgctcgcatctgctggaaggtgctcgttagcggtgaatcgtaccgaccgtttccgaatgcgccgatgaccgcctgagcgcaatcaaagttacgaagagagcagcaccgtcttgtttttgcgagccgcgattgttgatgacagaaccgttgaccggcgcaccttaagcctggctaaaaaagcagtccttcgtgactgaacgccttatgaggcaaggcgcgcgcggattccatcaaggccagggaccagcgttcccaaccgtaggccggatacattgacgcaaaacgttcttctgacgttggcaaacacagcttgcaaaaccggggcagaccataca

SEQ ID NO: 4938 - DNA, 1357 bp, unidentified
  source 1..1357: mol_type = unassigned DNA; note = element_783e583
  misc_feature 1..3: note = core
  misc_feature 4..118: note = LE
  misc_feature 119..967: note = CDS
  misc_feature 968..1357: note = RE
  misc_feature 1078..1344: note = bridgeRNA
tgatggggtggacggcccctgcacccgcctcggcgtgccatggtagctgtcgatgtttgtcaggcaggagctatcctaatgcaaattcaggtcgtcggtctcatacatcgccaaacagatgtttcaggtccacgcagccgacaaggcaggccgcacgctcgcgcaggtgaggctgcggcgaggacaagtgctcgattacttccgcgaactgccatcgtgcctgatcggcatggaagcatgcgcgacagcgcattactgggcgcgcgagttgatagcgctcggccacgatgtacgcctcatggcgccagcctatgtgaagccttacgtcaagcgcaacaagacggatgcaaccgatgctgaggcgatcgcggaagcggttacgcgcccgaccatgcggttcgtggccgtgaagtcatctgagcagcaggcagcgcttatgctccatcgggtccgcgaacttcttgttcgtcaacgaactatgctggcgacggcattacgcgcgcatttggcggagttcgggattattgcaccgcaaggtattcatcgtgtcgagaagcttgccgtcgaagtgaacagttcgtctgtgccgccattggcacgtcaagcactgacgctgctgatcgaagagcttgcggatgtctggcggcgggtcgaggcgattgaggcgcgcctcataacactgcaccgcgccaacgaggtgagccgtcgacttgccacgataccgggtgtcggaccgatcaccgcgacggcgatcgccggaagcgtctcggatccatcaatgttccgctcgggtcgtgagtttgcggcctggctcgggctcacgcccaagagccactcaagtggaggcaaggatcgcctcggacggatctcaaagcgaggagaccgctatatccgtcacctcctgtatgttggtgccggcaatgcgatccgcttcgcaaaggcgcaagcggcaaccggtgaagcgtagatacacagcctccagcagcgccgacctgcgaaggtcgctatcatcgcgctggctaacaagatggcacgcatcgcctgggcgctgatgatacgcggcgagaacttccgctcgcccatggttgcggcagcatagtccatcgacgggaaatcccgaggttgcgagggcaaacgtgaggtgacggcacgaccggtcggaccggggatcgacaaagcccgtagagctttaagcgccgataagcgcgacccgttgatgaggcgtcgattcgcgaactccatcagggccagcggtcatgaagatggccgcacgaacaggccgcatacatgaacgcacccggcccggattatgctctaacctcactaaagaccttgcaacgcaggggccgtccataca

SEQ ID NO: 4939 - DNA, 1466 bp, unidentified
  source 1..1466: mol_type = unassigned DNA; note = element_7840163
  misc_feature 1: note = core
  misc_feature 2..139: note = LE
  misc_feature 140..1174: note = CDS
  misc_feature 1175..1466: note = RE
  misc_feature 1202..1464: note = bridgeRNA
atggtatggacgcctcccccctcgctgatcgagtgcgaatggttgggacacgggtgatgaaggggggcctcgcagtcgacggcatcgagtgccaaagtggaagttcgattagcaaccactcgcagacggaggccccgaaatggatcgtacgacgtatggcttggaccttgcaaagaacgtgatgcaacttcattgggtcgatagcgagacaggcgagatcgggcgcaagaagctcgctcgagcaaagttgggcgagttcttcgcacagctgcaaccagcgcgcgtggcaatggaggcgtgtggcagtgcgcaccactgggcgcgcgtgctgggcggcctcggacaccaggtggagttgctgccagcacggcaggtacgcgcgtttgtgcgcagcaacaaggatgacgcggccgatgcgcgcgcgatctggctggcggcgcaacagtgcgacatccggcgtgcaccggtcaagaccgtggagcagcaggcggtgatgtcactgcaccgagcacgttcgcactgggtgagcgtgcgcacggccaccctcaacatgctgcgaggcttgttgtacgagttcggtgtcttgctgccaggcaagaaagcggggctgaagacgatgagcgcgcggcgcgcccaagtcgacgatcaattgccaccgttgatgcgccggttggttgacctgcagctcgaaacgctcaagggcatcgagcgcagcatcgatcagctcgaagccgagatcgcagagcagcaacgcaaaggcgatacggcgcgcacgctgcgcgaggtgcccggcatcggcgtgctcggtgcgacggcgctggccgccacgctgggagatgcgagtaactggcgctcggggcgagagttcgctgccagcctgggactggttcctgcgcacaccaagacccgaatcggccacctgagcaagcgaggcgacccttatctgcggacattgctcatccacggcgctcgagcggtgatcacgcaagccaggttcaagcctgcctggctagagcaactgctgcgacgccggccgctgaacgtggcggcggtggcgttggccaacaagatggctcgcacggcctgggctctcatagcgcacgggcgggcgtaccaagcggagtggaagagcactccacctagtggctgcggcgcgcaagcgcaggcggcttagatcatcaacctgagacaacctataggagtggatgccgcaaagagtgcgtgagtcgagtcgatgaagtgatgggtgaagcggtcggaccgcgggtcgggtaaagctgaatgtttgtctgggcgagcctcgtgcaaagcccacccaggagatgagcaccgaccctgcgaatgaccatcaaggccagcggcgggcttcggtccgatctgcacaaacaggccggatataagaccgcagtcattaccgccagccggaacttcaagaactcgcttgccacacgggaggcgtccatata

SEQ ID NO: 4940 - DNA, 1343 bp, unidentified
  source 1..1343: mol_type = unassigned DNA; note = element_7841cd6
  misc_feature 1..2: note = core
  misc_feature 3..83: note = LE
  misc_feature 84..1100: note = CDS
  misc_feature 1101..1343: note = RE
  misc_feature 1085..1330: note = bridgeRNA
tgttggtgtggacggccccacggcatcacctaggtgtgccaaggtttggctgttgttgaacatcaaacgacggggccgtccacatgaagcttaagcggatttccatcgatacgtccaaggctgtgttcacgctgcacgggatcgacgatcaagatcgccctgtgcttcgccgcaatctcagccgaccggcgtttgaagcatttttcgcaaagctgcctcccaccgaggtggcgttggaggcctgtggcggatcgcaccactgggggcgccggctgaccgaactgggccatcacgtgcatctgatcgcaccgcaatacgtcaagcccttcgtcaagcgcggcaagaacgaccgcaatgatgctgaggcgatcagcgaggcggccgggcggcctgggatgtcggctgtgccggtcaagtcggccgaacggcaggccggggcgatggtggtaagcgtgcgcgagctgttggtgcgccaacgcacccaggcgatcaacgccctgcgcggccacgccgcagagttcggcgtgattgccgccaagggcaccgccaacgtggccgcgctgtgcgaacgcgtggcgcaggatgcccaggtgcccgaggccgcacgccgcatgctggcagtgctcgcccagcaggtgtcgcatctggacgcagagatcgcggcgctcgatgctcaactgcgcgaggcggcacaggccgacacgacggcgcgccggttgatggcagcgcctggtattggcgccttgggtgcgatcaccctcgccctgacggtggatgcctcgcagttccgttcggggcggcactttgccgcttggctcggcctggtgccgaaagaacgatcgaccggcggccggcagcgtcttggcgggatcagccgacagggcaacgagcgactgcgacaactgctggtggtgggagcgatggctgtgatccgtcacgccagacctggcagcaaaaccgcatcggggtggttgctgaaattgctggagcgccgaccgcgcaagctggttgcggtggctctggccaacaagatggcccgcgtggtgtgggccatgatggcgcgtgggcaagcgtatcggcagcagccgatcgcgccgtaacctcaggcgcggtgccgcgggaagagagcaactgcagaagatgatgatcggtcggaccgacgcacgagcgatgccggggtttccaacggctccacaagccgcgtctttgtttggcattcgtgcgcggaacccatctgggccagcggccatgcgccgtcacaaacaggccggacacatgaacgcttccgaaacgccatcatccaacgctcaaattactcttgacccaaaggagccgtccacaca

SEQ ID NO: 4941 - DNA, 1138 bp, unidentified
  source 1..1138: mol_type = unassigned DNA; note = element_784c8b0
  misc_feature 1..2: note = core
  misc_feature 3..178: note = LE
  misc_feature 179..1123: note = CDS
  misc_feature 1124..1138: note = RE
  misc_feature 12..189: note = bridgeRNA
cttgtatctcacggttgccgaccggctctgagccggggaagctgtcgacggaagggagcccgtacaggccttgggtgattgagcccgcctctgagcatggggccccgcccgtcggttccagaggagcccgaacagtcgcttgggccgcagtgcgagcccggatttgcaaggacgggtcatggaacaacctccagcgccgccgagcttcgtcgccatcgatgtctcgaaggatcgtctcgatgtccatgttttgccgtctggcgacgcgttcgcggtcgcccgtaacggcaaaggcttggacaaactgctgacagcccttcgctgccgatccgtaggcctcatcgtgatcgaagcgaccggaggatatgaactcacggtatcagccgcaattgccgctgccgatctaccgctcgccgttgttaatccgcgtcagattcgggattttgctcgtgctaccgggcggttggcgaagaccgatgcgctcgatgccgaggttatcgcgttgtttgctgagcgcatccgcccggaagcgcgccacttgcctgggccagatgcacaagcacttgcggatctggtcgcgaggcggcgtcaactggtcgagatgatcggcatggaaggcaaccgcctacgccaggcgcacactccgcttatccagaagagtctgagggcaacgctcaaaatgcttgaggcgcaacttgccgctctcgatcacgacatcgacaatacggttcgcgcctcgcctatctggcgtgccgcggatgaccttcttctgtccgttccaagcgtcggcagcgtcacagctcgtacgctgattgctgatcttccagaactcgggcgcctcgatcggcgaagcatcgcctcccttgtcggcgtagcgcccgtcaaccgcgacagtggcacctggcgcggccatcgtgcgatagccggcgggcgccccaccgtacggcgaacgctgttcatggctgctctcgtcggcgtgcgctggaaccccgttctcaaagatcaatatcagcggctggcacgagggcgtccgaagaaagtcgccctcgtcgcttgtatgcggcgcctcctcaccatcctcaacgcgatcatccggagcgcgacgccatggcaaaacgcttgacgcgaaagacagtcg

SEQ ID NO: 4942 - DNA, 1452 bp, unidentified
  source 1..1452: mol_type = unassigned DNA; note = element_784f8bd
  misc_feature 1..2: note = core
  misc_feature 3..210: note = LE
  misc_feature 211..1437: note = CDS
  misc_feature 1438..1452: note = RE
  misc_feature 12..198: note = bridgeRNA
tccttacctttcttggagggtgttcggggccgctggccttaggcttcgattcacccagggacagcgggtatggctttcattggtcagcccgtgatggccgaggaggattggccgcccgctgtcccgcgacgactcgaccgctaattgagagatgcgattcgatcgctgtgtaaggacacgacggcgtggtcgtctggcgggctggtggaaatggtgatgagcacggaggcggtagtgacacaagctgtttgggcgggtatcgatgctgggaaatcggaccacttctgcgtggtcatcgatgcgcagggaaagcggctgctgtcgcagcgggtagccaacgacgaagcgaccctgttgaagttgatcagctctgtcgcaaccatggctgacggcggtgaagtcacctgggccatcgatctcaacgctggcggtgcggccctgctgatcacgctgctgatcgccgctgaccagcggctgctctacattcccggccgcaccgtgcaccacgcctcgggcagctaccgcggggaggggaagaccgacgccaaagatgccgccgtcattgccgatcaggcccggatgcgccgcgatctgcaaccactgcgccccggagatgacatcgcagtggagctgcgcatcctcaccagccgacgcaccgatctggtggctgatcgcacccgcacgatcaaccgactgcgtgcccagctgctcgaatacttcccagccctggaacgcgcgttcgactacagcaccagcaaggccgcgttgctgctgctcaccggctatcaaactcccgatgggctgcgacgagccggtactgctcgactggcagcctggttgggtaaacgcaaggcccgcaacgccgatgccgtcgcggccaaagccctgcaggccgctcacgctcaacacaccgtcatacccggacaacaactcgctgcggccatcgttgcccgcttggccaaggaggtgatggccctcgacaccgaaatcggcgacaccgatgcgatgatcgaggagcgatttcgccgccaccgccacgccgaaatcatcgtgagcatgtcgggcttcggcgtcacgctcggcgctgaattcctcgcctccaccggcggagacatgagtgccttcgactccgttgaccgcctcgccggcgtcgccggcctggctccggtaccgcgtgactccggccgcatcagcggcaaccttcaacgcccccgccgctacaaccggcgcctgctgcgcgcctgctacctgtcggcgctgtacagcattcgatccgaccccgcctcgcgcacgtattacaaccgcaaacgcgccgaaggcaaacgccacagccaagccgtcctggccctggcacgtcggcgtctcaatgttctgtgggcaatgctgcgcgaccacacgacctatcaacccaccacgcctactgccgcagcggcttgacaacctcattgagaa

SEQ ID NO: 4943 - DNA, 1349 bp, unidentified
  source 1..1349: mol_type = unassigned DNA; note = element_785a9d9
  misc_feature 1..2: note = core
  misc_feature 3..8: note = LE
  misc_feature 9..1166: note = CDS
  misc_feature 1167..1349: note = RE
  misc_feature 1133..1342: note = bridgeRNA
ttaatgagatggtcatccccaccctccgagggcacactttcgcagggtgttttatttcggaggccatcatcacgagcgcagttgcactggtagggattgatccgggcaagcaaagctttcatctacacggaaaagacggttctggccggaagatctttcgcacgaaagcgacacgccagcaaatgatgcgattgcttggcatcctgccggcttgcacggtggtgatggaagcctgcgccggagcgcactttatggcgcgccaactgacggcgctcgggcatcaagtgaaattgatctcgccgcagttcgtgcgtcctttcgtcaagggcaacaagaacgacttcattgatgccgaagcgatctgcgaagccgcctcgcggcccagcatgcgcttcgtctcgcccaagaccgaggcccggcaaacgctttcggtattgcaccggatgcgtgattcgctggtgcgtgatcgtaccaagacggccaaccaggcccacggtttcctgctggagttcggcatcagcctgcccaagggactatcgctggtcagacgactgccgagcacgttggatgagcatgagctgccgcctcggctggtcgtactcctaacgcgcctgcatcagcattcacgctgtctggacggacagatcaaggcaccggacaaggaaatgaccacccagcttgaggaagatgacctggggagccgcttgctgacgattccctgtgtcggcccgatcacagccagcctgttatcggccgaaatgggcgatggcaagcagtatggcggcagccgtgatttcgcggcatcggtggggctggtaccccgccagcacagcaccggcggtcgagccaatttgctgggtatcagcaaacgagggagacaagtatctgcggcggcttttagtgcagtgcgcccgggtctacctgcagcgcctggagcatcagcagggtgccttggcccactgggtccgctcgctacggcagcgacgccatgcgaacatggtggtgcgcgccctggccaacaagttctcccgagtcgcctgggcgttcgccgccaaccactcggaattcgaagcagggccagtcgtctacgccgcctgacccggccattcagctgtaccacggaacacccttccaggttttgcgatgctgaacaaccgatgacgtgaacggccaccgacctggtgaacaacctgacataaaaatcggctttcgaagccgccggcttttcaggatcaccaggcgcgactctcatcgtggcgcggggcatgccccaacgagacgctggatagatttaggcaagccatacaatcatcgctggtcagtattgcagaaacgggatgaccataaat

SEQ ID NO: 4944 - DNA, 1158 bp, unidentified
  source 1..1158: mol_type = unassigned DNA; note = element_785df2a
  misc_feature 1..2: note = core
  misc_feature 3..210: note = LE
  misc_feature 211..1146: note = CDS
  misc_feature 1147..1158: note = RE
  misc_feature 13..212: note = bridgeRNA
cttgttttatgacttcggtcggctcctgaggcaaaagggagccactgtccgccacgccacttatggcggacagtggcgggggagggatcggtcgacacgttggtcttgcaggaccgcagcgcagtaggatcgcccccgtcttttctttcggcctgaacggataccggggctttgaggcccgcatgacaagaccaggagaggaaaagacacatgaggaatatcattggcgtcgacatctcgaaagatcgactggacgtctttgcactcgctgatcgaacataccaccagttcgccaacgatcagcatggcatccgggcgctgatccgtcagctcggaaaactcgaccagccgcttgtggtcttcgaggcaaccggcgcctaccatcgccggctcgaagcttcccttgccaagcatgccgtgcatttccacaagatcaacccaaggcagtctcggcggttcgccgaagcaaccggtcgccttgccaagaccgatcgcgtggatgccgcgatgctcgcacgcatggcggcggcactgagtctgtcaccgcaaacgccgaaggcagaaacgcatcatgatctgagggagttattggttgcccgtcgtgctttggtcaaggacctggcgaccgggaaggcacgtgagaaaagagccttgcagcccgtcgttcgtcgccagatcaccaagcggctgcggctcgccgaaagccagatcgcagagctggagcgcgaaatcctcgatcggataaatgacgatcccgagctgtgcgcccgtttcaacattctcctgagcattcccggtatcagcgagatcaccgctttcaccatgctggtcgaaatgcccgagcttggaacgatgtcgaacaagcaagccgcatccctggccaggcttgcgccagtgtcgcgtcagtctggcaaatggcaaggcaaggagcacatccgaggcggccgacgcgaattgcgacgcgcgctctatatgccggcgctctcggccatgcgcttcaatcccgatctgaagacgatgtcagaaaccctggccgccaggggcaagcctgccaaggtcgtgatcactgctgtgatgcgaaagctgatcgtgctttccaacatccttgtcgcggctggacgagaatggagcccaaatcaggcttgaccatcacggata

SEQ ID NO: 4945 - DNA, 1313 bp, unidentified
  source 1..1313: mol_type = unassigned DNA; note = element_78600db
  misc_feature 1: note = core
  misc_feature 2..68: note = LE
  misc_feature 69..1085: note = CDS
  misc_feature 1086..1313: note = RE
  misc_feature 1087..1307: note = bridgeRNA
taattagatggtactccccacaccccagaacctagactttaagtctatctatttaaggggcgaatattatggttatcactacaactattggtatcgatctaggaaaatcttcatttcatgcagtagggcatgactcgaacggtagagaaacatttcgtaagaagttaaatagaacaaaattacttcaatttctctctgcttatgagcctgtgcttatagcaatggagtcttgcggtggttctcattggttagccaggaaatgtaaatcttatggacatgtagttaaattgattccagcacaatatgtaaaaccttatgtgaagacaaataaaaatgacttcattgatgccgatgcaattgctgaggcatcaactagaccaacaatgaggttcacttctcctaaatcagaagaagcgcaagtagcttcgataattcgtaaagttcgttcttcatttatgaaagaacgaacagcgtgtatgaacagaatgggggcaatgcttctagaatttggcttgagtttacctcgtggccacagcccactcaaaaagctttttgagtggatagaacttcaaaatgaagtattaccaaactcattgattaatgagttaacagaacagcttgaatactatcgctatcttaatgaacgaattgaatctcaagagaaaaaactacaactcataaataaggatgatattcgctatagccttttacaaactatccctggagtaggccctttgacagcggcttgttgtgtagccaacgtagctgaccctaaggatttttccagtggtcgtaactttgcagcatgggttggattagtacctcgtcaacactctactggtggtaaaagtcgaatgttaggtatatcaaagcgagggaatagtgagctgagggagctatttgttcatgctgctcggtcaatattaagacgagcagaaacagctgaaaagtattttggtctttggttgatgaatttaaaacgaacaaagccgtttaatgtggcagtggttgctttagctaacaaaatcgccagaatagcgtggtctgttatgcttacgaacaaagaattttcactaaagatttaaaccaggtttgcaatgatgataaatgatgacaaaacggttagaccaccagattgaaacctgtcgagtgaactagcaggcttatatgctttgatggttatgaggacaatctggcgcggatctcatcgtagagcgaagttgtgaaatgacttcatatagactctgaatacattagcgcaaatcagctcgttattaaatatcattacttgcaaaagtggggagtaccataca

SEQ ID NO: 4946 - DNA, 1416 bp, unidentified
  source 1..1416: mol_type = unassigned DNA; note = element_787101e
  misc_feature 1: note = core
  misc_feature 2..314: note = LE
  misc_feature 315..1397: note = CDS
  misc_feature 1398..1416: note = RE
  misc_feature 80..319: note = bridgeRNA
cacttcctcagaatggtgcgggtgaggttgcggattggatcggtgcggtgtgtctccccgggatccgcaaccggctcggtgaggcttggcgcgttctgccgccggcccccggcctggccctgcacgcagctgaccgcgtgagcgtgtcctgtgcccggaccgccggccggggtccgacgggaggacgtggaacccgcggggcccgggacggccgtgacctgataggagcctgacctctgttgtcccagaagtgctctgtccgccgtctcgtgccctgcggtgccatcccagtcccggcaaggaacggagacgacatgcccacgatcgcagatacagacctgcccgtcaccggcggcgtcgatacccacgccgaggtgcacgtggccgggatggccggccaggccgggcgggtgctggggaccacagagttccccgccaccgccgcgggctatgcggcggcgctggcctggatgcgcggccacggtgagctggtcaaagccggggtggaaggcaccgggagctacggggctgggctggcccgctacctggccgcccacggcatcgaagtggccgaggtgatccggccgaaccggcaggcccggcgccggcgcggcaaatccgatcccgccgacgcggtcgctgccgcgctggccgcgctgaacggcgaggcgtcggggcagccgaagtctggtgacggcgcggtggagtcgatccgggccctgcaggtggcccgccgcggcgcggtcaaggcccgcacccaggctggcaaccagctccgcgacctgatcatcaccgcgccgcaggtgctgcgggagaaactggccgccttgcccgccccgaagcgggtcaagctggcggcccggttccgccctggcgacctcaccagccccgccgaggcggccaaggccgccatggccaccgtggcccgccgccaccaggcactgaccgccgagatcgcccagctggacaccgccttggaaacgctcctcggccatgcggccccggccggcttcccggccagaactggcatgggcgccaagtccgccgcctcgctcctggtcaccgccggcgacaaccctggccggctgcgcaccgaagccagcttcgccgcgctgtgcggcgccagcccggccgacgcctcctccggcaaacaacgccgccacctcctcaaccgcggcggggaccggcaggccaactccgccccgtggcggatcgtcttcacccggatggccaccgacccgcgcacccaggcctacctggcccggcgcaccgccgagggcaaaaccaccagagaaatcatccgctgcctcaaacgctacgtcgcccgcgagatctacaaggccctgacccactctggcaacccggccaacatcaaccatctcaaagagattccatgatcacttgacataggagctt

SEQ ID NO: 4947 - DNA, 1473 bp, unidentified
  source 1..1473: mol_type = unassigned DNA; note = element_78a6711
  misc_feature 1..4: note = core
  misc_feature 5..221: note = LE
  misc_feature 222..1457: note = CDS
  misc_feature 1458..1473: note = RE
  misc_feature 1..225: note = bridgeRNA
ccccgttaccttcttgatcaagcccggtgagggcttgcaggccgccggccgcggtatgactcgttgcccctgtcgctcgatgatctggggggtgttgtcgccgcggccggagaacactcatgaccgctgacagagacctgaccgcacttcggtctgctcgtaacgtggctgccggcgcgggtgctccaggtcggcctgctgcgacgaggagggagcggccgatgcccgatcctgatcagcccccgacgaccgggtatgcggtgttctgcggcctcgacgtcggtaagtccgaacaccacgcctgcgcgatcgacaccaccggcacacggctgcacgacaagccgctgcccaacgacgagaccgcattgcgcgccgtgttcaccgccctcgccgagcacggccgggtgctcgtagtggtcgatcagcccgcctcgatcggcgccttggccgtcgccctcgcccgccacatgggcgtcgacgtggcgtatctgcccgggctggcgatgcgccgcatcgccgacctgcaccccggccaggccaagaccgacgcccgcgacgcacacgtcatcgccgaagccgcccgcaccatgccccacaccctgcgccgggtcggcaccgacgacgaaaccctcgccgagctgaccgtgttggccggctacgacgacgacctcgccggacagtccactcggctcaccaaccggctccgcgacgccatgctgcacgtccatccagccctggaacgcctgatcggaccacgtctggaccgcggcagagtgctcgacctgctcgcggtcgcaccgaccccgcaggcgctgcgcgagctgggtgtcgacgggatcgctgaggtgatgcgcccacgctcgccgcggctggcccgcaccctgcccactcagatcctggccgcactcgatgcccagaccctgatcgtccccggcaccgccgcgttcgcccgggtcgtcaccggtgtcgccacgcagctgcgtgaggttcaccgcgaacgcgacgatctggccaccgaactcaaggcccgcctggaggcccaccctcttggaccggtcctgacctcgatgcccggcgtcggggtcaggaccgccatcaagatcctcaccatcgtcggtgatgggcgagcgttccccaccgccggacacctggccgcctacgccggcctcgccccggtcacccgacggtccggctcgtcgatcaagggagagacccgatcccaacgcggcaaccacgcactgaaatcggccctgttcctgtccgcgttcgcctccctcggtgacccggcaagccgcgcctactacgaccgcaagcgggctcagggcaaacggcacaacgccgccctgatctgcctcacccggcggcgcaccgacgtcatctacgccatgctccgcgaccgccgcccctacacgccgccgaccctcagcgaacccgatcccggcctaatcgccgcttgacgaccccatagagaca

SEQ ID NO: 4948 - DNA, 1718 bp, unidentified
  source 1..1718: mol_type = unassigned DNA; note = element_78a92a3
  misc_feature 1..2: note = core
  misc_feature 3..352: note = LE
  misc_feature 353..1582: note = CDS
  misc_feature 1583..1718: note = RE
  misc_feature 46..320: note = bridgeRNA
ctcgtatattaaaaataatccttttgttttttgtgacattacaacttgctttctggtcaccgcatgatagcctctaattatcattggctttggtcaactggtataggttatttcctcctgtagtttaactacttgcttagtctgccgcccaggcaatcaactaattctcgaactcacatgctgtaccgattagaagattgactaattcttgagtaggaattagatgcagctttaatcgttctaaccaatgagtactgatacttgcgaggttgcttttagtgattgtaattaggggttatcatgcagtgatcagattaagaccagtaaatttttatgaaaggaggccattccaatgaaactttttgtcggtatcgacgttagctccaaggatttagttacttccatgatctccgaagaagctcatcaagaagtcttccaaggcaactttcctaatgatttgaaaggtgcttcagaattaaagaactccattattgacacggcaaattcatgtcatttgactcaagttgtcatcgggatggaggctacttccatttatagttttcatccggcaatgtttttccaggaagataacgatttaaagcagtttgatgctcagtcagtcgtcatcgacccgaagaaaaccaagcgttatcatgatgtcttcgctgaagataaaaatgatcgaattgatgctttctacatcgcggattacttaagggttggtcactattccgtcggaatagtgcgccaagaaaactacattgctctccaacgcctaacgcgttcgcgctatgaattggtgcagagcttaactagggccaaacaacactttattgagaacctgtattacaagttgaataaactggttgtttctgaggaactcaacacctcaatctttggctctacaatgatgaagctcttaaccgaagatatgaccactgatgacttacttaatctttcgattactgacctagcacaatatctcgacgaacatggtcgaggtcgcttcgccgaccctgaggccttagcgagaacaattcagaaggctgttcgcgcttcttatcgtctcaatcaagtcgttgccaattccgtggatactgttttatcagtctatgctgaagagattaaagcatttcaaaaaatgatcaaagatctcgacaagtcgattgaaaaggtcgttcaagtcacccctgaagaacaaattcttcgttccattcccggcattggacctgtctacgctgccggtattttagcggaaatcggtcaaattgaccggtttgacaacgaagctaaactggcaaagtatgcagggctttcctggcaagaaaagcaatccggaagttataagagtgataacacccccatgaagcgaactggcaatgcatatcttaggtattacttggttgaagctgccaaccgagtaaaaagcttagatccagtctttggtgagtattatcaacgtaaatacaaagaagtgaatcgaacaccatccaaacgcgccctcgtccttaccgcacgcaaactaattagggtgattttcttcctactcaaaaatcatcaaatctatcaagaaaagaggtaatggtataggaagatgaaatgattctcgacgcttaagctttaaaacaccttggtatcaaggcttatttaagtgcgcctaaaatctggtcaaagcaagttagtcatcggtaatttgttcttgacttattaccacatga

SEQ ID NO: 4949 - DNA, 1377 bp, unidentified
  source 1..1377: mol_type = unassigned DNA; note = element_78b5109
  misc_feature 1..2: note = core
  misc_feature 3..78: note = LE
  misc_feature 79..1110: note = CDS
  misc_feature 1111..1377: note = RE
  misc_feature 1146..1365: note = bridgeRNA
tgatggtgtggaacggccctcctcaggcaactgagtttgccgcatattctcgcgagagttcacacagggagcagtttcatgggtgcgattgctacgattggtctcgatttggcaaaatcggtgtttcaggtccacgccgtggataccgcaggaaaagttgtggcgcgtcgagcaatacgtcgatctcaacttctggacttctttgaacgaacctctccttgcctcgtcggaatggaggcctgcgccagcgcccactactggacacgcgagatcggaaaattcggtcaccaggtccgcatcatgcccgcctcctacgttaaggcttacgtgaagaggaacaaaaccgatgccgcggatgccgaagccatctgtgaggccgtaacacggccgacgatgcggtttgtgccggtgaggtcggatgtcgagcagtctatcaacatgatgctcaaaacacgcgatctcctaaccagacagcgtactaagtcggtcaatgcgctacgctcccatctcgctgagctgggtatcgtggccggtgcaggatttaaggcgagcgccaagctcatcgagatagtgcgcgacaataccgatcatcgactgccaccggttgcccgctttgcattggctgagatcgcggaccagatcgagcgcctgacagagaagatcatgaagctggaaaaggtgatcgtttcgtccgtccgagaggacgacgtctcgcgacgcttgaccagcattcccggcgtcggcccgattactgcggcggcggtgagggcgctggtaccggatccagctggattccgaaccggccgcgattttgcagcatgggtcgggctgacacctcggtcaaattcgagcggcgggaaacaaaagctggggtcgatatcgaagcggggcaatcctcaactgcgaagtctcttcatggtgggagccatggcgatcctcagaatgtcaagatacggggcgacgatgcagccttgggtcgccagtcttctcaagcggaggcccttcaaggtggtcgctgtggccatggccaacaagacagctcgcatcatctgggctttgatgaacaaaggtggatgttacgaaccgacatcagcagtatcgcacgcgtgacatctttacgaacttccggggcgacagcgccggaatgagcggcagggtgcagctgaagtgatgaaccacagggcgaattccaatgcagatcagaccattcccctctttgcgcgttagagcgcgtgagtttgattaggcgatccagcattacggaaatcatcatggccagcggtcgcgtgaccgcgctgataggccggacatacgaacgcaccgcccgactggggtaattacagcagcaacgtcttgctaaacgggccgttccacata

SEQ ID NO: 4950 - DNA, 1553 bp, unidentified
  source 1..1553: mol_type = unassigned DNA; note = element_78ce472
  misc_feature 1..3: note = core
  misc_feature 4..282: note = LE
  misc_feature 283..1446: note = CDS
  misc_feature 1447..1553: note = RE
  misc_feature 45..260: note = bridgeRNA
cacgtataattaaaaccatctcgaaaggggtggttttaattatttctcctttcctcaagaagctatattgcaggagtagctacctgctttataatcagaacaagcactgtggatttgtatctataaaattacagcatgactgttcggaggtgactcaaaccacagtgacttgtctgaattggtaatcagttgggtaacgcttgacgtttcatttgcgtgaatacatggacaagccttctgtggaaacagcagtgctaaaaaacagatagaggaggaaaccaattgtactttgtaggaatcgacatttcaaaattcaagcacgactgcgccattgttgatgagcttggcgatgtcatcacaccctcgtggtcgttccagaatgaccgcgaggggttttctttgctcaaggagttgcttgatgccctcgatggcaaaaagaagatagggcttgaagctaccggtcattatgggcaaaatctgaagctgttccttgaaaacaacgacttctcgttcatagagtttaatccgcttctgatcaaccaatttgttcacagcaaatcgctcagaaaaacaaagacggattccatcgacgctctcatgatcgcccaatatctgatgacggtagagtacaagccctatccaccgtcattttacacgcttgaaaggctaaagtcactaacaagatttcgggacaacctgattcggcaacggagcaagcaactggttgagttgacaaacatccttgacaaggtcttccctgaattcaagccttttttcaagggaagattttcggcaacggcactgtatattctttcccattacgcttctccagagaaaatatccaacatgaattccaaatcctacgaaccattgcggcgtctatctcgaggaagattctccatggtggattttgttgaactcaagacgctggtcagaaatacggtcggttcaacttgcgactatttgcttcaggaaatggagatcaccatcgatatttacaaccagcttcaaagcaaggcggaggaaattgagttgcagatccatgactgtgtccttgaccttgctccgcctatgctgaccattccgggaatcggtgcagcttccgccgcggttattctttctgaatttggtgatctttccaagttcaacagtccatccaaactgctttcctttgccggaatggagcctggatattttcaatccggcacttcagaaagcactggaaagatggtaaagcacggttcttcccatttgcgctatgccatgatgaactgtgcgcagacagtgattaacaacgaaccgacttttgcggcctactacgccaagaaacgtgccgagggcaaggagcaccgcgttgctcttacccatgttgctaaaaagcttttgcgggttatttatacgcttcagacgaaagaactgtcctataacccggatctcgttcgctgacccatgatcaactttttttgaagtcctcggaagagggcttggttttctgcgcccttttttgaccagatgaaaatttttcaattttcccttgacttcttatagttggt

SEQ ID NO: 4951 - DNA, 1206 bp, unidentified
  source 1..1206: mol_type = unassigned DNA; note = element_78d1df5
  misc_feature 1..2: note = core
  misc_feature 3..431: note = LE
  misc_feature 432..1172: note = CDS
  misc_feature 1173..1206: note = RE
  misc_feature 19..206: note = bridgeRNA
cttgtatctctccaatctaatgatatattgcctagctagcagtatatcacggtgcatgatcagaatttgtatgcgggctgagacaaaaagactgtaacgtagataaaacccatgcgctgattttcttaagactgaatggtatccaagtgcttcccgatgggggaaagatgctgtatgaacaaggggagtaaaagaaagatgaatattattggtatcgatgtaagcaaagccaagctggattgtgcgtggttaaaagaagataacaaagtcaaaacgaaagtatttaccaatcagcttgaaggctggaaagggctagtcagttgggcaaagacccagacaggcaatgaacttagtgagttgcattttgtgatggaagcaacgggtacactcatgaaaacatggcgacgtggttgcatgatagtggtgcgaacgtgtctatcgccaatcctgcccacgttaactattacgcccaaagtttaggtggacggactaaaaacgacaaaaaagacagcatcgtgttagcgcggtatggcataaaagaacatcccatgctctggcatcctgcaccacaggagatgagagcattaaaagccttactgacgcgcttggatgccgttgaaaaagacctgcaacgcgaaaaaaatcgccatgaaaagatcatcgtcagcgatacgcctacggctgttttggcttctatcaaacaaatgattgaacaccttgagacagaacagaagacgctagaaaaactcattgacgaccacattaaagcgcacaaaaacctgaaagaaaataaagccttactggaaaccatcccaggtattggcaaggtcatgtcacaacggatgctcatggtactgggtacgcatcacttcaaggatgcccaccaatgtgcagcttatctgggtctcgttcccgtacaaaaagaatcaggcagtagtatcagaggacgatcccaactggctaaaaacggtaataaaaccgttcgcgccaagttgtacatggcaaccgtgaccgcaacccgctacaacccagatattaaagcccaatatgaacggctaaccaaaaaaggtaaaagcaaaatgtccgcactcggcgcggcaatgcgaaaactggtacagatttgttttggtgtctttaaacaccaactaccctatcaaccacaatcggcttaattttccgcttgtgtttgatttggagagatggtat

SEQ ID NO: 4952 - DNA, 1411 bp, unidentified
  source 1..1411: mol_type = unassigned DNA; note = element_78db4cf
  misc_feature 1..3: note = core
  misc_feature 4..132: note = LE
  misc_feature 133..1152: note = CDS
  misc_feature 1153..1411: note = RE
  misc_feature 1168..1407: note = bridgeRNA
agatggtatgggcgcctccctccggcaacgggccggcgcgcggagaccccggcaacagggcggatcctccggcgacggcatcgatgtgccagagtggagatgcgactcaaccactgaaccggaggatccatcatggagcttaacgtcgtcgcgatcgacatcgccaagaaggtgttccaactccattgggtggagcccgagacgggcagcatcgagcgtctgaagctgaagcgcgcccaggtgctccaatggttcgtcaatcggacgccgtcgctcgtactgatcgaagcctgcggcagtgctcatgaatgggggcggcaattgatcaagctcggccacgacgtacgcttgctgccggcgaagatggttcggcccttcgttcagcgcaacaagaccgacgcggccgacgcgcaagcgatctggacggccggccagcagcccgggacgaggttcgttcccgtcaagaccgaagcgcagcaggtcgtgctggctttgcatcgcctgcgcgcccagctcatgaagatgcgcatcatgcagaccaacgagatccgcggtctgatgtacgagttcggcatcgtgatgtcggaaggtcatcgagcgctgctgaaggaattgcccgctgcgctgatggaggcgaagagcaagctgccggcgatgttcatcgagtgcatcgatgagcaagtgcggcgcgtcaacgatcttgagcgcgacattgccacgatcgagcggcgactctcggaaaacctgcgcaaatcgcccgcctgcaagacactggcggagatccccggcgttgggctcatgacggccaccgcagtgatctccacgatgggaacaccgacggccttcaagagtgcacgcgaattcgccgcatggatcggcctggtgcctcggcaaaccggaaccggaggtcgtgttcgacagttggggatcagcaagcgaggtgacgcgtatttgcgaacgctgttgatgcacggcgcgcgatccatcgtgcgatctgatcgatcgacgacctggccgtggctcagcgaactgctcaagcgtcgaccgtacagcgtcgtggtggctgccgttgcgaacaagctcgccaggacgatctgggctgtactggcaagaggtcaggaatggcgcccggaagcctggcaggcagcctgacccgtcataccccaatcaaccgttttaggagagcaagcgaccaaccgtgtgatgggccagacaggtcggaccgggacggggaccttccgatagggacgtggagcttcgagctcgatgtgcagatgggaacctcgtcggcgaatgccatcagggccagcaggcttcgccgcctgcacaacaggccggatataagactgcagccctgcctcctgcttcgtcacacgcagacgtcacttgcgatccgggaggcgcccatata

SEQ ID NO: 4953 - DNA, 1379 bp, unidentified
  source 1..1379: mol_type = unassigned DNA; note = element_78dec47
  misc_feature 1..3: note = core
  misc_feature 4..80: note = LE
  misc_feature 81..1112: note = CDS
  misc_feature 1113..1379: note = RE
  misc_feature 1137..1367: note = bridgeRNA
tgatgctgtggacggctcctccgtcggcatcgcaatgtgccatggaggtttttcaaccgccaaaaggggagccgcccgatatggaagttagcacgattggtttggatatcgcgaagagcgtttttcaggttcacgggattgatgcagcaggcaaggtcgtcattcggcggcagttgcggcggggtcagcttctgaagtttttcaagaagcttggcccctgtgtggtcgggatggaggcgtgtgccacggcgcatcactggggacgcgaaattgcggcactgggccatgaggtcaggctgatgccggcccactatgtgaaggcttacgtgaagcgcaacaagaacgatgtggccgatgctgaagccatctgcgaggcggtgacccgtccgagcatgcgctttgtcggcctgaagagtgcagaacagcagagcgtgttgatgctgcaccggacccgggagttgctggtgcgtcagcgcaccatgctggtcaatgccatccgcgggcacatggcggagttcgggattgtggccgccgctggcctgccccggatcaaggagcttctggcggtgattgccgatccggacgatcaccggcttacacccggtgcgcgtgcctgccttgaaagccttgcccgtcagcttctgtcgctcaatgaagagataggcgctgctgacaagcgtctgcacgcctggcaccggtcaagtgacctctcgcagcggcttgcgaccatacccggcatcggaccggttacggcgagcgcgctggccgcctccatcactgatcctgaagggttcagatcgggacgcgagatggcggcctggatcgggctggtgccgcggcagacctcaaccggtgggaaggtgcggctcgggcgcatctccaagcagggggaccagtatctgcgctggctgctggttgccggcgccatgtcggtcatccgccatgcccagcgcaaaggtgcagcaagccagccgtggcttgatgatcttatgaccaggaggccggcaaaggtggcggccgtggcgctcgccaacaagatggcgcggatggcatgggcgctgctcagacatggcggcacctatcgccagccaatggtcacggccagcccatgaggcgctgagcaggcaaaggagatcaacagtttggcgaggtgcaggtgaggtaatgcaacatcggtcgatacctgagggtcgggaaaacccgtttgggtcagggtgcatgatcagcccgtgcttttgattgggacccggcccccgcggatcgcattagggccagcggccataccaagcgccgcagcaacaggccggacacatgacagcactcgaccagtttgcaggaacttcaaaaaaacaccttgccaaaaccgagccgtccacaca

SEQ ID NO: 4954 - DNA, 1225 bp, unidentified
  source 1..1225: mol_type = unassigned DNA; note = element_78ee40e
  misc_feature 1..2: note = core
  misc_feature 3..226: note = LE
  misc_feature 227..1210: note = CDS
  misc_feature 1211..1225: note = RE
  misc_feature 12..198: note = bridgeRNA
cttgtatcttgtttcccgtggtggtgaggtgccaccacacgaggtggagagagcttgattcgctcctgaagggtgaaccttgatttgtagacgaagccctccgcctcactttccgccggacaccacactgtacggtagccaagggcctggaacccagtgaccctgcatggacaaggcaagtgggcgtgaaaggcgcaatagaatagacagataaggaggagttgccatggtttatctgggcatagatgtctccaaggccaagctggattgcagcctgtttgacccggtgacggacaagcgcaagaccaaggctgtcagcaacgacgcggcgggatttgcagccttgtcgacgtggctcgccaagcaaggcgttgctctgggcgaggtgcatggggtgatggaagccaccggggtttatcacgagcaggccgccctgtggttgtctgaggcggggatgcgagtctcggtggtcaatcccgcccaggtcagagattttgcccgcgggctggcagtacgcaccaagaccgacgggacggatagcacggtgttggcgcgctatggtgcgttgacccagccgcagctctgggaagcgccgccgctggaaattcgtgagttgaaagcgttgatcacccggctggaagctctggagaccgatgcgcgccgggagttgaaccggcgcgagaaagccctggccgccaaggcgccggtcttggttcaggaatctctggacaaccaccttgcctccttgggcaaggaaatcgcccggctgcagcaggcgattgacgaccatatcaaccgtcatccaggattgaacgcagatcgggagcgcttgctgtcgataccggcggtaggcaccaagactgccaaccggatgctggcggtgctgcatggccggaagttcgtgagcgcgggacaggtggcggcctttctgggcttggtcccggtcgaacaccagtccgggagcagcatcctgaagcgcccgcgcctggcgaagaacggggacgccaaaactcgggctgtgctttatatggcagccatcgtggcgacccggtacaacccgcacgtcagagcgctctatgtccggctgcgcgccaagggcaaagccaaaatggccgccgtcggcgccgccatgcgtaagctcgttcatctgtgcttcggggttattaaacatcagaccacttaccagcccaattgggtcgcgaaccgttgacaggaaagacggtat

SEQ ID NO: 4955 - DNA, 1504 bp, unidentified
  source 1..1504: mol_type = unassigned DNA; note = element_78f461b
  misc_feature 1..3: note = core
  misc_feature 4..136: note = LE
  misc_feature 137..1168: note = CDS
  misc_feature 1169..1504: note = RE
  misc_feature 1206..1381: note = bridgeRNA
aacatggggtaatcgcggcgcgatcgccccaggccatttttataagatgatggctggcgggggtggttgcccccgataagatggtaaaacgggctcacgattggaaccgggcccaaacatcgaacggagagcaaccgtggaccaatatataggcctggacgtttcattgaaagatactgcgatctcgatacgacaggacggtaagcggatctggcggggaaagtgcccgtcggatccaaagcttctggcgcagatgatccgcaagcatgcgccgcacgccaggcgcgttgtgttcgagacggggccgttgtcgacatggttctatcacgcgctgacggccgagggggttccggcgatctgcattgaagcgcggcacgcgcaaaaggtattggacgagacgctcaacaagacagatgccaatgatgcggatggcttggcgcaactggccgaagccggcttctacaaggccgtccgggtaaaggcggtcgacagcatgctgacgcgcacgcttgtggcgactcgcaatcagctcctgagaatctcaacccagcttagcaaccagatccgcggcctgatgaagacgttcggtctcatcgtccccaaagggacaggtcgggtatttgatggcaatgtgagggaactcctagatgggaatgacggcctggcaaggatcatattgcctctacttgaggcctggcgcgacatacgcaagcgcggagccgatcttgatcaccagttgctcgcagcggcgcggcaaagccaagagacgaagcttttgatgacaatcccggggattggtgccgtcacggccgtctcgtatatcgcggccattgaagatccagaaaacttcaaaacgtcgcgctcggttggcgcctggctcgggttgacaacgcggcgctaccagtcaggcgaggtggattatgacggccacatctcgcgaagaggcgacaaccatttgcggggactgctttatgaagcggcgaccgtgatcctcacgagaaccggtgccaggaacgagagcactctcaaaaactgggggctcaagctgcgtcagcggttgggcttcaagcgcgcagcagtggcggtcgcgcgaaagctcgcggtcatcatgcacagcatgctcaaaacaggagaagtcttcaacggattggctggcgcaacagcataagcgaggtgccagccttctcacctcagcgcgttaaacccgatttgaagcactgagtgtccctgctgcggacgtgggttggatcattccgttagcgcggctgcagctcactgagactgcgtcccaaacataggaagatcttacctgcgaagacccatcgtgcggcgaccctatatcgaccgcggagacaaccctgctcccagcaccggacagctctgaaggaaacatggccgctgaggcctgacccaaaccactcaactcccgccgcgtggcctgtctcgcaacacggcgcagatgccgaatgcccagaccaccttgacgaacggaacgcgattagac

SEQ ID NO: 4956 - DNA, 1330 bp, unidentified
  source 1..1330: mol_type = unassigned DNA; note = element_78faaff
  misc_feature 1: note = core
  misc_feature 2..229: note = LE
  misc_feature 230..1315: note = CDS
  misc_feature 1316..1330: note = RE
  misc_feature 6..219: note = bridgeRNA
cagtgaggatgtggcgtggtgacgctgcgggtgggtttgaccctgcgactgactgacgtctcgactgtcctgttggggatttgtcggctcgccgggcgtcaccacgcacgcggccggacgggcgtttgtgaccttataggagcttggtccagaagccccgtcactgtcttgtccacccgcccgaccggcgcgtgccgcccctgggaacggacacgccacaaggacggacatgaccagcatgacgcacgacggcccgcagatcaccggcggagtcgacacccacggcctggcccaccacgctgccgtgatcgacgggatcgggcggcacctggccggccgggagttccctgccaccatccggggttaccgggacctgctggactggatgcgcggccacggcgctgtcaccgcgatcggggtggagggcaccggtgcctacggggcggagctggcccgggtcctgaccgccgccggcgtcactgtcgtcgacgtggaccgcccggaccgtaaaacgcgcaggctgaagggcaagtccgacccgatcgacgcctatgccgccgcgaccgccgtgctgtccggccgggccaccggcatccccaagagccgggacggcgtggtcgaggcggtgcgcgtgctgcggatcgcgcgccgcagcgcggtcaaggcccgcacgcaggcgatgaaccagatccgcggcctgctggtctcggcaccagcgatgctgcgtgagcaggtcgcggggctggagcgggccacactgatacgcacgctcgcccggctgcggcccggggatgacctgtcccgcccgctggcggcgacccgggcgtcactgcgccggctcgcccgccgtcaccagacgctggacgccgagatcgcagaactggacatggagatcgtcccgctggtgaagcaggccgcccccgcgctgctggagttgttcggcgtcggccccgagaccgccgggcagctactggcctcggccggggacaaccccgaacggatgcggtccgagggtgcgttcgcgcacctggccggtgtcgcgccgatcccggcctcgtccggccgcacccaccgccaccgcctcaaccgaggcggcgaccgggccgcgaacaacgccctgcacaccatcgtgctcacccgcatgcgctaccacgagcgcacccgcgcctacgtcgaacgtcgcaccagggaagggctgaacaagaaggacatcatgcgctgcctcaagcgattcgtcgcccgagagatctaccgcgcactgaccaccacaccaaccgaaccaatcactcaaaccgacctcgccccagcggcttgacacccataggagcat

SEQ ID NO: 4957 - DNA, 1438 bp, unidentified
  source 1..1438: mol_type = unassigned DNA; note = element_78fcedf
  misc_feature 1..3: note = core
  misc_feature 4..150: note = LE
  misc_feature 151..1170: note = CDS
  misc_feature 1171..1438: note = RE
  misc_feature 1207..1437: note = bridgeRNA
agaatgagatgaacgctccccactccttaagttcggaactgcatgatggttgaatgagtgatatcagtgggtgtggagcctcgcagatttacggcatcatagtgcccaatcagggatccataagctccctcagactggagactccacatcatgaaatatataccggttggcgttgatatcgcaaaacatctgattcaggttcacttcatcaatgaacatacgggtgaagttgttgataagcagttacgtagtaaggattttctgacgttcttcagtaaccgggaacccagcctgattggtatggaggcttgtggaggttctcagcactgggcccgtgaactgaaaaaactggggcataaagtccggttgttgcaggcccgcttcgttaaagcgttcgtcatgggcaacaaaaacgacgtgatggatgcacgggctatctggatggcagtacagcagccatgcaaggaaatagccgtgaaaacagaagaacagcaatcagtattggtactgcatcgttcccgtaaccaactggtgaagttccgttctgcacagattaatgcgattcatgggacactgctggagtttggtgaaacggttcacaagggcaggactgcaatgagcaaagagtttccggcagccctggagcgcatgaaggcgaagctgccgccgtatctcatcactgcgctggaagatcaatacaacagactgagtgagctggacatgcagatagatggtctggaaaaacagcttaacagcgtggcgcgacagaatgagacctgtaaacggttgatggaaattcccggtattgggccgctaattgctacagcggcggtagctactatgggggaggcctcagcctttaagtccggacgcgagttcgctgcgtatatcggcctggtgccaaaacaaactggttctggtggcaaagtccgtctgctgggaataagcaaacggggtgacaaatatctgcgaaccctgtttatccatggcgcaagagcagcatcattactggcaaaagagccggggccatggatcacggaactgaaaaagcggcgtccgactggtgtagccatagtggcgatggcgaacaagctggcgcgaaccttatgggcgatagcggcgcataaccgtaagtacgataagaattacgtcagtatcaagcccatttaatcgctgatatcgataaatattaactactaacaaagagtgaataccaaaaggttgctatggcggccagagtgatgacaaagacggtaagaccgtgacctgataaacctgaataagtgcttgggcatgaagtccgtacggagaatgaggatcaggtcagcgaatctcatagtggcccgcagctctgactgcaataaggccggatacagagctgcaactactcgtcaatgtcagaacaacggaggccttgcaaacggggaggcgttcatac

SEQ ID NO: 4958 - DNA, 1380 bp, unidentified
  source 1..1380: mol_type = unassigned DNA; note = element_7902765
  misc_feature 1..2: note = core
  misc_feature 3..129: note = LE
  misc_feature 130..1092: note = CDS
  misc_feature 1093..1380: note = RE
  misc_feature 1141..1377: note = bridgeRNA
gaatggaatggacgcctccccccgtgagggggagttgaatagagagtaggtggaccctcacgggccgacggcatcaaagtgcccaaagtggaagaatgaaatcttcacaggcaaaccggagggtccgaaatgaatggtagcaaaaacgtagtcggcatcgatattgccaagcgggtgtttcagttgcactggatcgacatggagagcggagaaatcgtgagcctgcagctcaagcgcgagaagtttcttgaacactttgccaaccggcagtcgtgcctgatcggcatggaggcctgcggcggcgcgcagcactgggcgaggaaactcacggcgatgggccatcaggtcaagctgctaccgggcaaggcggtcaaacccttggtgatgggcacactggcgatcaagactgaagaacaacaggcgatcctggcgctgcaccgcatgaggagtcagctggtcaaattccgcaccgcccagatcaacggactgcggggattgctcaccgaatacggtgaagtcatgccgcaaggcaaggccggggtcaggaaaggcattactgaagcgctagccagactctccgatcgactgccggcgatggtcatcgacaccctgcgcgagcaatgggcgcgcattggcaagatggatgaagaaatcgccaccatcgagcaacgcatcaagcggtggctcaaaaacgacgatgcctgccgacgaattgccgagattcccggcgtcgggccactgaccgccacggcagcggttgccatcatgggtgacgccaagacattcaagtcggggcgggagtttgccgcctttgccggcctggtgccaagacagacgggcacggggggacgaatcaagctcttgggcatcagcaagcgtggcgatacttacctgcgcacgttgttgatccacggcgcccgatccgtgctggcccatgccaaagatcccgggccatgggtgacggaattacgccagcgccggccgctgaatgtggcggtcgtggcactcgccaacaagatggcgcggacgatctgggcgatgctcgcccatgagcggacgtaccaaaaggagttcgtgagtcagcctgcatagggcggcgcacaacgtgtatcaaccgcatcaaccactttgaagaaaggagtggccgccgtaaaggttgcgtaaggtcgataaaagtgtgatggcaaacaggtcagaccgtgacccgccaagcctgtatgtgttcaaggacttaaagtcctccaggagaatgaggcgcgggtcagcggattccatcagggccagcaggcatccgcctgcacaacaggccggatatagaactgcagcctatctgtcccaacacaccaaaaccgatcttggcaaacgggaggcgtccatata

SEQ ID NO: 4959 - DNA, 1393 bp, unidentified
  source 1..1393: mol_type = unassigned DNA; note = element_79176e8
  misc_feature 1: note = core
  misc_feature 2..88: note = LE
  misc_feature 89..1126: note = CDS
  misc_feature 1127..1393: note = RE
  misc_feature 1166..1385: note = bridgeRNA
caatgggatggacgcccccacctgtaacggcatcaacgtgccaaagtggaagtgtcaccaaccacttgaaccgagaggggcgtccaccatgaagattacgactgttggcatcgacttggccaagaacgtgttccaagtccacggcatcgacgagcacggcaaggctgtgctgaagaagcagttgcggcgcgatcagatggccaccttcttcgtcaatctgacgtcgtgcctgatcggcatggaagcctgcgggagcgcgcatcactgggcacgcaagcttcagagcttcggacacacggtgcgcctcatggcgccgcagtttgtgaagccgtacgtcaagacgaacaagaacgatgcggccgacgctgaggcgatctgcgaggcagtgggtcgaccgaacatgcgctacgttccggtgaagaacattgagcaacaagcggtcctcgcactgcatcgcgtgcggcagggattcgtgcgagcgcgcaccgcgcaagcgaaccagatacgaggcctcctcggcgagttcggcctaatcattccgcagggaatcggctacatcgccacgcgcgttccagagttgatcgaagatggcgccaacgagttgcccggcgcgttccgaatgcttgtacagcggctgctcgaccacctcaaggagctcgatcgccaggtcgatgaactggaagcaaagatccaggcttggcatcgcagcaatgacctcagtcgcaagctcgcccaggtgccgggtatcgggccgatcacggccagtgcgctggtggcgtccatcggcgacgcaaagaacttcgacagcgatcgtcaggttgccgcttggcttgggctcgtgcccagacaacattcctccggcggcaagtccaacctgctgggcatgagcaagcgcggagacacctatctgaggacgttgctcattcacggagcacggtcagtcatctatcgcgtgactcagaaggtggacgcttgcagcaattggattggtgctgtcgtgaatcgacgcaacaagaacgttgccgcggtggcgctggcgaacaagaatgcccggatcgtctgggcgttgctggcgcacgatcgacagtacgacgaagggtacgcgcgcaaggcagcaatggcttgagcagacatccgagcagaacaacgccagggggaacaaaccaccgattgcttaggcgatcatgaagtgatggcaagacaggtcagaccgtggttggcaaagcccgcgccggacgaggcacccagagtgcgtgtaagcgatcgaggcgtcaaccagcggatcccatcagggacagcggccaaaagccgcaaccaaagtccggatgtacgggtgcagtctttaccttcgaaccgtcatcaatgagagcctggcatagggggcgtccatgta

SEQ ID NO: 4960 - DNA, 1353 bp, unidentified
  source 1..1353: mol_type = unassigned DNA; note = element_791a840
  misc_feature 1: note = core
  misc_feature 2..62: note = LE
  misc_feature 63..1112: note = CDS
  misc_feature 1113..1353: note = RE
  misc_feature 1126..1347: note = bridgeRNA
taatgggatgacctgccccaccctccgagacattgttgatgtgtgatcaaaggaggaagcaaatgatcaggaatgcacctaaggaagctgccgtgttcggtgttgatctcggaaagaaccttttccacgttgtgggcctggatgagcgcggcagcgttatccagcgcgccaagttccggcgagacacggtgctggcctttttccaacgcgccgcaccaaccctggtggggatggaggcctgccctggctcgcagtggttcgcgcgcaagctgcaggcgttcggacacgaggttcggatcgtgccggcgcagttcgtaaagccattcgtgaagtcccagaagaacgacaccatcgatgctgaagccattgccgaggctgtaaccagaccaacaatgcgcttcacacaagtgcggaccgttgagcagatcgatatgcaggctctgcatcggatgcgagaccagctcgtctccagccgcacccgtctgatcaaccaagccagggcattctgcctggaatatggcatcgctatgcggcaaggcgtcggcaccttccgtgtcgatcttccgcgagtccttgccgatgacagcaatgacctcagccaggcgatgcgacagatgctagctgaagttctggacgacatcggccatgtcgatcaccgcatctcttctgtcacaaggcagattgaagcgctggcagatcgagaggaccgcgccaggcggcttatgacaatacctggcatcggcccgatggcagcgacagcgttgcttgcggctgttggcgacggccgtcagttccgacgagctcgagaactcgccgcttggctggggctgacgcccagagagcactcgaccggaggtagaacgacgttgctgggcatcagcaagcggggaaaccgatacgtcagaaagcttctggtccatggcgcgcgatcctgcatcacccacatgaatcgaaccaaagaccggatcggcgactggcttgatgctctggaaagcagaatgcacgtcaacaaggtcaccgtcgccctagcggcaaagatggcgaggatggcgtgggccatcatcgtgcggcccggcgccatatacgacagacgagatccggccgtagcctaaggggtactggcctgaagaaagcgaggctcgggatagtgatgacgaaacagtcgatcagcgcatcgtaagctctgtgcaaaaaagcgtgctcctgcacgaaccattttctgagaaccatgcgcgcggatctcatcatggcctgaccgcaacagcggtccactcgcgagaggccggatacatttaggcggactgccatcgtcagaacgaaatcgatccttgcccgggcggggcaggtcataca

SEQ ID NO: 4961 - DNA, 1392 bp, unidentified
  source 1..1392: mol_type = unassigned DNA; note = element_791f60f
  misc_feature 1..3: note = core
  misc_feature 4..85: note = LE
  misc_feature 86..1111: note = CDS
  misc_feature 1112..1392: note = RE
  misc_feature 1125..1380: note = bridgeRNA
atgatgtggtggacggcgcccgctcccggcaacgcattgccctagggtgatcgttgcgacgaatcacacgaaggagccgtgccctatgcagattacgacaatcggtttggatatcgccaagaacgtgttccaggttcacggcatcgacgcggccgagaatgtggtggtcagaaagcaactacgtcgcggtcaggtgatagcgttcttcaaagctctgccgccgtgccttatcggcatggaagcctgcgccacatcgcattattgggcgcgagaactcgccaagctcggtcatgaagtgcgactgatgccggcgaaggatgtgaaggcctatatcaagcgcaacaagaatgacgcggccgacgccgaagcgatctgtgaggctgtacgtcggccgaccatgcggtttgtagaggtaaagtcagcggagcagcaggcccagctgatgcaacatcgtgcccgcgatctgttgatgcggcagcgcacacagctgatcaatgccatgcggtcccacctggccgaacttggcattatcgctccgcaaggacgcgaaggggtcaaagagctgctggcgatcatctcgatcgaagacgacaagcatttgccgaacgatgcccgggcgagcctgatcgtgctggcggcgcagcttcaggccttgcagacgacgatcggcgcgatagagaagcggatcgtggtacagcatcgcgccaagaaagagagcaggcggcttcagaccattccgggcatcgggattattggcgcctctgcgattgccgcgacggtgacaaatcccaagatcttccggtcagggcgcgactttgcggcgtggatcggcctggtgccgcgacaaatgtcgaccgggggaaagccgaagcttgggccgatctccaaacagggcgaccgttacctgcgacgcatcctggtggtgggtgcggtttcggtcctgcgccgggccaagaacaacccggagaagtttccttggatcacccagatgctgacacgacgaccgttcaaggtcgtcgcggttgctctcgccaacaagatggcccgtgtcgcctgggcgctaatgatgagcggtaacacctgtcgagctgctcgatttgcgacaacgtaagaagcagccaaccgacgagagtggaagttgcgtgagtgtgttcacgatctgcaaggggtgatgacgacattgatgcgaaacggtcgagaccgtcgattgggaaaacccgttacaagtgccatgcgagacttgaacgcgtgcgattggttgggacccgatcagcggattacatcagggccagcggccacagcggccgcattcaaaggccgtatacatggctgcacccgacccgctcgttgaaatgtccgatttgcctcttgcaccgcgggcgccgtccatac

SEQ ID NO: 4962 - DNA, 1372 bp, unidentified
  source 1..1372: mol_type = unassigned DNA; note = element_79227c2
  misc_feature 1: note = core
  misc_feature 2..67: note = LE
  misc_feature 68..1114: note = CDS
  misc_feature 1115..1372: note = RE
  misc_feature 1117..1362: note = bridgeRNA
tatgggatggcccgctcctttcccccggcggtgtatagtctgctggggccagcgaaaggaaagtgccatgacgaaagagatcgcggtattggggatcgatctgggcaagaacagttgcagtctcgcggggttggatgcgagcggcgcggtggtgaaacggcgccggatgcggccggacagcgtgacggcctttacggcgaagatcccggcgtgtgtgatcgccatggaggcatgctgtggcgcccattatctcgggcggctgttggcggctcagggtcacacggtccggctgatgtcgccggaatatgtgcgcccgtatgtgaaagcgcagaagaacgatgatcgggacgccgaggcgatcgctgaagcagcgacccggccgacgatgcgctttgtagatctcaaaagcgaggaacagcttgacgtgcagacgttgcatcgggcgcgggatcgcctggtggtggaacgtacggcgctgatcaatcagctacgcgctatccttcttgaacgggggattaccgtgccaaaggggcggagcaagctcgcgcaatatctggtggggcggttcgatcagaacgacggaggtagcatcgcgttgtctccacgaacgcaagcgctcattgccgacatgcggaaggaatggcgcgaactggatcaccggatcgaggctttcgacgacgaatttgttgctcgtgcccgcgccgatgaggcggcccgcaggctgctttcgatccctggtatcggcccggtcaacgccaccgcgctgatcgccgcgatcggcaagggtgagagtttcggtcatggccgcgatcttgccgcctggctgggtttggtgccgcgtcagatcacgacaggcggacgaccccggcttgtcgggatcagcaagcgcggcaacaaatatctgcgcaagcagttgatccatggtgcacgctccgccctgccaggtctgctgaccagcgccacgccactcggcggatggctgcgggggctgatcaccagggtgcataagaacgccgtagtcgtcgcattggccaataagctggcacggattgcgtgggccgtcttacgtcacggcgacaaatttgacgccaaagccgttggtgtgacggtgtgaccgaaatcgaccggtgctgatatgatgatcggctaccggtccatgatgtttgcgggtggtggaagaaagatggcctgacagtcgatcggtgttctggaaatctgatgtgtggaatggcggacttgtcgccgacagaattatgagaaccagagcgcgcggatctccatcttggtcgagagcttgctctgaggccggatacgttgacgcagactgaccagtccatcggaaaaatcacttgcaggcggggcgggccatacg

SEQ ID NO: 4963 - DNA, 1484 bp, unidentified
  source 1..1484: mol_type = unassigned DNA; note = element_7928684
  misc_feature 1..2: note = core
  misc_feature 3..243: note = LE
  misc_feature 244..1464: note = CDS
  misc_feature 1465..1484: note = RE
  misc_feature 6..236: note = bridgeRNA
ctaatgggagctaccgggtcggccgccgctggcagactcggtgcctggtagccgccggggagtgagcacttccttcgcctggacctgtgagtcctggggtcagatcgtgccctctccggtggtcagggatcttgatcgctgatgggatgtcgtgcccgccgatcggtggcgtgagcactggtccattaggtcgcgaccgtccctgcgggctgctgatctgggtcgtggagtgtggaggccggtgtgctgttcgtcggagatgactgggccgaggaccatcatgacgtggaggtccaggactcagacgggaaagtcctcaagcgggctcggctgcccgaggggatggccgggatgtcgcggttccacgagctggtcggccggttcgtggccgccgatgccgaaccgtgcgatgtgggtgtgtgcatcgagaccgaccggggtccgtgggtgcgggcgctggtggcggcggggtacagggtgttcgcggtggatcccaagcaggcggcccggcaccgggagatcctggggtcctcgggggccaagagcgataagggcgacgcgcacgcgctggccgacatgctgcgcacccgccaccggcagctgcgcgaggtcgccggtgactccgaggtcgccgaggcggtcaaggtcgtcacccgggcgcatcagagcatggtgtgggagcgcacccggcacatgctgcggctgcggtcggcgctgcgcgagtacttccccgccgcgctggaggcctacaagcctctcggcctgacctcgccggcggtgctgcggctgctggccaaggcccccgcccccgccgcggccgccaagctcacggccgggcagatcgccgcagcgctcaccggccgccgcgacgtccacgccaaggccgcagcggtccagcaggtcctgcgcgccgagcacctggggcagggtgagatcgtcaccagcgcctatgcggccacggtccggtcgctggtcgcggtcatcaccaccctgaacgccgagatcaccgccctgcaagggcaggtcgaggcgcattttggccggcacccggacgctgagatcatcctgtcccagcccggcctgggaaccgttctcggtgcccgggtgctcgccgaattcggggacgccgacggacgctacacctgcgccaaggcccgcaagaactatgccggaacgtccccgatcacccggcaatcaggcaagatgcgcaccgtccacgcccgattcgtccacaacgaccgcctcgtcgacgccctccacatgcaggcctcctgcgccctcctgcacgacccgcacgtccgcgcctactacgaccagctcaaagcccgcgacatcggccacaacgccgccctccgccaggtcgccaaccgcctcgtcggcatcctgcacggatgcctcaaaacccacaccccctacgaccagacaaccgcctggtcacaccaccaccacgacctcgccgcttgacatccaacctccagggatgt

SEQ ID NO: 4964 - DNA, 1367 bp, unidentified
  source 1..1367: mol_type = unassigned DNA; note = element_792bcc6
  misc_feature 1: note = core
  misc_feature 2..74: note = LE
  misc_feature 75..1091: note = CDS
  misc_feature 1092..1367: note = RE
  misc_feature 1131..1363: note = bridgeRNA
taatgagatggtcacccccacaccctgcgagggctacgctttagcagggtgttttattttcggagggcatcatcatgagcgagttagcgctgataggtattgatctcggtaaacatacgttccatctgcacggccaggataagtcaggccgggaggtgtttcgcaaaaaatgttcacgggcgcaaatgatgcaatttttcgccagctcgcagagctgtgtcgtggcaatggaggcctgtgcggggtcgcactgtgttgctcgtcagttggcggcaattggacacacggccaagctgatttccccgcagttcgttaagcccttcgtcaagggcaacaaaaacgactttgtcgacgctgaggcgatttgcgaagccgcttctcgtccttcgatgcgtttcgttacgcccaagactgaatcccagcaaaccctttctgtgctccatcggatgcgcgaatcgttggtgcgtgatcgcaccagaaccgctaatcagatgcacggttttctattggaatttggcgtcagcctgcccagaggtttgaccatcatgaagcgtctggcggttgttttggctgagcatgaacttcccgttcgtctgacggtgctgctgcagcgtttgcacaatcacttcatctatctggatgagcaaattaaggcaatggataaagagctggcatgccaagtggccgacgatgatctgggtagccgtttgctgagcattccatgtgtcggcccgatcaccgccagcctgctagctgtggagatgggcgatggcaagcagtaccgatgcagccgggactttgccgcatcagtgggcttggtacccaagcaatacagcaccggcggtaaggccaacttactggggatcagtaaacgcggcgacaagcaccttcgacagttgctcgtgcaatgttccagggtctacatgcagagactcgatcaccagaaaggagccttggccgactgggttcgttcattgctgagtcgacgccactccaatgtcgtggcctgtgccttggctaacaagctggcgcgaatcgcttgggcgatagccgcgcaccatacgcagtacgaagcagggccaggcgcctgaacgcctgaacgcctgattcggcagttgttgctgtaccacgatttacctttcaggttttgcgatagctgaataatggatgacgtaaacggcctaccggcctgacgaagaacctgttttaaaaattggctcagcaagaagccgttagccttttcaggatcgttaggcgcgactctcatcatggcgcgggtgaatcatccaatagacgccggatagatttaagcaagccaactacttcgcccatgaatcagcattgcaaaaaagggggtgaccatagat

SEQ ID NO: 4965 - DNA, 2121 bp, unidentified
  source 1..2121: mol_type = unassigned DNA; note = element_7932a2e
  misc_feature 1..3: note = core
  misc_feature 4..227: note = LE
  misc_feature 228..1547: note = CDS
  misc_feature 1548..2121: note = RE
  misc_feature 13..199: note = bridgeRNA
ttccttacctcgttgctcgggcggttccggcgcagtcgtagtgtgtcgatcgtccgaggacggcggacatggctcagctgttttcgccgctgtgacggctcgtgaagaatggccgcccgccgtccacccgatggttcgaccgctaattgagagaagcgatagatcgctgcgtaaggaaaagtcggcgtgaccatcactaccacacgagggaagtgaagggagcggccatgccgcagatctgggccgggatcgatgcggggaaggggcaccatcactgcgtcgtcatcgacgccgacggcgccaagctccattccactcgcgtcgccaacgatgaggcggcgctgctcgagctgatcgctacggtcacggatctcgccggcgacgacgagtgcctatgggcgatcgacctcagcagtgggggagcggcactgatcctcgggctcctcgccgcccacgacctgccggtcgtctacatccccggtcacgccgtgcaccacgccgcgaaggcgtaccgcggcgacgggaagaccgacgcgaaggacgcggcgatcatcgccgaccaggcgcgcatgcgccgggacctgcaactactgaccgtcgcggatgagactcgcatcgagctgcgcgcgctgaccgcgcaccggaaggacctcgtctgcgaccggacgagggccatcaatcggctccgcgggcacctgctcgagtactttcccgcgctcgagcgtgccttcaactactccgccagccgcgcctcactcctcttacttaccggctacgccactccggacgcgatccggaagatgggggagtcgcgcctagcccggtggcttcgagcgcaaggctgccggagcgcggtcgcgaccgccgccaccgcggtcattgccgcgaagagccagcagagcgtgctccccgggcaggcgatcgcggctgaactggcccgccggctcgccctcgacgtcatcgctctcgaaagccgcatcacagagatagaccagctcatcgcaacgcgcgtcgagaccagccgtgccgccgagctcttgcgctcgatgccgggcttcggtccgctgctcgcagccgagttcctcgcgtcggccggcgcggacctgagcgtctacgtcagcgccgaccgactggccggcgtcgccgggctcgcgtcggctccgcgtgactcgggcaagatcagcagcaatcaccaccggccacgccgctacgacagacggctgctgcgcgcctgctacctcgcagcgatggtcagcgtgcagcagaagaccgagtcgcgagtcatttacgaccgcaagcgcgccgaggggaagtcgcacaagcaggccatcctcgccctcgcgcggcgccgcctcgacgtcatctgggcgatgtttcgcgatgaccgcccctatagttcaccgatcaaggaaggtcggggtgctaccccggtctcctctagtcgcacaggtcttcgtcaactactggagcctactcagggagattctggcttgagtgaaggtgttgtcccgttgagcgaccgttcgttcgttccaatatcttcctgaccggagttcgtctctcccgcacttggaactggcgcccgagctccgtccaatgcgtccatcgcccgaacgcccattcttcgcggaatacatccattcgaaggtgccgctcgcaccattgagcggcgaggtcggccaggagctctggcgccgcaggtgcgcccgacacagtgaggtctcgggacggatccgcgccgtggtggtcggcgaccagccatcggtctccccacgagccttcaaccaggggaaccccgtggtaatcctcagtgcacgccacccagagcaccgtcatgccgccggataggcccggcacgtcgatgcgagcccagaccgtgtcgggggaagcgtcgaagctggtgtcgctcggctgcacgtccgtatcccatgcggcagcgcggaggctcagttgcgtcaggaatgcacgggtgaacgagcttgtggatggaggcagctcgtccatcgagaaccactcggccgtcgtcatcatcagattatgcgtcacttcgaccagcgggggcgcaagaccggctggcgctggctgatggagcctgcggcactgttgacaacctgattgaga

SEQ ID NO: 4966 - DNA, 1362 bp, unidentified
  source 1..1362: mol_type = unassigned DNA; note = element_793e085
  misc_feature 1: note = core
  misc_feature 2..69: note = LE
  misc_feature 70..972: note = CDS
  misc_feature 973..1362: note = RE
  misc_feature 1121..1356: note = bridgeRNA
gaatgacatggattccccctcccgaggatctgccacacttatgtggtacttaaatgcatcggaggcaccatgtctgattattcttatttctgcggtatcgacctagctaaaaaccactttagtcttcatgccgtagaccaaaatggtaaggtcatacttcataagtcagtaacccgctctaaactactgactacaatagcaaatatgccactcatgcgtataggcgttgaagcgtgtggtggtgcacattattgggcaagaacactcaataaactcggtcacgacgcccgtattatggccgttaaatacgtaattccttatcgaaccaagggaaagaacgaccttaatgatgctgttgccatatgcgaagctgttcagcgaccatccactcgctttgtacccgtaaaatccccagagcaacaagccatcttatcggtacatagaatgagagagcattgggttcgtgaacgcaccgcgcttatgaatcgcatgcgtgccttactctctgaattcgggttgatcattcctgttggccgctcttcgttaatgaaacacgttcccttaatgctggaagacgcagaaaatgaactgccgcacctcgcaagaactgtgattgccgatgcctatcatcaccttggagaattgaatcaacgtatcgccgatactgaacaagtcttcgattcttttgctaaggtcagcaccaatgttcaacgagtgatgaaggttcgaggaattggaccgcaaaccgctactgcgatacttgcttcgataggcaatggttctcaatttgatcaaagccgtgatttttctgcttggctaggactcgtaccaaaacaatattccacaggaggaaaacctcggttaggccgaataaccaaacacggcgacaaatacttacgaacactattagttcacggcgcaaggaccgtgattgccaaccttggcgacaagcaagataagttaagtcagtagtgtcgcggcgttctagaacgaagaggaatgaaccgagcgatagttgcacttgccgcgaagaacgcacggattatatggtcgcttttacacaatcaaacagaatatgaaaactatgctgcttaagtaaaaacttaagcagcataaagagttaaacccaccgggtcattgcagacgctaatgatggagataggttaagaccacttgcggagagcctgttaatgcggcggacacactagatgtcatctaacgaataaggcaccgcagtcgcgcaagtcatcagggccacgacgtatgcgaatcgtcgataagtaggccgaatgtagagcggcagtccaaaacccatcaacataagtttagcggatgtttgacaacctggggggaatccatgta

SEQ ID NO: 4967 - DNA, 1307 bp, unidentified
  source 1..1307: mol_type = unassigned DNA; note = element_7953fb2
  misc_feature 1: note = core
  misc_feature 2..276: note = LE
  misc_feature 277..1269: note = CDS
  misc_feature 1270..1307: note = RE
  misc_feature 58..260: note = bridgeRNA
cctttggactttaaagggggaaaactatcaaagggcatattaatattattataatgggggtttccaaagggggtgtggaaaagtgcgaatttgtgtataactttaaaaagcagcagggtgaactatgagaatgactagtgcatttgcgtgaactttattttgtattagtccctgctgctttttaggttgcccaggtccatctagaattttcgccttcgtagcatcaaaggtctttgactaagcaaccattttttataaaatcctaaaagtaaaagtatggaaaaattcgcattttacattggagtggatgtatcaaaaaatacgctcgacgttcattgctctgaagtaaacaaacacattactatacccaacagctccgaagggttccgtatgtttcattccttctgccgagaaaatggtattgacctgaaaattacttttgttgcactggaatataccgggggatatgagtacaggttcattcaacatttacacgaaaagcaaatagcattcgcccgtatacccggtatagctattaagcactcattgggtattagcagagggaaaagtgataaggtagatgctaagcgcattgccacttatgcggaggagaagcacaaacagctttctattgaaaagccagtagataaggccattatagagcttaaagcgttactggctttcaggaaaaggctggtaagggaaaatgcagggtataagtcaagcattaaagagcgcaaacacatgtacggtttaagcaataaagattttatgatttccatattgctcaaaaaagaagctcataatactaagctcattgaaaaaatagaacaacaaattaccatgcttttaacgatgaatccggctgtgaaccacagctttaaactactaactagtataaagggcataggcaaagtaaatgcctggatgaccatcgcgtacactgaaaattttaccagcttccctaatgcccgcagctatgcggtttatgtgggagttattccctttgaccacagtagtggaaccagtataaggggaagaaaaagagtaagtcatttagccaataaagagcttaaacaagagctggcccaggcggcaagatctgctattgagtgggatacggaaatgaggctttatgcagagagaaaattaaagaataagcaatatggcattgtggtcaacaatgtaaaatttaaactcattttacggatgttcgctgttataaaacgtggagaaaaatatgtggataagcttgctaatgttgcctaatttgaaaataaatttggtggtttgcatatcctagaata

SEQ ID NO: 4968 - DNA, 1480 bp, unidentified
  source 1..1480: mol_type = unassigned DNA; note = element_79570f0
  misc_feature 1..2: note = core
  misc_feature 3..182: note = LE
  misc_feature 183..1226: note = CDS
  misc_feature 1227..1480: note = RE
  misc_feature 1244..1475: note = bridgeRNA
agatggggtaacgggctggggcttggcaagcaagccgctcgctcgctacggcgctttgtggtggcgcgctcgctcgcggcttgcttgccggctttgcttgaagggtggtcgtccctcaaactgatggtgtcaacaaacggagtcgggctttcgcctgctccaagcatcatcgagggacgaccatggaccattatgcaggaatcgacgtgtcattggaatactcgagcgtttgcgttgtggatgcgagcggcaagatcgttcgggagggcaaggttgcgacggagccggaggtgctgatggcttggctgggctcgcttggttttgacatggcgcgggtggggcttgaggctggccccctgtcacaatggctttatgcggccatgcagaagacgggcctcgcggttgagctgcttgagacacgtcacgtgcgcgctgctttcgaggcaatgccagtgaagacggaccgcaatgatgctcgcggcattgctcaactgatgcggctagggtggttccgccctgtgcattgcaagtcgctccccgcccaggaggtgcgcgcgctgctgaccgcccgcaagctcgtgcaatcgaagctctttgacgtggagatgagcctgcgcggcattctgcggggattcggcctgaaggtgggacggaccacgccgaagcgctttgcggggcggatcagggagctcgtggccggccatgcgaccctggaggtcgtggccgcgtccttgctggcggttcatgaggttatgcggcgcgagttcggcagcttggagaagcgggtgcggtcaatggcgcgcgaagacgcgcgggcgcgactgttgatgtcggcgcccggcgtcggtgcgatcgtggcgctcacctatgtgtcggccgtcgacaatccgaggcggttcacatcgtcgaaagggatcggagcgcatttcggattgacgccgaagaggtaccagtcgggcgagagggatgtcaccggccggatcagcaagatcggcgatgcctcggtccgtgccgcgctctacgaggccgctcatgtcatcctgacccgtccggtgaggggctcggccctgaagagctgggccgccaagctcgtcaagcgtgccggcatgaagaaggccaaggtggcgcttgcccgcaagcttgcggtgatcctgcatcgcatgtgggtcgatgggagagagttcatcttcactacgcccaggaatgctgccgcggcggcggcgtaaacaaggagagatcgacggttttcgggcgggtcacgacaccagccgtcccgaagcgaagtcccgacgccgggacgatggatcaggtcaggccgccatccgggatgtggcatcacgaccacgcgcaccgtagattggccgacctatcctcatcgaaccccatcaggtggcggccacgcgccgaccccggacagaagcaagttcccggcgattgggatgacgcaaaaagggattgaccaaccgaggcccgttacaga

SEQ ID NO: 4969 - DNA, 1252 bp, unidentified
  source 1..1252: mol_type = unassigned DNA; note = element_795ab3d
  misc_feature 1..2: note = core
  misc_feature 3..244: note = LE
  misc_feature 245..1237: note = CDS
  misc_feature 1238..1252: note = RE
  misc_feature 3..189: note = bridgeRNA
cttgtatgttgaaccttaatgaattgataataaaaccagtttaccggggaggctgtccgtaccttgaggctgtttattctgacctcgttcgtagagtagccccccgcctcattgctcaactcgaagagtatccggaagccttgtattacaaggacttcgcatcacaaggtcgagccgggcatcaagtgcgaggtcggggagccggtgactattctggcctatttgatgttcaaaggggaagcatatgagtggttttgttgggattgacgttgctgcgaagactgttgatttggtagtcagagatgatgacaaaaccagtaagtccgaacagttcagccaaacacctgatggccatgctgctgtggtgcgcaagctacaaaagctagcccctgaactcatcgtgatggaagcaaccgggatttattatctcgaccttgcggtggcgttagcgaaggcaaatttgcccgtggcagtgattaatcccaagagttttcatcactttgcagcgcttaagcttaatggcaacaaaacagatgcggtcgatgctgcactactggcagagttcgcgcagtgcatgagaccgcgcttatggacgctgcctcaagatgaactgcttggacttcgcgatattggccggcagctcaaccggttaacaggcagtcgcactcaggcaaagaatcgtttgcatgcgttgatgtccaaagggatgacgttgccaatgctgattgaagacgagcaggaaggcattgagcaactggaacgacgcatcaaacgtctgactcaggcagctttgacactgattgtcagtaatgaaatcttagctgcacactttgaccgactgacggccgccaaaggcattggcgagaccagtgccatcgcgatattggcggagttgtgcgtattgccatcgacgatgaaagccccgcaggtcagtcgttatgcgggactggacgtacgcaaaaccgaatctggtagcagcgtcaacaaacccgggcgcctgagcaaagcgggtaatgcctatctgcgtgcagctctgtacatgccagcaatgagcgcagttcgtcatgatgtcagagccagagcgttttatgaggcgttaaccgggcgtggcaaaaagaaaatccaggcacaatgcgccgtaatgcggaaatatctggttggcatctgggcctgcatgcagacccagactaccttcgactcaagtttgttgttcagcgaaaagcacctgaaccattgaccggaaacagagtat

SEQ ID NO: 4970 - DNA, 1429 bp, unidentified
  source 1..1429: mol_type = unassigned DNA; note = element_796baad
  misc_feature 1: note = core
  misc_feature 2..128: note = LE
  misc_feature 129..1148: note = CDS
  misc_feature 1149..1429: note = RE
  misc_feature 1189..1428: note = bridgeRNA
atgatatgaacgcctcccacccgtgagcggtggaagccggaaagaaggcggagcctcgcgggccaacggcatcagagtgcccagatggaagaccatagaggttttcctggcaaaccggaggctccgaaatgaagcatacgacagtgggtgttgacattgcaaagaacgtgatgcagctccattacatcgacgcagagacgggcgagattgtgaacaaaccagtaaagcgggcagcgtttctggagcacttcgcgaacctggctccgtgcctgatcgggatggaggcctgcggcggttcccagcactgggcgcgcaagctgatggcgatgggtcatcaggtgaagctgatgccggggaagttcgtcaaggcgttcgtgatgggtaacaaaaacgatgcggctgatgcgcaagcgatctggatggcggtgcagcatgcgagcaagtcggtcgcggtaaagaccgaaacccaacaggcggtgctggggctgcaccggatgcgcgagcagttggtgaagtttcgcacgatgcagatcaacagcctgcgcggcttgctgaccgaatacggtgaagtaatggccaaggggcgagcggcgctggacaaggcgattccgggtgtacttgaacggctgtttgatcgtctgccgacgatcctgatcgacacgctgcgcgagcagtggaacggcctgacggaactggataaacagattgcccagatcgaacggcgtctacaggcatggatgaaagaggacaaggcgtgcaaggcaatcgctgcgataccgggtatcggcctgctgacggcgacagcgactgtcgcgacgatgggtgacgcgaagacattcaaatccggccgggagttcgcagcctggatcgggctggtgccgaggcagacgggcacgggcggcaaggtccagttaatggggatcagcaagcgaggcgatatgtatctacgcaagctactgattcacggtgcccggagcgtgctgtgtctctcgaaggagccgggggggtgggtccagggaatcaaaaagcggcgaccgatgaatgtggcagtcgtggcgcaagcaaacaggatggcccggaccatctgggctatcctggctcacgacaggcagtacgacaaggactacgtaagcgtaaaaccggtttgaccggtggactctacgtagaaggaatatcaacttttacaggatgacacgtcgaaaggttgcgctggcaatcgtatgcgatgacaagacaggtcggaccgggactcgctaaacctgaatgatgtatcgagcttcaagctcgcggagcaaatgaggtgcgggtcagcggatttcatggtgggccgcagcgtatcaggctgcaacaagcccggatataaagctgcaacccatcctgttcggtcgaaacacacgagaaaccttcgcaaacgggaggcgttcatata

SEQ ID NO: 4971 - DNA, 1162 bp, unidentified
  source 1..1162: mol_type = unassigned DNA; note = element_7970815
  misc_feature 1..2: note = core
  misc_feature 3..215: note = LE
  misc_feature 216..1148: note = CDS
  misc_feature 1149..1162: note = RE
  misc_feature 27..191: note = bridgeRNA
cttgtatcttggcatttcagccggtgtgctgcaaaacagtgcggctgcgagatcctcgaagcggctggtcctggctcaaagccaaggccgagttgtagtttgatccgcagccgcgcagttcttttaaactcgaacagttactggagcgaccaggccgcctcccaggtggggcaagcggcccggccagctcgaatacaagcaggagttatttacctatgaagcagaccattgtctatatcggcattgatgtagccaaagctcacttggatgtggcgtggcaaaaacggttgcgtcgttttgacaacgacaaggcaggcagagcgactttagtcaaatggatcaaacaaaagcagtctgaccctgttcaggtcatctgcgaagccagtggcggttacgagcaagagttgctcgacgcgctggctgaggctgacctggcgttcagcctggtgcaggcgactcgggtgcgacaatacgctcgggcggctggcatcctggccaagaccgacaaagtcgatgcccgtgtgctagctcgctttggggcagccatgcggccagagcccacctccccgcgatccgctgcacagaagcttttgcgcgaactggaagcgcagcgtcggcacttaagcgaccttttagtagccgagcaaaaccggctcgagcaactcaatgacgaaaagttgcgccgcttaacgcgtgctctgatgggcaccttaaaaaagcaaatcgccctgatcgactcccgcatcgccactttaatcatgcaggaccaagaactctgccaaaaagcccaaaaactcaccagcgtcaaaggcgtcggagagcgcaccgccgcactgctgctagcgcagatgcccgagctgggcacgctcaatcgacgggaagctgccgctctggcgggcttggcaccttttaaccgcgacagcggcaccatgcgtggcaagcgcttgatcttcggaggacgccgggccgtacgccacggcctctacatggctgcactggtggcgagtcgtcgcaatccaatcctctcaagcttttaccggcgtcttcgcataaaagacaaaccacacaaagttgccctcaccgcggtcatgcgaaaactcctcctcgccctcaatcaggccttaactccaaaccaatccttcacttgaaaacaagacagtta

SEQ ID NO: 4972 - DNA, 1382 bp, unidentified
  source 1..1382: mol_type = unassigned DNA; note = element_7975646
  misc_feature 1..2: note = core
  misc_feature 3..86: note = LE
  misc_feature 87..1118: note = CDS
  misc_feature 1119..1382: note = RE
  misc_feature 1166..1371: note = bridgeRNA
tgatggtgtggaacggcccttcgaaccggcatcaaaagtgcctaacgtggtcgcgttaataggcgccacaaagaaaggaccgttccatggagaagattatcacggtggggttggatttggccaagtcgatctttcaagttcatggcgtcgccgataacggccaagtcttggttcgtcgtaccttgcggcgatcccaggttctgccgttctttcgcgggcttcccgcctgcttggtgggcatggaagcttgtgcgagtgcccatcactgggcgcgcgagatcgcagcgctgggccactcggtccgcctgatgccgccggcctacgtgaagccctacgtcaaacgcaataagaccgacgcggcggatgcagaggccatctgcgaggcgatcacccgcccgacgatgcggttcgttccggtgaagactgccgaacaacaagcagccggcatggttttgcgaacgcgagagatgctaatgagacagcgcagtcagacggcaaatgccttgcgcggacatatggctgaattgggtattatcgccgggaccggcatgacaagcatcgcaaaactcttggtgcttctccgggatgagaaagacagtaggattcccagcgccgcccggtttgccctgatccagttcgctgagcagatcgagttgctgacaacccgcatagaaaagctcgaccgggagattttagcggccgtaagacaggatcctcatgctagacgacttatgagcatcccaggcgtcggtcctctcatcgcggccaccgttcggacatccgtcctggacgcacgcgcctttgcggctgcgcgagacttcgcggcctggacggggctgacgccgagggcgcaatcaagcggcggaaaagatcggctcggcgcgatatcgaagcgcggaaatcggcaactacggacgcttttgatcgttggtgcgacctcgatcatcaagcttgccaaacgaggcttgaaagtcccggtctggattcggaccatgctccaaagacggccggtcaaggtcgtatcggtggcgcttgccaacaagattgcgcgcaccatctgggctttgctggtccggggcggcatttatcaggcgccaaccgcaatgctaaaatcctaatctgaagagctctccggcagaagaaaaggactgccgaggaggcaaggtgtaaatctggatgaaccccgaatgacgccattcccggcagtaatcagaccgcctgactcactgcgcttcgagcgcgagaaattgattgggcgattgcttccgcggatatcatcgtggccagcggccaggtgccgtgcttacaggccgaacatatgaccgcaccgtcatccctcgttcaaccggagaaagatcttgcagcccgggccgttccacata

SEQ ID NO: 4973 - DNA, 1658 bp, unidentified
  source 1..1658: mol_type = unassigned DNA; note = element_79827c1
  misc_feature 1..2: note = core
  misc_feature 3..296: note = LE
  misc_feature 297..1535: note = CDS
  misc_feature 1536..1658: note = RE
  misc_feature 13..316: note = bridgeRNA
ctattacaatagatttacggttagaggcacggcagccagccgtgtctttttccgcattattgccaaagctgttagaatgggaggacattggtctgacgttcaactccaaggactgacacgtccgatcgaaagtccgtcagccagcctctcattcgcagcgttcgatttatgcaggtagaaccgtcccgttggggcagcaccgccccggcccggcgcgtccgtgtcatcaaatagatagaatcggcaatgatggaaaggctggtcgccaatcaaatctacgatgggagtgttgcgcaatgaacgcggcagggattgatgtttccaaaggcaagagcatggtggctgtttatcgcccctttaacgagatggtggcaaaaccttttgaggtgcgccacaccggcagcgaactcaagcagctggcggactatctgaaaagcctggacggtgagacgcgggtagtgatggagcacaccgggcggtactatgagcagatcgcccagtaccttcatgacgaggggatctacgtcagtgcagtgaatcccaagctcatcaaagattatggaaccgggaacaccctgcgccatgtgaaaaccgataaggccgacgccaagaaaattgcaaaattcggtattgacagatgggccgaactgcgtcaatatgcttctatggacacgattcgttaccaactgaaaatgctgaaccggcagtgtggcctgtataccaagaccaagacgatgatgaagaacaacctcatcgccctcctggatcaaacctatcccggcgtaaacgccctgttcgacagccctgtccgggaggatggaacacagaaatgggtggattttgccgcgtcattctggcacatagactatgtgcggggtatgagccagacggctttttccgagcgttatcgaaaatggtgtaggcggcacggctacaacttcagcagtgataaggttgttaaaatctacagcaaggcgcaggatcaaatcgccatgatgcccaagaacgccttaaccaagctgctggtaaagcaggcgattgatgcccttaatgctgtttccgccacgttggaacggctcaaggccgagatgctccaactggcttcccagcttcctgagtttcctgtggtgatggccatgcgcggtgtaggcgattccctcggcccccagctcatggcggaaatcggggatgtgacccgtttcgcccaccggggagccattacatccttcgccggtgttgatcccggagccaaccagtccggcgcccatgaggccaagagtgtacgaacctccaagagcggatcacccgagttgcgcaaggacctgttcctggtgatggactgcttactgaaaaccgcaccgccaaacgacccagtgttccttttcatggacaagaaacgtgccgaaggcaagccctatctggtctacatgaccgctggtgccaacaagtttttgcgcatctactacggcagggtgaaggagtatctggtctcgttggagacttctcctgcgccggattccagcggacacatttgagccttgccacataactccttttcaggccgacgcttcggtggcggcctttttgttgtactctttttatcccctccacttttcttcgtttttccgcaaatttccccttgactttttatttgcaga

SEQ ID NO: 4974 - DNA, 1347 bp, unidentified
  source 1..1347: mol_type = unassigned DNA; note = element_7989f64
  misc_feature 1..3: note = core
  misc_feature 4..78: note = LE
  misc_feature 79..1101: note = CDS
  misc_feature 1102..1347: note = RE
  misc_feature 1120..1337: note = bridgeRNA
tgatgatgtggacgcccccgcaccggctgcggctatgatgccggcctgtcatccgaagcagcaagaggagcattcacgatgaagatcactatcatgggattggacctggccaagaacgtgtttcaggcgcatggcatcgacgagacaggcaacaccgtgctcgtgaagcggttgcatcggaagcagatgctgcccttcttctcaaagctaccatcatgcctgatcgggatggaggcgtgcggaacagcgcatcattgggctcgcacgctcgcggcgatggggcacgaggtccggctcatcccgccgtcctatgtgaaggcctatgtcaagcgtggcaagagcgacgcgctggatgccgaagcaatctgcgaagccgtgcagcgcccgacgatgcggttcgtgcctgtgaagacggtggagcagcagggcattctcatgacccaccgcgcgcgagcgctgctcgttcgccagcgcaccatggtcgcaaatgcgctgcgggcgcatttggcagaattcggccttgtcgccaatcccggcattgccaatctggccaagctggcgcagcaagcgctgtccgatgaggacggcctaccttcttatgcacgcacttcgctggatattctgatccggcagatcatggtgtttaccgatgagattgcggtgctggatcagcaacttcacgcttggcatgtcgacagcgaagccagtcgtaggctcgcagcgatccccggcctcggcgtagtcacggccacggctgttgctgccaccgtcaccgatcccgatcaattccgttcaggtcggcaatttgccgcttggctcggcctgacgccgcaacagcattcgacagggggcaaaacccagctcggtggcatctccaagcaaggagaccgatatttgcgccgattgctggttgtcggtgctaccgccgtcatccgtcacacgaaggacaaggcaacacccatggcgaattggatcagaaagctcttggagaaaaagccgttcaggctcgtctccgtcgcgctcgccaacaagctcgcgcggatcgcatgggtcgtactgacccgaaaggaagcttatagggctcatgagctgacggcctgagttcgatcccagacaacccgaattggtaacggcagtcgatgatgtgtaacgatcgagccaatggtgaggccaacccgtctgattcaatgcgcttcaaaagcgcgccagcttgatcagggacctcaccggcggatttccatcagggccagcggtcaaactctacgccgcacaaacaggccggacatatgaaagcaaccgatcaaaccatccccgacaaaaggcccttgccataggggcgtccacata

SEQ ID NO: 4975 - DNA, 1435 bp, unidentified
  source 1..1435: mol_type = unassigned DNA; note = element_7991895
  misc_feature 1..4: note = core
  misc_feature 5..224: note = LE
  misc_feature 225..1418: note = CDS
  misc_feature 1419..1435: note = RE
  misc_feature 1..228: note = bridgeRNA
ccccgttaccttcttcgtggtccccgggtggggactcctggccgccaggtccggcatgactttctgcccctgtcatcaatgatccggggggtgttgtcaccggtcctggtggtgtcggtggatcgcttatagggacatggccgatgttcgtgtcggtctcttcgtaacgtggctgccgagtgccgatgccatgctggccaggtgatctgagcgaggagttcaccgtggactatgacgtcgtcatcggcctcgatgtcggcaaggctgctcaccacgcgtgcgccctggatcagggtgggcgccgactcgtcgatcgagagatcaccaacaccgagtcgtcgctgcgcgccatcttcacctcgatggctgcccagggtcgggtgctcgtggtcgtcgaccagctccactcgatcggggcgcttcccgtcgcggtggcgcaggcgatgggcgtggacgtggcctacctgccggggctgtcgatgcggcggctcgcggaccttcatccggggaacgcgaagaccgacgctcgtgacgcctacgtgatcgcgcacgccgccctgacgatgccccacacgctgcgcgccctcgacgtcccgagcgaggcgcaagccgatctggcgatgctgctgggctacgacgacgacctcgccgcccaggtcaccgccgcgatcaaccggctccgtgggctgcttgtccagatccatcccagcctcgagaaagccttgggcgacaacgtcgcccacgccggtgtcctgcacctgctgatcaaggccggtggccccgacgggctgcgcacgatgggcaagacccgcatcgacaccaccctgcgcaagcacgccccacgcatccacgagcggctggccaccgagatctgggacgggctggccgcccagaccgtgatcgtgccaggcaccaccgccgcagcgaaggtcctgcccggcctcgccgctcagatcctccagctgcgagatcagcgcaaggagatcgccaaggacgtcgagaaggtcctcgatgcccaccctctcgccaagatcttgacgtccatgccaggagtcggcgtcaagatcgcggcgaggctcctggccgagatcggcggagacgtcaccgcgttcccgaccgccgcgcacctggccgcctacgccggcctggccccggtcaccaaacgctcgggcacctcgatccgcggcgagcaccccaaccggggcggcaacaaacggctcaagaacgccatgttcatggccgcgttcacctccctgcgcgccgaccccgccagccggacctactacgaccgcaagagagcccagggcaagaagcacaacgccgccctcatctgcctcgcccgacgcaagaccgacgtcctgttcgccatgatccgcgaccaccagccctacaccccctcacagcccgccgccgcttgacgaacgacatagggaca

SEQ ID NO: 4976 - DNA, 1407 bp, unidentified
  source 1..1407: mol_type = unassigned DNA; note = element_799ed3e
  misc_feature 1: note = core
  misc_feature 2..90: note = LE
  misc_feature 91..1119: note = CDS
  misc_feature 1120..1407: note = RE
  misc_feature 1177..1399: note = bridgeRNA
caatgggatggacgcccccacccgtaacggcatcgaatgtgccaaagtggaggtgttgtacaaccacttgaaccgagaggagcgtccaccatgaagattacaactattggcatcgatctggcaaagaacgtctttcaaattcacggcgttgatgcgcacagcaagacggttatcagaaagcaactcaagcgtgatcaggtggcaccgttttttgccaacttgcccacctgtctgattggtatggaggcttgtggcagtgcccaccactgggcccgcaagctgcaggccatggggcatacggtgcgcttgatggctccgcagtacgtcaagccctacgtcaagacgaacaagaacgatgtggctgatgccgaagcgatctgcgaagcggcgacgcggcccaccatgcgattcgtggcaatcaagacgatcgatcagcaggcagtgttggccttgcaccgggctcgccaggccttcgtccaggcgcgtaccgcccaagccaaccagatccgcggcatgttggccgagtacggtctggcgttgcccttgggcatccaccatatcccccagcgcgtgccggaactcattgaggacgggtcaatcgagctgccgggtcagttccgactgctgatccagcggctggtggagcacttcaaggagctgaatcggcaggtactggagcttgaggcccagattaaggcctggcaccgtgccaatccggccagttgcaagcttgagaagattcccggtatcgggccaatcaccgccagtgcgctggtcgcttccatcggggatgcccggcacttcgccaatggccggcaggtggctgcatggttgggcttagtgccccggcaaaattccaccggtggtaaggcaatgttgttgggcatcagcaaacgtggtgatacgtatctgcgcacgctgttgattcatggtgcccgatccgtcttagcccacgcttggcgccgagcagatcagtgcagttggctgcataggttggtacagcggcgcaatgccaacgtggcggcggtggctctggccaacaagaatgctcgggttatctgggcattgctcgcccacgaccgggagttccgagccgattacgtgtcagtagccccgtaatcgacccggttggcgtaaacagcgtcatcgtgcagttgcagtaagcagtaccagtccaccgattgctcaggcgatcacgcagtgatggcaagacaggtcagaccgtggttggcaaagcccgatcccttcgccgcaccttgagtgcgcgtacgcgatagaggtgccaaccagcagaacccatcagggacagcagcacaagctgcactcaaagtccggatgtacgggtgcaatctttacctctcaaaccatcatgaattgacagcttggcaaaacgggggtgtccatgta

SEQ ID NO: 4977 - DNA, 1428 bp, unidentified
  source 1..1428: mol_type = unassigned DNA; note = element_79a9fc9
  misc_feature 1: note = core
  misc_feature 2..90: note = LE
  misc_feature 91..1131: note = CDS
  misc_feature 1132..1428: note = RE
  misc_feature 1198..1423: note = bridgeRNA
taatggaatggacgcccactaccctaaacggcattgaagtgccaaagtagtggtgcaataaagcccaccaaatagaaaggagcgtccgtcatgaagattacaacgattggtattgatttagcaaaagaagtatttcagattcacggggtagatatgcatggcaaagcggtgctacgcaagcgactgcgccgtagcgagatggtgaggtttttcgtcaatcttgagccttgcttgattggtatggaagcctgcggtagttcacactactgggcgagaaagctgtgcgaatttggacatactgtaaaactcatgtcaccccagttcgtaaagccctatgtgaagactaacaaacatgacatggcggatgcggaagcgatttgtgaagcagtaagtcggcccaacatgcgttttgtgccgatcaaaaacgttgagcagcaggccatcctgtcggtacaccgtgccagacagggtttcgtcaaagccagaaccgcgcaggcaaaccagatacgaggtttactctctgaatttggtattgtgatacctcagggcatccgatccatccacaagcgtatcccggatatactcggagatgccgagaacggtttaccaggctccctgcgccctttattggaaaaactgaatgatcacctcaaggaattgaatcgtcaggtggaggaactggagttgcagatcaagctgtggcataaggagaatgaagccagtcaaagactggaagccatccccggcattggtccgattacggcgagcgccattgttgcaactgtgggagatgccacggaattcaagaacggcaagcaattatcggcatggttcggactggttccaaagcaacgctccagcggaggcaaacagacgttactcggtatcagtaaacgtggcgatacttacttgcgcacattgctgattcatggagcgcgtgcggttgtacgatttgctgagaacaaagctgaatcagaaagctggttgcgcaaactgataatacggcgaaacaagaatattgctgccgttgcactggcaaataagaacgcgcgtattatttgggcactgctcgcgagagacactaaattccaccctgatcacactctggcactggtcgccgccagagcttgatcggggccagctgaataaaaatgtactggtaatattgtaataaatcgagtttaaagataaaaactttcattgattgcacaggtaatcatgacgtgatggcgagtctggtcagaccgtgagtggctaaacctatattaaaccaagtgcatagagcacgttgacgtgataaggaactactcagcaaattccatcagggacagaggcaaacgcttcgcacagagtccggatgtatggctgcaatctcgtaccttctcaaaatcatcaattgaatgcttggcaaatgtgggcgtccatgta

SEQ ID NO: 4978 - DNA, 1287 bp, unidentified
  source 1..1287: mol_type = unassigned DNA; note = element_79ad03d
  misc_feature 1..2: note = core
  misc_feature 3..234: note = LE
  misc_feature 235..1275: note = CDS
  misc_feature 1276..1287: note = RE
ctgacttgttcaatcgggcccagacgctcggtgtgcagccgtagcgtcccgggcgccggtcggcatgggctcgcgtttgtcccttgccgctccagccgggctggctcatgaatagcgtgccatcgtcggccggcacccacgcggtgtggctcgacagaggcatgaacgtgtgtaaccgctacttcaagtcagggtgcccaccgcctgtttctgcccctgcgagtccaggtcaggttgcgcttgatcacgatcgggatcgatccccacaagtcctcccataccgccgtcgccatcgacgccgcgggccacgagatcggccagcggcgtctccgcgtcaacggcgggaccttcgaggccctgctgcgctggtgcgagcagtggcccacgcgtcggttcgcggtggaagaggccggcggcctcgggcgcactctggctcagcaattggccgcggccggtgaggatgtcgtcgatgtgccctcgactctgtcggccagggcccgatttctggccacgggcggagaccgcaagaccgacccggccgatgccctgcacgtggctcaggtcgccctgttccgcaccgacctgcacacggtgaccgcagaagaccagaccacgatcctgcggctcctgaccgaacgccacgatgacctggtcaatgagcgcacccgcgtcatcaaccgcctgcacgcgctgctgcgtgacctgctacccggaggagccccgacctggctgtcggcggacaaggccgcaaccctgatgaagcgtctgcggccgatcacggccaccgagtgctgtcgccgggacctcgcccgcgacctgctggctgatctccgccgactggaccagcggatcaagagcaacgaagcacagatgcgcgacgcgctcgccgccacacacaccacgctgacatcgctaccggggctgggcaccgtgctcgccgccaagatcctcggacacgtcggagacgtcacccgtttccccaccgagcatcactccgccagctacaccggcagcgccccgttggatgcctccagcggcaagaacacccgccaccggctcaacaccgacggcaaccgggcactgaactcgacgctgcacatcatcgccgtctgccagatccgcgatagcggccgaggccaggactactaccagcgcaaactcgccgagggcaaaacctccgccgaagcccgccgagccctcaaacgacgactgtccaacgtcgtctaccggaccctccaacgagatcgacgaaggcaacattcagcagccgcttgacacacagaggcg

SEQ ID NO: 4979 - DNA, 1215 bp, unidentified
  source 1..1215: mol_type = unassigned DNA; note = element_79b30b7
  misc_feature 1: note = core
  misc_feature 2..212: note = LE
  misc_feature 213..1184: note = CDS
  misc_feature 1185..1215: note = RE
  misc_feature 35..202: note = bridgeRNA
tcttaagtttgtcttttaataaatttgatacttaatcataaagaacccaagagatgaataaggttatgatatacgtagagactttagatcccttcaacattgataatcccatctcttttctatgtaaaattcgttcagttctatgaagctttagacttcgattttaagttgttgaattcacaataggttggttctttacaatcctttttaatatgactaaagatagaaattattttggtatcgacattagtaaagatatcattgacgtttgtgatgataatgggaatcattatcgatttaaaaatagtttatcaggctttaaaaaattgcataaacttatagatgtaaccacagtttgtgttatggagtctacgggttattatcatgtaaagcttgcttactatttattggaacaaaaccacaaagtaagtattgtaaatcctctaaagattaaacgctatatccaaatgcaattatctaagataaagacagataagagtgattcaaaaatgatacaagcatatggagttgcttgtaatccaagtttgtggttaggacaatctaaaacccagcagaatagtttgcaactatcacgtttactgagtatgtacgtgaaacaaacaactcagctaaaaaataagattcatggcgaggaagtactaggatttccatcaaaggatgttgtcaggtctttaaacagacaattaaaaaatctaaaaaaggaaatagaagtattggaagaaaaactgcttaagaatgtaaaatcagaatatcaagaatcattaacattattaaaaaccatacctggtattggagataaaacagcgctgatgttattggttttcacagatggttttcaacgatttactagctcaagggagttatgcagttatgctggaattacacctattattaggcaatctggaacaagtataaatggaaggcctagaatgagtaaaatgggaaatccaaaactcagaaatttattatttatgtgcagttttaatgcctgtaaatataaccaaggctgcaaagcactttatgatagaattgtggctaaaggaaagagtaaaaaattagctttgatagctgtttgtaataagctgttaaagcaagccttttcaattgtaaaaaatagaatgccatatgatgaaaactacaaaagtgttttggtaaataattaatagaatattatttgttttttacctcagttct

SEQ ID NO: 4980 - DNA, 1195 bp, unidentified
  source 1..1195: mol_type = unassigned DNA; note = element_79b6940
  misc_feature 1..4: note = core
  misc_feature 5..219: note = LE
  misc_feature 220..1188: note = CDS
  misc_feature 1189..1195: note = RE
  misc_feature 41..209: note = bridgeRNA
tcatcctatgtttgtataattattaaattagacaattaaccaagaaaagtaaaatgggtaaagaacaagactgttgttcgtcatttgtcattaagaccgttcgcaatgttagtcactttacccttctatttaaaacttgaacagatcattaggccaattgagcctgtatttaggattgataagtaacaagtagtatgcttttcgaataaaatattcattatgtgtaaaataataggaatcgacattagtaaagaaacttttgatgttggatttataaatgattccaaatggtgtcattttgtatttgagaacactgaaaaaggttttcgcaagttattaaaagaagtagatttaaccgactggattgttatggaagcatcgggaccttattatcttcagttagcattatttttttacaagaagcaaataaatgtatctgttttaaatccattaataataagaagatatagtcaaactagactgtatagagctaaaacagataagaaagatgctcaaacaatcgcagagtatggagctcaatatgatttaaaaaaatggaaacctgaaacaaaaagtatcattgaaatcaaacagctttatactgctttggaactaattcaaaaggagataaatcaaagtaaacggcaattagaagcatttacctcggcaggggtactatctaaagacttggctactactttaaaatcaataattaaatttttaaaagctaaaagcaccaagttagaacaacaaatagaagtcaaagcagagcaattttacaaatcaactttagaacgtttaaagagtattcctggtataggaactaagacagcaatcatgttaacagtcataacaaatgattttgaaaaatttgaaaaccacaaacagctcattgcttatgtaggttttagcccaaggctctatcagtcaggtacaagtgtaagagggaaagggcatatttgtaaaatgggaaagtctcaaataagaaaattaatgtacctgtgtagttggtctgcgaaaagatgtaatcctgattgtgtcaaaatgtataatcgacttaatgaaaaaggaaaaccagagcgggttataaaaatagctttggctaataaattattaaaacaggctttttcaatagtaaaaaaccaaacatattattctgaaaaatttatagataaagcttgtttttaaacacaga

SEQ ID NO: 4981 - DNA, 1363 bp, unidentified
  source 1..1363: mol_type = unassigned DNA; note = element_79b8113
  misc_feature 1..2: note = core
  misc_feature 3..168: note = LE
  misc_feature 169..1329: note = CDS
  misc_feature 1330..1363: note = RE
ctcgtgtattgtcaaaagagagagtataaaatgagggtagagggagtagccagtcgtcatgcgtaggcttagagcctgtagttcagattgggcacccttcttaacacgattgagagtaatggtcgaaaagaccgcaccttgtacgaggttgtgaaaggaggaaccctcatgttgtatgtaggagtggacatatccagtgaaagttttgacgtttgtttctatttaccagagaagaagaaaatgaaaagcatgaagtacaaacaagacagggaaggttttagggaatttctaaagaagctaaatgcttacaaggacgagaaacaagtcggaatggaagcgacgggttcgtatcacagcaacttgtacggatttcttaggagcaaagggatagacgtacagcttctcgatccgtatacccttagcaaattcatgaaggcaatgagcaggtcaaagacagacaagaaagatgcaaaaagcatagcggttgcaatgtacaggatattcgatctgctgagcgtttctcaagtaccagaggaagagatgtcagcattcagggacttggttagggtgagaagcactgtagtagcaaactgttctgatcttcaaaggaaactgaagagcaaattgaagattcatatgcctgagcttcttaagaccttcagatccgttagttcacctgtgctgttgcatctgttgagtgtatatccatccagagaagagatacttgacaacgaggaagatgcagtcaaattgctcagctctcacagaaactggagtgaaaagaaagcgagagaggttatcgattcactcaaagactcaataggcaagccagatacctttggaacctactcaacaattactagcacattcatagctgaaattaagcttctcaaagaccacgtggaagccctgaatgaggaaataaagaggtttcttgagaagttccctgacaatcccctaagaaccataccaggtattgctgaagtcacagaagccgaaatcgtatctgaagtaggcgacatagacagattctcttccgggaaagcctttgtatcgtacataggccttgaccctgttattaagcagagtggcaacatgactcgtggcctttcaatttctaagaagggtaacaaacatctacgaagaaccttctaccatttagctaagaacttgatcgcaaacactgagaagtacaggaacaaatacgagaagatgaaaaagaggggggtgaaaaataaggtggccctaatagcaactgcaagagctgcagctgaaatggtctaccaacttttgaaaaacaacgttccatttgacctttcactctcataattttcctaattctatacttgacaacttagagtat

SEQ ID NO: 4982 - DNA, 1369 bp, unidentified
  source 1..1369: mol_type = unassigned DNA; note = element_79bc638
  misc_feature 1..2: note = core
  misc_feature 3..77: note = LE
  misc_feature 78..1112: note = CDS
  misc_feature 1113..1369: note = RE
  misc_feature 1112..1356: note = bridgeRNA
tgatggggtggacggccccctacggcatcagttgtgccagaatgaggttgttgcaatctcagacaagggagccgtccgtgagagagattatccgcatcggtatggatacgtcgaagcatatttttgtgctgcatggggttgatgcagccgagcaggttgtgttgcgcaagaagctgtcgcggaagcaggtgctggacttcttcgccaagttaccaccgacggtgatcgggatggaggcctgcggaggctcgcagcattgggcgcgagagcttggcaagctcggccatgaggtgaagctgatggccccgcaactggtgaagccctacgtgatgcggaacaagaacgacgggcgggatgcggaagggctgtgtgaagcgatgggccggccgagcatgcgctttgtgccagtcaagacggccgagcaacaggccgcgctgatgctgacgggtatccgcgatggattgatcgcccggcgcacccagcttggcaatacgatccgtggccatgcggcggagttcggcctgatcgcagccaaaggggtcgacaaggtcgagccgctgctggcgcggattgcgcaggacgagacgcttcccgccctggcgcgcgagttgtttgtcgtgctgggccgcgagtacgccaggctcgagggcgagcttggggagatcgaagccaagctgatggcctggcaccgatccgatgccacgggtcggcgtctggcgcagattccctcgatcggtccaatcattgcgacgatgctggtgatgaagacgccggatccgcttgccttccgttccggccggcactttgcggcttggctcggcctcacacctcaagaccattccaccggcggcaagaccaggctcggcaagattacgcgggcgggcgacgaggacttgcgacggctgctggtgatcggggccacggcggtgatccagcaggccaggcgcgggcgcggtcatcactcgcgctggctgctggcactgatccggcgcaagccgccgaagcttgcggccgtggcgctcgccaacaaggtggcccgcatcgcctggaagctgatggcaacaggtgagagctacgatgtggcacggatgaatcccattccggccacctaacagattggccggccggcgggctcgctcgccggtcgacccggagctgcaggagcagatggagcgatcgatcgagcaacgatgcgagacaatccgtgggacccatcggccgtcaacaggtcgcctggttgtttggaactcgcatcgcgcaacccatcttggccagcgatcgacccgatcgcactcaacaggccggacatatggatgcaagcgatccgatctcaccaaaaagctcttgtgccacgggggccgtccacata

SEQ ID NO: 4983 - DNA, 1440 bp, unidentified
  source 1..1440: mol_type = unassigned DNA; note = element_79d1340
  misc_feature 1..2: note = core
  misc_feature 3..234: note = LE
  misc_feature 235..1425: note = CDS
  misc_feature 1426..1440: note = RE
  misc_feature 16..211: note = bridgeRNA
gtcctacctttcaggtgtgggtctgactctggtcattcgtaagatcggagggcccaggggctctgggtatggctggcatggcggagaccgttcgatggctcaaggaacttggccgcccggagccccgcgacgactcgaccgccaattgggagatgcgactccgatcgctgctgtaggacaacgccggcgaggtcgtctgcgggatcgatctacgacgagctggcggaggtgaccgtgcctgagatctgggccggggtagacatcggcaagacgcatcaccacgcggtggtgatcgacgcggagggcaagcgtctgctgtcccgccgggtccagaacgacgagaccgagctcctcgcgctcatcggcgacgtcttggagatatcccgggacgcgctgtgggcggtagacctcaaccatggtggtgccgcgctgctgatcggcctgctggtcagccatggccagccggtcgcctatctcaccggcctggcaattcaccgcgcttcggctacctaccgcggcgagggcaagacagacgcgaaggacgccttcgtcatcgccgaccaggcccgcgtccgccacgacctcggcctgctgcgacccggcgacgagatcgccgtcgacctgcgcacgctgaccacccgccgcctggacctgatcttcgaccgcacccgccagatcaaccggctccgtgcccaactcctggagatcttccctgcgctggaacggtccctggagctgacgaaccacggtccggtgatgctgctgaccggcttccagaccccggcggcgatccgccgtgcgggcgcgagccggatcgagacgtggctgaggaaccgcaaggtccggggcgccgccacactggcgaagagtgcggtggaggccgcccgggctcagcacaccgtgctccctggcgaggaactggccgccgccatggtggtccgcctcgcgaagggagtgatggccctcgacgaggagatcgctgagctcgacaccctgatcgaggccaagtttcgcgagcacccgcatgccgaggtgatccgcagcctgcccggtatgggaaccaaactcgcggcggagttcatcgccgcgaccggcggcgacatggacgccttcggcagctccgaccgcttggccggcttcgccggcctggcacccagaccccgcgactccggccgcgtcagcggcaacatgcgcaggccccggcgctaccaccgcgggctgctgagaaccatgtacctgtccgcgatggtcagcctgcggtgctgtcccgcctcgaaggcgtactacgaccggaagcggagcgagggcaagggacacaagcgggcactgctggccctcgcgcgcaggcgcctcaacgttctgtgggcgatgatccgagacggagagtgctttcactcttcaccccccgtcacgggagcagcttgacaacacgattgggaa

SEQ ID NO: 4984 - DNA, 1346 bp, unidentified
  source 1..1346: mol_type = unassigned DNA; note = element_79f05f8
  misc_feature 1: note = core
  misc_feature 2..69: note = LE
  misc_feature 70..1101: note = CDS
  misc_feature 1102..1346: note = RE
  misc_feature 1116..1337: note = bridgeRNA
tactgagatggtccgccgcttgatctccaccgggagatcttgtaggcaggttcaaggaggatcatcgacatgcagattcgatcggttggtattgaccttggtaagacgacctttcacctggtagcactcggcgataacggcaaggtgctgctgaagaagaggttcacccagaagcagttgatcaccttcaccgccaacatgcagacctgtttgatcgggatggaggcctgttcgggggcgcactttctcggtcgtacgctgcgtgagcagggccatgatgtgaagctgatcccagctcagtttgtgaagccgtttgtgaagtcgaacaagaacgacttcatcgatgctgaagccattgccgaggcagtggagcgccagaacatgcgcttcgttccgatcaagacagatgaccagctcgatttgcaggcgctccatcgagtgcgcgatcgcctgatcacacgacgaacgtctgtgatcaaccaactgcgagcctttctcctggagcgcggcctggtattcgcgaagagcccggccaagctgcgcgagcggatgcctgagatcctggaaaacgccgaggaagatctcactccccgcatgcggaacctgctggctctgctgtggaacgagtggaaggatctggagcttcagatcgtgcagatgaacgatgaagtggaacagatcgcatcgagcgatgcggcatgcacgcggctaaggcagatccctggcatcggccccctggtcgcaacggcgatcgtggccgccatcggcaacggcgcggccttccgtaaggggcgagagttcgccgcctggatggggctggtgccgaagcagtactcgactggcggtaaggcgaagctggctggcatcagcaagcgcggcaacctctacctgcgcaagattctgattcatggagcacgtgcagtcgtgctgcgatcgaaacgcgagcggattgcgatgggcgagtggatggccgctcttgaagccagagcgccacgcaacgtgctcatcgtcgccatggccaacaagctggcacgaattgcctgggccgtgctatcgagcggccaggactatcgggcagttcaagagcccgtcgctgcctagctatcgagattagttcccaccgaggtctgcaccggataagtaatgatgaaagaacagtcaaaacggcgtacttgaaacctgtttaccgaatgggcccttacacagccgaggggtttcaaaggacaggtacgtggcgtatctcatcatggccaggagactcatctccacctaaaggccggatacattgacgcagactttccttcactcatcaacttttcccttgcattcagacggcggaccataca

SEQ ID NO: 4985 - DNA, 1565 bp, unidentified
  source 1..1565: mol_type = unassigned DNA; note = element_79faf3a
  misc_feature 1..2: note = core
  misc_feature 3..248: note = LE
  misc_feature 249..1430: note = CDS
  misc_feature 1431..1565: note = RE
  misc_feature 3..226: note = bridgeRNA
ctcgtattatatagtagtagttatttacatccctcttcaaggataaaatgctatactgttacaggcgctgtggattagtacatcactcctaacgctagacgtttttaaaaagggtataactacagccgtttgtttaaatggtaattagttagataacgcatgacgttttatttcgaacgaggttacatttgacaaacaagtctgtggatacaaaacagtgtcaaatacaatgcaaaggagttactatcatgatttatgcaggaattaacgttgccaaggagaagcacgattgccttgtctctgacacaggtgggctggttttattagaaccttttaccatcgccaacaatcgtaatggttttgacgacctattatccaaactgaaatcatgttctgaagatttaagcaatataaaagtaggacttgaagctactggtcactacagcgataatcttttagagtttttgatttcacaaggtctaaccaccattgttataaatcccttacacactagtctttacaggaaaagtctaagtcttagaaaaactaaaacagataaggttgatgctcactctattgtaactatgctgagaacggaatctttaaagtcctactctcagacatcttatcatattcgtgagttgaaatcactaactcgttatcgtttttctcttgtccaagaccttgccaaacttaaaatttcttatgctaggctttgtgtcattcttttccctgaattagaaaagctagttccatccttacatttggtttcgatttattccttactagcagagtttccaacagctaggacaattgccaactgtcatctgactcgcctaaagcttttgctatcatccgcttctaaaggtcgctatggtgatgagaaagcaatcgaaatacgagatgctgcacgctcatctattggctcgtttagcgaaatgaaggtattggagttacaacagacaattcagcgcattcttgttttagaaaaacagattgcactcatagaatcaaaaattaatccgattgtcgactctttgcacagcccattgttaagcgttcctggtatttcatatcgcatggctgcaatcatcatctcggaaaccgagaattttgcgaatttcgattgtgcggaacagatattggtatacgctggattagaactatctgtctatcaatcaggtcaacttgtatccactcatgcgaagatggtgaagcgtggttctaaatatcttcgctatgccctatttaattctaccaagtatgtttgccattgggatactcattttggtgaatatctagcaaagaaacgttctgaaggtaaggcttataatgtggcattttctcatgctgccaaaaagttgactcgtgtactttttcatcttgtgaagtcagagcaaactttcgtgagtcgttcttacgattattaaaatcataattattttgagtggctctactggggcactctagttgtcatgcaattatcaaggttctatatatccaaaatacatttctgtgcttcaaatcaaaaacttcattttaggtgttgacttttaatagttagt

SEQ ID NO: 4986 - DNA, 1598 bp, unidentified
  source 1..1598: mol_type = unassigned DNA; note = element_7a0852f
  misc_feature 1..2: note = core
  misc_feature 3..250: note = LE
  misc_feature 251..1549: note = CDS
  misc_feature 1550..1598: note = RE
tctaccatcggaatttagcagatagcaggagcggagcgaaacggatataagagtttctgacgagggtgtggctcttggtgtcagtgacctgtttctttaggctcacacagtctgaaatgccgccctcgtcatctgcatcatccgaggggtcgaccgggatggtgccatattctcaccagaatacgtggctctgtaagtagacgagaccgaaggatgatgaatcgatcttgtttagggaaggaggagctacgtgtcagagagaaaatctttagagcttcgagtcagtgtggatgtgggctctcgacgccacagcgtggcgatcgggttgcccgatgggcaggtgttggaggagtttgagatagcgcaccggcctgaaggttttcaagagtttttctcgcgcattgagaaacatcaaaaggcacaaggctgtggagtggcagtagcgatggaaggctacaacggctatgcgcggccgctcgacaccctggttcgccagcgcggctatcggctttataacatcaacaatctgaagctcgcacgattcaaggagatctttcctggggcggccaagaaggatcggattgatgcgcgcaagggattggagctgtttcagctccgcgatcacctcccgttggccaagggagtcctgcaggaagttacggggacgcccaaggagaatgaaattcttaagcggcttacccggcgccggcgccgactagtcaacgagcgggtgcgggtggtcaataatcttcagtcggatctgcaggctgtgtgtccggggttgttagagatcaccacggaggcaagcaatcagtggtttttaaattttcttctcagtgcggatagccttcctcagctggcgcggcttcgaaagtcgacgttactgaagatccccgcggtaggccgaaaatacgcaagcctcattgagcagtggcagaagcgggcgcatttcagcgacgagatcgagtgggtgaatgaaatggtacgggaagacgcgctgcgctgtcttgagctcgacgagaagatcagaacactggaggctaagatcgaagaaattgccaagagctccaagatcgccaagattctattatcgattcccggtttcggaccggtctgcacttcagagttagccggagagattggcacggtggagcgcttcagcaaggaagggagtttagctctatacctggggatgtccacgttggacaacagttccggcgactatcacggctccaaacagcccaagcacgtcaacacgcgcgctaaggcggcgatgatgatagcgttagaccggcatcgaaagtatgtgccggagtctcaacgatattatgaaaagaaacgaaccgagggaaagaagcacaaccagacgatccgttctctcgggcgccacctctgccgcatcattttcaggatgcttagggaccagcgcaactacgagattcgaccccaacagcggaataccaagaccaaggtcagatcgagatcgtgtgttaaaacgaaaatacggaggccgaaaatttcagcgacccacttaaaacagaaagtttaacagagcccgtgaagactggcttacctgcttgaaatttccagcgggatga

SEQ ID NO: 4987 - DNA, 1539 bp, unidentified
  source 1..1539: mol_type = unassigned DNA; note = element_7a0f34f
  misc_feature 1..2: note = core
  misc_feature 3..240: note = LE
  misc_feature 241..1419: note = CDS
  misc_feature 1420..1539: note = RE
  misc_feature 3..217: note = bridgeRNA
cttgtattatagagtagtagtgattaaagcccctctccaagggctgtgctacactgtaaaggatgctgtggattggtgaaaacctcctaccacaagatggttctagaaaggttccaaccacagtcctttgcagttttgttaatcagttaaataccgccagacggtttatgtggaacaaggctacaaaagcaaagtgttctgtggaacagcatcacaaatttaccgttggaggtttttgaaatgattgtttccgttggcatcgatgtagcaaaggacaagcacgactgctttatccagaactcggagggtgaagtgcttgcggatgtgttcaccatccccaacaatatggagggatttaacactcttctgcataaaatccagacctgtaccacactccaggacaaaataaaggtagggcttgaggccaccgggcattacagctacaacatcctcgggtttcttctggacaatggtctggccacctatgtcttgaatcccttacgcacaaacctctaccgaaaaagtctcagcctcagaaagaccaaaaccgatcgggtagatgcacgaacgattgcggctatgctgttatccgatgtgggcctcaaaccctacacagatacagcataccacaatgaggagctaaagtcactcaccagataccgttttgataaggtaaaagagcgtgccaagctgaaaacttcggtctccagactggtctgcatcctgtttccggaactggagaaactggtcaccaccctccacacggcctctgtctacactctgctggaggagtttccgggagccaaacagattgccgcagcacacctgacaagactcaaatcccttctggagaatgcctccaagggacgctataaacgggacatggctatagcagttcgggatgcagcacgaaattccattggctcccggatgcctgccaagtccctggaattacagcataccatccggctcattcgggaattggattcggaaatccatgagattgagacggagattgaggccatgatggacgatatccagtctcccatcaccaccatccccggcattggctgccgcatgggtgccatgattctggctgaagctggtgatctctctcgcttcgactcacccgacaagctgctggcttatgctggtatgtcaccgtctacttaccagtccgggcaactgaaaaactgctatccacacatggagaaacgaggctccagatacctgcgttatgctctttacaatgccaccaagtatgtctgcctttgggacccaacctttactgcttatctcgctaagaaacgggccgagggcaagcattacaatgtcgctatctctcatgcagccaagaaactggtgcgccttatttttgccatcgagaagtccaggcaaccatatcgctcagcaacttgaacgcaaccacttgaatcgccagcaggggtcttagaagacctcagctttgctatacccttttggaactgtctgcctttgaccacctccattcattttcggggttgacttttaatagttaat

SEQ ID NO: 4988 - DNA, 1469 bp, unidentified
  source 1..1469: mol_type = unassigned DNA; note = element_7a1ea2e
  misc_feature 1..2: note = core
  misc_feature 3..246: note = LE
  misc_feature 247..1452: note = CDS
  misc_feature 1453..1469: note = RE
tctaccattggattttgcggagacgtgggcacccctgttgatgtagactgactgcgacgggggtgtggctcatggggtccgtggtctctgaccactcggctctgaaatgccgcccccgtctttcgtgtcatccaggagtgtctgccgggatgatgctaggcaactcagctacgctggattgcttgtggctctgcgcagtagacgagacggcctggatgagaactcacgctgcaaggaggcacaccgatggaaccccacctctgtgtcggcatcgacgtgggctgcaaggcccatcgtgtcggcatcgcccacccagacggatcgattctcgaggagttcgacatctcccacaacgatgtcggtttccaggagttctttcgtcgcgttgaagtgcatcgacaacgggtgaatcttcccgtcgctgtcgcgatggaagggttcaacggctacgcgcgcccgttggaccgactcgtcctcgacaaccactaccgactgtacaacgtcaacaacatgaagctcgcccgcttcaaggaagtcttccctggtgccgcgaagaccgatgtcatcgatgcacgcaagatcctccagttgttcatcctcaaagagcaccttccgatggcgaaggatgcgctccaggaagtggtcgcggctcccgcagtgaacgagaagctcaaacgactcagtcggcgcagacgcaggctagtcaacgagaaggtccgcgtggtcaacaacatgcaggcagatcttcaggcggtgtgcccggagcttctcgctgcgacccatgatgcagacaacctgtggttccttcgcttcctcacctttcgcgatgatctgccccagctggcacgtctgcgacgagcaaccattctccagatccccggcattggtcagaagtactcagcgatcatccgggagtggcaacgccaagcgaagttctcgtccgaggtggagtacgttgggccgatgatcatcgaggacgcaagacggatcctcgagcttcaccagcagatccgtgtactggacgaagcgatgacggagctggctggggattcggagatcgcgcgtcgactgtccacgattgacggattcgggaagacatcgattgccgagctggcgggagagatcggcacacagaggcgattcgcagccgaggcgagtttggcgctgtatgtggggatgagtccgttgacgcatcagtcaggccagacgtcgagcgcaaggagccctcgccaggtcaattgtcgcgccaaggcggcaatgatgaccgcggtggcccaccacatccgctgtgtaccacagtccaaggcgtactacgaccgcaaacgcgcacagggcaagacccacaaccaagcggtccgtgcactcggacgccacatggtccgtgtcatctgggcgatgctgcgggacgaacgcgattacgagatccgcgaggatacccacccgatgccttgaaaatccaagagggatgt

SEQ ID NO: 4989 - DNA, 1569 bp, unidentified
  source 1..1569: mol_type = unassigned DNA; note = element_7a27021
  misc_feature 1..3: note = core
  misc_feature 4..237: note = LE
  misc_feature 238..1437: note = CDS
  misc_feature 1438..1569: note = RE
  misc_feature 7..257: note = bridgeRNA
attcataatgtaagagtaaggtctatccggccttgctcttttcctttaagatgggggcatcggcctgacgtaatctggaattgggacaccacgcccggagacaaatgtgtcagccagcttccatcgtttagtgctcgattcagcaagttgggacacagctcccgtttcacgattgaatatgtgcgtaccctggaaagagctggatagccgtacaccaaatagaaagaagggatgctaatgcttgctgtaggaattgatgtttcaaagtcaaaaagcgctgcagccatcttaaactcggatggaacagtacacacaaagccttttgaattccgtcacagccaaccggaaatggatgcactcatcaggtacatcaaggaccagaatcagccggtaacgattctcatggaaaacacaggacactatcattatcctgtgctgaaagctcttgaagcagcaggtttgccggtctgtctcatcaatgcctatcaaatgaaaaagtacggagacatggaacttcgcaaggcaaagacagataagaaggatgcacttcggattgcccggtacgccttggagaaaggctattccctggttcctcatacctcaatggatcagaaatacgaggatctccgtttcctcgcaaggcagtatgatcagcgaatgggaacccttacaacgaacaaggtatttctcatcaatttactggacgaaaccatgccgggcataacaaaactgctctctttaacgacaagagacccggaaacaagccttaccatgctgtttattaagcgttttaagtcatatgaccgcatcaaaaagatgggaaggacacgttttctggatagctacaacaaacttgccagaaagtcacgtaatcgccatgcatacggatatggccttgccatctatgagttagctgtcaacagcattacaacacgcggcgagaatgaatttaccttagctgcacaagaccagtgcgtggacttggtttccgaatcgcagaaagctgcagacgctattattctgaatatgcaaacacttgcagaaaccttgccggagtacgctgtcctgcgttccatggctggcgttggagaccggctagggcctctcatccttgcagagatcggagatatccgccgtttccacagcggtaaggcactcaatgcttacgccgggaacgatgctcctccgtatcagtctggaacgtttgagagccacaatcgccacatatcaaaacgtgggaatgcggctctcaggaagtattgctttgaagtcatgcaggcgcttaaacttacacggcctcaggacgaccctgtctacctttttctgatcaaaaaggagcaggaagggaaaccgtataacgtagccaagatggctggcgttaacaagtttctccgaatctactatgcaagagcgatggaagcgctccggctacagtaaatctaaagtctatctttcattatacaatattttcttaaatccacaactgctgtgggttcggtttttgcgccttttttcagatagttggagccggtatttctttattttctacttgacaattacattagcaag

SEQ ID NO: 4990 - DNA, 1483 bp, unidentified
  source 1..1483: mol_type = unassigned DNA; note = element_7a34fce
  misc_feature 1..2: note = core
  misc_feature 3..242: note = LE
  misc_feature 243..1463: note = CDS
  misc_feature 1464..1483: note = RE
  misc_feature 7..243: note = bridgeRNA
ctaatgggaactaccgggtccgcctcactggcagactcgatgcctggtagccgctggtgagtgagcactctcgcctcctggaccgtgagtcctagggtcagatcgtgccctcgccggtggtcaggggtcttgatcgctgatgggatgtcgtgccccccgcgggttggggtgagcactggtccattaggtcgccgaccggctcctgcgggctgctgaaaccggtgtcgatcacggaggttcgaatgctgttcgtcggagatgactgggctgaggatcaccacgatgtggaggtccaggacgagcagggccgggtgttgaagcgggtccggttgcccgaggggatggccgggatgtcccgcttccacgagctggtgggccggttcgtgccggaggacggcgagccggcgcaggtgctggtgtgcatcgaggtcgatcggggcccgtgggtgcgggcgctgcgggcggcgggataccgggtgttcggggtggaccccaagcaggccgcccggcaccgggagatcctcggctcgtcgggggccaagagcgacaagggcgacgcgcacgcgctggccgacatgatccgtacccgccgtaaccagctgcgggaggtcgccggcgactccgaggtcgccgaggcggtcaaggtcgtcacccgcgcccatcagacgctgttgtgggaacgcacccgccacatgctccggctgcgggtggcgttgcgggactacttccccgccgctctggaggcctacaagcccctcggcctgacctcggatgctgcgctgaaactcctggtcaaggcccccactccggcgacagcggcgaagctcaccgccgtccagatcgctgccgcgctgaaggggcggcgggatatcccggccaaggccgagacgatcaagcaggtgctgcggtccgagcaactgggccaggccgatctggtcaccgctgcctacgcctcgaccgtgcgggcactggccgcggtcatcgccaccctcaacacggagatcaagaccctggaagacgaggtcgaggcgcattttggccggcacccggacgctgaggtcatcctcagtcagcccggcatcggcgtcgttctcggcgcccgggtgctcgccgagttcggagacgctcccgggcgttatgccagcgcgaaggcacgcaagaactatgccggtacctcgccggtcacccggcagtccggtaagacgcggaccgttcacgcccggttcgtccacaacgatcggctcgtcgacgccctgcacctgcaagcctcctgcgccctcctgcacgacgtggacgcccgcgcctactacgaccagatcagagcccgcgacgtcagccacaacgccgccctgcgccaggtcggcaaccgcctcgtcggcatcctccacggctgcctcaagaaccacaccctctacgaccgggcgaccgcctggtcacaccgcaaccacgacctcgccgcttgacatccaagctccagggatgt

SEQ ID NO: 4991 - DNA, 1498 bp, unidentified
  source 1..1498: mol_type = unassigned DNA; note = element_7a3d299
  misc_feature 1..2: note = core
  misc_feature 3..257: note = LE
  misc_feature 258..1478: note = CDS
  misc_feature 1479..1498: note = RE
  misc_feature 6..236: note = bridgeRNA
ctaatgagagttaccggctcggcccgttgaggcagactcggtgacaggtagctgccagttggtgagcactcgtgcgcccaggatctcttccgagtcctacaagcagatcgtgcccctgccggtggttggaagagttgaccgctgatgggatgtcgtgcctgctcgcccgagcgtgagcacttgttcattagggtgccggcgccttccacgagctgcctgacgttgttgatgatggatcgagagtcggaggtgcgggagtgctgttcataggagatgactgggccgaggaccatcacgacatcgagttgcaggatcagtcgggtcagtctctggttcggacgcgactcgctgagggcctggctggtatggctcagctgcatgagctgatcggcaaacacatcggtgaccaggcggccgaccatgtggcgatcgggatcgagaccgaccgcggcccatgggtggtcgcgctggtcgcggctggataccgcgtcttcgcggtcaacccgttgcaggcggcacgctaccgggaacggcagagcgtgtcgggtgccaagagcgatgccgcggacgcgcacatgcttgccgacatggtgcgtaccgactcgcatcagttgcgtcaggtcgcgggtgacagtgatcaggctgaggcggtcaaggtcgtggcacgggcccataagacgttgatctgggagaggacccgccacgtgcagcgagtgcgtaacgcgctacgggagttcttcccagctgcactgaccgccttcgaggatctcgctgctgcggatgcgcttgagctgctcgccaaggcacccgatccggacgcggcagcgcgcctgacgatcacgcagatcaccgccgcgctcaagcgcgcccgccgacaccacgccggtgagaaggccaaggcgatccaagcggcgctccgtacccagcagttgcggcagccggctgccgtgacagccgcgtacgcggctacagttcgagctcaggtagccgtgatcggcacgctcaacgcacagatcacgacgatgtcctcgcaggtcgacgcccattttgggcagcacccggacgttgagatctatctcagccagccggggatgggtccggtcatcggtgcccgggtgctggccgagttcggggatgaccaaagccgttacgccgacgcacgagcacgcaagaactacgccggcaccagccctatcacccgggcctcgggcaggaagaagaccgtcctggcgcgctacgtgcacaacaaccgcctcatcgacgcactcgggcagcaagccttcagcgccctgaccggctcacctggggcgcgggcctattacgacggtcttcgcgctcgagggaccggccatcgcgctgctcttcgacaactggccaatcgactcgtcggcatcctgcatggctgcctcaagaccggcacccggtacgacgagacgactgcgtggtcgcaccgcgacgaaccagccgccgcagcttgacaggtttcgccatgggatgt

SEQ ID NO: 4992 - DNA, 1447 bp, unidentified
  source 1..1447: mol_type = unassigned DNA; note = element_7a45ba6
  misc_feature 1: note = core
  misc_feature 2..226: note = LE
  misc_feature 227..1432: note = CDS
  misc_feature 1433..1447: note = RE
  misc_feature 9..230: note = bridgeRNA
cgttactatcttcgtgccccaataatcggggctttggccagccaggcccggcatgattgctgcccccagtcgcccatgatccggggggtgttgtcaccgggcctggtgggtggctggtgatcgctgataggggcttggccaggatttcctgaggccgtccgtaacgtggatgccgagacttgccaccgatgttgccggccaatgtgtttcattgcgtctgaccttcatgcaagaaccgcttcagcacaattccattgatgtctttgtcggcgtcgatgtcggcaagggccagcatcacgccgtcgcgctcgatcgcagcggcaagcgcctatacaacaaggcgctgcccaacgatgaggccaagctgcgcgccctgatcaacgaactcaaggcgcatggccaacttctgttcgtcgtcgatcaacccgccaccatcggtgcgctgccggtggccgtcgctcgcgacgagggtgtcctggttgcctatctgccagggctggccatgcgccgcatcgccgatctgcacgcaggcgaagccaagaccgacgcccgcgacgctgcgatcattgccgaagccgcccgctcgatgccgcacaccttgcgctcgctgcggctggccgatgagccgctggctgaactcaccatgctgtgcggcttcgacgacgatctggccgcccaagtcacccaaaccagcaaccgcattcgtggcctgctcacccagatccatcctgccctcgaacgggttctggggccacgcctggaccatcccgccgtgctcgatctgcttgagcgctatccgtcacccgccgctctcgccgcgaccaccgagaagacgctcgccaaccgcctgaccaaactcgctccgcgtatgggcaagcgccttgccgccgagatcgttcaagcacttggcgaacagaccgtcgtcgtgcccggcacccaggccgcaaccgtcgtcatgccgcgccttgccaagcaactcgccgccttgctccagcagcgcgacgaggtcgccagtgaagtcgaacgcctggtgcatgcgcaccctctttactcggtcctgaccagcatgcccggagtcggcgtcaggaccgctgccagactcctgaccgaagtcgcgcacaaaaccttcgcttcggccgcgcacctggccgcctatgccggtctcgcgccggtcacccggcgctcaggttcgtccatccgtggcgagcatccgtccagacgcggcaacaaggtgctcaaacgaaccttgtttctctctgcgtttgcggccttgcgagacccgatctctcgcgcctactactcgcgcaagatccagcagggcaagcgccacaaccaagcactcatcgcgctggcacggcgacgctgtgacgtcatgttcgccatgctgcgcgacgggaccttttaccaaccacaaaccacccctaacgcttgacgaaacacatagggg

SEQ ID NO: 4993 - DNA, 1452 bp, unidentified
  source 1..1452: mol_type = unassigned DNA; note = element_7a4dad3
  misc_feature 1: note = core
  misc_feature 2..78: note = LE
  misc_feature 79..1143: note = CDS
  misc_feature 1144..1452: note = RE
  misc_feature 1215..1443: note = bridgeRNA
taatggaatggtccggccgtgctcctgcctcgccagcgatcgaagctggcaaggggcgccaaagacaaggagcacgccatgtctcagaactcaaacaccgcgatcgcgatagtcggcatcgatatcggcaagaactcattccacattgttggccttgatcagcgcggtgcgatcgtactgcggcagaagtggtcgcgtggccaagtggaagcgcggtttgccaatatgccgccgtgcctgatcggcatggaagcctgcgttggcgcccatcatctcagccgtaagctgaaggagctcggccacgatgcccggctgatgccggcgaggtacgtgcggccctactcgaagggacagaagaacgacttccgcgatgcggaggcgattgccgaggctgtgcagcggccgacgatgaagttcgtagcgacgaagaccgccgatcagcttgacctgcaggcactgcaccgggtgcgggagcggttggtcagccagcgcaccggcatcatcaatcagatccgcgccttcctgttggagcgcggcgttgcggtgcggcagggattacggtttttgcgcgccgagctaccgcgcataatagccgcgccacctgatgttctgtcgccgcgcatggttcgggtcatcgagggcctagccggcgactggcgccggctcgatgagcgaatcgagagactatcgggcgagatcgaagccgttgcgcgccaggatgccggttgcgagcggttgatgagcgttcctggcatcggcccgatcatctccagtgcgatggtggccgcgattggcactggagatgtgttttctaaaggccgcgactttgccgcctggcttgggctcgtccccaaacagatctcgactggggaccgcaccatcctgggcaagatatccaagcgcggcaatcgctacctgcgggttctgttcgtgcaggcggcatgggtcgtgctgatcaagccgaagagctgggagcgccatgggctcaagccctggatcgaggcggccaagaagcggctgcaccgcaacgtgctagcgatcgcgctggccaacaagctcgcccgcatcgcctggagcgttctcgctcgtggtcgagccttcgaggttaggaaggtcggtgaggccgctgcccggtccgcctgatcctcattccgacatcacagggactcgcgacatgaggagcccgcgatgaagtagccagatcaatacgacttacctgccgaggtctgcgagaggatgagacgagatggaggatcggtcttcccggcgcatgcgagcactggtgacccaaatggcccagtcgaggcctgtccggtaatgagatcgcatgcgcgctgatatccatgatggcccggagcaaacacgcttcaatcgaaggccggatacattgatgcaagaccgcaatcaaacagctcgacgaaaacctcttgcaacgcacggccggaccataca

SEQ ID NO: 4994 - DNA, 1184 bp, unidentified
  source 1..1184: mol_type = unassigned DNA; note = element_7a500bf
  misc_feature 1..2: note = core
  misc_feature 3..203: note = LE
  misc_feature 204..1181: note = CDS
  misc_feature 1182..1184: note = RE
  misc_feature 27..185: note = bridgeRNA
tcctttagatttgtttttgataatttagaatgagaaggaagcagaagtaaactattcgttcctcagagtttagactcatatctcgatttagacttctgcatccctttcatcaggaactcaaatagaaattagggctagtgacccactatcaaggagttgagcagaactgatgaattctcatttcactttcttaaaacgaatttatgaaaaagatttttattggaatcgacattagcagcaaaacattggacatctgtgtaaagattgatggcaaagttcagtattttaacattcagaacgagattaaggcaatcagatcattattcaaaaagtatgcatctgtagaaacggtggtcgcaatggagaacacaggtcgctataactggaaccttcttgaggttttggcctgcatgaatcttagcgtctatgttctttctccgatgcacctgaagaagagtttggggcttacaagaggaaagaacgacaaggttgattcgctcaggatctgcagtttcatagaaaggaaccagcaggaaagtagaccatggaaaccatcgtcaatgcccatcaaaaagcttaaggtcctgctggccgagcgggcatcaaggataagaatgaagggccagcttgccagacagcagcatgactacaagttgatgaaaagcctgggcatggacaaagagctgctcaggctgaacaaaaaactgatcgaagcgattgatgttcagataaaaaagatcgaagcagatatcgagaaaaatatcatggctgatggcacccttaaggaaaaaaccgaacttatacgatctgtaccgggcgtaggaaaggtggtatcatggatgatgatcgcaaagaccgaggcattcacatcgatcagtgagcctagaaaaatggcctgctactgtggcgttgttccatttgaccaccaatccggaacatcgttaagatataggccaagggtatctgtttttgcagacaagccgatgaaaagcctcttacatttagccgctatgagcgcaatcagactgaagaatgaccttagcatatattataaacggaaggttcaagatggtaaaaacaaaatgagtgtcctgaatgctgttagaaacaaaataatccacagaatctttgccgtcataaaaaaccaaaccatttataaaaatgatttggttttgtcatagaaa

SEQ ID NO: 4995 - DNA, 1464 bp, unidentified
  source 1..1464: mol_type = unassigned DNA; note = element_7a532f0
  misc_feature 1: note = core
  misc_feature 2..231: note = LE
  misc_feature 232..1449: note = CDS
  misc_feature 1450..1464: note = RE
  misc_feature 42..216: note = bridgeRNA
cgttactttcttcgtgacccgttcggcggccatgctgggcggtgacggcctgccgggcccggcatgattgctgccccctgcccttgatgatccgggggggtgttgtcaccgggcctggttggcggtgtgtgatcgctgataggggctggacccgagcattctcaaggccgttcgtaacgtggatgccgagacgcaccgtcgcggacgccgtcgcgagcgaacggaggcaacgtggtcaccagcatcgacagatacgacgaggtcgacgtgttcgtcgggctcgacgtcggcaagggcgaacaccacgccgtcgccctcgaccggaccggcaagcgcctgttcgacaagccgctgccgaacgacgaacgccgactgagagcggtactcgaccagctcgcggcgcacggcacgatcctcctggtcgtggatcagccggccacgatcggcgcgctgccggtcgccgtcgcgcaggcttccggagcgctggtcggctacctgcccgggctggcgatgcggcgcatcgcggatctgcatccgggagaggcgaagaccgatgcgagagacgccgcgatcatcgctgagacggcgcggacgatgccgcacacgctccgctccatccaggtcgccgacgagcaggttgcagagctgagcatgctctgcgggttcgacgacgacctcgctgggcagatcacccaagtttctaaccgcatccggggcctgctgacgcagatccaccctgcgcttgagcgcgtgatcgggccgcggctggaccatcccgcgatgctcgacctgctgcagcgctacccgtcaccggcggcgatgaaggctgcgggtgagaagcggctcgggagccgactgctgaagaacgccccgaggaagggtcgtgtctgggcgggcgagatcgcgactgccctcggcgagcagaccgtcgtggtcaccggcaccgacgccgcagcgcttgtgctgccgcgtctggcggagcagctcgccgcgctgcgcaggcagcgggacgagatcgccgtcgaggtcgagaagatcgtcgagcagcaccctcttcaaccggttctgacgagcatgcccggagtcggcgtcaggaccgcagtccggctcctcaccgaagtcaccaccaagaccttccccaccgccggacacctcgccgcctacgccggcctcgcccccgtcacgagacgatccggcacctcgatccgcggcgagcacccctcccgacgagggaacaagatcctgaaacggatcatgttcctctccgcattcgccgccctccgagaccccgaatcccgcgcctactacgaccgcaagatcgcgcacggcaaacgccacaaccaggccctcatcgccctcgcccgccgcagatccgacgtcctattcgccatgctccgcgacggcaccctctaccagccacgactcacaccaccagccctcaccgcttgacaaacgacatagggg

SEQ ID NO: 4996 - DNA, 1361 bp, unidentified
  source 1..1361: mol_type = unassigned DNA; note = element_7a5d159
  misc_feature 1..3: note = core
  misc_feature 4..83: note = LE
  misc_feature 84..1106: note = CDS
  misc_feature 1107..1361: note = RE
  misc_feature 1085..1348: note = bridgeRNA
tgatggggtggatggcccccttgcggcatctaggtgccaaagtgctggtggatcgaaaaccaccagcaaacagggagccatccatgaacgagattacgacggtcggcttagatttggcgaaacatgttttccaggtgcacgcagttgatgcagagggggatacggttctgcgcaagcagcttcggcgggggcaggtgctggcgttcttcagtcgactaccgcgctgtctggtggggatggaggcgtgtgcgacggcgcattactgggcgcgggagctgcgtgcgctgggccatgaggtgcggctgatgccggcgcaatacgtgaaggcctacgtcaagcggaacaagaacgacgctgcggatgcggaagcgatctgcgaggcagttgggcggccaacaatgcgcttcgtccctgtcaagacggctgaacagcaagctgctgtgctgctgcaccgaggtcgggagcggctggtacgccagcgcacgatgctggtgaatgctctgcgcgcgcatctggcggagttcggagtgatcgcaccacagggattacgcaatgttggcaggctgattgctatcatccgcgatgatgacgacgctcgtctaccgggtctggcgcgccaggtgctgcaggtgcttgcggtacagattgagcagctcgaggcagcaattgcggcgctagagaagcgactgatgggttggcataagagcaatcctgtcagccagcgcttggcgacgattcctggcatcggtcccatcatcgctaccgctatagcggcgatggtggcggagccgagcggttttcgcagcggtcgcgaatttgcagcgtggctgggtctagtgccgcggcagaattccaccggcggcaaaaatcggttaggcggcatatccaagcgaggcaaccagtatttgcgacggctgctgatcaacggtgccagcgccaatctgctacgctcgaaggcgaccaatgccgatccatgggtgattgggctgcgccggcgacggccaagcctagtcgtagcggtggcgttagcgaacaagacggcgcgcatcgcctgggcggtgatgcaccggcaggagaattaccagcgcatggccacggcggcctaggctgccaagccaagctctggagcttgcgagagagcaatgacgcgtgatggcacagtcggtcgatccgacgcaaccgagagaagcctggcgcttcggtgggaggttgatcccgttcgaatgatgaggcctcggttcgcggactccatcagggccagcagtcggtttgggctgcaccaacaggccggacacatgactgcaagcgatctctgtgctgcacgtcaaattatctcttgccaggcgggggccatccacaca

SEQ ID NO: 4997 - DNA, 1418 bp, unidentified
  source 1..1418: mol_type = unassigned DNA; note = element_7a5dd7e
  misc_feature 1: note = core
  misc_feature 2..90: note = LE
  misc_feature 91..1134: note = CDS
  misc_feature 1135..1418: note = RE
  misc_feature 1187..1410: note = bridgeRNA
caatgggatggacgctcccaccctaacggcatcgcgatgtgccaaagtggcgatgcgatcaaccacttaaaccagacaggagcgtccaatatgaaggttacaacagttggcatcgatttggccaagaatgtgtttcaactccatggggtcaacgaggccggcaggcccgtcatcaagaagcagctgcgccgtgaccaggtcgctgcattctttatcaatctgccgctctgcctgatcggtatggaggcatgcggcagtgctcattactgggctcgaaaactggagggttttggtcacaccgtcaaattgatatccccccagtttgtcaagccctacgtcaagacaaacaaaaacgatgcagccgatgctgaggcgatctgtgaggcggtggcacgaccaaacatgcgctttgtgccaatcaaaaatattgagcagcaaagcgtgctgtctctgcaccgtgtacgtcagggttttgtgaaagcccgtactgcacaggccaatcagatccgtggcctgctctcggagtttggtttgatcattccccaaggcattgggcatatcgcaaaccgagtgcctgagctgattgaagatgccagcaacgaattgcctggatcatttcgcttgcttgtgcagcgcttgcttaatcatctcaaagagctcgatacccaagttgatgaactggaatcacaaatcgtgaggtggcatcgacagagtgcagccagcaataaactggcgcaagttcctggcatcggccccatcaccgccagcgcattggtggcgtctcttggtgatgccaagaactttgacagtggccggcaagtggcggcgtggctgggccttgtgcccaagcagcactccagtggtgggaaacagaacctactgggcatgagcaaacgcggtgactcgtatctcagaacactcttgatccacggggcgcgctctgccatttaccacgctgggcaaaagaccgatcaaaaccaaacgtgcaagtggatcaatgcaatagtgattcgccgcaacaagaatgtagcggcagtggcgctggccaacaagaatgcccgcatcgtgtgggcgctgctcacccatgatcgagagttccgacctgactacacgcgtcacactgtgggcgtgtagtcaggtcggcagaaagaagtagaagcgacaacaaggcagggggaactgaaccaccgattgctcaggcgatcatgaagtgatggcaaatcaggtaagaccgtggttggcaaagcccgacaatgaccgcgcacattagagtgcgagattgcgattggggcgtcaaccagcgaatcccatcaaggacagtgaccaaaagtcacaccaaaagtccgaatgtacgggtgcaatctttacctttgagtcaccatgaattgaaagcctggcattaagggggcgtccatgta

SEQ ID NO: 4998 - DNA, 1137 bp, unidentified
  source 1..1137: mol_type = unassigned DNA; note = element_7a617da
  misc_feature 1..2: note = core
  misc_feature 3..165: note = LE
  misc_feature 166..1122: note = CDS
  misc_feature 1123..1137: note = RE
  misc_feature 10..180: note = bridgeRNA
cttgtatctttgcagctcggaccggctcaggcagcccgtcgcgcctctgggttgattcaagcccgcccctgagcactgggcgcctgagccggaccgtccttctctgcagcccgaacggttgtaggaacttgaagttcgcatagacaaggatgggagcgagaggacatgtccgactctgtttttatcggtatcgatgtttccagccagacgctggaggttgccagcagcgaccaagccaagacttggcagcttgccaacgacgccagcggcatcgcgcagttggtcagccagatatcggccctggcacccgcgctggtggtgctggaggccaccggcggctacgagttcgaggcggcctgcgccctgcaagcggcgggccttgcggtggccgtggtcaacccgcgcacggcgcgcgactttgctcgcgcaatgggtgctttggccaagaccgacgcgctggatgcgcgcatgctggcaagcttcgcccgtgtgctgcaccagcatccccagcgcgagcgcttcgtcaagccgctggcggatggcgaactgcagcagttgcaggccctggtgctgcgtcggcgccagttggtgcagatgctgaccgccgaacggcaacgcctgcgcctggcgcacgtggcagcgcgcccgagcatcgagcggttcatagagtttctcaagcaggaacttggcgacagcgacgcccaggtggcttgtcacgtgcagcgccatcacgccgagctggcgcaggtgctgacaagcgtgccgggtatcggctctgccagcgtggctgtgctgctggcagagctgcccgaactgggcaagctcgatcggcgccgcatagccgcgctggtgggcgtggcaccactgaaccgggactcgggcaagatgcgcgcgcagcgctcgatctggggtgggcgcgccgacgtgcggcgcaccctgtacatggccacgctggtggccgtgcggttcaatcccgtgctgaaggcttgctatgagcgactgctggctgcaggcaagcgcaagaaggtggcattggtcgcttgcatgcgcaagctgctgaccatgctcaatgccatcgccaaacatagctgcgcttggaatccaacgcttcataacgcttgacaagcaagacggttg

SEQ ID NO: 4999 - DNA, 1448 bp, unidentified
  source 1..1448: mol_type = unassigned DNA; note = element_7a78f79
  misc_feature 1..3: note = core
  misc_feature 4..121: note = LE
  misc_feature 122..1159: note = CDS
  misc_feature 1160..1448: note = RE
  misc_feature 1199..1402: note = bridgeRNA
agatgggatattcggccggcttggtcgccccgcggcgaaggcaagggcgctgcgcttcaggctgatggtaaaaatggtctgcgtttggagcagccacaagcatcagatggagaagcgcagcatgaaacattatgccggtcttgatctctcaatcaaggagacctccatttgcatcgtggacgagacgggaaaggtctgccgcgaggcgaaagtcgtgagccatccggaggatcttatccaggagctcaaggatccggcgtggcggctcgagcgcgtcgggctcgaagccggcccgctgtcgcaatgggttttcagcgggctggcggaggcgggtctaccggtcatctgcatcgagacccggcatgccaaggccttcctcaaagctcaggtcaacaaaagcgatcgcaatgacgcgcgcggcatcgcgcaaatgatgcgcgtcaaccttttccggcctgttcatgtgaagacgctgacaagccagaagcggcgcgccttgttgaccgcccgcaagctgctgcaggagaaagccatcgccatcgagaacgacatccgcggcctgctgcgcaactttgggctcaaggttggcgtcgtcggttcgaccaaattcgaggaaagaattctcgaactcgtcgagggcatgccggagcttgccgagatcatggcgtctttgcttgacgctcgccggacgcttcgcgagcaggtcggaaaactgcatcaaaagctgttgtcgatcgtccgcgaagacaacgtgtgccggcggttgatgacgatcccgggcgtcggcccgatcgtttccttggctttcaccgcgaccatcgacattccggctcggttcaagaactccagggctgtcgggccggctctgggtttgacgccgatcctcaatcaatccggcgagagcaaccggatcggccggatctcccaatgcggcgacggcatgatgcggacgctgctctacgaagcggcgcaagtcatgctgacccgcacgatcaaatggtcgtggctgaaagcctgggcgatgaacgtcgccaaacggcgcggcaagcaaaaagccattgtcgcgctggcgcgccggctggcggtggtcatgcatcgcatgtggagcgacggaacggagttccgctggactaaagaaaacgcgccagctgcgggctgacgatcttcaaggcgtcaagccgccgaaaaggagaatagcccgaatccgccgcctggcggaaagatgtccctcgcgggacgatggacgaggcgagttcgctttggactcttgtatcgatcgcgtcatgcgcgatcagaacgcgagtcagattgggccgcctcatcctcctgatcccatattgggagagccaaagcgctgatcccggagagaagagaggacccgcgagagacatacatcaaaacggcattgaaagcctgaaagtgcttgaccccaaaccgccgaatagaga

SEQ ID NO: 5000 - DNA, 1439 bp, unidentified
  source 1..1439: mol_type = unassigned DNA; note = element_7a7c564
  misc_feature 1..2: note = core
  misc_feature 3..138: note = LE
  misc_feature 139..1158: note = CDS
  misc_feature 1159..1439: note = RE
  misc_feature 1199..1439: note = bridgeRNA
gaatgaaatgaacgcctcccaccctgtgagcagactttaatgaagagataaggaggcggatcctcgcgggccgacggcatcgaagtgccaaaatggtgaaacttgtgaagttttcacaggcaaaccggaggatccatcgtgaatgttacgcccgttggtattgatattgcaaagtcggtattccaggtgcattacgtggatgcccagaccggagagattgtgaaccgtgcgcttcgccgtgccgcgtttttggagcacttcgccaatcgcgccccttgcctgattgggatggaggcgtgcggcggcgcgcagcactgggcgcgatccttaatgaagatgggccatcaagtgcgcttgatgccggcgcggtttgtgaaggcgttcaacatcggtaacaagaacgacgcggccgatgcgcgcgcgatctggctcgcggtgcagcagccgtgcaaagcggtggcggttaagaccgaggcgcagcagacggtgctcgcgctgcaccggatgcgtcagcaattggtgaagtttcgcacgatgcaaaccaatggcctgcgcgggctgctcaccgagtatggcgaggtgatgggcaaaagccgcgccgccttggaccgtgcgatgcccgaggtattggctcgcctggcggatcggttgcccgcggtgctgatcgatactttgcgcgagcagtacaacggtttagcaggcctggatgcgcagattgcacagatcgaacggcgccttgggcaatggatgcgtgaagagcccgctgtccaagcgattgcccagattcctggggtcggcttgttgaccgccacggcggcggtggccgcgatgggggatgcgaagaccttccgttcggggcgcgagtttgcggcctgggttggtctggtgcccaaacaaacgggctcgggcggcaaggtcacgctgcacggtatcagcaagcgcggcgatgcgtatttgcgcacgctgctgattcatggtgcgcgcagtgtgctgcagcacgctaaggagcctggcccgtgggttgagcaattggggcagcgccggccaccgaacgtggtggtggtcgcgctggccaacaaaatggcgcgcacgatctgggcggtgctcgcccatgaccgcgtgtaccagaaggaatacgtcagtgtcaggccagcgtgatcggtcagcaatggggtatgaatattaacttttacacaggatgatcgtcgaaaggttgcgtgggcaatcgtgaagtgatgacaacacaggtcggaccgggacgtgctaaacctgaatgactgctagagcttagagctcgccaggagaatgaggggcatgtcagcggatttcatcggggcccgcagcgcatcaggctgcaacaaggccggatatagagctgcaacccatcggtgtctgtcaacacaaacgaaaatccttgcaagccgggaggcgttcatata

SEQ ID NO: 5001 - DNA, 1390 bp, unidentified
  source 1..1390: mol_type = unassigned DNA; note = element_7a7f641
  misc_feature 1..4: note = core
  misc_feature 5..90: note = LE
  misc_feature 91..1119: note = CDS
  misc_feature 1120..1390: note = RE
  misc_feature 1090..1377: note = bridgeRNA
agatggggtggttgccgccctcccgagacggcatcgcaatgtgccaagatgtggtgttgtgaccacttagcggaaaggacggcaaccgttatgaacgatacgatgattggcgtggatttggcaaagaatgtctttcaactgcacggtgcttcgatgagcgggcaagtcaggtttcgaaagaagctgtcacggcagaacttttccaagttcatggcggaacacccaccggcgttggtggtgatggaggcctgcggcagcgcgcattactgggcacgtgagatggttaggcttggccacgaagtgaagctgatcgcggcgcaatatgtacggccgttcgtcaagcggcagaaaaacgatgcgacggacgcggaggctatcgtaattgcggcccagcgaccggaaatgcgcttcgtggagccaaaatccgcggatcagcagagccgagcgattctgtttcgggctcgagaacgactcgtccatcagcgcacagaactgatcaacgcgctgagagcatgcctttatgaatatggccatgttgttcctcaaggtcgtaaccacttcaagcgtattgaagagattttggacgggctaaacagcgacttgcctgtgttgatgcttgaagaatgccgcgacttgttgaaacagatcgctgagaatacggctcgcatcgacgagcggaccgcaaagatcaaggcattgtcggctgaagctgacacggcgcggcgcttgcggaccattcctggcgttggccctttgacagccttggcgatcgaagcctttgccccgcatatggagaacttccggcgtggccgtgacttcgccgcatggctcggccttgtgccacgtcagttctcgtcgggcggcaaacaacgactgggacgcatttccaagtcagggcagtctgatatccgcaggctgctgattattggggcaatgacacgcctgaactggctgggccggaaatccatacccgaaggatcgtggttggcgcgcatgctcgcgcgaaagccccgaatgttggtcgcgatcgcactggccaacaagatggcgcgcacggtctgggcattgctgacaaaacatgaggattatcgagttccggcacaggcgccagcaacatgatgaaggtgttgtaggtagcctaatgtcggaaaaaggggtgtgagaaggcgacgactcgaatgggcaaatgatcgaaaagatctggatcgggaaaaccagccttgaatcatgagcagaagagctcgggattcagatttggacccgacccgcagatcaccataccggccagcggcttctgtaaacgccgtatctacaggcctcacagaagaccgcactcgatcacatgaccttcggttcaaagacttcttgcatcacgggcggcaaccacaga

SEQ ID NO: 5002 - DNA, 1375 bp, unidentified
  source 1..1375: mol_type = unassigned DNA; note = element_7a8d61e
  misc_feature 1..3: note = core
  misc_feature 4..82: note = LE
  misc_feature 83..1111: note = CDS
  misc_feature 1112..1375: note = RE
  misc_feature 1085..1362: note = bridgeRNA
tgatggggtggataccccctcccgacggcatcgcaatatgccaaggtgatgtgggtcacatcacaggaaggaggaagtatccatggaacaagttaccatcatcgggttggatttggcaaagcgggtttttcaggttcacggcgctactgcggatggccgagttgcttttcgcaagaagctgtcacgaggtcaggtgttggcatttttcgcgagcttaccgccttgtattgtggccatggaggcttgtgccacggcccactactgggcccgtgagattggcgctctcgggcacgatatcaggttggtgccgcctgcctatgtcaaacctttcgtcaaacgccaaaagaatgatgcagctgatgcagaggcgatagctgaagcagccagccgtccgaccatgaggtttgtcgagccgaagtcaccccgacaacaggcgcgggccatggcctttcgctcccgcgatctgtttgtccgccagaggacgcagacaatcaatgcgttgcgtgcccatctggcagaacatggcctcattgcgcctctgggcctgtcaaatcttgcaggccttcagcgccttgtcgaagacagtgcgtcagacttggaccccctcgtggtcgaaacggcgcgcatatacattgaccagatcagtgatctgtcagatcgcgtcgccaagatggaggcaacgctgaaacaggaagccgcacgatctgacgcctcgtcgcggatgatgacgatgccaggtcttgggccaatcactgccatggcaatcgaagccttcgctccgaccctgtcagtgttcaagcgcagtcgggatttcgcggcctggctgggcctagtgccgcgacagcattctactggcggcaagcaagtcttgggccgaacgtcgaagatggggcagcgcgatatccggcggttgctcatcatcggggcgatgtccgtcattcgctgggcaacccgtaaaggaacaatcccgggaacctggcttcatgccatgctcgcgcgcaagccacggaaggtggtcgcaatcgcgcttgccaacaaaatggcccgggcgctttgggcgatggaaacgcggaacgaagattatcgggatccacgactggcagcagcctgacggtgtcaggtcgccaagagtgggacgtcggcgtgtgaggaggtcatagacagtaaggacaaaagatcggtgacgatggttctggaaacgcatccgggtcacagggcagcaagcccgcagaactgattttgcaccagagccgcgcagctccataccggccagcggtcatgtgtttgccgcgcaacaggcctgatacatgaccgcacccgatcacacgtcaatgctgttcagaaaccatcttgcgcgaacgggggtatccataca

SEQ ID NO: 5003 - DNA, 1375 bp, unidentified
  source 1..1375: mol_type = unassigned DNA; note = element_7a932f7
  misc_feature 1..2: note = core
  misc_feature 3..218: note = LE
  misc_feature 219..1211: note = CDS
  misc_feature 1212..1375: note = RE
  misc_feature 6..208: note = bridgeRNA
catttacttttgcactattcaataacacgaaaaatcgtgtatctttgaaaaagaagagttgcagtgcactaatttttggactagtctttcaggactacaggctgaatcagactgcaactctaactttcggagaatttagccagttagaattttaggcattaaggcctgttaaatgtattaactacttctcctctttgtttaactgtaaatgcaaaagtatgaattattctcattttgtaggtcttgatgtgggaaaaaagtcctttgatgcctgcctggtttctttagacaaggaattaagtcatcatacctttcccaatacccctggaggcatcgaagaattattacatcgggtaaaacagcatggggtggaagttgaaaccgcccttttttgtgctgaaaacatgggtagtcacgtgatcgacttgtgtttatccagctaccagttccatttccccctggctcttgaatgtcccttgacaataaagagatcgatcggcttgcaacgcggcaaaaatgaccggatcgacgcgcggcgaatcgtgcggtatgcctgtttgcattaccgtaaactcagattatatcaattacctgataaagatctggtcaggttgaggaactggatggtcataagagataacctggtaaaacaaaaagtatcttcccgcaaactactggaactgccccgtgaaacttccggtctggctgatcttgtgactgccatgacttttttagaaaaacagctcagcctggtaaaagagaaaatctcttatgtcgaacaggaaatggaaaaaatcatttcctcgaatattgctcttttaacaaattaccagttactaacaagtataaaaggcatcggccccattaatgccattgtccttttatgtgtcacgggtaattttcaccgtttttctgatccgcgaaaatttgcctgttattgtggggtggctccttttgaacactcgtcaggaacctctatacggggtaaaacgaaaacttctaatctagccaacagggaagtgaaagtatacttgaccagggctgcaataacagctatatcatgggatccgcaaattaaagcatactataaaaggaaaacgggagaaggaaagcacaaggcatcagtgattaatgccgtcagggcgaaaattattgcaaggtgttttgcagttattaaaaggaaaactccattcgttacattaagagcatagggcggtgacacgcgcgagggaaagattatttttcttttcgaaagtctctcgcgaatcacgagatttttgaaaagaaaaagaagctgtggggggaaagaaaatcgcaataaaaatacattttaccacgattttcttcattaaatagttgcaagagacttagaatt

SEQ ID NO: 5004 - DNA, 1425 bp, unidentified
  source 1..1425: mol_type = unassigned DNA; note = element_7a983cc
  misc_feature 1..2: note = core
  misc_feature 3..120: note = LE
  misc_feature 121..1155: note = CDS
  misc_feature 1156..1425: note = RE
  misc_feature 1186..1378: note = bridgeRNA
agatggggtaatcggccagagttcttgtggatagttgaagatttggggtgctgcgcttcaggctgatgttgaaacgaggtccgcgtggacggcctcaagcatcagaaggagaagcgcagcatggaccattttgcgggactagacgtatcggtcaaggacacgagcgtctgcattgtggatgacaccggcaagatcgtgcgggaattgaaggtggcaagcgagcccgatgctctgctggcggttctgacggaccccgcctaccacttcaagcggatcggactggaagctgggccactgtcacagtggctgttcagcgcgctggccgaagcagacctgccggtgatctgcgtcgagacgcggcacatgcgggcggtattgaaggcacagatcaacaagaccgaccgcaacgatgcccgcggcatcgcccagatgatacgagtggggctttatcgcccggtgcatgtgaagaccttacgcagtcaaaagctgcggatgctgctgacccatcgccagctgctgcagtcgaaggcgatcgcggtcgacaatgacctgcgcggcacgttgcgcaacttcggcctcaaagtgggcatagtgggagcggccaggttcgaggcacgcatcagggagcttgtgcagggcttgcctgatctggcggtgctgattgaaccgctgcttgttgttcgccgagtgctgcgcgagcagatcgctgtcctgcaccgccgcctgttagcggtggtccgggacgacgaggtgtgccggcgcctcatgacggcgcccggtgtcgggccggtggtggcactgacctatcgggcgaccgtagacgtgcccgctcgcttccgcaaatccaagtcggttggagcggtgttcggtctgacgtgctccagggaccaatccggtgaacgagaccgtgcaggcgccatatcgcgctgcggtgacaagatgatgcgagccatgctctacgaggccgcccagagcatgctggtgcgctcgacgcgatggtcctggctcaaggcttgggcgatgcagatcgccaggcgccgagggaaaaagaaagcagtcgtcgcgctggcacgccggttggccgtgatcctgcaccgcatctgggtcgacggcaccgagttcaaatggacccgagagaccgtacccgcagcatgacacccgtacagcagcaataaggaggaatctcgagctccacccagcggtggaatggtgtccctcgcgggacgatggatgaggtgagttcgctcggtcgcttggacctgccaacggcaaggccgcccgttagattgttcaacctcattctcggatcccatgatggaagggccttagtgccgattccggagagaagcacgcgcccgcgagtgacccagacaccgtgacggtggatagtctgaaagcgcttgaccccagccggccgattagaga

SEQ ID NO: 5005 - DNA, 1822 bp, unidentified
  source 1..1822: mol_type = unassigned DNA; note = element_7a9ea7e
  misc_feature 1..2: note = core
  misc_feature 3..120: note = LE
  misc_feature 121..1407: note = CDS
  misc_feature 1408..1822: note = RE
  misc_feature 1460..1697: note = bridgeRNA
agcattcctgtaatgaagaaaaatgaggtttgaacaataaaataacctcttggtatgatatgagtgtcctgaagctggccagcgaaaaggacaaaacatatttaccaggaggcattcaatatgaattataaccaaaatgaaaagattgctcaaattacttctgaaacattgattataggtgtagatattgcgaagttcaagcatgtagctcgtgctcaagactttagaggactagagtttggtgcaccttgtcactttgaaaatacgaaaccacattttgatctttttttaagctggataaagcaattgatggaacaacacggcatgcgaaaggtaattataggaatggagccgacagggcattattggctcaaccttgctcattttcttaaagaagaggagattaagtttgtcgttgtaaatcctatgcatgtgaagaaatctaaagaattagatgataattctccaaccaaaaatgacgtaaaggacgcaagagttattgcacagctagtcaaagatggaagatatgccgaacctaatattccacagggggtttatgcagaacttcgtgtggcaaggaaaatacgtgatctcctatatgttgacttacaagctgtgcagggacagattcataattggttagatcgatatttcccagaatttcttacagtgtttaaggattgggaaggaaaagcagcactacaattattaaagttaaatgcattaccacatgagttagagatcctctcggaacaagagatcctcattcacctcagaaaagctgtaaagcgtgcggttggactcagtaaaattcaagaacttaaacgagtagcgaaagactctattggtattcgtgaaggttcaaggatggctaaattagagcttcgcactttactagacaagtatgagttgataactaagaagttcgaagaactagaatctgatattgatggactccttgaacgaataccaggtgttcaacaaatgttagccattacaggaatcggcaaggacactgtagctggcttcttctcagaagtagggaacttaagttactattctcaccctcgacaaatcatcaagttagctgggttaagcctaaaggagaatacctctggaaagcacaaagggcaaacgaagattacaaagaggggcaggaagacactaagggctctcctcttccgagtagcgatgcctttggttgctaagaacactgcttttaaagctttacatgagtattttacaacacgtaaaaataatcctctaaagaaaatgcaatcgttgatagccatatgtaataagctgatacgaattctttttacgattgggacaaaacaatgtgaatttagtgaagatagaatgttgaaggatattcctcatatggcactattacagaaagtagcttaggaatctttagtttgttttttataaagttttattaggaaaattatttagacatttgaagcacggattagtcagtaaaacaacaatactacggacttagatcctgtcgggcagcatcactgacatccacctcatggaaaggttggacgaaggaattttggagcatagactctgtgagacatgggagggttgacctccatgagacatgtggacatccaccagtgcaaccatacttttacttagccaccactttttggataggagtggttaggcggttaaggactttttttctctaacgcaccaaaaataaccatactttcaacttacatccatgactttgatgtcgaattaatatagatcctaatgaaatcataagaaaaagctagaaagccagagttattcctttctttatagaggg

SEQ ID NO: 5006 - DNA, 1403 bp, unidentified
  source 1..1403: mol_type = unassigned DNA; note = element_7aa27a7
  misc_feature 1: note = core
  misc_feature 2..93: note = LE
  misc_feature 94..1131: note = CDS
  misc_feature 1132..1403: note = RE
  misc_feature 1175..1398: note = bridgeRNA
caatgggatggactcctcctcacctgactaatcggcgactatgcgccagaatggtaattgagagaaaaccatttaaaaaacgaggagaagtccgtgactaatattaagcgagtaggtgttgatattgcaaaaacagtctttcacattcatgcagtggacggccgagataaatcagtctgggagggtaaatataatcgcaaggcctggcttcaggcgataattaaacgagtaccaaacggtgctttgataggtatggaagcctgtgcttcttctcattattgggccagagagttacgagggttaggctttgtagtgaaattaatagccccgcagttcgtcaagccctatgtaaagagcaataagaacgatcgtgctgatgcggcagcgatatgtgaagcattgggccgacctcacatgcggttcgtagcggttaagagcattttgcaacaggatattcaggcagctcatcgaattagagaagagcttgtttgtcatcgcacagcaaaagcgaatcaaatacgagggctcgtgggcgaatatggcattgtcgccccagttgggattggacagttaagacgtgcattacctcaatggctagaggatggcgaaaatggtctcacctctgattttaggcaattgatgtttggaatggcagaagatttagcagcgttagatgagcgtattgaagaaacaaccgcgctgatgacaaggaaggttcaaagtgaccctgctgcacagcgcctgatgacgatagggggtgtcgggcccattgttgcgagtgcgttgttgggggctctgggtgacggcaggaacttccggaaaggacgtgattttgctgcatccctggggcttacaccccggcaacatagcacaggaggtaagccgacgcttttaggcatcagcaaacgaggcaacagctatctaagaaaactgttggttcacggtgctcggtctgtgttcaggcatgcagggactaaggaggacaaattgagcctatggttgatgagtctagccaagcgcaaacatgccaatgtggcaattgttgccctggctaacaaaattgcgcgtatagcctgggcggtcgtgcataatgaagacacctacaatccatcgttagcagctggcttgtaggttgtaagcgttaatacgataactaggtagtaaccacctttgtgacggttgcgaagtatagttttgatggcaaacaggttgaaccgacgttagaaaaaccctgattaggcgtagagtttaaaaactcgtgtaagcgattgggatctaacgtgcgaatagcccattaaggtccgatgctaataatttgcatcacttaagagaccggatacacgtaggcagtcgtaccttcacgccaatcaaaatttacttgcaaacgaggaggagtccataca

SEQ ID NO: 5007 - DNA, 1461 bp, unidentified
  source 1..1461: mol_type = unassigned DNA; note = element_7aa8d1d
  misc_feature 1: note = core
  misc_feature 2..57: note = LE
  misc_feature 58..1446: note = CDS
  misc_feature 1447..1461: note = RE
cccccccattaccgtcttcgtagccccgcaacggggttaccggccttcggagttggcatgactacctccccttgtcgagtgcatggcctggggggtggtgtcaccagctccggaggcactgacagaccgctgattaggggcatgaccaccgacttcttcgcaggtcgggaggctcttcgtaatgtggatgtggcgatcagtgccgtggcagggccggacgagtacgaccggaggacaccgcacgtgatcgacaccggcgacatcgacgtctacctcggcctggacgtcggcaagggcgaacaccacgccaccgcgctcaccccggccgggaagaagaccttcgaccgtagactgcccaacagcgaacccaaactccgcgaggtcttcgccaaactgcaggccaagcacggcaccgttctcgtcatcgtcgaccaggtcgcctccatcggcgccctgccgctgaccgtcgcccgcgagctcggctgccatgtcgcctatctgcccggcctgaccatgcggcggatcgccgacctctaccccggcgaggcaaagaccgacgcgaaggacgcgttcatcatcgccgacgccgcccgggcaatgcctcacacgctgcggtcggtcgacctcgacgacgagacgatcgccgagctgcagatgctcgtcggcttcgacgacgacctcgccgccgaagcgactcgcctgtccaaccggctgcggggcctgttcacgcagatccacccgcatctggaacgggtcctgggcccgcgcatgcagcacccggccgtgctcaggctgctggaccagttcggctcgccggcccagatccgcaaggccggacgccgacggctcgtcaccctgatccggccgaaggcgcccaggatggccgaacggctgatcgacgacgtgttctccgcgctggacgaacagaccgtcgtcgtcccgggcacggatgcggccgcgctgatcgtccccagcctcgcctcctcgctccaggccgtgctcgaccagcgcaaactgctggcccaccggatcgaggaactcctggaggcccaccctctttccaaggtcctgatgtccatgcccggcatcggcatcaggaccggagcccgcatcctcatcgacgtcggtgacggcaccgcgttcccgtccgccgcccacctcgccgcctacgccggcctcgctccggcgacccggacctccgggtcctccatccgcggggaacagccctcacggagaggaaacaagcagctcaaacgcgccttcttcctctccgcgttcgccgcactggccgacccggcctcccgcacctactacgacaagaagatcgcccagggaaagcaccacacccaggccatcctctgcctcgcccgacgccgagccgacgtgctcttcgcgatgctccgcgacggcaccttctaccaaccaccaaccccgaccaccccttgaccaaagtcatagggg

SEQ ID NO: 5008 - DNA, 1191 bp, unidentified
  source 1..1191: mol_type = unassigned DNA; note = element_7aa9232
  misc_feature 1..2: note = core
  misc_feature 3..210: note = LE
  misc_feature 211..1188: note = CDS
  misc_feature 1189..1191: note = RE
  misc_feature 38..196: note = bridgeRNA
tcctttagatttgtaaaagaaaaatgatatttttattatgaagagaaaagtgtttaagtaaactaataattactccgagtacaactcatagttcgattaagacttaaacactttcttatcaaaaactcagatagaaattcgggattggagcccattattaaggagttgagatgatgataagtttctctttcaattaatcaaaacaaatttatggaaaaagtttttattggaattgacatcagcaaactaactctggatattttcgttaaaggatattgtaagacacagcactatcaaattgagaatacttcgaaagctatcaaaaagtttttcaaaagcttccccaataatgcaaataccgttgtagggatggagaatacaggtcggtataattttgaactttacgaagttttaagtaatatggatctgttggtttttgttatcaatccgcttcatttaaagaaaagcattggtcttttaaggggtaaaaatgataaacttgacagtcagagaatctgtgtttttttggagaaaaaccacatggatctagagccctggatttctaaatcttcagatattcaaaagataagcttacttaatactgagcgcaggcacagagtgaaaataagagcaggtttatcgaggcagatgaaagatttaagctttcttaaaaaccatacagataaagaaactgtaaaacttaacaagcagttaattttacttttagataagcagattaaaacaattgagaaaaaaattgtagaaattattgaatcgaacatagaactaagggaccaatatgaaagaatacagactgttccgggtgttggaaaagtattagccacgatgttcattgttaagacgaatggatttacagagattcaatcggcaagaaagatggcctgctactcaggagtggttccgtttgatcatcgatcgggttcatcaatctattacaaaccccgagtctctacgatggctgataaggaattaaaaaagattttacatttagctgctttgagttccataagattgaaaaatgatcttgctttatattttcaaagaaaagttttggaggaaaagaataagatgtctgtattgaatgcaattagaaataaaatcatccatagagtttatgccctaataaaaaacaattctgtctatgaaaataagttgcatatgtcatagaaa

SEQ ID NO: 5009 - DNA, 1351 bp, unidentified
  source 1..1351: mol_type = unassigned DNA; note = element_7ab6127
  misc_feature 1..2: note = core
  misc_feature 3..55: note = LE
  misc_feature 56..1093: note = CDS
  misc_feature 1094..1351: note = RE
  misc_feature 1119..1341: note = bridgeRNA
tgatggtgtggacacccccgccacttcggccgatgctggtcgaaggcaaccggtgatgggaaaggtgcatcctatgcgtcagcttactttcggggtcgatctcgccaagaatgtcttccaggtgcacgccgtcgacgcggctggtgtaatcgttttccagcaaaagcttcgtcgagggcagtttctgactttcttccagaaaatcgaaccaagcctcattggtatggaggcatgctcggccgcacaccattgggcgcgtgagttaatggcgattggccatgatgtgaaattaatggtcccagcttatgtgaagccctatgtcaaacgggggaaaaatgatgccgttgacgccgaggccatctgcgaggcggtaacccggcccaccatgcggttcgtcccggtgaaaagctcacagcagcaatccatactcatggttcaccgctcaagagctctcatggttcggcagagaacgatgcttgtgaatgcacttcgtgcacacttggccgaactcggtatagtcgcacctgtgggccttgagagagtagcggacctggtccagcgtgtatttaccgagcggcgagatctccctgagctcgtctacgacgtcgttgcatccttggtgaagcagattggttgcttgaccgatgaggtccgtatccttgaagcgaagatcaaggcatggcatcgaaacagtcccaccagtcgcagacttgctacgatccctggcatcggcatcattaccgcgaccgctctggcagcaacgatcagtgatccgtccgcgttcaaatctgggagacagttggccgcctggctaggtctgacgcctcggtcgaactcctcgggcgggaaagaaaggctcgggcggattacgaaggctggcgaccgttatctccgaacattgttggtcgtcggcgccacagcggtcattcgatacgctcggcagaagggcggtagcccgctgatggaatgggtcagaaagctattgcaatccaaatcaccacgactgacttccgtcgctttggcgaacaagatggctcgaatggcctgggctgtgatggctcacaacacggtttaccgccgtgcgatagcttaaggaaacacggcgcattagtcgtcgatcaagttcggagggcctgcacacaatcttgatgaataccggcgtcgccggagatcagggagaatccgttcgcgaaactgcatagtctgtatgcgcaattttgataggaacccatgatctgcggacttcatcagggcctacggcgataagccgaccatcaaaggccgaacatatggaagcagcctgccgggatttgtgattgtgaaaaggcttgacgaggggggtgtccacata

SEQ ID NO: 5010 - DNA, 1481 bp, unidentified
  source 1..1481: mol_type = unassigned DNA; note = element_7ab7214
  misc_feature 1..4: note = core
  misc_feature 5..198: note = LE
  misc_feature 199..1464: note = CDS
  misc_feature 1465..1481: note = RE
  misc_feature 1..235: note = bridgeRNA
ccccgttacctttctggtggccccagacgcaaggggttagggtcgccgggcccggcatgacttactgcccctgtctcacacatgatccggggggtgttgtcaccgggcctggtcgcgccagatgaccgctgatagggacacggccgtagttcaggtctcttcgtaacgtgggtgccagcaactgacgcatcaccaaccatggcgaccgtcaccttcgatggaaggatagtgatcgtcatggacgagaacaccggtttcgacatctggtgcgggctggacgtgggcaagcaatcccaccacgcctgcgcactcgatactgccggccgcagggtcctcgacaaacccctgccccaagaccagaccaagctcgaggaactgttcacccggctggaaggccatggtcgagtactggttatcgttgaccagccgaacacgatcggcgcactcccgatcgccgtcgccggctcgatggacatccaagtcgcctacctacccggcctggcgatgcgccgcgccgccgacctttacccaggctcggcgaagaccgacgcccgagacgcgttcatcatcgcggataccgcccgcaccataccccacaccctgcgacgcatcgacgccgacgaagaaaccctcgctgaactcaaagtgctcgtgggcttcgacgaggaccttgctgccgaagccactcgcttgtcgaaccgcatccgagggctactcacacagatccatcccgcactggagcgcgttgtcggaccacggttgaccaccaaacaaggcctcgccgtcatcgaacagctcggcggcccccaaggcatggctgcggcctcgaagtcccgcctgctcaaggtgattaccaaggcctacccgcaccgcgcccaagacttcgccgacgccatcaccgccgctcttgctgagcagaccgtcactgtcgcggacactgctgctgccgagcaagtcctgcctcagctggcagcctcgctgcgccagacactagaccagcgacacgcactcgctgcgcagatcgaacaggttgttgatgcacaccctcttgccgaggtcctgacctcgatgccaggcgtcggggtcaggaccgcagcacggatcctgctcgacgtcggcgacgcctcacaattcccgaccgccggacatctggccgcctacgccggcctcgcccccgtcacccgacgctccggcaccagcatccgcggcgagttccccgcccgctcgggcaacaagcacctcaaacgcgccctgttcctgtccgccttcgcagccctgcgcgccgacccgaccagcaaggcctactacgaccgcaaacgagcccaaggcaagaagcacaacgccgccctcatctgcctgtcccgacgccgctgcgacgtcctgttcgcaatgctccgcaaccgggagccctacaggacacccgcccccaacccagaaccttcccccacacccctcgcagcttgacaacgaacatagggaca

SEQ ID NO: 5011 - DNA, 1395 bp, unidentified
  source 1..1395: mol_type = unassigned DNA; note = element_7ab7847
  misc_feature 1..2: note = core
  misc_feature 3..79: note = LE
  misc_feature 80..1114: note = CDS
  misc_feature 1115..1395: note = RE
  misc_feature 1113..1383: note = bridgeRNA
tgttggtgtggacggctcccaacggcatcgcaatgtgccaggatgagttcgttgatatctcaaacgagggagaccgcccgtgaaacagattattcgcattggaatggatacgtcaaaaagtgttttccagttgcatggtgtgaacgcagccgagcagcccatcctgcgcaagaagctttcgcgcagagagatggtaaaatttttcgagaagtcaccgccgactgcaatctcgcttgaagcctgtggcgggtctcatcattgggcgcggctattaagttcgtttggtcatgaggtgaaattgattgcgcctcagttggctaaaccctatgtcaagcgcggcaagaacgacgcggcggacgcggaagccttgtgtgaggcgatgagccggcccaccatgcgcttcgttccggtgaagactgccgaccagcaggcggcgttgatgctggtcggcatgcgggaaaggctcattcgcaatcgaacacagctcgccaatgccattcgcggttttgccatggagttcggcattgtcgcagccaagggcatgcgccggatcgagccattgctggagcgaatagcggctgatcaatccctgcctgaattggcccgcgcgttatttgcgatgcatggcgctgaatatcgagatctgcttgctgagacgaacgccgttgaagaaaaactcatcgcactgcatcgctccgatgaatgcagcaggcggcttgccgagattccaggtgtcgggccggatggcgcatcacttttgatgatgaagacccccgatcccaggatgttcaagtcgggtcgcgattttgccgcctggatagggcttacccccagggatcattcgaccgcaggcaaggtcaggttgggggtgatcacgcgtgcaggcgacgaaatgctgagaagcgtactggtggttggcgccactgccctttttcagcatgtcaggataggtcgaagcaaacatacttcccgatggctcattgctctcccgcaacggaaaaagccgaaactggtggccgtggcgctcgccaacaagatcgcccgtattgcctggaagctcatggtgagtggcgaaacgtatcggcgaccggaaggacaaacacaagcagtataggagattggccgccacggggagcatgatatgaatgcaatcgtgtcgagctgatgctgtgaacttgcaagggaaaagcaggtggtgtgatcgatccaagacgcgtgaaactccgttagttccactggcctttttaaggtcgtcatcgtgttgggaacatgcgttgcggaaaccatcttggccagtgatcatgtgcgatcacaaacaaaggccgaacatatggcagcaagagatccgatcaaagtatctgcaaaaaatgcttgcaagtgagagccgtccacata

SEQ ID NO: 5012 - DNA, 1350 bp, unidentified
  source 1..1350: mol_type = unassigned DNA; note = element_7ab94f5
  misc_feature 1: note = core
  misc_feature 2..72: note = LE
  misc_feature 73..1098: note = CDS
  misc_feature 1099..1350: note = RE
  misc_feature 1120..1347: note = bridgeRNA
taatgggatggtcacccccacaccctgccaggggttaggctctggctgggggcattcacggagaccatcatcatgagcgcagtcgcactggtaggcatcgatctcggcaagcacaacttccatctgcatgggcaggacaagtctgggcgagaggttttccgcaagaaggcgacgcgtctacagatgatgcgattcttgagcaacctgccaagctgcaccgtggcgatggaggcttgtgccggatcgcatttcgtggcccgccaactgatagcgatcgggcatgaggcgaagctgatctcaccgcagttcgtgcggcccttcgtcaaggctaacaagaacgacttcgttgatgccgaggcgatctgcgaagcggcttcgcgaccggcaatgcgcttcgtgacgcccaagaccgaggcgcagcaaaccctgtctgtgctgcatcgaatccgtgactctctggtgcgtgaccgcaccaagaccgccaaccaggtccacgccttcctgttggagttcggtatcagcctgcccaaggggctgccgctgctcaggcgtttgccgaacacactcgccgagcatgagctgccgcctcggttgatcatgctgctaacacgtctacaccagcacttctgctacctggatgaacagatcagggagttggacaaggaaatggccagccagcttgccgaagacgacctcggaactcgtctgttgaccataccgtgtgtgggtccgatcacggctagcctgctgtccgccgagatgggagatggtaaacagtatggcggcagtcgcgatttcgcggcttcggtgggactggttcctcgccagtacagcacgggaggccgagccaacctgctgggcatcagcaagcgcggcgacaagaacttgcgccgcctgctggtgcaatgtgccagggtctacctccagcgcctggagttccagcagggcgccttggccgactgggtgcgctcgttacgcgaacgacgccactcgaatgtggtggtctgcgccttggccaacaagtttgctcgcattgcctgggcgatagccaccaatcgctcgagatttgacccagagccaagcacttccggagcctgaccccgcgtctacagcaggaccacgaacaccctttcaggtttgcgatgttgaacaattgatgacgtgaacggcccaccggcctggcgaagaacctggtacgaaaagaggctttcgaagccgcagtacttttaaggatcgctaggtgcgactctcatcgtggcgcggggcaagccccacactgacgccggatagatttaggcaagccaaacactcatcgctgatcagcattgcagaaacgggggtgaccataga

SEQ ID NO: 5013 - DNA, 1337 bp, unidentified
  source 1..1337: mol_type = unassigned DNA; note = element_7abf5d8
  misc_feature 1: note = core
  misc_feature 2..72: note = LE
  misc_feature 73..1071: note = CDS
  misc_feature 1072..1337: note = RE
  misc_feature 1105..1333: note = bridgeRNA
taatgagatgatcgcccccacctgcgacgcgtgcgctaaccttaccgcgtcaattgcgaacaggagaacatcgtgcaagacgtgacgctcatcggaatcgatctcggcaaacattcgttccatctgcctggacaggacgcaagaggaaaggccatattccgcaacaagctgagccgcaagcagctgatcgagtttctcgcgacgcttcatgcctgcacgctggtaatggaggcatgtgcaggcgcgcaccacatggcgcggaggctggcgaccttgggccatcaggtgaagctcatctctccgcaattcgtccgtccgttcgtcaagagtaacaagagtgattttgtcgatgccgaggcaatctgcgaggcggcgtcgcgtccctcaatgcggttcgggactcccaagaccggatcgcagcagaccctgtgcgcattacacaaggttcgggactcattcgtacaggaccgcgtcaagacgatcaaccagatacacggattcctgctcgaattcgggatcagtctgcccgtgggcaatgcggtaatcagacgcttgcctgctgtgctatccgagcacccgttgccaccgcgactgatcacaacgctcgagcgcctgcatgctcatttcaaatatctcagcgaacaaatcggagagattgaccgcgaactggcgatgcagctggccgacaacgatctaggtcaacgtcttctctccattccgggtgtcggtcctgtcaccgcaagcgtgcttgccgccgagatcggcgacggcaagcagtatgcgagcagtcgggacttcgcagcgcccattggactcgtgccccgacaatacagcacgggcggccgcacgaacctgctgggtatcagaggggggacgcgaatattcgcagactcctcgttcaatgcgcacggacctacatgcacagggtttccaacaaggctggtccactggccgagtgggtccgttcgatgcttgctaggcggcattccaacgtggtcgcttgtgcactggccaacaaattcgcgcgtatcgcgtgggcattgtcggcgcaccatgcctcgttcactctaaacaccaccatgttgaggcctgagacctcaatttgaaccgtcccacctggttttgcgactgttgaagctgatgacatgaacggcacaccggcctgacggacaccctgtggaaaatatcggcttaccgcaaagccgacgtgctttttaggactgtcaggcgcgaattcatcgtggcgcggggagcgatccccacaacgacgccgaatagatttacgcaagccaaccatgcatccattcagcgttgcaaaaacgggggcgatcatagat

SEQ ID NO: 5014 - DNA, 1522 bp, unidentified
  source 1..1522: mol_type = unassigned DNA; note = element_7ac6748
  misc_feature 1..3: note = core
  misc_feature 4..491: note = LE
  misc_feature 492..1376: note = CDS
  misc_feature 1377..1522: note = RE
  misc_feature 3..220: note = bridgeRNA
cttatattatatttagcgcagttagctactgccaaagcccaagtggtatacttggaataagccactgtggattagtttattccctccaatcgcttgacgatttccgaaagggtctaaccacagctttttgtttcaattggtaatgagtttgataacgcatagacgttttatctcgtctaaggtaacaaggcaaaaagttcgtggataaccaagtagacttgaaatactatatctggaggtactcccatgctttatgtgggcattgatgtcgctaaaaataaacacgatgttacagccttgaatgttcgaggaaaactgttcttaaaccactcactttttcaaataataaagctggttttgaacttttagatctgtctcttcgacagctcaaccaagactatctcatcgctcttgaagataccggacattatgcctttaatctactgaacttcctgcatgaacaagaatataaagtttacacctacaatcctttgctcatcaagaaatttgccaaatcattatcacttcgcaagactaaagcggataagaaagacgctcatggcatcgctcttaaacttctttctgaccccaatcgtgaacaatttcaacacgataatcggcaagtagacctaaaaatactggctagacatattcatcgtctcaagaaaaaacagtctgattggaaagtacaatacactcgttgtcttgatatcatctttcctgagttggataaaatcgttggaaagcattcagaatatacctaccaactcttgacgcgctaccctaatcctcagaaaaggattgaggcaggatttgataagctgatagaaattaagcgattgaccgcttctaaaattcaggatatcctctcagtcgcacctcgttctatcggaacaacatctcctgctcgtgaattcgaaatcatcgaaatcatcaaacattacaagaggctcattgacaaggcggaaacatgtgtcaatgacttgatggctgagttcaactcagtcatcacgacggttactgggattgggaatcgtttaggggcggtcatgttagccgagattcgaaatattcatgcctttgataatcctgctcaattacaagctttcgctggactggattcttctatttatcagtcaggtcagattgatttagctggaagaatgatcaaacggggttcccctcatctgcggtgggcactcatacaagctgccaaagcatgcgctcgcttttcacctgcttttaaggcctatcttaagactaagttagaacaaggaaaacattacaatgtagccatcatccaccttgcaaaaaaacttatccgaaccctgttttatatcctaaaaaagatctgccatttgacgaacaaaaagtgatgtaatttctgaaattaacacaggattacctttgaaaaaatggactttttcaagggctttttgccgtgctctaaaatcatcgccaaatcatcaaattgaaataagaaatagtttagataaaactattgacttttcttatagtttgt

SEQ ID NO: 5015 - DNA, 1390 bp, unidentified
  source 1..1390: mol_type = unassigned DNA; note = element_7ac83d8
  misc_feature 1: note = core
  misc_feature 2..78: note = LE
  misc_feature 79..1128: note = CDS
  misc_feature 1129..1390: note = RE
  misc_feature 1156..1381: note = bridgeRNA
taatgggatggtccggccgtgttcctgccctgccagcgatagaagctgggaaggggcgcccacgacaaggagcacgccatgtcccagatcgcccaagctgccgtctctgtaattggaatcgatatcggtaagaactcgttccacgttgtaggccaggatgaccgtggcgcgatcgtcctgcgccagcggtggtcgcgaggccaggtggagacacgcctcgccaatatgccgcgatgcctggtcggcatggaggcctgcgtcggggcgcattatctcagccgcaagctcaagacgctgggccatgatgcccggctgatgccggcgaagtatgtccgtccctactcaaagggacagaagaacgacttccgtgatgcagaggccatcgcggaggcggtgcaacggccgacgatgaagttcgtggcgaccaagaccgcggatcagctcgacctgcaggctttgcatcgggtacgcgaacggttggtcagccagcgcaccggcatcatcaaccagatccgtgccttcctgctggaacgcggcatcgcggtgcggcaagggcagcggttcttgcgcgctgagctgccacgcatcctggccacatcgcccgatgttctgtcgccccgcatggcgcgggtgatcgaagacttggcgagcgactggcgccggctcgatgagcgcatcgaagggctgtcagcggagatcgaagttctggcctgcgcggactccggctgcgagcggctgatgagcgtgcccggcattgggccgattatctccagcgcgatggtagccgcgatcggtactggagatgccttcagtaaaggccgcgacttcgcggcttggctgggacttgtgccacgacagatgtcaaccggggaccgcacaatcctcggcaggatatcgaagcgcggcaatcgctatctgcgcgtcctcttcgttcaggcggcatgggtggtgctgatcagacccaagagttgggagcgtcacggtctcaagccctggattgagtcggccaggaagcggctgcaccacaacgtgctggcgattgcactcgccaacaagctcgcccggatcgcctggagtgtgctggcacggggtcgaggtttcgaggcgagcaagcttcacgctgtgtgatcaacaaccgtcaatatcgacataggattccaccgaggtctgcgagagtgtgacacgagatggaggttcggtcttcccggcgcctgcaaaagctggtggcactttcggcccaacgaggcctctccgctaatgagctcgcaggcgcgctgatatccatgatggcccgaagcaaaaagcttcaagcgaaggccggatacataaatgcaagaccgctaccgccacttcgacgccattctcttgcgacgcacggccggaccataca

SEQ ID NO: 5016 - DNA, 1652 bp, unidentified
  source 1..1652: mol_type = unassigned DNA; note = element_7acd090
  misc_feature 1..2: note = core
  misc_feature 3..287: note = LE
  misc_feature 288..1613: note = CDS
  misc_feature 1614..1652: note = RE
aattcccctcttttccaaaaaaaaataattactttaaggtaacgtttgtatcttactggttagcccattgcaagaccgatttcaaattgatgccttaaaagctcgtgcgcaattctggttggaatgtgaaaagcctttgatattgacctatcaaaggcttgtgataattacactgatgaatcctttatggatatctcgttcagaatattttcttgtttacaatatacattctctttgggttttttattcatttaaaaccaaaaataatggcaaagagaaaattaaaaatggaaatcatcaatcctaatgcagctggaattgatattggcagtcgctcacattttgtagcaattaatcaagacctctcagatgtaagagagtttggagtttacgctgaggatatgaaagaattactcaagtggctacttgaaaatgacgtgaaaactgtggccatggaatctacaggttcctattggcaaaatttatttactgaattacaaaattccgctatagaagtaattctaaccaatggaaaattcaccaaaaatatccaaggaaagaaaacagatgtactagattgtatgtggattcaaaagttacataccctcggacttttacggggaagttttttgcctgatttacaaacagaacatctaagaaccttagtaaggcatcgcggtaatttaattgatacaacttcaaaagcctctaaaagaatggctcaaaatatgagactgatgaatcttagattggatgtggtagtaaaagatattgttggattaaccggtttacgcattataaatgcaatatgtaatggtcaaactagcagtgaagaacttgcaaagctacgacacggaaattgtaaaaaatctgaagaagaaattgcaaaagcactacaaagtaataaccgccaagattatttatttgttttaaaacaagaactacaaaaatatcaagatgcacagagattaatcttagaatgtgatatggaaataaaaaaacttttggatgaatttatcaatcaagatgatgtgaaaaaatccctttgtattgataagaaagtacataaaagaataaataaaaacacaccaaaaaatctagatttaaaccttatttcttatcaatactttgacggaattgatttgtacgctatagaaggttttagtcacggtactgtactaactttaatgagtgaacttggcgaaaatggcatcttaaaattccaaaacgcacaacactttacatcctggcttagattagcaccaaataataaagtctcaggaggaagaattcttagcagtcgaacacctaaaggtagtaatagacttaaaattgcactaagacaagccgcaaattctattggaaatttaaaagatactcacctttctaatttcttcaatagaatagcctatagaaaagggagagctgttgctgtttctgctactgcaagaaaagtagccactatactttggaatatgctttacaaaaaacaacaatacaacccacctactgtttatgaatatcttgaccaaaaaagaaaaagaaaagtaagtgaacttcaaaaacaaattgctaatttagatgcaagaatgagtaaaataagacccgcttgaaagccagtaaaaacagggtgtaaaaaaaacgttactcag

SEQ ID NO: 5017 - DNA, 1516 bp, unidentified
  source 1..1516: mol_type = unassigned DNA; note = element_7acd84e
  misc_feature 1..2: note = core
  misc_feature 3..250: note = LE
  misc_feature 251..1477: note = CDS
  misc_feature 1478..1516: note = RE
  misc_feature 48..231: note = bridgeRNA
cttatattagctctgttgcagacattcatattggagatcatgtttatgtgacaccagtttcaagagcttgctggcatgaggacccactctaaccgattacccatcggaggatcagggagagactgtcccggccagtgagagaacggagttgagattcaatagaaagtggtcccttggttgaggaccgatataaggcaaacattccgttcaacgcacttgggattggcactacagcaagaaggagaagccattggagcgatattatttgggagtcgattgggccgatgagtttcaccaggtctgggtcagcgatcctgagggcaagaaggtaagcgagaaaaaggttgagcagagcgttggggggctgactgagtttggtcgttttctcgatgagagccgaagcaagggagtggagctttgggcggccatcgagaagcctcagggacgaatcgtggattttcttttggaccacggggtggtggtctatgcggtgaaccccaaggcgctggatcgggccagggaccgttttcgcatgagtcagtccaaaagtgattcctttgacgcctacgtattggcggagtttgtgagaaccgatcatggtcatttgcgagcgctcaagcccaactccgattcggcccaggagcttaaactgctcacgcgcgatcagcagcggttggtccgtcagaagacgcggctgctcaaccagctcactaccacactcaaagagtactattctcggccgctggagatgttttctgatctggaatcgaacctcgcgttggattttctcaaacagtacccaacaccgcaggctctgtcgcgactgactcgccggcagtggaatcgcttttccaagcgcgagcattctcttggagagcagcgctctaaagagctgtgggacaagctccagcaaccgcagcttgaggttcccgagcacgtggtgagagccaaggcgcggctgttggaggtgttggtggctcagctgatcactttgcgcgatgcggttgagagctacaacgagagggtcaggagttttttcgcctccatgccggcggctgagctggtgagactgctggcgggagccaagacgggcacgatcgtggccacactgtgggccgaactcggcgatgctaaggatcgctggcagtcgtttcgtcacctgcaagccgaggcgggtgtagtgccggtgacccaggccagcggtaagagccgcgtggtcaagtttcgtttctgttgtaacaagatcctgcgccacgcggcctactggctggcctttgtctcgctcaatcgaagtgagtgggccaatcattacgatcgtgaccagcgggctaaaggacatagtcaccatcgatcgctgagggctttggcagccaagtggctcaagattatctttgtgatgtggcgcgatcataaaccgtatgatgaaaactatcacctggccaacatcacccgacaaaaaatgcgccaggcggcataaaaaaatagatagacacacttgacaagcgacatagaaagt

SEQ ID NO: 5018 - DNA, 1463 bp, unidentified
  source 1..1463: mol_type = unassigned DNA; note = element_7ad4216
  misc_feature 1..4: note = core
  misc_feature 5..238: note = LE
  misc_feature 239..1453: note = CDS
  misc_feature 1454..1463: note = RE
ctcactggtccaccatccaagtgtcggcagcggtgaagctgtcggcgcacccctggtgaccgccggtccatcgccaagttcgctcgcggctcgaccgccacggtgagtccagcgaggtccggcggcccaggacgccaatagggctgagcgccccagagcgccgatcagtgagcgaccggcagacacgtcctgtaaccaccgggtgcttccccactgggcaaacagcgaggaggctgaaatggatgatcccaccaccggctacaccggtgtggactgggccaccgacgcccacgccgtgtgcgtggtcgacggccagggccgggtcgtcgtcgagttcgacgtggcccacagcgccgagggcctggccgatctgtgccgccgggtgctgcgaggaggcgctcgacgggtggccatcgaacgacccgacgggcccgtcgtcgccgctctgttggctgccgggctggaggtcgtggtggtggccagccgttgggtcaaggcgctgcgggagcgatacggcagcgccggcaacaagtcggaccgctccgacgcctacgtgctggccgactgcctgcgcaccgacgggcaccgctggcgatcgctggagccggactcgccggcaacggtcacgctgcgcgcccatgtcagggcccgcaaggacctggtcgagacccgggtggcggtcgccaaccagctccgggcccacctgcgcgtggtgttccccggcgccgttgggctgttcagcgacatcgacagcccgatctcgctgcgattcctcgagcggttcccgtcggccagccgagccgcctggctgtcggagaaacgtctcggctcctggctgcgggccaacggctactgcggccgcaaagccccggccgagctctacgcccgactgtccgccgccccggccggcgtcgggggtgacgacggcgacgcccgaggggccgtcgctgcggcctacgtggtggttctgaaggctctgcggacccagatcgacgagctgaacacccgcctcgacgagctcctcgacgcccaccccgacgcggagatcttccgatccctgccccgctgcgccaccatccgagcggcgacgctgctggccgagatcggcgactgccgggcccgctttccggacgccgagtccctcagctgcctcgccggtgtcgctccctcgactcgtgccagcggtcggcaccgggccgtcacgttccgcttcagcagcgacaagaaactcagcgacgccctctgtgacttcgccggggacagctggcggggcaacgcctgggctgagcagcgctaccgccagctccgagctgccggcaagacccacccgcacgcggaacgcatcctcgcccgcagctgggcccacgtcatctggcgttgctggcaggaccacactccctacgacccggcccgtcacggttcctacgcacgtctccacgaggaggccgcttgacatagggcta

SEQ ID NO: 5019 - DNA, 1441 bp, unidentified
  source 1..1441: mol_type = unassigned DNA; note = element_7ad44a4
  misc_feature 1: note = core
  misc_feature 2..223: note = LE
  misc_feature 224..1132: note = CDS
  misc_feature 1133..1441: note = RE
  misc_feature 17..235: note = bridgeRNA
ctgatagatggttctggtggacgtggggcgtttgctcgtagcgtccagggactcggcgggtcggctcttgatgtgcctgccactggtgttcgggttggctttcgaacgaagcgccgatctgccgggtttccctaggccggcgcgtggctcgaaacaggcgagcaccgattcacatcaggagtgcctacggcggccgatccctgcgcccccttgaggaggggcgatggtgttgatcggtattgatccgcataaggcgtcacacacggcggtggtgatcgaccgtgacgagcaggaactggcccgggtcacggtccgcgctagccgcgggcaggtcagtgaactgttggcgttcgccgcgccgttcaccgaccggcggtgggcgatcgagtccgcgggtgggctggggttcttgctggcccagcagctggtccgcgccggggaggacgtggtcgatgtcccggcgacgttggcggccaaggcccggctgctggggtcggggcggggctcgaagaatgatcccaacgatgccttgtcgaccgcggtggcggcgctgcgtgacccgcggctgcgggcggtggtcgtcgaggacccggtgatggtgctgcggctgctggctgaccggcatcaggacctgaccagtttgcggacccaggcggtgtgccgtctgcatgcgctgctggccgcattgaccccgggtggggtgcagaaacgattgtctgccacggctgcggccgtgttcttggcccgggtccaccccgacagcgtgaccggggtgacccgccgccagatggccgccgacctggtcgccgacatccgtcgcctggacaaggccatcgccgacatcaaggcccgcaccgcggtcgcggtcaccgcgtcgggcacgaccgtgaccgacctgtacggcgtcggaccggtcatcgctgcgcttttgatcgggcattccggggacgtccggcgctttcccaaccccgggacctacgcctcctacaacggcaccgcgccgatcgaagcctcgtccgggccgaaggtgcggcaccggctcaacccccgtgggaaccgccagctcaaccacgccatgcacatgatcgccgtcacccagatcagaggcgacaaccccggccgcgactactagcgcaagaagatcaccgaggggaagaccacccgcgaggcccgacgagcgttgaagcggaagatcagcgacgcggtctaccgccagctcaaagccgacgccgtcggctagccgaccggtctcggacaacaagcagtccgggaggacaaccagggacgtctcttcatccagcgcgaccggcctcgcaccctgacagccggctctttggatcagtcactcccggaccacaacgaaaactacgccccgagcaccccccacgccaaggggccagcccagcacgcgcgaaaacggcccttgacaacaaacaggctt

SEQ ID NO: 5020 - DNA, 1341 bp, unidentified
  source 1..1341: mol_type = unassigned DNA; note = element_7ad63db
  misc_feature 1: note = core
  misc_feature 2..66: note = LE
  misc_feature 67..1098: note = CDS
  misc_feature 1099..1341: note = RE
  misc_feature 1126..1332: note = bridgeRNA
tatgggatggcccgcccctcaccgaccggcattactatgctgccggaatagaagaggagaggaccgatggcgaatccggcgatcagcattctgggcgtagatcttggcaagaacagctgcagcatcgcaggccttgatgccgcgggtgctgtcgtgatgcggcggcgaatgacgcgcgaaggcttggtcaaattcgtctcgaagttgccgcaatgcgttgtggcgatggaggcatgctgcggcgcgcactttttgagccgcatcttcgtgacacatggacacaccgtacgattgatgccgccggaatacgttcagccctacgtcaaggcgcagaagaccgacgaccgggatgccgaagctatcgccgaagccgcgacccgtccgacaatgcgcctagtgacgccgaaaagcgaagcgcaactcgatctgcaaatcttgcatcgggcgcgagcgaggttggttgcggagcggacacggctgaccaatcagctgcgcgcgatgttgctggagcgtggtatcattctgccgaagcgccgcagccccctgatcaaacggctcgacgaactcatggcgaacaatccgcctatcagcgccagaatgctgcgcctgctgaacgacttgcgagaggaatgggcggacctggaccgcaggattagtgcctatgacgaggaactgattgcaatgacgcgggaagacgatctcgcccggcgtctggttacggttcccggcatcggcgtgatcaatgcaacggccttggtcgccgcagtgggtgatgccagcgccttcgccaaagcgcgcgatctcgccgcctggctcggtctgacaccgcgccaacactctaccggcggcaaaaccaaaatgctggggatcagcaaacgcggcaatcgttacctgcgaacccagctcatccacggcgcgcgggcggcgatgcggcacttcgccgaaagaccaacggcgcttggggcctggatccgcaatctgcttgcacgcgcgcatcccaatgtcgtggtggttgcgcttgctgccaagctggctcggatcgcctgggccgtccttcggcgcggcgacgcatatcggacgcaaggaagcctggtctgaagtaattgcggccggacctaaccggttgcccaacatgtctgtggaggtgagaaagatggcataacggtcgaaccggcggagcggtcagcctgattaaaaatgtggcgcatgacgccgatagctttatgaggccccacccgcgcggaacccatcttggccaggacaacaagcctgagaccggatacgttgatgcagacccactaagtcatccattttacccttgcagacggggcgggccatacg

SEQ ID NO: 5021 - DNA, 1457 bp, unidentified
  source 1..1457: mol_type = unassigned DNA; note = element_7ad8c85
  misc_feature 1..2: note = core
  misc_feature 3..46: note = LE
  misc_feature 47..1204: note = CDS
  misc_feature 1205..1457: note = RE
  misc_feature 1212..1455: note = bridgeRNA
agatgagatggacgccgccctcttctgagcgaagagggagggtgcgatgggtaggcagtcgaagcaagcggatcccctggagcccgaacggcatcagtgtgccagagtggaagtgtctagcaaccactcgagggacaggggatccaccatgaacgttacgacttacggcttggatttggcaaagcgggtttttcaggtgcattgggtcgagccgcagaccggggagctgaagcgcaaggcactggcgcgggccgacgtgagtgccttctttgcccgccgggcgccgggtgtggtggcgatggaggcctgtggttcggcgcatcactggggtcggatgctgagcggcctgggtcatcaggtgcggctgattgcggcgcagttcgtgcggccgttcgtcaagacgaacaagaccgatgcggcggacgccgaggcgatctgggaagcggtacagcggcctgggatgcgcttcgttgcgctgaagaccgaggagcaacaggcggtgctgtcgctgcatcgcatgcgagcgcagctcgtaaagatccgaacgatgcagggataccaggtgcgcagcttgacctacgagttcggagtggtggccccgaagggctggcgagcgctcctgacacaggtcgcgccgctgctggccgacccgacgcgctgtccggtgcccgagctggcacgagtcgagctgctcaaccagcttgaggggttgcgtaccctgaccgctcgcattgatgagcttgaacgtcagatcggcggctggcagcgtcgcgaggcggagtgccagcggctggcagcgatccctggggtcgggaggctcacggccacggcggtggtcgcgacggtgtctgacgcgcgcagcttccgctccgggcgagagtttgccgcctttctgggtctggtaccacggcagtcgggcaccggcggacgggtgaagttgctcggcatcagcaagcgcggcgatccgtacttgagaacgctgctgatccacggtgctcgcagcgtattgctgtcgcagagtcgagctgatcgggtgatggacccatggctcagaggcatgctgtcgcgacgacccaagaacgtcgcgatcgtagcgctggcgaacaagatggcgcgtacgatctgggctctcatggctcatggtcggacgtttcatcggagctggagtcacgctgtgacaccggccgctccagccttgtcctaaccgaacggagggacagccaaacagttcaggcaggcagcgttcttgtgatggcagaacaggtcggaccgtgaggggataaacctgcatgatgtctcggacttagagtccttgcgctagatgaggctctcttcagcggatttcatcagggccacgtagagcgaagctctgcacacgtaggccggatataagactgcagccgcacctctgtgccagaacgaacacgctgcttgccaactcgggcggcgtccatata

SEQ ID NO: 5022 - DNA, 1188 bp, unidentified
  source 1..1188: mol_type = unassigned DNA; note = element_7adf34f
  misc_feature 1..3: note = core
  misc_feature 4..209: note = LE
  misc_feature 210..1172: note = CDS
  misc_feature 1173..1188: note = RE
  misc_feature 12..204: note = bridgeRNA
cttgtgtcttggtttcggactacaatcggttggtatgggcgcgacagaccgatttctccttgatcggagcttcgctctaagatcgcaggaaagccagggtcgtcgcgcccctttgagctcggtggagcccgcacagttgcctgggccgctggcctcgccagtgagcccgtacccgcaaggttgggccatgcccgaaaaggaggagcgttttgagcaccgccacgcctaccctctacgtaggcatagacgtttccaaggccaccctcgatgttgcgatcctcccgtccgggaggcatttcgtcgtctccaacgacgagagagggatcgacgagctcctcggcgggttcgaagatccgcgccccaccctcgtggtcctcgaggccagcggcggctacgagcgcccggtcgcggcggccatcgccgcttgcgggatcgccgtcgccgtggtcaaccccaggcaggcccgcgacttcgcccgggcgaccggcaggctcgccaagaccgatgccctggacgccaaggttctcgcccgcttcgccgaggccgtgcggcccgagcctagggcgctccccgacgaggaagccagggagttctcggccatcctcgcccgcagacggcagatcatccagatgatgagcgcagagaaaaaccgcctcggcgccgctacctccgtggccgtcgcaagacgtatcggggcccacgtccgctggctcgaaaaggaactcggccgtaccgaccgggacctcgatgaggccatcgagggcagccctgccttcaaggagaacgaggccctcctcaggagcgttcccggggtaggtccggtcttcttgtgcaggacgctcatggccgagttgcccgagctcggctcccttcctcccagggaactctcggctctggtgggcgtggctcccctcaaccgagactccggcacccttaggggcaggcgcgccgtctggggcgggagagccagggtgcgtgaagcgctctacatgggcgctctggtcgccacgcgatacaacccctgcataaaggagttctacgagaggctggtagcggccggcaagcccaagaaggtggcgctggtggcgtgcatgaggaagcttttggtgatcctcaacgcgctccttagagaccgcactccctggaggtgtcctcatgccctaaactcctgatccttcacaacagttg

SEQ ID NO: 5023 - DNA, 1616 bp, unidentified
  source 1..1616: mol_type = unassigned DNA; note = element_7ae0d25
  misc_feature 1..2: note = core
  misc_feature 3..238: note = LE
  misc_feature 239..1492: note = CDS
  misc_feature 1493..1616: note = RE
  misc_feature 14..297: note = bridgeRNA
ctgttacaatgtaattgacgggtaaaaccttgcacgccagtaagggtttacacgtacttgttacttaagctatactgaaagcagtaattggactggcggatctctccttgggagaaagcgcccgtataaaagactgtcatccatgctttcattatagcgttcggtttatgcaggttgagccacagtacgtgcgttcgtgtcaccaaacagattgaatatgtaatgagtaaagcgtggtttgcccgattacaatttcaattcaggagatgcatttattatgaacgcagtaggtatcgatgtttccaaaggtaagagtacagtcgctgtacttcgtcccttcggtgaggttgtggcttcgccttttgatgttgctcacactggaagtgaattaaagtcattagctgacttcataaaggaacttcgtggtgagactaaggttgttatggaggcaacaggaaactattacgaacccattgcccgttacctccacgaacaaaatatatttgtttccgtagtcaatcctgtgcttatcagtgacttcggtggaaacacattaagaaagcctaaaaccgataagaaggactctttgaaaattgcctcttatgcattaagctattgggttgatctgaaggaatatatccctcaggaagacttaagaaagtccttgaaactgctgaacagacagtatcagcaggcgtctaagttaaagaccatgatgaacaataacctcatatcattacttgacctgacattccctggaataaataagatatttacatcaccttccagagaatcggacggtcatgaaaagtgggtagactttgtattagcgtttcctcactgcgatatgatctcaaagctcactatcaaagcatttgcaaggaagtacaagaagtggtgcgacaataattcttattacttcgccgaagcatcgtgcaagaaaatacatgatttctcaaaagagtgtatcagtagcgtatcttcaggagaagcatctgcatttgctattatacaagccgcaaaaatgcttaattccgctaccgagaactgtcacgtcatccagcttgaaatgaaccgtgttgcagctcagcttccagaatacagtactgttatgtccatgtatggggttggaaaagctatggggcctcagctgatggccgagattggggatccaagacggttccacagcagaaaggcaattactgcttactttggttatgatagcgagaataacgattccggtcagaaagtatcaccctcaaattcaatgacaaagaaaggtgcaggcgctctacgaaggaccttattcatcattatacaggtattgttaaaaaccaagccagtcgataatcctgtttatgattttttgataaagaaacaatccgagggtaagcattactattcatacatgaacgccgctgcaaacaagtttcttcgcatttactatgcaagagtaaaagaagttttatctgccccagaagcctcagcataaatctatcatttcaacgaatatttttttcagactgcctcggctcgcagtctttttgtcgtacgcttttttaccttgaaaaacttttcttttttttcaatttagggcttgacttttatttgcaggt

SEQ ID NO: 5024 - DNA, 1653 bp, unidentified
  source 1..1653: mol_type = unassigned DNA; note = element_7aea4c2
  misc_feature 1: note = core
  misc_feature 2..293: note = LE
  misc_feature 294..1565: note = CDS
  misc_feature 1566..1653: note = RE
tttttgtcattcctttcgcttcgctcaaggcacaaacaagttatgaaaaatgttgtgcccctccactctttgatttataattcttgtatggaatagcaatacactacagagcacggaaggagaagtggcgaatttatttcgaccccgtatagttatatgtgccgtcatccttacaagcacaaacaagtgggacattgagcccggactcttatcattggtaataaaccatgtttattcagtcgcaggatgacagtcaatgttgctattccctttttattaaggtggtgatacttatgatgaagttaaaatactccatctgctgtggacttgatgtccacaaaaatgttatcgttgcaaccatcgtaactaccaataaagacggaatatctgaatataagcaaaaatccttttcaactatcaattcggatattcaaaagtttcacaactggcttatcgagaataattgctatcatgtttgtatggaatccaccggaaagtattggattcctatttttaattatctcgaaaatgacattgatgtctgccttacacatccgaagtatgtcaaagccattaaaggcaagaaaacggacaaaaaggattctaaatggattgctgacctctacaaatttgatcttgtcagatgttcctttattcctccaaaagattttcgtcagcttagggaactttccagataccgtttcaagctggtctgcatgaagtcttccgagaagaatcgcattcagaactgtatgaccgtttccaatgtcggcattgccagtgttctttctgatccttttggcaagacagcaactgaaatcatctcttatctattggagcatactgccgattccatggatgaaaaagctgttcgcaaactcataaagaaaggggctaaatccaaggctgatgaaatcatcgaagccatcaaaggctacactattgaaacagatcaggctaaaaaactagagcttgcccgggggcatctggaatatctcgatgatatgattacccagaccgaagtggaactctatgtccgcatcaagccttattacgagttcgtggagtttgtcagtaccatgcccggcatgacagagttaagttccacgattgttcttgcagaaacaggcgttgatatggatatttttgatgatgcaaaacatctgtgttcctggtgcggactttctcctgccaacaatgaatccgctggtaagaaaaagtctgtccgcattgccaaagcaggcgattacctgaaacctatgatggttcaatgtgcccttgctgcaatcaaaagtaaaaaaaagccttattttgcaatcaaatatggtcgaatcaaaaagcgacgtgggcacaaaaaggcaatcattgccattgcaagaatgatgatggtctgtatttaccacatggtttcagaaaagaagccctttacccctactgactatgaggaattgatgaaccctcagaatcatgtagagcgtgttgtcctgaatgagaacaatgtgtttgcttaccttgaaagccttggttacgacagctctaagttagtgaaacgcaacgataactaacattttttctgctttctatacttgtaaaaacggggttttatgaacccttatacaagtgcgccctaaaatctactttatttttcactct

SEQ ID NO: 5025 - DNA, 1380 bp, unidentified
  source 1..1380: mol_type = unassigned DNA; note = element_7aea9c9
  misc_feature 1..2: note = core
  misc_feature 3..80: note = LE
  misc_feature 81..1103: note = CDS
  misc_feature 1104..1380: note = RE
  misc_feature 1102..1368: note = bridgeRNA
cgatggggtggacgcccccactcgacggcatctgtgtgccagaatggttgtgttgaaaccattacagagaggaagcgtccatggagaaggttagcatagtcggcctggatttggccaagaacacaattcaggtgcatggagcagctgcggacggctccatcattttccgccgcaaggtgtcgaatggcaaactcctagagtttttatctggaataaacccatgcacggtggcgatggaagcatgtgcaggcagccactactggggccgtgagatcggcaggcttggtcatcatgttagattaatcgcaccgatatatgtgaagcccttcgtcaaacgccaaaagaatgatgctgccgatgccgaggctatttgcgaagcggcactgccaccaacgatgcggtttgtcgcggtaaagagcgaggcaaagcaggcttccggtactctgttcaaggtacgcgatcttctggtgcggcaaaagacgcaaattatcaatgcgctacgcggcctcctggccgaatttggcgttgttgttgcgcagggacccgcacatgtgggtatcttgatcgaatacgtcgaagacccttgttcgaacctaccagaagcagcacgggctccttgtctgggactggttgcaacgctacgctcgctcgttggggaagtccgtgaacttgatcaagaaattgctcgcagagcgcggcaagatgatgttgccaagcggctgatgaccatcccaggtgtcgggccaatcattgcaacggccctcgaggctttggcaccacccgccgagaccttcagccgaggcagggatttctctgcttggatggggctaacaccacgacagcactcgaccggcggtaaagccaagctcggcaaaacctccaaaatggggcaacgcgatcttcgacgactgttaatcatcggggcgtcagctgtcgtgcgctgggcatcaaggcatggagcagctgaagggtcctggctatcgcgcatgatcggtacaaagcctccaatgctgatcacggtggcactcgccaatcggatggcgcgtattgcttgggcgttgatgacaaacggtagtcgctacgaggcgacgagaacagcataagattggctctggcggaaagatttcctgaccgccattgcgaaagtgggcaggtcgagcgaaggatatggacaaacggtcaacgagacgggatcaggaaaaccagctcaccggacggcacctcgagtgcgtgtaagcgtgttggacctggtctgcagactcccatatgggcccgcgacgtttaaaggtcgcagtcagaggccggacacacgtcagcacccgaccattttgttcataccggatagaagattttgcttgctttcgagggggcgtccacaca

SEQ ID NO: 5026 - DNA, 1104 bp, unidentified
  source 1..1104: mol_type = unassigned DNA; note = element_7aec33b
  misc_feature 1..2: note = core
  misc_feature 3..164: note = LE
  misc_feature 165..1088: note = CDS
  misc_feature 1089..1104: note = RE
  misc_feature 1..160: note = bridgeRNA
cctgtctgttggcgaagtggtagcgttggagttgcggaagggagcccgtcccccccgagggccgcggagcccgttagggagcatgggccccttccgcatcgctcagaaccctgaacagttgcttgggactgccgatcccgcacgacatggacaggacctctaccatgccacgcaccgtcatcggctgcgatctctcgcgcgccgtcatcgatctccagaccctgccggacgctatctcgtcgcaggtggcgaacgaccctgaggctatcgccgcatggatctcgtcgctgccccccgacgtgctcgtcgtcttcgaggccaccagtggctgcgacggccccctcatcgccgcactcgccgaacgcggcgtcacgttctcgcggaccaatccacgccaggcgcgcgagtttgccagagccaccggcgtcctcgccaagaccgaccgcgtcgatgcccgggtgctggcgcagatgggctcggttctcgatcaccccatcactcgcccaagcagcccggcacggagccggctatccgatttcctcaggcgtcgcagacaattggtggacatccgcaaggccgagaagacgcgccgccacaacgccggccaggacgagatcgccgcccagatcgaggcgatgatcggcctcctcacccgccagatcgccgaactcgatcgcgccattgcgggcctcatcgaggaggagcccacgttctcctctcaagcccggcttctgcgcgccgtgccaggcatcggcccgaccgtgctcgccacacttcttggtgagctcccggagctcggcacgctcgaccggcgccgcatcgcatcgctcgccggcctcgcaccgcatgcccgggagagcgggacctggcgcggtgcacgccgcatctggggcggtcgccgcaaggttcgcgaggcgctctacatcgccgccctcacggcttcgcggcgcattccaagcctcgtcgccatgcgcgatcgtatgcgcgagaagggcaaggcgcccaagacgatcctcatcgcagtcgcccgccagctgctcgtcatcatcaacgccatgctgcgcaacggaacgcctctcgtcgcctgaggtgacaacacagttg

SEQ ID NO: 5027 - DNA, 1378 bp, unidentified
  source 1..1378: mol_type = unassigned DNA; note = element_7af6b83
  misc_feature 1..2: note = core
  misc_feature 3..87: note = LE
  misc_feature 88..1119: note = CDS
  misc_feature 1120..1378: note = RE
  misc_feature 1150..1366: note = bridgeRNA
tgatgctgtggacggctcctccacgggcacgagagtgccaaagatgtgggtgctgtttaaggctcccacgattcggaggagctaaccatgcaagctgtcacgacaatcggtctcgatattgccaagtcggtgtttcaggttcacggcgtcgatgctaacggtctagtggttattcgccggcagttgaagcgtcgctacgtcctggcgttctttgcgaagcagccgccctgcctggtgggcatcgaggcctgtgcctcgtcacatcattggtcgcgcgaactgcaggcacttggccacaccgtgcggccgatgccgccggcatacgtaaagccctacgttaagcgacagaagaacgatatggccgacgctgaggcgatttgcgaagcagtcacaagggctaatatgcggtttgtgccaaccaagacgcccgaacaacaaagcgggctggtgctccatcgcacgcgccatctgttcatccgccagcagacctccgtgatcaatgcgatccgggctcaccttgccgagtttggcgtcaccgcaccggtcggacgcaaaggcatcgaggaactgctgcggatcatcgccgatccaagcgacaaacgggtgcccgatgttgtgcgtgcatgccttgccgcgctgggcagccaattgctcagccttaaaaagcagatcttggatttcgatcgaatgatcgtggcatggcaccgctccgatccaacgagcaagcgcctgaattgcattctaggcgtcggtccgttgctggccaccgcgctggtttcgagcgttggcgaccccaaagtctttcgatcaggccgcaacttctcggcctggatcgggctggtacccaaacagcactcaagtgggggtcgggccaggctcggcagtatcagcaaacaaggggaccgctatctgcgcagcctgttcgtggctggcgcactcgctgtcatccgctatgccaagctccatggcaccaagtatcggccctgggtcgcagcattgctggcacgacggccgaccaaagtcgctgccatcgcgctggccaataagctcgccagaatggcctgggcaatgatggctaggggcgagcggtacaattatccgaccgccctaagggtctaacgagatcgcgccgagttcttggcgtgatgtgaaggttggggaggacgaacagcacgtaatgcagagccggtcgatccggcgatcaggacaacccacatgggccactgcattctcgaatgcgagtttctgaccgggacctgatccgcggagagcattatggccagcggttgtgaaccgcactcaaaggccgaacacatggctgcaccgaccaagcctgcaacgtgaagattctccttgccaactcggagccgtccacaca

SEQ ID NO: 5028 - DNA, 1385 bp, unidentified
  source 1..1385: mol_type = unassigned DNA; note = element_7af8542
  misc_feature 1..2: note = core
  misc_feature 3..89: note = LE
  misc_feature 90..1106: note = CDS
  misc_feature 1107..1385: note = RE
  misc_feature 1148..1383: note = bridgeRNA
cgatgtaatggtctcctcccccttataattcggcgtctatgcgccatgatggagataaaaacaaccatcaatgcaagcaggagaagaccatgaaaaagattacaacaatcgggctggatttagcaaaaaatgtatttcatgtcatatgctgcaatgaacatggcaaagtcatcagaaagaggatgctgaggcgaaaagaggttattctctttttcactcaaatgccgccctgcctggtaggaatggaagcttgttcaggtgcttgctactgggcacatcaattcacctccctggggcatcgggtaaaacttattccagcgcagtttgtgaagccctttgtgcagggcaataaaaatgactataacgatgcattagccatagcagaggctgttgttcggccaaacatgcgttttgtaacccccaagacaacagcacaacaagctgtgcaggcacttcaccgcctacgtgaaagacgccttcaagagcgtacagctctctgcaatcagatcagaggcctattggcagaatatggcttgatcttgccacaaggcgttaatgttacccgtcgaagtattccagaattgttggaagatgctgagaatggattgaacgatctgtttcgtcaactgttggcgcagtgctatcaacaattgcaagaacttgatgagcatattgctttttacacacagacactggaagttcagaatcaacagaatgaagcctgccaaaggctacaaaccatccctggatttggccccattgttgccagtgtattttatgccacagtgggtgatggtagtgcttttcggcgaggacgtgatgtatctgcttcactggggttggtacctcggcagcattcaagtggcggggtgaatacattactgggaattagtaagcggggagatagctacctgagaagtctgcgggttcatggtgcccgatcagtggttttgcatgcgcaaaaaaaagatgatcggctaagtcgttggattaataaaatcagatcagagcgaggctataacaaggcaacagtggcattagctaataaactggctcgtattggttgggcaatatcaagtcagcaaaccgtgtaccgcactgtgtgatacccgcagctaaactaaattgaatgagcagcaagaggtaacctgccatcgattgcgaagacattgaaaatagtgatgacacaacaggttagaccggcgtattgaaaacctgggtcctgcgaaggtcataatagaccgagcgtacgataaggacgatacgcgcatatttcatcgaggccagagggtgatgtatccctcaccacaggccggatatacgagagcaatcctgtccctgtcattaaatttacaacgtcttgcaaaatgggaagagaccatata

SEQ ID NO: 5029 - DNA, 1556 bp, unidentified
  source 1..1556: mol_type = unassigned DNA; note = element_7afaddd
  misc_feature 1..2: note = core
  misc_feature 3..522: note = LE
  misc_feature 523..1425: note = CDS
  misc_feature 1426..1556: note = RE
  misc_feature 3..237: note = bridgeRNA
cttgtatgataattaggaagttaattatcacatgtttcctttcttttaatatcgtggttcaatacattcagatactgtggacttttgattttgccctgtagctttgactactctaaggagtgtattgccgctacctttatctgaattgtttatagctggatgttaccggagtaatccgagttcttatttccatcaagtctacgatgataatcgctggtggatatcacggtatcagactttagaaagggaggtacaacctcatgatttacgtaggcattgacattgcaaaactcaatcactttgcctcagccatatcttctgatggtgaagaactaatcaagccgttcaaatttacaaatgacaatgatggcttccaactgctgctttccaagctaaatcctctagacaaggacagcctcatcattggtcttgaatcgacggcacactacggcgacaaccttgttcgatatcttgttgctaagaattacaaagtgtgtgttgaaccccatcaagacttctactatgcgtaagaacaacattcgcaaaacgaagactgacaaagtcgacacatacatcatttgcaaaactctcatgatgcaggaatctctcagatttgtgaccttttatgatcttgacctgatggacttaaaagcccttggtcgattccgtcagaaaaccattaagcagcgaactcgtttaaagattcagctgacttcttacgtggatgagatattccctgaattgcagtatttcttcaaatcaggtctgcatcaaaaatctgtctatgcgcttctcaaggaagcaccaacaccggaagctattgcttctatgcatatgactcatctggctcatcttctcaaagtgaactcgcatggacgctttgacaaagagatggcacagcagttaagagttctcgcacagaagtctgtcggtgccagcgacagttctctatctatccaggtaactcacaccatacaacaaatagagttactcgatagccaattagaaagagttgaagctgaaatgacggaaatcatgaaattcaatgattctgtcattatgaccattcctggtatcggatatatcaatggaggaatgatacttggtgaaatcggtgatattcgccgtttctccagccccaacaagctgcttgcatatgccggtttggatccttctgtctatcagtctggaaactttcaggctaagaagaccagaatgtccaaacgtggatccaaagtcctcagatatgcacttgttaatgtagctcacaatgttgttaaaaataatgccaccttcaaggcttactacgaagccaagatggctgaaggccggactcactataatgccctcgggcactgtgccggcaagctcgtcagaatcatctggaaaatgatgactgacaacgtggaatttaacctcgattaagagatctggatacctacatcatagatttggttaaaagcacccaccagggggccttattaaggttacccatttttaccacgaaaaggatttactaatttccagctaattaagcttgacttttcatagctggt

SEQ ID NO: 5030 - DNA, 1433 bp, unidentified
  source 1..1433: mol_type = unassigned DNA; note = element_7b0641f
  misc_feature 1: note = core
  misc_feature 2..224: note = LE
  misc_feature 225..1247: note = CDS
  misc_feature 1248..1433: note = RE
  misc_feature 19..236: note = bridgeRNA
ctgcttcagacttgacgtgacgagtcggcgtgttccgtagcgtcggggatctcggttgggctgctcgctaagtgcctgccggctcgctatgggtctggctgaggaacgaagtgcagcctgaccgagatccccgtcgcggtgtggctcgagagaggaacgagcacaacgaactacaagtaggagtgcccaccgcgattccactcaaccaactcgggaggtatttcatggacgtggtcatcggaatcgacccgcacaaggcatcacacaccgcggtggcgctcgccgacacggaggtcgagctcgcacgcctgcagctgagcagcactcgatctcaggtcgaccggctgctggcgtgggccaagccgttcccgcaacgccgctgggcgatcgagggtgctgaaggtctcggcttcctgctcgctcagcagcttgtcgccgccgaccaggtcgtcgtcgacgtaccggccaccctcgccgcgaggacccggctgctcggcaacggccggaccaacaagaacgatcccaatgacgccttgtcggtcgccgtcacggcgttgcggcaccggggcctgcgcacggtgacgacggccggctacagcgagctgcttcgactcctcgccaaacgccacatcgatctctcgaaccagcggacccgactcgtcgcccgcctccacgccctcgccacagagctgtcaccaggaggaatcgccaagaaactgaactcgaccgacgccgccaagttccttgccgcggtcacccccaccgacgccgtcgcccagctccgctgcgcctcatccgcggagttggccgacgacatcgcccggatcgaggcccagaccaagcagtcggaacgacgcttacgcgatgccgtcgccgcgtcgggcagcaccatcaccgacatctacgggatcggcccggtcatcgccgcgatgctcatcggcaacaccggtgacatcggtcgcttcgccaaccgggaccacttcgccgcctacaacggcaccgcaccggtcgagttctcctccggcggtcgcatcgtccaccgtgtctccgagcgcggaaaccgcacgctcaatcactcgctgcacctcgctgcgatgtgccagctccgtcaacgccacagcgagggtcgcgcctacttcgaccggcgcgtcgccgagggcaaaacgaacaaagaagccatccgcgccctgaaacgacagatcagcaacaacgtctaccgacacctcgtcgccgacatcgcccactgaccccaagggcccgggaggacaagcgggagcgtctgatcgcctgcgcgactggcctcacatcccaaaagccagctcttcggcgaagtcactcccggaccccatcaacacgctacgcccgccaccaccggcggtcgaacacgcgcgccccgacacccgctcaaacgaccacttgacacagagaggatt

SEQ ID NO: 5031 - DNA, 1558 bp, unidentified
  source 1..1558: mol_type = unassigned DNA; note = element_7b0b9f4
  misc_feature 1..3: note = core
  misc_feature 4..245: note = LE
  misc_feature 246..1418: note = CDS
  misc_feature 1419..1558: note = RE
  misc_feature 3..223: note = bridgeRNA
cttgtattatataaatatagttaaatatccattttttatggatatatgctatactgttttagatactgtggattagttcaattctcctaccacttgatggtttttttaaggctctaaccacagtctctttgtacagttgttaatcagttagataccgcatgacggtttatttagaacaaggttacaatcgcaaagtgccctgtggatctaaacagtatcaaaatttattgaaatgaggtagttttatgatttatgcaggaattgatgttgcaaaggacaagcatgattgtttcctctgcaattccaatggtgaagttctttttgatgcctttacctttcccaacaatatgcaaggttttgaagaactttatcaaagaatcaaatctgtttcagaagatttgagcaaagtaaaagtagggcttgaagccacaggacattactcatacaatcttctgggttttcttcttgataaaggtttggcgacctacattatcaatccactacataccaatctataccgaaaaagtcttactctcagaaagactaaaacggataaggttgatgcccatactatcgctatgatgttaatgtctgatgtgaacttaaagtcctactcaaacacattatatcataacgaagagttaaagtcactaacaagatacagatttgataaagtacaagagagagctaaacttaaacaatccgttgcaaggcttgttaatatcctctttcccgaacttgaaaaaatagtcccaactctgcatatgaagtctgtctatacattgctttcagaatttccgtcagctcatcacattgcagatgctcaccttacaaggcttgtaaacttactttatgaagcctcaaagggcagatacaaccgcgatattgccattcgttttcgtgatgctgcaagaaattctatcggttctgtcatgcctgccaagtctctcgaattaaagcatacaatcaagctcataagtgaacttgatacagaaatcagagaggtcgaagatgcaattaaatccataatggacgaaatcaattccccaatcctcagcattcccggcatcagttatcgtatgggagctatgataattgctgagattggtgattttgataagttttcttcacctgataaaattcttgcctatgcaggtttatcaccatctacatatcaatcaggacaaatgcagaactgctattctcatatggaaaagcgtggttctcggtatttgagatatgctctttttaatgccacaaaattcgtttgcaactgggattcttcttttggtgaatacctttccaaaaaacgaaatgaaggtaagcattacaatgttgctgtatctcatgctgctaaaaagcttgtgcggttaatttatcatttagagaaaacggggcaattttacaaatccttttaatctttcattccaatattttttaacgagcaacattcgttgctctatttgtcatgcaattttcaatgttcaactgattattttaactccctaaaaaatatttcaaagaaatttaaattttctattgacatttaatagttagt

SEQ ID NO: 5032 - DNA, 1377 bp, unidentified
  source 1..1377: mol_type = unassigned DNA; note = element_7b0f892
  misc_feature 1..2: note = core
  misc_feature 3..80: note = LE
  misc_feature 81..1109: note = CDS
  misc_feature 1110..1377: note = RE
  misc_feature 1083..1364: note = bridgeRNA
tgatggggtggatgcttcctcccgacggcatcaaagtgccaatgtacgtggtcagtgccacaaaaagaggagaaagcaccatgaatgaagttacactaattggcgtcgatttggcaaaatctgtctttcaggcgcacggagcagcggcggacgggtcgacaattttccgcaaaaagttgacccgaattcaatttgctaaattcatggctgagcaaccaccttgcgtcgttgcgatggaggcctgtggaagtgctcattattgggcccgcgaaatgacgaagcttggccatacggcccgtctcattgcgcctatctacgtgaagccattcgtaaagcgccaaaagaatgatgtcgccgacgcagaagccatagctgaggcggcgtcgcgtcccaatatgcgttttgttccggttaaatccgaggaacaacaagcccgctcggcgctatttcgaacacgtgagttgctagttcggcagcgtactcaggcagcaaacgcactgcgctctcatttggcagaattcgggattatcgtgccaaagtgtatgtgtaatgtgaagcgcctcgtcacatatgttgacgatcctcaacggcttctccctaaaagtctgcgagatttgggattgatgtatttgcttcaaatcgcagatctcaaacatcagattgaccagttggaaaaatcaattaaatcagaagctcaagacagccaaatctcgcggcgacttcagacaatgccaggggtcggccccattgtagccatggcaatagaagcctttgcaccggatatgagcaatttcaagtgtggtcgtaatttttccgcatggctcggattggttccgcgacaacactcaaccggtggcaagcaaatattgggacgcacgtcgaaggtgggccaaaaggacatacgccgacttctaattataggggctatgtctgttatcaaagcgacaacaattaggggcacggtcaaaggttcatggcttgagcgtatgcttgccaagaaaccccgtatgctggtcgccattgcccttgctaacaaaatggcgcgctcaatctgggcgatgctgacacgaggagagaattatcggaatccgatgatggcggcggcctaaatagcaaccattattcatcggtatgttgggatgtgagaggtgtacgatatttatgggcaaatgatcgagtagatccggaacaggaaaaccagttcatcgcatagcgctcagagcgcgtaaccttgtaatggacctgatccgcgaactatccataacggcccgcggcttccaaaaacgtcgcacattcgaggcctgacacatgaccgcacccgatcacatgttcaaaaatgtcaaaaaagcaacttgcattaacggaagcatccacaca

SEQ ID NO: 5033 - DNA, 1358 bp, unidentified
  source 1..1358: mol_type = unassigned DNA; note = element_7b0f907
  misc_feature 1: note = core
  misc_feature 2..351: note = LE
  misc_feature 352..1218: note = CDS
  misc_feature 1219..1358: note = RE
  misc_feature 46..214: note = bridgeRNA
cctttagatttgctaaatgtaaaattgataactttaaagaatagtattaacaaacctaatcaacaaagtgaaccattatccgcccaaagctatattaaaggcttagtgctcgactaggactttgttgatttcactaaaaagtatcagactagtaattaagacgttcgggtctagtatcaaggtttagatagcactttagtgttaggttgttttaaataattatcattatggacaaatttacaaaagtttattgggatagatatctcaaaagagtattttgatgcatcaattttagtagaaaacaatgagtttagccacaatcaattttgtaatacaaagaaaggggtgaaaatgtttttaaagtggataaagggtgaacattgtccaattgaaactactttaatctgtatggagcatacaggtttatataaaaacattttagttgatgtattaacctcaaatcagtgtaacctatgggtcgaaatggcctatcgaataattagaagtagtggtatacaaaggggtaagaatgacaaagtagattccgcaagaatagctcaatatgctaaaaaaaatcaagaagaagtcaagttgtttaaatgttccaaagaggttttagacaagataaaaggattattaaatctacgagaattaaatgtttcttataaaactgctgtacaagtaaatatccaagaattaaaaggatataacgatcccgtttataatctgctatccaagagcaaaaaaaatgctgctaaagccgtcaaaaagacgatcgaggatatagataagcaattagaagaacttgtaaagcaagattcagagatttcacaagtatataattgtataacctctgtcaaaggggttggaagtattaccgcgctatttttactttgctatactgattcgtttacctcgtttgattcgccaagagaattagcttcctattgtggggtagttccttttgaatatacttcaggaaaaagcataagaggcaaggcaaaagttcattttatggctaataaaaagcttaaaaaattattgcatttatgtgcattatctagtataaggtatgatccggaaataaagacatattatgagaaaaaggttgaagaaggaaaacataaaatgcttgttttaaataacgttaggaataagctaattcaccgcatatgctcttgtgtccgtaataataaaaggtatgaagtagcagcatagtaatatagtgctccaaattttcaataaaaaagaggtttattatcatttacctcaggacacctattggccttatttttgaattattagcacaaaatgacgctgaaagttattaatttattatttggttttatcatagtaat

SEQ ID NO: 5034 - DNA, 1438 bp, unidentified
  source 1..1438: mol_type = unassigned DNA; note = element_7b17084
  misc_feature 1: note = core
  misc_feature 2..135: note = LE
  misc_feature 136..1248: note = CDS
  misc_feature 1249..1438: note = RE
ctgattgatacttgtgtcgggtgttgcggtgtttcgtagcatctcgaggactcggctggtcgtctctctaagtgcctgtcaccttcgggttggctttctaacgagctgttggccagccggtgtccttgctggggtgtggctcgaaagaggcgagagcacgatcaacccgaatcaggagtgcccacctcggtttcatctattgccaaggagggcattgtgttcgtgatgattgggattgatccccataaggcaacccatactgcggttgctgttgatgatgatgagaacgtggtcggcgagttcacgctcgaagcatcgaacaaccaggtcgagcgtctcacgggctggtctgaccggttcacgaaacgtgagtgggcggtcgagtcagcaaacggcctcggatacctgattgggcgacagcttgtcgcggccggtgagaccgtgttcgatgtaccgcccgtgttggcgtcacgggtccggctgatgggttcaggcaagtcgcagaagaacgatccgaatgatgcccgctcgatagcgatcgcagcgttgcgttcagaccgtctccgtgtcgttgaacctgatgatcatgtcacggtgttgcgtctgttggtgaaacggcaccgtgacatggccaggctccgcaacaagcactgctcccgtctccacgccctgctccttgaactcgaagcgggtgggatcgagggaaagatcagtgttagcaacgcttctgagctcctcgaccgtatcggcgtcaccgatgaggcgtcgcggtatcggatattggttgctggcgaagtcgttgccgacatcgccagactcgacgcaacactgggatcttccaagaagcggatcgctgcagcagtcaccgcgtcgggaacgtcgttgactgacattgttgggataggcccgatcggtgcagcaaccatcattggctacaccaaagacatcacccggttcccgacccgtggccactacgcgacgtacaacgcaacggcaccgatcgaagtgtcatcagcagccaacacgaaacaccggctgaatctgcgagggaaccgcatcttgaaccacgccatccacatcgcagccgttacccagctccgacacgacacaaacggccgcatctactaccagaagaagatcgctgagggcaagacccccaaagaagcgatcagagcactgaagcgacgcatctcagatgccgtctaccggcgcctcgtcgccgaccgcgcccggcaacgaagtgcctgaacatcagaggcgggtccgagaggacacccaggaacggcactgaatccagcgtggccggccttgcatcctgatcaccggctcttcggataagtcacttcccggacccgacaccaaatccacaccccaaagccgaaccccgatcggctccgacaaacgcgcccccagaaatccccttgacacaaagaggctt

SEQ ID NO: 5035 - DNA, 1552 bp, unidentified
  source 1..1552: mol_type = unassigned DNA; note = element_7b2ab35
  misc_feature 1..2: note = core
  misc_feature 3..246: note = LE
  misc_feature 247..1422: note = CDS
  misc_feature 1423..1552: note = RE
  misc_feature 3..222: note = bridgeRNA
ctcgtattatatatttatagtatttaaagtctactataaagacttatgctataattgttttagatactgtggattgtttaacaccacctaccacttgatggtttaagaaaggctacaaccacagctctttgtacatttgttaatcagttagataccgcatgacggtttatttagaacgaggttacaatcgcaaagtgttacgtggtctaaaacagtatcaatattttatttaaaggatgtgtttttatgatttttgttggtattgatgttgccaaagataagcacgattgttttattactgattctgatggtgaaatactttttgattcttttacaattacaaacaatatagaaggttttgaaaacttatttcaaaagattgaatctgtttcaaatgatttaactaaagtaaaagtaggtcttgaagccactggacactatagttacaacattttaggattccttcttaacaaaaaccttactgtatacgtgattaaccctttacacactagtctttacagaaaaagtctaagccttagaaagactaaaacagataaggttgattccaaaactatcgcaactatgcttatgtccgatgtagacttaaagccctactcaagtgaattataccacaacgaagagctaaagtcactatctcgttatcgttttgataaagttcaagaacgtgccaagcttaaatcttccattgctcgacttgttaatattcttttccccgaattagaaaaattattttgcactatccacttaacaactgtttatcaacttcttagtgaatatcctggtgcttctcacatagcaaatgctaaattggatgaactttcaaatattattttttcttcttcaaaaggaagatttgactattcaaaagccgaactagttcaagttactgcacaaaaatctattggctctgtaatgccagctaaatctcttgaattaaagcatacaattaaactcattcaagagcttgactctgaaatcgaagaaatagaaaaggaaattaaaattataatggataaaatcaattctccaattttaacaataccaggtattagttatcgcatgggagcaatgattttatctgaaattggtagtttctctaattttgattcaccagataaaatactggcttttgctggactctctccttctacatatcaatctggaaaacttgattcttctcattctcatatggaaaaacgaggttcaagatatttgcgttatgctctatttaatgctacaaaatttgtatgcaattgggatccaatttttaatgcttatctctcaaagaaacgcgctgaaggcaagcactataatgttgcaatctcacatgccactaaaaagttggtacgagttatgtttcaactagaaaaaacaggacaaacttttcaaagaattgcttagtatttcttatattctaaaatttttgagtgcctaaatgacactctattcatcatgcaattttcaatgtacaaatttaatctaaaactttttaaactttttttgatttttctattgacttttaatagttagt

SEQ ID NO: 5036 - DNA, 1353 bp, unidentified
  source 1..1353: mol_type = unassigned DNA; note = element_7b2dd55
  misc_feature 1: note = core
  misc_feature 2..311: note = LE
  misc_feature 312..1100: note = CDS
  misc_feature 1101..1353: note = RE
  misc_feature 1120..1349: note = bridgeRNA
taatgagatggtcagcccgatccccacgaagcggtacgctgagtggggattgttctttttgggagacctctcatgagcaccgtcacgctgattggcatcgatctgggcaaacacagcttccatctgcatgggcaggacgcggccggcaggatgatgtttcgcaagaagtgctcgcgccaggatctgttcaagttactgggcaacacaccgcgcagcacagtggtgatggaggcctgcgccggcgcgcactggatggcgcgccgcatcgaagaactgggccaccaggccaagctcatttcccccccaggttcgtgcgccccttcgtacagggcaacaagaatgacttcgccgatgcccaggcgatctgcgaggcggcctcgcgcccgagcatgcggttcgtgagcgtgcgcaatcaggctcagcagaccgtctctgccctgcatcgggtgcgtgaatcactggtcgctcagcgcacgggcgtgatcaaccaggtgcacgcctttttgctggagtttggcatcagcctgcctcgtggtcaggcgatcctgcgacgcttgccagcggttctggccgaacacgcgctgccgccccaactaggcgcgctgctggagcggctgcgatcgcactttcagtatctggatgagcaggtaggccagattgagcgtgagctgtgtctacagctgcgcgaggatgaacgcagccagcggctgcttcagatccccggcatcgggccaatcactgctagcgtgctgatgactgagctgggcgatgcgcggcaatttggttcggcgcgccagttcgccgcttcggtaggcttggtgcctcgccagtacagcacgggcggcaaacccacgctcctgggcatcagcaaacggggcgacaagaaccttagacgattgttggtacagggcgctcgcgcgatcatgcgacacgtggagcgacgaaccgaccggctaggcgcctgggtgcgcgagctgcaggcccgacgtcactcgaacgtggtcgcttgtgcgctggccaataaattggcgaggatcgcctgggccatcctcgccaatggaacgaactaccgaagtgagcagactgtagcgccagcctgaccttcatcaccgttttacgtagtcacttcctggttttgcgacgcgagtacgtgaagacataaacggctcaacggcctggcaagaaacctgacatgaaatccagcaccgcgatgctgaggggctttttaggtttgccgggcgcgactctcatcatggagcggggggcctagccccaactgactccgaatagatttgagcaagcccaatttacgcctacaccgcctcgcttgcaaaaatcgggctgaccatagat

SEQ ID NO: 5037 - DNA, 1439 bp, unidentified
  source 1..1439: mol_type = unassigned DNA; note = element_7b32eab
  misc_feature 1..2: note = core
  misc_feature 3..119: note = LE
  misc_feature 120..1157: note = CDS
  misc_feature 1158..1439: note = RE
  misc_feature 1193..1392: note = bridgeRNA
agatggggtaatcggccggcagcttgtggatagctgaagattttgggtgctgcgcttcaggctgatggtgaaacgaggtccgtggtgacggcctcaagcatcagaaggagaagcgcagcatggagcattttgctggactggatgtttcggtcaaggagaccagcatctgcattgtggatgacacgggtaagatcgttcgcgaagtgaaggtggcaagcgagcctgaggctctgttgccggtgctgacaaatcccgcctactgcttcaagcggattggattggaagccgggccgctgtcgcaatggctgttcagcgcgctcgccgaagcaggcttgccggcgatctgcgtcgagacgcggcacatgagagcggcattgaaggcgcagatcaacaagacgaaccgcaacgatgcgcgcggcatcgcgcagatgatgcgatctggactttatcgctcggtgcacgtgaagacattacgcagtcagaaactgcgaatgctgctgacccaccgcaagctgctgcagtcgaaggccatcgccatcgagaacgatctgcgcgccacgttgcgcaacttcggcctcaaggtgggcgtggtggaaacggtgaagttcgaagcgcgcattaaggagcttgtcgagaaggtctccgatttggccctgctggtcgaaccgctactcattgtccggcgggtgcttcgcgaacagattggcatcctgcatcgccgcttgctggccatcgtgcgggacgacgatgtgtgccgtcgtctgatgacgatccctggtgtcggcccggtggtggcgctcacctatcgcgccaccgtcgatgtgcccgcacgctttcggaactccaaggcggtcggggccgtgtttggactgacaccctccaagcaccaatccggcgaggccgaccgaactggcgggatatcgcggtgcggagatgagatgatgcgggcgatgctctacgaagcggcccatatcctcctggtacgcacgacgaaatggtcgtggcttaaagcctgggcgatgtcgatcgccaggcgccgcggattgaagaaggcggtcgtggccctggcgcgtcggctggccgtaatcatgcatcgcatatgggttgacggcaccgagttccggtggacccgggaacaagccgtcgcagccgcatgaaaacccttcagggtcaaatccgataggaagaaactcgagctccaccgagcggtggaatgatgtccctcacgggacgacggatggggtgagatcgtatgtccgcttggacctgccgtttgtctgatggcaaggccgacccaaagatcgttccgcctgtcctcgaatcccatgatggaagggccttggtgccgattccgaagagaagcacgagcccgtgggcgacatcgacactgtagcggtggatagtctgaaagcgattgaccccagccggccgattagaga

SEQ ID NO: 5038 - DNA, 1756 bp, unidentified
  source 1..1756: mol_type = unassigned DNA; note = element_7b375a1
  misc_feature 1: note = core
  misc_feature 2..144: note = LE
  misc_feature 145..1182: note = CDS
  misc_feature 1183..1756: note = RE
ttagatgacatgcatcgggccgtactgcgctgagggccgcggccgggtgccgggagacctccccagctcagacgcgtcacgatggaccgcgtaggcaatttcgcaggggcgcgtgcgccccttccggagcgtgaggaggtcccgatgcccatcgtaggcgggctggatatccaccggaagcagatcaccttcgactacctcgacaccgccaccgggcaggtgcggcgcggccaggtcagcccggcggaccgggagcacctgcgggcctggctggcgcggttcgccggccgggaggatgtcgcgttcgcggtcgaggggtgcaccgggtggcggtatgtcgccggggaactggccgcagcggggatcgcggtgcacctggccgagccggccgacaccgccttcgcccgcggccgcaagcggcacgccaagaccgataagaccgactgccggcacctgcggcagctgctggccgagggccggctgccgcagtgctggatcccgcccggccacatcctggagtgccgggcgctgctcgagctgtacaacgacctgcgccgcgagcacaccgcctgggcgcagcgcatccacgcggtcttgttccaccagggcgccccggccctgggcgagggcacgctgcgcagcgagcagggcctggccgcgctgcgggcggccgcggccgcccagctgtcgccggccgggcagctgcaggtcgccaccgcgctggaggtgaccgccgccctggaggcccgcatgcacgcggtgcggcaccagctgctggacgccgcccggcacctgaccggggcgaaggtgctggccgcgcggctgtacggggtcgggccggtcaccgcgctggcgctgacctgctggctgggcggggcgggccggttctcctcctcccgcaaggcggtccggttcgccgggctggacgtcaccgtctggtcttccgaccgcaaggggccgcccgggcggctgtcccggcagggaccgccggtgctgcgctgggcggtgtatgaggccggcaagacccacgcccggtcctccgcccccgaccacgcctactacgcccaggtcaaggagaacaacggcggcaagcgcgccgcgctgtccgaggcccgcaagatcatccggcaggcctgccacatcctgaccgagctcggcgacgacgcgctcgccgccgtctgagacccacccccatgccatcggtcaccagctcgcgaccgcgccggcccggccgggcataccgcagccgcactcaacccgatggggaccaccgcggccagctcccgccgagccgctgtcagccgccgccggcccgcccgccagcgggccaggcggacggcctgattagactgagcggccgcatccccgcaggcggggacacccaatcaatcatcatgtcgccggggcagcgccaagccccgcggacctaggtaaggctggctgccccaggccctgcccccggccgccacggctggtcacccgcaccgaaaggccaccaccccggaccgctgaacccgtactccgcacctagagggctccccgtccccggccgcccattatcggctcgcggcgggccgcggcaagggcgcctgcggcgccgctacgcgggcgctgcgcgccccttgccccgccaccgccgctcgcacgaaccggcagcaatcgggaacagggagcagactgggtcacgccccggaccacggccacccaaccccatcgggccacggaacgagcacttgcggacccgaaccgatgcagg

SEQ ID NO: 5039 - DNA, 1374 bp, unidentified
  source 1..1374: mol_type = unassigned DNA; note = element_7b3d452
  misc_feature 1..2: note = core
  misc_feature 3..85: note = LE
  misc_feature 86..1111: note = CDS
  misc_feature 1112..1374: note = RE
  misc_feature 1144..1362: note = bridgeRNA
tgatgctgtggacggctcctccctgggcacaagagtgccaagctgagggggcgattgaggctcccgccatttggaggagctgtctatgcagtcgatcacgacaatcggtctcgatatcgcgaagtcggtgtttcgagtccacggagttgatgcggctggccgggtggtcgtgcgccgccagttgaagcgccggcacgtcgttgccgttttccagaagctgccgccctgcctggtggggatagaggcatgcgcctcatcacaccattggtcgcgcgagctggaggcgcttggccacacggtgcgattgatgccggcgtcgtatgtgaagccctacgtcaagcggcagaagaacgacgccaccgacgcggaggcgatatgcgaagcggtcacgcggccgaccatgcggttcgtgccgaccaagacgaccgagcaacaggcctgcctgatacttcatcgggcgcgccagttcattcgccagcagacggccgtcatcaactccatccgcgcctaccttgccgagttcgggatcgtcgctgccgtcgggcgccgcggcgtcgagcgcctgctggaagtcgtcgctaataaaaacgaccggcggctgccggagatcgcccgggtgggcgttgctgccctcggcgagcagctgcgggcgctcaaggcccagatactgaagttcgaccgatgcatcatcgcctggcatcgatcgaatgcgacgagccggcagctcgacattcccggcatcggtccggctctggcaatcgcgctggccggcagcgtcgccgatcccaacgccttccgatccggacgggacttctcggcctgggtcgggctggtgccgaggcagaactcgagcggtggcaaggacaagctcggcagcataagcaagcaaggcgatcgctacctgcgcagcctgtttaccgccggcgcactggccgtgatccgctatgccaagatccacggtacgcaacatcggccctggctcacggcgttgctggcgcggcgtcccaccaaggtcgccgccattgcgctcgccaataagctcgccacgatggcctgggctatgatggccaaggacgaacgctacaaggaaccggccgcgctcgcggcctgaacgagatcacgctggacaaggtcagtgtgacgtaacggttgggagggcgaacagcacgtaatgcagtgccggtcgatccggcgatcaggacaacccacttgggccatagcatcttcgaatgcgtgcctttgaccgggacctgatccgcggagggcattatggccagcggtcatgtgaacggcgcaaacaggccgaacacatggctgcaccgaccaaccctgcgacgtgatgattgttcttgccaaccaggagccgtccacaca

SEQ ID NO: 5040 - DNA, 1382 bp, unidentified
  source 1..1382: mol_type = unassigned DNA; note = element_7b46c7e
  misc_feature 1..2: note = core
  misc_feature 3..78: note = LE
  misc_feature 79..1128: note = CDS
  misc_feature 1129..1382: note = RE
  misc_feature 1125..1369: note = bridgeRNA
tgatggtgtggacggccccctacggcatcgagtgtgccagaatgaggttgtcgaaaatctcatacgagggagccgtccgtgagccagattatccgaattgggatggatacgtcgaagtatatttttcaactgcatggcgtggatgcagaggagcggacggtgctgcgcaagcggcttagccgcaaggcgatgctggagttttttgccaagctgccgccgacggtggttgtgatcgaggcgtgtggggcagcgcactaccttgcgcgagagcttggcaagctgggacatacggccaagctgatcgcgccgcagctggtgaagccctatgtgccgcgcaacaagaatgatggacgcgatgcggaagggctgtgcgaggcggcgagccgaccgcggatgcggtatgtgccggtgaagacggcggagcagcaggcggcgttgatgctgctgggtgtccgcgaccagttggtggggcggcgcacgcaactgagcaacacgatccgcggtcatgcggcggagttcggcctgatcgcggcgaaggggctcgacaagcttgcctcgttcctggccgcgatcgaccaagacgagcgcgtgccggtactggcccgcgagctgtttgcgatgcttgctcgcgaatacgcgcgggtgcaggccgaactgagggcgatcgaggccaagcttctggcctggcaccgcgccgatgcctcgagccggcgcctggcgcagatccccggtgttggtccggtcaccgccgcagcgctggtgatgaaggcgcccgatccgcacgccttccgctccggccggctgtttgcagcctggctcggcttgaccccaaaggatcattccacaggcggaaaaaccaggctcggcaagatcacccgcgccggcgacgagagattgcgccagctgctcgtggtgggagcgacctcggtggtcaggcaggcgaaggccaaaggtcgtgcgccgcgctggctcctcgatctcctgaagcgcaagtcgccgaagcttgctgcggtggcgcttgccaacaagatggcccgcatcgcctggaaactgatgacgacgggagagaactacgagagcgcgcggctcgatgcccgggccgacacacaagcggcggccaccgcgtagttgacaggtacggccgacaggccggccgaaccggagctgcaagagcagaggagatggtgcgatcgatcgatccatgatgcgagcaagcccgtgggacccaacggccgaacgaggtcgcgtggttgattggaactcgtgtcgcggaaaccatcttggccagcgaccaacaagccgcaccaacaggccggacatatggacgcaagcgatccgatcaaacctttcaaagctcttgtgccacggaggccgtccacata

SEQ ID NO: 5041 - DNA, 1687 bp, unidentified
  source 1..1687: mol_type = unassigned DNA; note = element_7b49e27
  misc_feature 1..4: note = core
  misc_feature 5..387: note = LE
  misc_feature 388..1551: note = CDS
  misc_feature 1552..1687: note = RE
tcacgtataatcaatcttaaggaattattaattctattagattgatttttcctttctcatatctttattgtttattcaagattatatatattggatttataaatccaatatatataatcacggcttcgctgatatgccacgaagcatttaaattttatatttttttgttataatatttagtgcactgtggatttgttactattttattacagccactttgtggactggtttgaggtgactcaaaccacagatttttaatttaattgttaattagttagttaacacgttagtttttactaattgatgttttattagattacgtgattacataattagaaagactgtggcaaacgttcagtgcaaaaaataattaaggaggtgcttacaatgatatattatgttggtattgatatatcaaagtacaaacacgatttctgtattatctcaaatactggtgaagtaattgttgaaaatttatcttttgaaaacaacaaaaaaggatttcaagaactattagaaaaattgaaaccctataataaatctgacgtccatattgcttttgaagcaactggacactattctatgaatttggaattgtttttaaatgatcagggatattcatttatgaaaatgaatcctcttgtcattcatcaatttttaaaagctcgaagcttacgaagaactaaaactgataaggccgatagtttaactatcgctaattatctaatgtctgtcccatataaaccaaattcagatttattatacaatatttttacattaaagtcactatgcagaagtagagaattattaataaaagaaagaagtaaatttcaaatattattaaccaatgaactagataagacttttccggaattaaaacctttctttaataacactatttctagtacattactttatattttggaaaaatataaaaacacttatcatatttcgttaatgaaagattatgaatctataagaaaagtttctcatggaaaatttacttatgcaaaatttgctaatcttaaacaattagctaaaaattcagttggtcaatacaatgaaaatactgacttacttatatctacttatgtttcaattatcaataactttaatgataaacttgatccaatagaaaaacaaatttcaacaattatcaaagaacttaaccctaagatgttaaccatcccaggattaggtgaaatatctgcagcaactattttatctgaatatggagatatttctaatttcccaactccaggcaaaatgttagcctatgcaggattagaacctagtgttatcgaatccggtacattacaatctaatggtaagatggttaaacatggttctagtcatttaagatattctattatgaatatctcaatgacaattttaaaatattcaccaacattttatgattattaccttaagaaaagatctgaaggtaaatgtcatagagttgctttgtctcacgttagtaaaaaactaattagagttatttacagtttggagaaaaacaatgctaattttgatccatctttgttaaaataatttttataataattatttctaataccttcaaaatttttaaaatttatcaattttgaaggcttttggcgtggatcacaccccaaaattataacaaactattttattttcaattttactattgacttttaatagttag

SEQ ID NO: 5042 - DNA, 1386 bp, unidentified
  source 1..1386: mol_type = unassigned DNA; note = element_7b4a6f9
  misc_feature 1..2: note = core
  misc_feature 3..81: note = LE
  misc_feature 82..1107: note = CDS
  misc_feature 1108..1386: note = RE
  misc_feature 1131..1374: note = bridgeRNA
tgatgatgtggacggccccgcccgaacggcatcaagtgccaagacgtggtcgccggagcgccacacaaggggaggccgtccatgaacaggtttagcagaattggggtcgatttggccaagaacttctttcagattcacgcgatcgagcgcgagggcggatcgcctgtgacgcgcaagttgagccggaacaagtttcgcgaattcttctcgcgcacggctccatgtcgggtggcgatggaggcttgcggttcctcgcactactgggcgcgcgaactcggggcaatggggcacgaggttgccctgattccaccggtttacgtcaagccgtatgtcaagcgcggcaagaatgacgcggccgacgcggcggcgatctgcgaggcgatgtcgcgacccgacatgcggttcgcgccgatcaagagtgcggcccaacaggctgtgctgatgttgcacaagacccgggatttgctggtcaagcagcgaacgatgggcgtcaacgcgctgcgcggccacctccaggagttcggcctgatcgcacccaggggcattcatcgcgtcggggatctcatcgctctggcgcgcgggcgcgccgatctgcccgaagaggctaaacaagcggtggagatattggcatggctcggcgaggagctcgacgcgaagatcgacgcattggagaagaaaatcgcccagggcgccgcgaagaacccggcaagccgtatgctcaaacaggttcccgccatcggcccgctgatcgcgtcggcgatggcggcgttcgttcccgatccgggcgtcttcaaatcggggcgcgatttcagcgcgtctctggggctgacgccgagccaacactcgagcggcggcaagcaaaagctcggcggcatcacgaagaagggcaatcgatatttacgcaagaacctcgtcgtcggctgcacctcggtgctgcgggtggcccacaaatacaagggcgccctggccgaatggatcgtcgcgatgaaggccaaaaagcctgagcgggtggtcgcggtggccttggccaacaggctggccagaatctgttgggccatcatgtcgaccggcgagtgcttccgcgaggacatatacgccaaggcttgaagaaacagcctgtcgatgaggaagatgaagatagcttttgactttccgcagtttggcaagcgctacgacgggatgatgcacaacggtcgccaccgaaaaccgaggacaccccgccagccgtcacgaacgccgagttcgccgcaatgatagggaccaaggttgtcggatatcatcagggccagcggtcaaaacccgcaccaaaaggccggacatatgaccgcagccgaccaaacgcatcaaaacgccaaatatcgcttgccaacaggggccgtccacata

SEQ ID NO: 5043 - DNA, 1582 bp, unidentified
  source 1..1582: mol_type = unassigned DNA; note = element_7b56e43
  misc_feature 1: note = core
  misc_feature 2..79: note = LE
  misc_feature 80..1228: note = CDS
  misc_feature 1229..1582: note = RE
  misc_feature 1344..1573: note = bridgeRNA
taatgggatggtccggccgtgctccggccctgccagcacgagaagctggcaaggggcgcctcaagacaaggagcacgccatgtctcagaaactcaacgcagcgatcgccgtaatcggcatcgatatcggcaagaactcgttccacatcgtgggtcatgatcaccgcggtgccatcgtgctgcggcagaagtggtcacgcggccaggtggaaacgcggctcgccaacctgccgccgtgcttgatcggtatggaggcctgcgtcggcgcccatcatctcagccgcaaacttcaaatgcttggccacgacgcccgcctgatgccggcgaaatacgtgcgcccgtactcgaagggacagaaaaatgacttccgggatgcggaagccatcgccgaggctgtccaacgcccgaccatgaagttcgtcgcgaccaagaccgccgatcagcttgaccttcaggcacgcaccgcgtccgcgatcgattggttggtcagcgtaccggcgtcatcaatcagatccgtgcgttcctgctggagcggggcatcgccgtgcggcggcctgcgttccctgcggttcgagttgccggatatcttggcaacacgcaccgatgtgctctcgccccgcatgttgcgcatcatcgagggtctggcggaagactggcgccggctggatgaacggatcgaggggctatctagcgagatcgaaacgctggcccttcaagataaggcttgcgagcgactgatgacggtgcccggcattggcccgatcatctcgagcgcaatggtggctgcgattggcactggagacgtgttctcgaaaggccgcgacttcggcgcctggcttggacttgtaccgaagcagatatcgaccggcgatcgcacgatcctcggcagcatatcaaggcgcggcaatcgctacctgcgcgcgctgttcgtgcaagctgcgtgggtcgttctggtcaaggtcaggtgttgggagcgctatggcctcaaatcttggatcaagccgccaagaaacgattgcaccacaacgtgctggcgattgcgctcgccaacaagctcgcccggatcgcctgggcggtcctcaacaagggacgcgccttcgcgtgcgtcaagacggaggagacggcgtcccgacctgcttgatcctcgcgctgtgctcggggccgtcaaggcgcggcctggcagcaggagagcaagcaagacgtcaggacagcacgacggccggccttgacgacccctgcgcgcggcgcgtctgcgcgcgcaggccgggacgaaggaacgaccgccaggcacgaacaaaggaacagcgctaagtgaggagccatcgatgacgtaaaaacacccttacccgccgaggtctgcgagaggatgagacgacgatggaggatcggtcttcccggcgcatgcgaacactggtgacccgaatggcccgtacgaggcctgtccgctaatcagctcgaatgcgcgctgatatccatgatggcccggagcacaacacgctccaatcagaggccggatacattgatgcaagaccgtatctaccggatcgtcgaaatcttcttgcaccgcacggccggaccataca

SEQ ID NO: 5044 - DNA, 1383 bp, unidentified
  source 1..1383: mol_type = unassigned DNA; note = element_7b593b1
  misc_feature 1..3: note = core
  misc_feature 4..261: note = LE
  misc_feature 262..1299: note = CDS
  misc_feature 1300..1383: note = RE
  misc_feature 34..238: note = bridgeRNA
tctcctatgtttgcaaagagaataataagtttttatatgttctaaatttgcaatattaaagtgtaaaagaatgagagagcatttgtgcctaaatagttcaaggaaacatattctcgcaaagatatatcctcattcttttttatcttttagagtctgaacagaatgtaatgaattaagcaatgcttaatatccagaatatccaatcaggagagaagacggaggaagattcatcactttataaaccaatttaaaaaagtaaagatgaaaaaagtagtaaagcaagttgcaggtattgatgttgcacaaaaagaattagtaatcactttgggacgtatgtttgacgattttacaatcgaattatttagttataaagtttttaaaaacaatgattcagggattaaattattagttgattgggtaaataaattgacagatcatgatgtgcctgttcgatacgtgatggaagctacaggggtttatcatcaaaagtttgcttattatttagtggataacggatatgagataagtattgtattacccaataaaataagcaactacatccgtacattagaattaaaaaccgttacagataaaagttgttctcaagccatttcacaatttggattagagcgaaaattagataaatgggctaaacctaaaagtatttacaaagagttacaacaacttacacgtgaaagagatcaaatagttcaagagaggagtatgattaaaaaccaactgcatgctgaaaatgttgaagctattccaaatcaaagaagtttggaaagaatgcaatcaagaatagtgtttttaaattctcaagaaaaagaaatcaaacaagatatagcagctttgattaaaatgaatccagatattaagagtacaatcgaaagaataaaatcaatacccggagttggagagctgactgccgtaatagtattagctgagacaaatggatttgaattaattagaagcaaatcacaattatctagctatgcaggactagatgtaaaggaaaaacaatctggaacttctgtgaaagggaagccgcgaatatcaaaaaaaggaaatcgaaatcttagaaaggcagtccatttaccggctttgacagcagtaaaatgggatgataattttagaaatatttatgctagattagtttccaagcacgggataaaaatgaaagctttagttgcaattcaaagaaaaatacttgaactaatctatattttattcaaaaatgaatcggtttacgataaagaatatataacaaaaaatagcgtgcaaacacaagtggtttaaacacgctatagagactagctcaatgactgtcttgaaaaacaaaattaataaaaattaagattttaattggaaatcaacacagaa

SEQ ID NO: 5045 - DNA, 1379 bp, unidentified
  source 1..1379: mol_type = unassigned DNA; note = element_7b63e51
  misc_feature 1..2: note = core
  misc_feature 3..86: note = LE
  misc_feature 87..1118: note = CDS
  misc_feature 1119..1379: note = RE
  misc_feature 1149..1367: note = bridgeRNA
tgatgctgtggacggctcctccacgggcacgcgagtgccattgatgtggggcctgctgaggctcccacgatttggaggagataagcatgcaaacggttacgacaatcggttttgatatcgccaagtcagtctttcaggtgcacggcgttgatgctgctggccaagtggttgtccgccggcagttgaagcgccgccaggtcatggcttttttcgagaagttgccaccctgcctggttggtatcgaggcgtgcgcctcatcacattattggtcgcgccagcttcaggcccttgggcatggcgtgcggctgatgccgccggcctatgtgaggccgtacgttaagcgacagaagaacgatagggctgacgctgaggcgatttgcgaagcggtcacaagagccaacatgcgcttcgtgccgacgaagacgcctgagcagcaaagcgggttgatgcttcaccgcgcgcgccatctgttcattcgtcagcagacctcagtgatcaatgcgatccgcgctcacctggccgagtttggcattaccgcgccggtcggacgcagaggcgtcgaggacctgctgcgtgtcgttgccgatccgagcgataaacgggtgcctgaggttgtgcgtgcatgccttggcgcgctgggcaatcaattgctcaacctcaagaagcaaatcttgaattttgatcgaatgatcatggcttggcaccgctccaatcaaaccagcaagcgcctgaattgcattcctggcgtcggtccactactggccactgctcttgttgcgagcgttgccgaccctaaaaccttccgatcaggtcgcaacttctcagcctggatcgggctggtgcccaagcagcactcgagcgggggtcgagagaagctcagcagtatcagcaaacagggtgaccgctacctgcgcagcctgttcgtggccggcgccttcgccgtcatccgctatgccaagatccacggcaccaagcatcgaccctggctcaccgcattactgacgcgacggccgaccaaagttgcggcgatcgcgcttgccaacaagcttgcgcgaatggcttgggcaatgatggctacgggcgcgcggtacaattatccggcgtcgctgaaggtctaacgagatcgcgccgcgtatcttggcgtgatgtgaaggttgggagggcgaacagcacgtaaagcagagccggtcgatccggcggtcaggacaacccactcgtgccagcgcatcattgaatgcgtccttttgaccgggacctgatccgcggagggcattatggccagcggtcatgtgaaccgcacttaaaggccgaacacatggctgcaccgaccaactttgcgacgtgaagattcttcttgccaactcggagccgtccacaca

SEQ ID NO: 5046 - DNA, 1399 bp, unidentified
  source 1..1399: mol_type = unassigned DNA; note = element_7b73709
  misc_feature 1..2: note = core
  misc_feature 3..79: note = LE
  misc_feature 80..1117: note = CDS
  misc_feature 1118..1399: note = RE
  misc_feature 1115..1385: note = bridgeRNA
tgttggggtggacggcccccgaacggcatcgaaacgtgccagagtgagtcgttaagatctcaaacaaagggagccgtccgtggacaagattactcgtatcggcatcgatacgtcaaagcatgtctttcaactgcatggcgtgaacgccgccgagaagccggtcttgcgcaagaaaatgcgccgcaaggaatcgatagatttcttgacgacctgcccgccaaccgtgatcgccatcgaagcttgtggcggttcccatcactgggctcggctgctgacctcgctcgggcatgaggtgaaaatgatcgcgccgcagctcgtgaagccttacgtcaagcggagtaagaacgacgccgctgacgctgaggcgctgtgcgaggcgatgagccgtccgacgatgcggtttgtgccggtcaagacggtcgatgagcaagcggccctcatggtggtcggcgtccggggtcgtttgatccgcaaccgtacccaactcgccaatgctatccgcggctatgccgctgaattcggcatttccgccgccaagggcctggcccatattcctttgcttcttgaacggatacaggccgacgcgacggtgccggaattggcacgggaattgttcgcgagtcaggcagaggaatacgcgcaactggaagagaagattgccgacgtggatgcgaagctcaaggcatggcagcgtaccgatgaacgcagcaaacgcctcaacagaattcccggcattggcccgatcggcgcggcgcttctgatcatgaagacaccggcgccggaactattccgatccggccgtcagtttgccgcctggattgggttgacgccgaaggaccactcgaccggcggtaagctgcgcctcggccgcatcacgcgagcaggcgatgaggcattgcgagcggtgctggtggtcggagcaaccactgtcattcagcatgcacggcgatctggcaaggcttctccatggttgaccgaactgctgaaacgcaagccgccgaagcttgcagccgtcgccctcgccaacaagatggcgcgtatcgcctggaagatcatggtgtctggagagacatacaacgtaaagttagcgccagcgctgatggtcaacgccgcatgaagatcggcaacgtatagaaagtctagtccttcaatccgcgtgctgatgccagaacttgcaagataggagcagatggtgtgatcaatcgatccacgacgtgagacactccgtataggcccatggccttctacaaggtcgtgtatgtgtttggggctcacgttgcggaaaccatcttggccagcgttcatgtgcgagcgcaacaacaggccggacgtatggacgcaagcgatgcggtcaaaatcatctcaaaaatatcttgcgagcaggggggccgtccacgta

SEQ ID NO: 5047 - DNA, 1460 bp, unidentified
  source 1..1460: mol_type = unassigned DNA; note = element_7b847cd
  misc_feature 1..2: note = core
  misc_feature 3..79: note = LE
  misc_feature 80..1096: note = CDS
  misc_feature 1097..1460: note = RE
  misc_feature 1202..1458: note = bridgeRNA
tgatgatatggactcctcttcactcccacggtgtcataatgcacccaacaataaacaacggagcaaagaggagcccgaaatgaatgataatgtagttggcctggacatcgcaaagaacatctttcactgctatagcctgaacgccgagggcaaagcgatcaggaaaaagctcaagcgagcagaattgctggcttttttcgccaattacccggcgagtctgattggcatagaagcttgcggcggagcccatcattgggggagagaactgactaagctggggcatcaggtcgtgctgctgaatgcccgttacgtcaaaaacttcgtggtgggcaataagaacgactttaacgatgcgcaagcgatcttcgatgccgtgacccggccgaacaagcgagtggtggcgatcaaaacgctggaacaacaggatgtgcaactggttcataacatccggcaggatctggtggacaaacgtacggcactggtcaatcagctccggggcttattgagcgaaagagggattgtcatagcccaggggatcgatcgggtcagaaaagaactgcccttgatcctggaggaggcggaaaacggcttgaccccgctcagccgtgaagtgttggccgaacaatacgggcaattgaaggcgctggatcaagccatcaaggaccaggaccggcggatcagccggctgtgcaacagcaacgccttaagccggcgatttctggaggttcccgggataggaccgatcaccgctacgatcgtcgcagccgatcttggccacggcaagggctatgccagcagccgggattatgccgccagtttgggtgtcgtacccaggcagcatagcagcggggataaagcggtgtatctgggcatcagcaaacggggcaatcgctatatccgtaccaagctcattcatggtgcccggtcggtggtcaagtactgcagtggcaagaccgacccattaaaccgatggctgcaagccctggttgaacggcggggcttcaataaggccgtggtcgccctggccaacaagaatgcccggatcctgtgggcgatggcgactaaagagcaagcttacgagcctaaggcggcctaattaggcaccgggttatccaccctttgcccaccgactgcgtgaaagtgaagcacttcgtccgtggacaaagcgtggataaccctcttgagcactattttaaccgagtacacaagattgcggaggcaagttaacgattagtgatgacaacaacaggtcagaccggtgctttccaaacccgctcagcacataggttcttaagaaaccgttaggatggttgaggtgaaagcgcgcggatagattcatcaggagtcctgaggtaagaaaacctctgttaagagaccgaatatatggcggcaatcttgatctctgttagtgacattacaaaattgaaaacttggcttgcaataatcgaggagtccatata

SEQ ID NO: 5048 - DNA, 1483 bp, unidentified
  source 1..1483: mol_type = unassigned DNA; note = element_7b873ea
  misc_feature 1: note = core
  misc_feature 2..127: note = LE
  misc_feature 128..1144: note = CDS
  misc_feature 1145..1483: note = RE
  misc_feature 1173..1450: note = bridgeRNA
gaatgaaagggacttccccgtcccatgcgagccgcgccccgtcagggttgcggtttacggcaacagagtgccaagatggagaggcgaatcttttcatcaactcacttgtttattggaaggggaaatcatgactatcgtaaccgttggaatcgatctggcaaagaacgtctttgccgttcatggtgttgatgccacaggcaagcctgtgttgctcaagcccagcgtgccacgcgccaagttggcgccacttattgcgtctttaccgccttgccttattggcatggaagcctgctcaggtgcccattactgggcaagactatttgccacctttggtcacaccgtgcgcctgatggcgcctaagttcgtcgcgccgtaccggctttcgggcaagcgtggcaagaacgatgctgctgatgcgtcagccgtatgcgaggcggttacgcgcgccaacatgcgttttgttccgatcaaaacagtggaccagcaaggccaactcatggtgcaccgtgctcgccagggatttgtagagcaacctaacgccacgatcaatcgcatccggggtctgctttctgaatttggggtggtgttgccactcaaggccgctgttgtgcgtcaacaggcgctacaacacctggaagacctgccaggttgggccaataccgttgtgggtgacttacttagcgaggtgagccactttgatgagcgcattacccaatacgaccaccacattgcaacactggccaaagcggatcccgcagcacgccaactcatgcaattgcccggcgttgggccgactacggctacggcactgatcagtacgattggccatggacatgacttctccaatggtcgccagctcagcgcctggctgggcctggtgcccggtcagtacagctcgggtggtaagcagcgcctggggcacatcaccaaagcgggagactcctacttgcgctctctgctggtgctgggcgcaaaggcggtactggttgcagcaaaaaataagacttacccgatcagccgctgggcaaccagcctggccgagcggcggggttactggcgcgccattgtggcgattgcggccaaaaacgctcgcatgtgctgggcagtactgcacaggggagatgcgttcaaacttcctgtgtgattctgatctgagaaaaaggagtttcgtatccaccaccgcgtgacgctagcgttgatgtgcaaaggttggacctgcgtggggagtgactgactacatttcggagacacctttggtgtgctcggctaacgaatgagtcccccacgcgcgtctttcatcagggtccgcaggttttgcgcttgcagcaatgacagtttgtagtttcgctgtccgcacctcttgccatttgagcagcgcagccaatcgctcaaggtggaatcagattgatagtttcggtgtcaatcgcttgcgcgatttaaccccggtggaaatttgtttgacaaaagtgggtaagcccttgta

SEQ ID NO: 5049 - DNA, 1589 bp, unidentified
  source 1..1589: mol_type = unassigned DNA; note = element_7b8744d
  misc_feature 1..4: note = core
  misc_feature 5..274: note = LE
  misc_feature 275..1474: note = CDS
  misc_feature 1475..1589: note = RE
  misc_feature 36..294: note = bridgeRNA
ttttagtaccataaaagtgtaagtgttaagcacatcattagtgctgtaacatttgcacttatttttttataataagggaagtaattggtctggcgtggcgctttttggattaactacatccgtcataaaaaccgtcaaccaccccttattataagcattcgattaagcaggttggaactcttggatgagctttcgtgtaacgagctaaaatgaattgtaataagtgtggatggaaacaattacaaattttttagaatgtgaggaataacggtccatgataagtgtaggtattgatatttcaaaagaaaagagcaccgtctgtattttaaaaccatacggtgaaataatttctatgccttttgaaataaaacatgcagaaaaagcattgtcagaattagctacaatgcttttaagatttaacgaagaagttaaagttgtgatggaagctaccggaatctatcatctgcctgtacttagttatttacaggaaaaaggaatttttgtggcagtgatcaatccgttcgagatgaaacagtatcgtaatcagggactaagatcggtaaaaacagacaagaaggacgccattacaatagcgaactatgggattgattattggtttcgacttagaaaatatgaagtaaccgaggaaatttatcaggagcttaaaatactgggaagacaatatagtcattatatgtgtatgaggatagaaagcgtgcaatcattgacacatttactggattataccatgccgggtattaaaggactgttaaaggggtggcaggatgccaatggcaaagacaaattatcggattttgttgaagcgtattggcattttgataacataacaaaaatgtcggaagagaactttgttaatagttatgtgaactgggcaaaagaaaaaggataccatcaaagccaaaataaagccgtcaagatttattccctggcaaaagaaggtatccctacactgtctgcagagatggaatcaacaaaaataatgctacagcaggcagtaagcgtattgaaacaagtcaatacaactttaacaattattttagcacgaatgaaggatttagccaagcgattgccggaataccccattgtaagagcaatgggtggcgtaggtgatgtattggcgccgaaacttattgctgaaataggcgatataagaagatttcacagcggcaaagcattaattgcatatgcaggcattgatgcaccaccgtatcaatcgggacaatttgtaggaactaatcgaaaaattagtaagcgtggatcatcaacgctacgaaaaattggttatgaaaccatgcgcgttctgaaaacgcatcgtgctcctgaagatagcgcggtatattggtacatcttaaaaaaagaagctgaaggtaaagcgaaacgggtagcaaaaattgctggcctcaataaattcctgcgaatttattatgcaagggtaaaagaagtatatcaataaataaaacgaatacatatctcaaggctggctgaataaatccagtcattttgtgatgaaataaaactgaataaaaaataaaaatctgctaaaaaagttcttgatttttcttagcagg

SEQ ID NO: 5050 - DNA, 1610 bp, unidentified
  source 1..1610: mol_type = unassigned DNA; note = element_7b8768f
  misc_feature 1..4: note = core
  misc_feature 5..315: note = LE
  misc_feature 316..1479: note = CDS
  misc_feature 1480..1610: note = RE
tcacgtataatcaatcttatagaaatattaattaatttcttattgattgatccctttctatttatatttttttgatatatcatacagctagttgtataatatatcttgcactgtggatttgttcctattttattacagccactttgtggactggttttaggtgactcaaaccacagatttttaatttaattgttaattagttagttaacacgttagtttttactaatcgatgttttattaatttacgtgattacatgattagaaaccttgtggcaaacattcagtgcaaaaaaactaattaaggaggtgtttatattgatatattatattggcattgatatatcaaagtacaaacacgatttctgtattatatcaaatacagatgaaataattgttgaaaactcatcttttgaaaacaacaaaaaaggatttcaatttttattggaccaattgaaaccctataataaatctgatgtccaaattgcttttgaagcaactgggaattattccttgaatttggaacttcttttaattgatcaaggttattcatttatgaaaatgaaccctcttgtcattcatcagtttttaaaagctcgtagcctacgtagaactaaaacagataaagctgatagtttaactattgctaattatctaatgtcagttccatacaaaccaaattcaaatttattatacaacattttttcattaaagtcactatgtagaagtagagaacaattaattaaagaaagatgcaagtatcaagttctattaacaaatgaattagatcttacttttcctgaattaaaacctttctttaacaataatttttcagcaaccttattatttattctaggaaaatacataaatactgaacatatatcattaatgagagattatgattcaataagggctacttctcgcggtaaatttagttatgcaaaatttgctaaacttagaaaacttgccaaaaattcagttggtcgtcacgatgaaaataccgacttacttatctctacatacatctctattattaggacttttaatgataaaattgatccaatcgaaaaacaaatttcaacaattatcaaagtactaaatcctaggatgttaaccattcctggacttggtgagatatctgcagcaacaatactatctgaatatggagatattaataatttttcttctccaaacaaaatgctagcatttgcaggacttgaacctagtataattcaatctggtaccattgaaaataatggtaaaatggttaaacacggttctggtcatcttagatattcaatcatgaatacagcaatgaatattttaagatattcaccaacattttatgattattaccttaagaaacgttctgaaggtaaatgtcatagagttgcattatctcatgtatgcaaaaaactattaagagttatttatacattagagaaaaacaacattaatttcaatccgtctttattaaaataatattttttaatattatcataccttcaaaaattttaaaaatttatatttttgagggcttttggcatgggataattccaatttataacaaactattaaaaatttcaattttactattgacttttaatagttag

SEQ ID NO: 5051 - DNA, 1218 bp, unidentified
  source 1..1218: mol_type = unassigned DNA; note = element_7b97d44
  misc_feature 1: note = core
  misc_feature 2..215: note = LE
  misc_feature 216..1187: note = CDS
  misc_feature 1188..1218: note = RE
  misc_feature 35..205: note = bridgeRNA
tcttaagtttacaaagtagtaaatttaagtactaaaccagaaagcacaaaagagaggattaagattattatacatgcagagactatagatctcgacaacattgaaaatcccctctcttttctactcagattccgtacagttctatgaggctttttagacctcgcttttaagtagttgaaactagtgtagattgtcctttcaataaaacttttcttatgtataaagatattaaatattttggaatagatataagtaaatcagtttttgatgttacggattcagatggtaattattggcagtttaaaaatagtttttcagggtttaacaagtttgttaaattgttaactgttacgagtcattgtgtgatggaagcaacagggtattaccattataagttagcctattatttagtagaaaaaggaataaaagtatctgtagaaaacccactatcggtaaaacgttttattcaaatgaaactctcaaaaataaaaacagataagagtgattcaaaattaatctgtgagtacgggaaacaggtagacttaaagttatggtgtggacaatcaaaagaacaacaagaatgtcttcaaataacaagattgcttagtgtttatacaaaacagagcactatgctaaaaaacaaaatacatggggaagaagttttaggtattccaagcaattcagttttacgttctatagtacgcagtttaaaacaccttaaaaaagagataaaagttttagaagagaaattgttaatactactaaaaaaggaacatcaagatctattaacccgtttggaaacgattccaggaatagggaagaaaacagctataatgttagtcgttttgacagatggatttgaacgttttgccagtggtagtgaattatgttcttattcaggcttaactccaataattcgacaaagtggaagtagtgtaaaaggacgagcaagaattagtaaaataggaaatgtaaaacttcgaaatctattattcatgtgtagttttaatgcttgtaaatataataagagttgcagagagctttatcaacgaatagtagccaaaggaaagagtaagaaacttgccttaatagccgtttgtaataagctattaaaacaagcatttgcaattgcaaaatcaggattaatatatgatgaaacttatagaagtactttgataaaaaattaaacaaaaattagttgctttttaccacagttct

SEQ ID NO: 5052 - DNA, 1395 bp, unidentified
  source 1..1395: mol_type = unassigned DNA; note = element_7b9c8bb
  misc_feature 1: note = core
  misc_feature 2..294: note = LE
  misc_feature 295..1380: note = CDS
  misc_feature 1381..1395: note = RE
  misc_feature 1..304: note = bridgeRNA
cagtaagaatatctgtgccagttgtttcggagcggcctgaccctcacagcgatagaccggtcatgaagaatctggtgccgtgaagtgttccggatgacctgacccacactctgatcgacaagacctgttgtctttcctcggacctgtcggccctccaggacaccgaacggcgaggtttcacctcgccgatacatgtgactcaagaagggcctgacgccctgtcgcattactgtcttgtccaggtatccggttgcggtgaaatcgcccccttccatcgctaaccggagcaaccgcatgaatgaaggacaggctactaccgagcgttgtggcgtcgtgggcggtgtcgatacccacaaggacctgcacgtcgcggctgttgttgactcccacgatcgcgtgttgggcagcgaatgcttcccaagcacccggcatggctacaagcagatgctgatatggatgcgttcattcggcgagcttacccgcgtcggcatcgagtgcaccggaacctatggcgcaggacttctacgttacatgcagcaggctggcgtgacggtgctcgaggtcactaccccggacaaaagcgaccggcgcaagcgcggcaaggacgatacgctcgatgcccagaatgccgcgcacgcggcctacgctggtatccgtacggtcacacccaaaacccgtgacggtatgatcgaatccttgcgggtgctgaaagtctgtcgcaaaaccgccatgactgcgcgccgcgtaacgctgcaactgatccataacaccatcgtctgcgcaccggacgaactacgcgaatcgctacgcgtgatgacccgcatgcagctcatccgtacgctggcggcatggcgtccggatctctccgactatcggagtctcacttcagcgtaccgaattgccctgaagtccttgggacgccgttatctggagttgcacgatgagatcgccgatctcgacgtcatgatcgcggctctggtcgacgagcttgcccccgacctcatttcgcgaaactgcattggctacgagtctgcgtcacagctgctactgactgccggcgacaacagcaatcgactccgatccgaagccagcttcgctgccttgtgtggcgtcagcccggttcctgcatcctcaggaaaggtcactcgtcatcgcctgaatcgaggtggagaccgggctgccaacagtgccttgcatattattgcgataggccgactgcggacggatccgcgcacaaaggcctatatcgatcgacgagtcagcgaggggcactcgaagcttgagtccatccgctgcctcaagcgctatatcgcccgagaggtttatcacgtgatacggcaacgaaaccgccaaattggacaagtccaaattgctacttgacgcttagaagggcgt

SEQ ID NO: 5053 - DNA, 1502 bp, unidentified
  source 1..1502: mol_type = unassigned DNA; note = element_7bb73bf
  misc_feature 1..4: note = core
  misc_feature 5..268: note = LE
  misc_feature 269..1477: note = CDS
  misc_feature 1478..1502: note = RE
ctcactggactaccctttcgcgaaagtccgaggttctccgcggggagagggaagacagtggggcgaggcgatcagcgttcggggagagccaagttcgctcgccgctcaacggccagcatgagacccgctccctcgaaccaaaagaagagaggcccagaccggccacaggatgacgcgccacgtgcccaggcaggccagagcgccaatcagtgagcgaccggccggacctctcaccgcgcagtgtctcgccgtccccggaggcgacgcaatgcaattcttcgtaggcatcgactgggcgactcaggcccacacggtctgcgtcatcgaccaggccgggcgcagccgctggcagggcgcggtgccccacaccagcgccgggctcgcggagctccgcgcccgcctgcgccgcttgcgccggcgggggccggtacgcattgccctcgaacgtccctctggcctgctcgtcgacactctcgtcgacgctgggctcgaggtcgtaccgattcacccgaacgcgctcaaagcgagtcggccccgctactcggccgccggcggcaagagcgatcccggcgacgcgttcatcctcgccgatgtgctccggaccgacggccaccggttccggccgctgcgtccgccctccgacgatacgcgcgccttgcgcgcgctcgtgcgcggccgcgacgacctcgtcgcccaacgtgtcgccctcgccaatcagctgcgcgcgctcctcgagcgcttctggcccggggcggctgcgatcttcgccgacgtcgactcgcccatcgcgctcgccttcctcgcccgctaccccacgccgcacagcgcggtgcgcctcggccaaaagcgtctcgcgcagttcctcggccaacacgcgtactgcggccgccgccccgtggccgagctgctcgcccgcctccgcacggcgccggcaagccaggtcggtgaggcggaagcggaggcgagcggcgacgtcgtccgcgcgctcgtggccgtcctgaatccgctcggcgcccagatccagcaactgacggccgccatcgaagccgccctgccgcagcatcctgatggccggctcctgcagagcctgccgcgcagcggcgccatcaatgcggcgcagatccttgccgaactcggtgacgatcgcactcgcttccccaccgatgaccagctggccgccgaaggcggcctggcgccggtcactcatgcctccggcaagcatcacgccgtcgtcttccgctgggcctgtaacaagcgtctgcgccgcgcccttacgaccttcgctgataactctcgtcatgcttcgcggtgggcggccctcgtctatcagcgtgctcgcgcccgcggctgtcgacatccgcatgcgattcgcatcctcgcccgcgcgtggacccgcatcctctggcgttgctggcaggaccgcaccccatatgacgtcagccggcatcgcgccgcgcagacgctcgtcgccgcgtgacgtcgccatggttgacacaggatgt

SEQ ID NO: 5054 - DNA, 1617 bp, unidentified
  source 1..1617: mol_type = unassigned DNA; note = element_7bc6939
  misc_feature 1..3: note = core
  misc_feature 4..249: note = LE
  misc_feature 250..1485: note = CDS
  misc_feature 1486..1617: note = RE
  misc_feature 8..226: note = bridgeRNA
gttcgtaatataaggttaaccagatttttctggttgaccattttttatatggttttattataacagtagccggggtagaacgtctctgctcgtgggacattgatcccgtcaactaaacagttcaccccctacttgtaaaaacatgattgaggctggttgggacctttggatcccgtttaacaagcgaagctatgatattacaagaaggattaggggcaccggcaatttattaggaggaggagattttgaatgaatccagtcgttggtctggatatttctaaaggggaaagtcaggtccaagcatttttggacaagaaaaagccatatcgtaagagttttaaagtagaacacaccaatgataggttagcgttacttcacgagtttttaaagcatataaaggaaactacaggacagaatccggcaattattttggaatccacagggcattatcatgcctccgttgttcaatttttggaggatcgtaattatttgttaatcatagtgaacccattggtctcacatagagcgaaaagttctagtttacgtaaggttaagacagatgctgtagatgcttaccatctttgcgaactttactataaggaagatttagagccttataaaaaacgtggagttcaactcttaaaccttcgtaatctaacacggcaacatgagaatattactgggaatttcattaacacaaaactacagtttcaagctgtattggaacaagtatttcctgaatatagaggtgtcttcggagagctatattcatatgtttctttacgtattctcaaagaatttaaggcatccgaagatatcttgaaaactagtgaagataaactagcaaatcgtatagcagatttatgtaagagtcgttctgaaaaatgggcttatgaaaaggcgcaaaagctaaaagaagcagcatcacgaaacccatttaaaaagacgttatatcaaagtcatctgttaagcatggatatgtatatagatatgcttcttcaatttaaagagcatctatcaaagttggaggcagagatagataccctggctaaagaaattgaagaatataatattatcaaatctatccctggtattggagagaagatcgctgccacgatcatttctgaaattggggaaatagatcgatttaatcatccaaaaaagcttgtagcttttgcaggtgttgatcctagcgtttttgaatcaggtagattcacagccagtatgaaccgtattactaaaagaggttctagccgcctacgacatgccctatttctagctgtgcgttgtgccatacgtgataaacggaaaaagaaaactcgtaatgaaatactccctcgaaataagagaatgagagagttttacgataaaaaacgtagtgaaggcaaaccttttagggtagcagttattgcttgcgtaaataagctcttacattggatttatgccttactaaaaaacaaaacgactttccaagatatagattaaaaactatatctaattaaataatccaaagccttccataatggtgataatggagggttatttggcatgcgcaaatttagtatatcatattattttttaggattttacagaaaaatattgacaaactattagctg

SEQ ID NO: 5055 - DNA, 1455 bp, unidentified
  source 1..1455: mol_type = unassigned DNA; note = element_7bcc94e
  misc_feature 1: note = core
  misc_feature 2..240: note = LE
  misc_feature 241..1440: note = CDS
  misc_feature 1441..1455: note = RE
  misc_feature 19..237: note = bridgeRNA
ccgttaccttgtaggtagcccttgaagcttgcttcttagggtgttggcctgttaggcccggcatggttgctgcccccagtcgttaatgatccggggggtgttgtcaccgggcctgactgggattgggtgatcgctaataggggctcgactggaactcgtttctgggtcgaacgtaacgtggatgccgagacttgatgccgtggacaggccaaccgatccgcatggctgacggggaaactcatgattgagaattacgacagcgtcgacgtgttcatcggtgttgacgttggaaaaagcgaacatcacgcggtcgctctcgaccgcaccgggaaacgcctctacgacaaagcgctccccaatgacgaagccaaattgcgcgccgtgattcagaagttcaaggtccgcggcactgtgctcccggtcgtcgaccagcccgaaacagtcggcgctctacctgtcgcggtcgcctatgccgaaggcatcctcgtggcgtatctgcccggtctggcactgcgtcgcatcgccgaccttcacgccggtgaggcaaagacagatgcccgcgacgcggccatcatcgccgaagccgcccgcaccctcccgcacgctttacggccgatccgactcgaagacgagcaagttgccgaactctcgatgctctgcggattcgacgatgacatcgtcggccagatgactgccaccagcaaccgaatccgggggctgctgatgcagatccacccagcgttggagcgagtactgggcccgcacctcgaccacccagccgtcctggacctcctccagaaatacccgacaccgacagcgctgacggccgccgggaaggtccgggtcggcaaccgcctcctcacgctcgcaccacggatgggccgccgcctggccgaggaaatcttccaggccctctccgagcagaccgtcatcgttggcggcacccatgccacgcgcgccgtgctaccgcgccttgccgagcagctcagcatgctccaccgccaacgcgccgagatcgccgtcgaggtcgccgaggtcgtcgacgcaaacccactggaaccgatcatcacgagcatgcccggcgtcggcgtggggaccgccgcccgtgtcatcaccgagatctcaggcaaggagtccgccaccgccggccacctcgcctcctacgccggcctcgcgccggtcaccagacgctccggatcatccatccgaggcgagcacccctcacggcgcggcaacaaagtcctcaaacgcacgctgttcctctccgccttcgcggccctcagcgaccccgtctcacgcacctactacgaccgcaagatcgcccaaggcaaacgccataaccaagccctcatcgccctcgcccgccgacgctgcgacgtgctctacgccatgctccgcaatggcacgctctacgaaaacaaaacctccatcaggacttgacgaaacacatagggg

SEQ ID NO: 5056 - DNA, 1623 bp, unidentified
  source 1..1623: mol_type = unassigned DNA; note = element_7bcd781
  misc_feature 1..2: note = core
  misc_feature 3..283: note = LE
  misc_feature 284..1486: note = CDS
  misc_feature 1487..1623: note = RE
  misc_feature 17..303: note = bridgeRNA
ttgctacaatgtcaacaggccggataaagcgtgtcagccagtcatgcttttcttggactcacacttaagctacaatggaagggaaattggcctgacgagacttttgatggactaaccatgtccggctgctaaacagtcagccatccttccgctgcagcgttcggttgaggcaggttgaaccactgaagtacaggatgttcgtgtgactaagcaatttgaatcggtagtgagaaaacgatggccgccaatttaaaatcgaatcggatagagaggtatatacgaaatgaacgcagtagggattgacgtttccaaaggaaagagcatggtggctattatgcggccttttggtgaagtggtagcaacaccatttgagataaagcatacagagatcgaactaaaaaaaatggtctgcatccttgagaaacttcctggcgaaacacggattgttatggaacacacaggcatctattggcagcctatcgctaaggcactgcatgacgcaggcttgtgggtttctgttgtaaatgcgctgttaatccataagtatggaaacaattctattcgaaaagggaaaaccgataagttagatgctgtaaaaatcgcaaactattgtcttgaccattggttggatcttgaccgttttactttgattgatcctatccgacaggaacttaaaacatgtcatcgacagtatgaccaatatatcaagttaaaagttaatcttaaaaacaatctaattactctattagacggaactttcccgggccttaatacattgttcaaaagcgctcccagagatgtggatgggcatgagaaatggatagatttcgctatcaaattctggcaccgagaatgtgtttgtggatgcaccgaaaaatcgttcacaaatcaatatcgcaagtggtgcactaaagcggggtaccgattcaatgaagcgaaagcagcatccatctacgctcatgctgctgcacaagtgaatacacttccaatgtctgatgcaatcaaacgtttagtcatcctcgcagcatctcagcttaatacgattatagaaaccctttccgttattcagaatgaaatgcttaccctggcatccaagctcccggaatttcctgttgtaatgaaaatgtttggcgttggtcctgtattggggcctcagcttatagcggaaattggcgatgtgcgtcgatttcatcataagcaatctttagtagcttttgccggtgtggatgcacctccttgtcagtctggcactttcgaatcgaaaaacaggcatatttctaaacgtggatctccccggctgcgaaaaacacttttccaaatcatgtctactatcattcagcatgcacctgcagacaatcctgtatttcaatttcttgaccgtaaacggcaagaaggaaaacactactatgtctacatgactgctgctgcgaataaattcctgaggatctattacggtacagttagggcttatttagaagatacataatttcttctataaattgatcgttatttctttgtttcgaggccttcgcaatgtggaggcctgctttgctatacctttttcacgaaaatcatgtttttctttcttttgtgcctttttacccttgacagctcttggcaggt

SEQ ID NO: 5057 - DNA, 1420 bp, unidentified
  source 1..1420: mol_type = unassigned DNA; note = element_7bce501
  misc_feature 1: note = core
  misc_feature 2..87: note = LE
  misc_feature 88..1134: note = CDS
  misc_feature 1135..1420: note = RE
  misc_feature 1181..1415: note = bridgeRNA
taatggcatggacgcccctgctcggcacggcatcagttgtgccaaggtggaagtgtcgagcaaccacttaaaccggcaggagcgtccgtgaggaacattacgaccattggcgttgatctggcaaagaacctgtttcaggtgcatggggtcgatgatcgaggcaaggtggttcttcgccgagcactaaagcgagccgagctggcgagcttcttcgcgcggctcacgccgtgtctgatcgggatggaagcctgcggtggcgctcacttctgggcgcgtaagctcaccgagctggggcacaccgtcaggctgatggcgccgcagttcgtgaagccctacgtgaagacgaacaagaacgacgcacgtgatgcggaagcgatctgtgaggcggtggcgcgaccgaacatgcgctttgtgccgatcaagaccgttgagcagcaggcgttgctggcggttcatcgggcccggcaggcattggtgtcggcgcgtacggcgcaaagcaatcagctgcgtggattgctgagtgagttcgggatcgtgatgccgaagggggtcgcggttctcgagcggcgtatgccgcagattctggaggatgccgagaatggcctgcctggtgtgagccgcgagctcttcgcgcggctctatgcgcatttcaaggagctgagtgaccagatgggtgagctggagcggcagatcaaggcgtggcatcgcgagaacagcgccagtcaacgcctggaggcaattccgggcattgggccgctgactgcaagtgcactggccgccagcatcggggatgcgaaggcgttcaagaatggccgacagctagcggcttggctgggtctggtcccgcgccagtgctccagcggtggtaaagaccggttgctcgggatcagcaagcgcggcgattcgtatctgcgcacgctgctgattcacggtgcacgctcggtgctgatacggctcaaccgacatgccgatcaggctgaagggtggctggcgcgcttggtcgcgcggcgcaatcccaacattgccgcggtggcgctcgcgaacaagaacgcacgcatcatttgggcgttgctggctcatggacgggactatcaagccggatacgtcgcggtacctgaacaggcgatggcgtagatcactgcgcggcagtcgggcattcgagaaacagtttcaacgcaagacacgccatagattgcacaggcgtcttcaaaggtgatggcgaccaggttagaccggggttgacgaatcctgccaggttcttcgggacctcaagagtccgtggatttgatcaggcgtcgaccagcgcattccatcagggcccgcggccaagtgccgtacaccgaggccgaatgtatggctgcaatctctacctggagaccggaagcgaagaagaggcttggcatatgggggcgtccatgta

SEQ ID NO: 5058 - DNA, 1450 bp, unidentified
  source 1..1450: mol_type = unassigned DNA; note = element_7bcef95
  misc_feature 1..4: note = core
  misc_feature 5..234: note = LE
  misc_feature 235..1434: note = CDS
  misc_feature 1435..1450: note = RE
  misc_feature 12..237: note = bridgeRNA
acccgttacattcattggtaggtcctcaccagaggatctggtcgctggccctggtatggctgtcttgccctgtcttcaatgatccggggggtgttgccgccaggagtccaggacgcgcgttgactgctgatagggacgcggcccgacttcggttgaggtctcttcgtaacgtgggtgccagcatcgggtgtcatgacaccagtgaccgaggtctagcaggtgaaggagcctgtcatgacaaccgaatacgccatcactctggggctcgacgtcggaaaatcggctcatcacggatgcgcccttactcctgagggtcagcgcgtgtacgaccacgagctgccgcaagacgagaccgctctgcgcgaggtcatcaccgacctgcagcagcacggtgcggtgctcgtcgtggtggaccagccgaacacgatcggggcgctgccgatcgcgatcgctcgtgatgtcggcgcggatgtcgcttacctgcccgggctggcgatgcggaaggccgcggacctgtacccaggcaggtcgaagaccgatgccagggacgccttcatcatcgcggacaccgcgaggacgatgccgcatacgctgcgggccgtggaccgggactccgccgtcttatcggcgttgaaggtgctgtccgggttcgacgaggacctcgcccgcgaatcaacgcgcgcgatcaaccgactgcggtccctgctggtccagatctacccatctttggagcgtgtcttccctggtgtcgtgctcacacgagcgatcgtgttggagctgttcatccgttaccacgggccggccgggctcaaggctgcggggaaggcgggggtgaaacggtgggcgaggaaccacagccgcaaggacccgggtccacttgtcgatcaggtcttcaccgcgttagcggagcagaccgtcacggtgcccggtgccgacgcggtcgagctcgtcatccccagggtggcggcgcagatcaaggagctgaaccatcagcgggacatcgttgccggtgaggtcgagaagctggtggatgacttccctctttccagggtcttgaccagcattccgggagtcggggtcaagaccgccgtacagattctcctggccgctggtgacatgtccgcgttccccaccccgggacacctggctgcgtatgcagggatcgccccggtgacccgcaggtcgggcacgtcgatccggggcgagttccccgccagggctgggaacaagcggttgaagaacgcattgttccggtccgcgtgggtcgcttcctgccacgatccgctgtcgagggcgtactacgagcggaagcgggctgaggggaagcgtcacaatgctgctgtgatgtgcttggctcgtcgccggctgaacgtcatgtacgcgatgatgaaaactggcacgctgtacgagccccgagtccctgcggctgcttgacaaccaccatagggac

SEQ ID NO: 5059 - DNA, 1611 bp, unidentified
  source 1..1611: mol_type = unassigned DNA; note = element_7bd969d
  misc_feature 1..2: note = core
  misc_feature 3..281: note = LE
  misc_feature 282..1487: note = CDS
  misc_feature 1488..1611: note = RE
  misc_feature 14..301: note = bridgeRNA
ctactacaatgattttatagttaatattcttaacatccagttaagatgttatctatcttattgcttaagctgtataatgatggggcaataggtatatcggcttttttcttggactccgcgtccgtaaattagactgataaccagctcctcattagcagcgttcgttttatgcaggttgtttcaccatagggtgcattcgtgtcacaccacagtagattgaataggcaatgagtaaactggtgtatatccattgcactatatttttaaggagtgacaaatatatgaacgcagtaggtattgatgtatcaaaaggtaagagtacagtttctatactgagaccatttggcgaaatagtttattctccatttgatgttaatcattcttcgagtgatatcaatgcattaattcaacttatcaactctgttgaaggagaatcacgaatcgttatggagtataccggacgctattacgaggttcttgcacatcagctttctgaggctaatctctttgtcagcgttgttaatccaaagctcattaaggatttcgataacgattctctccgtaaggttaagtctgataatgctgattctgtcaaaatagctcgttatgctcttgacaaatggcataaacttcaacagtatggtgatatggaagaattacgcaatcagttaaaaaccatgaatcgccaattcggcttttacatgaaacacaaaactgctatgaagaataatctcataggcattcttgatcagacttaccctggtgttaacacctactttgatagccctgcacgcagcgacggaagccagaaatgggttgacttcgcatctacttattggcatgtagactgtgttcgaaaaatgtctttaaacgcctttatagagcattatcagaaatggtgtaaacgtaggaagtacaacttcagtaaatcaaaagctgaagaaatctacgaaaaagcaaaggagcttgttccggtgcttccaaaggatgacatcactaagatgattattaagcaagcagttgaccaactgaataacacatctgctacagttgaaaagcttagatctttaatggacgaaacagcttctaaactgcctgaataccctgttgtaatgcaaatgaaaggtgttggtccatctctcggtccacagcttatagcagaaattggagatataacacgttttcataagaaaagcgctcttacagcatttgcaggtatagacccaggagtaaacgaatccggatcttatgagcagaaaagtgttccaactaccaaaagaggttctgctgatcttcgaaagactctgtttcagataatggatgtacttataaaaacagctccgatagacgatccggtatatcaatttcttgataagaaaagatctcaaggtaaaccgtactatgtctatatgactgctggagcaaataagtttttacgagtctactatggacgagttaccgaatatctatcgactctttcagattaatcataactaataaatgatcctgatcagaccggcactgatgtggtggtcttcttttgatacctttttccaacctgtatttaattttcaatttttataaatttagccttgactttttatttgcagg

SEQ ID NO: 5060 - DNA, 1466 bp, unidentified
  source 1..1466: mol_type = unassigned DNA; note = element_7beaae3
  misc_feature 1: note = core
  misc_feature 2..86: note = LE
  misc_feature 87..1115: note = CDS
  misc_feature 1116..1466: note = RE
  misc_feature 1236..1461: note = bridgeRNA
taatgggatggtcgccccttcccgagacggcatcagagtgccaaagtggcgaatggaattcccaccaaccgagagaggcgaccgaaatgaagattacgacaattggcattgatttggcaaagagcgtattccaagttcatggcgttgatgaacggggcaaggcggtggtgaaaaaggcactcaagcgggcgcagatggtgccgttcttcgtaaacctgccgccgtgcctgattggcatggaagcctgtggcagcgcccactactgggcgaggaaactgcaggcgctgggacacaccgtaagactgatggcaccgcagttcgtcaagccgtatgtcaagacgaacaagaatgatgcggccgatgcggaagcgatctgcgaggcggtgacgcggcccacgatgcgttttgttccgatcaagaacgacgagcaacaggctgtgctggcgctgcatcgtgcccggcaaggcttcgtcaaggcgaggacagcacaggccaaccagattcgcgggctgctggccgaatacggcatcgttatcccgcaggggatcagccatatcgccacgcacctaccggatatcctggaagacgccgagaacgggctgccgggggtgtttcgccaactgatcgatcggttgggggcgcacctcaaagagcttgaccggcaggtccaggaattggaggttcaaattcaggtctggcaccgtgccaacgacgcgagccggaaattggcgcagatcccgggcatcggtccgatcaccgcaagtgctctggtggcttcgattggcgatgccaagagcttcgataatggccgacagttggcagcctggctcggactcgttccccggcagcactccagtggcggcaagcagactctgctcggcattagcaagcgcggcgatacctatctgaggacattgctgatccacggtgcgcgcgccgtgatccgggtggcagaacgaaaggtcaatcatgccggcagttggctgtcgggcgtcatggggcggcggaacaagaacgtggctgctgtggcgttggccaacaagaacgcccggatcgtctgggcactcctggcgcatgatcgcgagtacaccaacgattacgcgcccgtggcatgaacaccgcgtttcaccgcgccgatcacctctggtgccaagagggcccgccggcgatcggcgctgcggcaactccggcggcaacgcagcacagcggcagcacaatttcttaggagaaacaccccaccgattgcttaggcaattatgacgtgatggcaagataggtcagaccgtggtcgagcaaacctgtacgcaacacggcgcttcgagcgcgttcccgtgatcaggccttgaccagcgaattccatcagggacagaggctacagcctcgatcaaagtccggatctatggctgcaatctttaccttactaccatcatcgactaagggcttggcaaaatggggacgaccatcta

SEQ ID NO: 5061 - DNA, 1370 bp, unidentified
  source 1..1370: mol_type = unassigned DNA; note = element_7beca9d
  misc_feature 1..2: note = core
  misc_feature 3..75: note = LE
  misc_feature 76..1110: note = CDS
  misc_feature 1111..1370: note = RE
  misc_feature 1083..1358: note = bridgeRNA
tgatggggtggacgccccccgacggcatcgatgtgccatagtggaggtgttgtaacaccactggaggaggcgtccgtgtcgaaggttatcacgattggtctggatatcgcaaagaacgtttttcatgcgcatggcgccgatgagcgcggcgcgatggtgttcagtcgcaagctgacgaggggcaagctgctcgagttcttcgccggtcaaccggcgtgcacggtggcgctcgaagcctgcggcggcgcgcatcactgggcgcgccagttgcaggcattgggtcacgatgtccggctgatcccgccagcttacgtgaagccgttcgtgaagcggaacaagaacgatgcggtcgatgccgaggcgatctgcgaggctgcgcagcgccccggcatgcgcttcgttgcgatcaagaccgaagagcagcaggctgcaggcctcgtgttccgcacccgcgatctggtggtgcgccagcgcacccagctgatcaatgcgatccgcgggcacctggccgagtatggctgggttgcgccgcgaggcaccgcgtccatgacgatgctggcagatcttctgcaagacggggacatggcctcaagcttgccggaagctgcacgcccgatgttcaagctgatgatcgacctgctggctgagctcgacgagcagatcgccacgcttgaccgcgagatcgcgcgccgagccaaggatgacgaagcggcccggcggttgatgacgatccccggcatcggtccgatcgcagccactgccatcatcgccttggcaccgccgatcgagacgttccgcaaaggccgcgacttcgccgcatggcttggtcttgcgccgcgccagcactcaacgggcggcaagcagcggctcggcagcatcaccaagatgggcgagcggacgatcaggcggctgctcatcatcggtgcaagctctgtggtgctccaagccagcaggcgcggcgctcagagtggctcatggctggagcggatgctggcgcgcaagccgcgcatgctcgtctcggtcgcgctcgccaacaagatggcgcggatggtctgggcgctgctcaccaaggacgaagattacagagctccggccgcggtctcggcgtaagctgagaaggcggtcagaggcgtcggggacgtaggcggtcgaaggagggtatggcacaacagtcggcgagacggggccggaagaaccagggaatggcagagcgctacccaagcgcgcaaagctgaaatggatccggtccgcgaactcccatactggcccgcagctatggcgctgctcatcgaggccggacagatgacagcatccgactacgtgccaacatacccgaaaataccgcttgcatccaaaggggcgtccacaga

SEQ ID NO: 5062 - DNA, 1552 bp, unidentified
  source 1..1552: mol_type = unassigned DNA; note = element_7bf5f92
  misc_feature 1..4: note = core
  misc_feature 5..283: note = LE
  misc_feature 284..1447: note = CDS
  misc_feature 1448..1552: note = RE
  misc_feature 37..265: note = bridgeRNA
tcacgtataataaaaaccatctcgaaaggggtggtttttattatttctccttccttaacaagattgtatcgcaggagtagctacctgcgttataatcagtacaagcactgtggatttgcatctatactattacagcttgactggttcgaggtgactcaaaccacagtgacttgtctgaattggtaatcagttagttaacgctttgacgtttcatttgtgcgtgaatccatggacaagtttcctgtggcaaacagcagtgctaaatttcaaaaggaggaaaccaatgtactttatcggaatcgacatttcaaaattcaagcatgactgcgccatcatcgacgaagccggtgacacggttacagcttcctggtcatttgccaacagctgtgaaggtttttccttactcaaacagctgttggatgccctggatggacaaaagaaaatagggtttgaatctaccggtcactatgggcataacttaaagctgttccttgaagccaacaacttttcattcatggagttcaatccgcttctggtttctaaatttgttcgcagcaaatccctcagaaacacgaagactgactctctggatgcagtttccattgcccaatatcttatgacggtagagtataaaccctatccaccgtcattctatcacatggatcagcttaagtcactaacaagatttcgggattctcttgtccgtcagcactcccggcagcttgttgagctcacaaatatcctggacaaggttttccctgagttcaagcccttctttgacggaagattctctgccacagctctctacatactgacccattaccaaagtcctgagaagattgccaatatgaatgccaagtcctatgaggctctgcgcaaaaagtcccgtggtaaattctcaatggtgaagttcgcacagttgaaaactctggcaaaaaacactgtcggcagatctgatgccttccttctcaagcagatggaaattaccatagatattgagaatcagctagatgcaaagattgacgagattgaatcgcaaattcttgagtgtattcgcgctctgaatccaccgatccttaccattcccggcattggagaattaactgctgcgattattctttctgagtatggtaacattaacaaatttgaaaacccagctcagctgctttctttcgctggtttggagcccggttactaccaatctggtctggctgaacaccagggtcacatggtaaaacacggttcttctcaccttcgctacgcccttatgaacgcctgtctgccgcttattacttacgaaccagtatttgcggagtactatgcaaaaaagcgggctgagggcaagcctcaccgtgtagctctgacccatgtcgcaaagaagctgctgcgcgtcatcttcaccctgcaaacgaagaacatttcttacgatcccaccttgatccggtaactacagcgatttcatttttcagcactcgaaagagggcttatcttcgtgcgcccatttttccccagaatatttttctgctcttagggcttgacttttaatagttag

SEQ ID NO: 5063 - DNA, 1353 bp, unidentified
  source 1..1353: mol_type = unassigned DNA; note = element_7c034c3
  misc_feature 1: note = core
  misc_feature 2..77: note = LE
  misc_feature 78..1103: note = CDS
  misc_feature 1104..1353: note = RE
  misc_feature 1121..1349: note = bridgeRNA
taatgaaatggctacccccgcctcaccctgtgtgagcccctaagctttcacagggtgcctattcggagtgcaacgccatgaacactgtcgccatcgtcgccatcgacttgggaaagctgagcttccatgtccacgcgcagaatgatcggggtcatgagctttatcaccgcaagttcaaccgtgaaacgctcatgcgccaccttgccaatcttgcaccgtgcaccgtggcgatggaggcctgcggcggctctcatttcatggcccgagagctcacgaggctgggccatacgcccaagctcattcctgcccagttcgttcgcccttacgtgaagagcaacaagaacgacttcgccgatgctgccgcaattggcgaggcggcaactcgtgaccaaatgcgcttcgtgcagcccaaaacggaagcccagcaggcgttggcgatgctcaactcactgcgtgacagcttcatcagggaccgtaccgccaccatgaaccgcatccacgcgtatttgctggaggtcgggatcagtttgccgcccagcttcaaagcggtccgtgaactccccatcgtactggacgacagcactttctcaccgctgatcaaaaagctgctgctggacctgcacacccacttcagctacctcgacgatcgggtcaaagcgctggacaaagaagtgcatggccaggccgctagcgatgatctcgcttctcgtttgatgtcgataccttgtattggcccgatcaccgctaccgccctggctgcggaactgggggacggcaagcagttccgttgtgggcgagattactcagcttccgtaggcctggttcccaggcaacatacgacgggtggcaagccttgcctggggcgaatcagcaagcgcggagatggcaatcaacgacgactgctgatccagtgcgcgagggtctatttgatgggactggagcgccaatccggcaagttggcggactgggtgcgtggtttgctacgcgctcaccaccctaacctggtggtgtgcgctgtcgccaacaaactggcccgcatcgcctgggccatcaccgcacatcacagcgaatttgatgcaggggcaagcgcgatgagcgcttgaccctgcggacacacgagttgtaaccacctggttttgcgatgctgcacacagatgacgtgaacggtacaccggcctggcgatcaacctgagctcccactcggcttcagaagccgaacaaatattaaggctcgtcgggcgcgactttcatcgaggcgcgggactgacctcccacacgacgccgtatagattgacgcaaaccaaactcacgcacatctcgctacagtattgcagaaatgggggtaaccataga

SEQ ID NO: 5064 - DNA, 1377 bp, unidentified
  source 1..1377: mol_type = unassigned DNA; note = element_7c0c260
  misc_feature 1: note = core
  misc_feature 2..277: note = LE
  misc_feature 278..1315: note = CDS
  misc_feature 1316..1377: note = RE
  misc_feature 93..251: note = bridgeRNA
ctttaactttgcagcatatatataagagtcttaaaaactcttaattatatataaacgtttatcagttttttcttacctttgttgtttaaaggaaggattaactgccggaggtcaacctaaagtctctaccagacctaaagtctatggcatgttgaaggccctccggattgaagctgcagatcctaaataggaaggtaggcttcgagcctaattaaagtagtagtcagacgcagcttaccagttaatcgcttccataacttaaattatttgcaaatttatgaaaaaaatcgtattcggcatcgatgtttccaaagaaaaaatcgatgtgaccgcaattgaggtgagagatggattcatgggtgccaaaaaactgggctacaatgagtatgagaaccgccccaggggattccacaagatgctttcctgggctaagcgactggccaccaaagacgggcttaaggacgtgctgttctgctgtgagaccacaggagggtatgaccgatgcctctgcgactacctctacggaaaggactgtgacatctggagggagagcgcacttcagataaaaaggagctgcggacttcgcaagggaaaggacgacaaggcggactcggagatgattgctgagtatgcgatgagacacatggacaaggctgtgtcctatgagtcacctgattcgaatataagggacttgaaggcacttctgagctacagggacaagctgatgagacagaagacatcactgagcgtcagaatgaacgagataaagtcaactgcggcaaagagcaagacgcaaagcctcatcatgcaggatgagaagaggcatatcagggaactggagaagagcattaagaaatgcgagaaggagattctccagatcattgaacaggatgagcagctcaagaagaactatctgcatctcacttccatcaagggcgtcggaatcgtcaacgccacagccatgattgtctacaccaacaacttcaagaacatctcaacggcaaaccagatggcgtcatactggggagctgcgcctttcagggaacagtccggtacatccgttaacaggaaggcacacgtcgggaaatattcgtcatccagactcaaggcatggctcacggaggcggctaagcacactgtcaaggagaatggtatttacagagaatactatattagaatgaaatccaagggaaaaccggagggcgtgattctgaacaacgcaaaaaacaaacttctacatttggcctttgagcttataaagaacgacatggattatgaggaaaaccatgaaattctaagacttcgaagagcataaaacacgaaacaccataaattagaatttattaacagtttttattttgaaaaatccataggaag

SEQ ID NO: 5065 - DNA, 1523 bp, unidentified
  source 1..1523: mol_type = unassigned DNA; note = element_7c12115
  misc_feature 1..4: note = core
  misc_feature 5..259: note = LE
  misc_feature 260..1513: note = CDS
  misc_feature 1514..1523: note = RE
ctcactggtgcaccatccttgtgtcagcagttatgaggctgctgatgcacccgaggtgccgccgggtcaccgccctgctcgctcgacgctgtggacgtccagtatgagttctgcgggatccggcggtcatccggggcgcgccgaccgtcgacagggctgtatgcgcaggtgagcgccgaacagtgagcggacaggcagccgcgtcccggcaccgcgcataagggtgcctccccactgggcacgcagcgaggaggctgtaatggagtatcccccggacacgctgcccgcggtcccgccgggcggggtgacctgcggcatcgactgggccaacgatgatcacgccgtctgcgtggtggacctggccggcaagatcgtgcagcggttcatcgccgagcacacgggcaagggcctggccggcctggtgcgccagctgcgccgggcaggcgtcggcgaggtggcgatcgagcggccggacggcacggtggtcgacacgctgctggaggccgggctgaccgtggtggtcatcagcccgaaccagctgaagaacctgcggggccgctacgggtcggcgggcaacaaggacgatcggttcgactcgttcgtgctggccgacacgctgcgcaccgaccgggcccggctgcggccgctgctgccggacagcccggccaccgtcaccttgcggcaggcctgccgggcccgcaaggacctggtcggtcaccgcgtcgcggtgtgcaaccagctgcgcgcccacctcaagctcgccttccccggcgcggtcgggctgttccgcgacctcgattccccgatcagcctggcgttcctggcccgcttcgactgccaggaccgggccggctggctcacgccccggcggctggccgcctggctgaaaagccagggctaccccggccgcaaagaccccgccgccctgcacgcccggctggccgccgccccccgcggcgcggtcggcgacgacggcgccgccaaggcgcacatcacccgcgccctgctcgccgtcctggccagcctcgtgcagcagatcaaggccctggacgcccagatcgccgagcagctcgccctgcacgccgacgcgcccatcttcacctcgctgccccgcgccggcaccatccgcgccgcccggctgctcgccgagatcggcgactgccgggcccggttccccacccccgaagcgctgatctgcctggccggagtcgccccctccacccgcaagtccggcaagaccacctacgtcgacttccgctgggccgccgacaagcagctccgcgacgccgtctgcgacttcgccggcgactcccgccacgccagcccctgggctgcccggctgtacgacgacgccatcgcccgcggcaaagaccacccccacgccacccgcatcctcgcccgcgcctggctctacgtcatctggcactgctggcagaaccgcaccgcctacgaccccgcccggcacaaagcactgcagcgcatcctcaccgggcaaaaaccggcagcggcttgacacagggcta

SEQ ID NO: 5066 - DNA, 1650 bp, unidentified
  source 1..1650: mol_type = unassigned DNA; note = element_7c1db41
  misc_feature 1..6: note = core
  misc_feature 7..271: note = LE
  misc_feature 272..1366: note = CDS
  misc_feature 1367..1650: note = RE
  misc_feature 2..224: note = bridgeRNA
caccccgttaccttgattctgtccccgtaagctcgggggcaggtcactggcctcggtatggctgattcgccctgttgttctacatcatgatccgggggtgttgccgccgaggtaccaggacacacgtagacggctaatagggacgcggctcaccgctcttcaggggcggtgaagtctctttgtaacgtgggtgcccgcaccgagtgtccgaccaccaccagtgatcttccaccacaaccacacaccaacctcccccaaggaggggatgatcatggaagacaccacctacgacgtctacctcggactcgacgtcggaaaaaccgaccactacggctgcgccctgaccagcagcgggaccaagatctacgacaaggccctgccccaggacgaagccagcctgcgcgccgtcttcgacgagctcgccacccacggcagagtcctgctgatcgtcgatcaacccaacaccatcggcgccctaccgatcgccgtggcgagggcctgcgactgcggcgtggcctaccttcccggcctggcgatgagaaaagccgctgacctgtaccccggacaggccaagactgatccgcgggatgcgttcatcatcgccaataccgcccgcaccatgccgcacactctacgtgcggtggaccgcaacgctgaagtgttttccgcactcaagatgctgtccggcctggatgacgacatcgctcgtgattgcacccgcacgatcaaccggcttcgcagcatcctggtgcagatctatccgtccctggaacgcgtcttcgccggcgagatcatccagcgagccttcgtgctggatctactgatccattacggcgggccgaccaagctcaagcgttccggtaagaaccgggtgctggcctggtcgcgtaagcgtgcgaagaaggacccagaatccctggtggacgccatctttcaggccctggcggcacagacggtcaccgtacccggcaccgccgcagccgaagtggcgattccgatgctggcgaccaacatcaaggcgttgaaagcccagcgtgactccatcgccgggcaggttgaggagatgcttgacgacttccctcttgccgaggtcttgatgtcgatgccgggtgtgggcatcaagaccgccgcgaatatcctgctggccgtgggcgactgttccgacttccccgatgccgcccacctggccgcctacgccggcatcgccccgatcaccagacgctcaggcacatcaatcaaaggcgagttccctgcccgatccggcaacaaacggctgaaaaacgccctgttcaggtcggcccgggtcgcatcaaactgccacgaggcgttcccggtcgtactacaccaagaagcgggccgagggtaaacggcacaacgccgcggtgatgtgtcttgcccggcgtcggtgcaacgtcatcttcgcgatgctgacccgcggtgagttcttccgggagcttccgccgagaccggcgagggaggctgccgcagcctagactgacgaactgggccccgtccccgcagagacctaaggcggtgcgccccaacagccgggcgcaccgtcaacgtccgcatgttcgaagcgtcgccatcggcaatcagccacaccaggtcgagaaacttcggttgaagggttgacaacctacataggga

SEQ ID NO: 5067 - DNA, 1689 bp, unidentified
  source 1..1689: mol_type = unassigned DNA; note = element_7c39615
  misc_feature 1..3: note = core
  misc_feature 4..238: note = LE
  misc_feature 239..1444: note = CDS
  misc_feature 1445..1689: note = RE
  misc_feature 53..227: note = bridgeRNA
cttatacattaaactaatgccaggccccttgagtgaggacctcagcaggattatacttgctgtattgggacgaccagggaaagacttttttctcctcacggctcgaccgattaaaaaagatcgtgcttccctggcgtgttcctggaccagattgaccattagagggtcgtgcttcgagcaccgaggtataaggacacaagggtccaggatatccttcgtttgagaaaggagcaccaccatgtggtatgccggagtggactgggctgactctcatcacgatgtcgtggtgattactgagaccagccgccaagtggcctcgcgtcgcgttgcccatacagcggaaggactggctgaattgatcgccttcttgcaagcgatcgcgccactcgaccaaattgcatgcatcatcgaaacgagccaagggcttctcatttcgacgatgttggaagcaggatgtacgatttaccctgtgaaccccaaaaccatcgatcgccgtcgtgccgcttctggagccaaaacagataccattgatgcatacttgttggccaaaacagggcgaagtgatctgccagatttgaggaaattgactcctgatagtccaatcatccaggaactcaaagcactgacccgcgatcaagatagcttggtgcaaagtcagacccgtgtcgtcaatcagcttacggcctgtctcaaagcctactatccggtcgcgttgcagctctttagcaaattgcagcaacgctccaccctgatctttttgcagacctatccaacccttgaggcagcgcaacaggcttcggtcgcagaaatcacgaggatcctcaaagaggccgggcaccccactgcgcgccaatctgctctcaagatacaggaggcgttgcatcagccccagttgcatgccgatgcgattacaacccgcacgaaatcgcgattgatgatggcactggttgctcaactcttgccgctgattgagcagatctcttcctatgacaaggagattacggccctttttttgactcatgaagaccgcgagcttttcagcagccttccgggagcgggaaagcgtcttgctcctcgtctgctggctgaatggggcagtgatcgtacacggtacggcggaagtacgagtgtgcaggctctggcaggaaccgcgcccgtggccttccaaagtggcaattatgccaaagcccataagcgctatgcctgcttgaagccgctgcgcaacacgctgcatcaatttgcctggcagtccaccaaacaagaaacgtgggcactgctgtattacaaacgcaaacgagttgagggcaagagtcatagtatggcggtacgctcgctggctaatgtctgggtacgcatcatctacgcgatgtggtttgagcacaaaggctatgagacggcaacctttgaggcggcacagcaccatcatgcgagcagagctgcctagaaacctgtgatcaagggaccgtcgatccagacgaacaaaaaagcctgctgttttttggttttcaacgcggcatgcccatttcagactacacaagccagaagccgccaaggaaagcgaagcggcttgacagcggtgagcggcgtggtacactttctcatgccttgttgaagacatttcccttcctccttttcctgattttttcttttgctacaaattggtcatcataggacttgacaatagagggt

SEQ ID NO: 5068 - DNA, 1153 bp, unidentified
  source 1..1153: mol_type = unassigned DNA; note = element_7c3a391
  misc_feature 1..2: note = core
  misc_feature 3..190: note = LE
  misc_feature 191..1138: note = CDS
  misc_feature 1139..1153: note = RE
  misc_feature 20..188: note = bridgeRNA
cttgtatcttgaaccccgcatctcgatgagggaatctctctccaagcgggcgtgatagaccgatccagccgaggtcgtctgagaccgaggagtagccagggtcgtcacgcctttatcctgaatgagcccgaacagttgcacgggccacaagcccgcatcatgcaaggatgggccaccaagggaggcgatcatggcacctgccccatggtttgttggtattgatgtctcgaaggctcagttggatattgccctgcggcccgaaggacggttcgtcgtacccaatgatgagaccggacttgctcatgtggtcgagcgcctgcgggctctcccggtggcgttgatcgtcttggaggcgaccggtggtctcgagctgccactcagcggggcgctcgtcgcggcggggctgccggtcgtggtcgccaatcctcgacaggtgcgggactttgccaaggcgacggggaaactggccaagaccgatcccctcgatgcgcagatgctcgcccatttcgctgacgtcatccgtcccgtcccccggccgttgccggatgaacagatgcaagcgctcgccgcactccttgcccgacgtcgccaactcatcgagatgctgacggcggagaagaaccgtctcggaagcgcacctcccctcgtgcatcagcgcctgcacgcgcacatcacgtggctcgaacgtgaggtggcgcaggccgaacgagcgctcgcccacgccattcacgagagtcccatctggagagagaaagacgatttgcttcgcacggtgccaggggtaggaccagggctcgcccggacgctgattgtggatctccccgaattggggactctgagccggaagcaaattgccgcactcgttggagtcgctcccctgaaccgcgatagcgggacgcttcgaggcaaacggaccgtgtggggcggccgcgctcatgtccgggccgcactgtacatggcggcccgggtgggggcccgctgtaatcccgtcattcgcagtttctaccaacgcctgtgtgacgcaggaaaagccaagaaggtggctctcactgcctgtatgcgaaagctgctcaccattctcaacgccatgatgaagcatcggacacgctggagtatgaatgagatcgtgtgctcttgacagtggagacagttg

SEQ ID NO: 5069 - DNA, 1469 bp, unidentified
  source 1..1469: mol_type = unassigned DNA; note = element_7c3af9b
  misc_feature 1: note = core
  misc_feature 2..90: note = LE
  misc_feature 91..1119: note = CDS
  misc_feature 1120..1469: note = RE
  misc_feature 1237..1461: note = bridgeRNA
taatgggatggtcgtcccctcctgaaacggcatcgtaatgtgccaaagtggaagtgctgtttcaaccactttgagaaagggacgaccaacatgaaggttacgacgattggattagatttggcaaagaacgcgttccaggtccatggcgccgatgacaaaggacgggcggtgctgaagaagcaactcaagcgcggccaggtgttgcccttcttcgccaacttagagccatgcaagataggcatggaagcctgcggtagcgcgcaccactgggcaaggaaactgcaggcagtggggcatacggtgcagttgatcgcacctcagtacgtgaaaccgttcgtgaagcggaacaagaacgatgctgccgacgccgaggcaatctgtgaagcggtgacgcgaccgaacatgccgacggtgccgatcaagaacgccagtcagcaggcaattctcagtgtgcatcgtgcgcgacaggggttcgtcaaggcgagaaccgcgcaggccaaccagatacgggggctcctggcggagtacggcatcgccatgccacagggaatcagccatattgccaagcgagtgccggaaattatcgaggacggcgagaacgagttgcccggcagcttccgtttattaatccagcgtttagtcgatcacctcaaggcactggatcgccaggtgggtgagctcgaagctgagattcagttgtggcatcgtgaggatagcgctagcaagaaattggagaagattcccggcattggcccgatgacggcaagcgcgctagtggcgtcaattggggatgcccgaaactttaaaaatggccggcagttctcagcgtggcttggcatcgtgccgaagcagcattcgactggcgggaaatcggcactgttgggtataagcaagcgcggcgacagctatctgcgcacgttgctgattcacggggcacgggcagtgatccgctgggcggagaatcggtcggacgccgatgtgtggcttaagaatttgttggccaggcggaataagaacatcgtcgcggtcgctttggcaaacaaaaatgctcgcacaatatgggcgctcctggcgcatgaccgggagtacaagactggctacgtaagggcgacagcatgaacatgggtttccatggcgccgctcgcctctggttatagaaggaccgccggcgagcggcgccatggaaagcgctgcggcatagcagaacaacgacaaccgacttcgaaaggagaatctccaccgattgcacaggcaatcatgacgtgatggcaaaataggtcagaccgtggtcaagcaaccctacgcggtacagagcgcttcgagcgcgacaaagtgataaggacttgaccagcgtattccatcagggacgggggcttgcggcctctatcacagtccggatctatggcagcaatctccacccgttttaccgtcattgattgagggcttggcaaaccggggacgaccatcta

SEQ ID NO: 5070 - DNA, 1385 bp, unidentified
  source 1..1385: mol_type = unassigned DNA; note = element_7c3c288
  misc_feature 1: note = core
  misc_feature 2..92: note = LE
  misc_feature 93..1118: note = CDS
  misc_feature 1119..1385: note = RE
  misc_feature 1157..1377: note = bridgeRNA
caatgggatggactcctctcgactatacggtatcaaagtaccaaactgatatgatttgaattgtcagttaaatttagcaagaggaatcagaaatgaatattaaacgtattgggatagatttagcaaaacaagtgtttcaattacacggagtcgatcaaaacgaaaaagcagtgttgaaaaaacaattgcctcgaaaaaaaatgttggcatattttcaatcattgccaccctgtttgattggtatggaagcctgtggaagttcacattactgggcaagagaattacaaaaaatcgggcatacagtaaaactgatggcaccacagtttgtgaagccttatgtgaaaggcaataaaaatgatacgaacgatgcggaagctatttgtgaagccgtttcacgacctaatatgcgttttgtcacaatcaaaaccgttgctcaacaagatgttcaatctgtacatcgtatacgcagtgaattagttaaacagcgtactgcgaaaggcaatcaaattagaggattgttagctgaatatggtgttgtgattaacaaacgtattgacgtacttcgtaaagcattgccttcaatttttgaagatactgaaaatggtttaagtgctgatttaagaacacttcttgaagaattgcgacaagatttgattgcattagatgaacgagttttagtcgtcacagaaaaaataaatgtgcttgccaaagccgatgaagatgcccagcgattactgaaaataccaggcatcggacctatgacagcaacagccatcatcagtgcgataggcaatggtaaacagtttaaatgcggacgtgatttagcggcatggttgggactgacaccaaaacaacacagcagtggtggtaaagaacggttattaggcatcagcaaacgcggtgatgcttatttacgaacgctattgattcatggtgcaagagcagtattacgagtttcagaaacgaaaaacgattctctgaattgttggctacaaaaattatgcagcagacgcaataaaaacattgcggctgttgccttggcaaataagaacgctcgcatcatttgggcaattcttaccaagaaaactgattacaaaatggacggtgtggcggcttaaaatttttaaatcgcaacatcagcgtaaggaaacatccactcacgatcgattgtttagcatagactactgatggaaaacaggtcgaaccgacgtttgcaaaaccttaaaaaaacgacgtgccttgagtacgatttatcgattaggagtaaacgtgcgaatagcccattatggttagagcaatagctcacaaaaaaccgaatatacgtgtgccagtcgtacctaaatccagatgtgcaatatgcttgcaaaatgagaggagtccatata

SEQ ID NO: 5071 - DNA, 1571 bp, unidentified
  source 1..1571: mol_type = unassigned DNA; note = element_7c40524
  misc_feature 1..3: note = core
  misc_feature 4..592: note = LE
  misc_feature 593..1453: note = CDS
  misc_feature 1454..1571: note = RE
  misc_feature 1..221: note = bridgeRNA
cccgttaccttgtgagtgtccccgataatggggatagtcgctggtcccggtatggcttacctgccctgtagtttccataatccgggggggggtgttgccgccgggtgccaggactttcgatgacagctgatagggacacggccagttttaaactaggtctctttgtaacgtgggtgcttgcaacgaaggtcatgacaccagcgactggaacaacgccatacccatctcgttttctaggagctcatcatgtctccggagcattccatcgacatattccttgggttagacgtcggcaaatctgaacaccacgcctgcgccttagaccgtgatggcaacaaggtcttcgacaaaccgttgcctcaactcgaatccgaactagcaggcgtttttcaccagcttcagaagcttggcaccgtgctcgtgatcgtcgaccaacccaacaccatcggcgcactaccgattgctgtagcccgggactgcggttgcgaagtcggatacctgccaggtcttgcgatgcgcaaagctgcagatctctatccgggacgtgcaaaaacagacaaacgcattcatcatcgccgacaccgcccgcacaatgccccacacgctacgtgccgtcgaccgcaatgatgaggtactctccgccctaaagatgctgtccggcttcgatgatgacatcgcccgcgattgcactcgcactgtcaatcggcttcgcagtgtcctcacccagatctaccccagcctggaacgagtttttgctggtagcaccctgactcgcacgccgatcctggaattattgatccattacaagggaccgcaggggctaaaaagagccggataccaacgagtgttgaactggatgatcaagcgcacacgtaaagaccccaccccgctggtagacgacatttttacagcgctgaaagctcaaacagtcaccgtgcctggaagcgatgccgccgagttagtaattcctcaactggctgcaaacatccaggccctcaaagagcaacgaaacaccattgctgagcaggttgaagagatgctcgctgatttccctctttgtgaggtcttgatgagtatgcccggagtcggcatcaagaccgcagcgcagatccttcttgcgatcggtgatggctccgacttcgctagtgctggccacttagctgcttatgctggaatagcacccgtgactagacaatccggttcgtcgatcagaggtgaattcccggcacggtcaggcaataaacgactgaaaaacgccttgttctactccgcattcgcagttatccgcagccacgaaccgtcacggcggtattacgaacgcaaacgcgctgaaggaaaacgccacaacgcagcagtcatctgcctggcacgacgccgatgcaatgtcatctacgcgatgctgaaaaacaaggagttcttccgcgaaatcccgccacgccccgtcgccgcataaagccccaaagacgaagccgaccagcacacgctggccggctcctaggcacgcctaagaaactactcccaagactgtgctcgtcaacatcggtctggcacttgacaaaaacatagggaca

SEQ ID NO: 5072 - DNA, 1171 bp, unidentified
  source 1..1171: mol_type = unassigned DNA; note = element_7c493b0
  misc_feature 1..2: note = core
  misc_feature 3..179: note = LE
  misc_feature 180..1148: note = CDS
  misc_feature 1149..1171: note = RE
  misc_feature 34..200: note = bridgeRNA
cttgtatcttagtaattcggtactattgtttttgttaggtttggcaaggcccatgcagtttgtaattcccccagggttaaaaagcccgcggtagagctgataacgcatgggctgagccactcatctgaaacccgaacagttgcctgaattccatttcgtatatgcaaggaggggtaataatgagtctgccaaatccactttgtgttggtattgatgtttctaaagaaactctggatatttctgttggtacatatcaaacgccattcactgtcagcaatgacaccgaagggtttgatgctgtagtggagaacttcagaaaacactccgtttctctggttctgatggaagccacgggagggctggaatctgctgtggcttatcatctccagtccgaaggttttgaaattgcaattatcaatccacgacaagccagagatttttgtcgagccatgggatacctggcaaaaacggataaaattgatgccaaagccctgtctcaaatggctgaagtaatcaataatcatccggatagagaacgctttattctgtcgctccctgatactgaacggcagactcttgtcgctatagtggtgcgtcggcgtcaactggtttctatgttggttgcagagcgcaatcgcctttattctgcccatccgcaaagtgcaataagtattaaaaccattattgaggtactggaaaacgaactttccaatatcgataacagcatgaataagcatgtaaaaacgcattttgtagagctgtccgaattgcttggaagcgttaaaggtatcggctctatgactattgcatcgttgttggctgaggttcctgagttgggtaaactctcgcgacgagaaataagcgccctcattggcgtagcccccatcaacagagactccggtaaaatgcgaggacgaaaaaccatttttggcggaagagcaagcgttcgagccattctgtatatggcagcgcttagcgccgcccgttttaactctgcgataaaagcgttttacacacgccttgttattgctggaaagcctaaaaaagtagccctcgttgcttgtatgcgaaaacttctgacaatcttgaacgctatggtcagaaaagggcaagtgtgggatgaaactttccattatgagcctcattaaaaaaacatcgttcaagacagttg

SEQ ID NO: 5073 - DNA, 1453 bp, unidentified
  source 1..1453: mol_type = unassigned DNA; note = element_7c50240
  misc_feature 1..3: note = core
  misc_feature 4..263: note = LE
  misc_feature 264..1331: note = CDS
  misc_feature 1332..1453: note = RE
  misc_feature 13..283: note = bridgeRNA
tctattacaataagttttggttggaagcccagcatccggctgggcttctttccatctcttgcctaagctacaataagggaagcaactggttgacgactcttttcttgggcttctatgtccgtcaataagactgtcagccattcccttattgcggcgttcgatttgagcaggttgagccatagagttcgtgtcacccaatagattgaatcggcaatgagaaaaagatggattccggttgcaattcacagatgggaggaatacaaatgaactctgttggcattgacatttccaaaggcagaagcacggttgccgtcatgcgtccctttggggaggtcgttatctcgccctttgaagtccgtcacaccgacagtgaactgagcgaactggcaaggcagctcaaaagcctggacggtgagactcgtgtggtcatggaggccgcaaattacggtcttgaccgctggctcgctttgacgagatatgttccagaggaagatacccggctactgctgaagaactgctaccgccagtaccggcagtattccaaggtacagacggttctgaagaacaatctgatttcgttgctggatacggtatttcctaatgtaaaccgtttgttcagcagtcccgcccgtgaggatggaagcgagaaatgggtggactttgtggcggagttttggcattgccgctgtgtcagcgagaaatctgaaaaggcattcgcaaacaaataccagcgatggtgcaggaagtatggatataacttcaatgaagcaaaggcgcacacgattcacgccgaagccagcggacacattggtgtcatgccaatgtccgaaacgaccaagctgctcgtggaacaggcggttgcgcagctcagagcgacttctaccgcgcttgcggctctcaaacacgaaatgcaagcattgacttccatgcttccggaatatcccgttgtcatggatatgttcggcgtaggcccgactctggggccgcagctcatagccgaaatcggggatgtgcgccgcttttattccaagaaagcgctcgtagcctacgctgggctggatgctccgccaaatgattccggtgatgtgaccggcaggcacaaatccatgagcaaaattggcgcgtcgtctttacggcggacactctttcttgttatgagcgtctatttgcagaccgcaccgctggatgaaccggtctaccagttcatggacaggaaacgcgccgagggcaagccctaccgcgtctacatgatggcttccgccaataagtttctacggatctactacgccaccgtgaaggcctatctggagtcgttggaacacaccgcctgatcttcgccataaagccattggctggccgccgtttcattttgagatgcaaagcggcttggtttggcgcggcctttttgcgcaccgcattaccttgaaatttctacttgacttttcttagcagg

SEQ ID NO: 5074 - DNA, 1388 bp, unidentified
  source 1..1388: mol_type = unassigned DNA; note = element_7c51990
  misc_feature 1..3: note = core
  misc_feature 4..129: note = LE
  misc_feature 130..1155: note = CDS
  misc_feature 1156..1388: note = RE
  misc_feature 1174..1349: note = bridgeRNA
acatggggtaatcgcaggagcgagttgcccaaaatcaatcactagtcttggagggtggctgttccccgataggatgagatacgggctcacgactggacgccgggcccaagcatcgaatggagaacagccatggaagaatatatcggtctcgacgtgtcgatgaaagagacgtcaatctcgatccgccgagcaggtgaacggatctggcgcggcaagtgcgcatctgatcccagactcatagccgagctcatccgcaagcgggcgccagccgtgaaacgcgtggtgttcgagaccggaccactgtcgatatggttttatcattctctgcgcaccgaggggttgccggcgatctgcatcgatgcgcgccatgctaatgcggcgctcgatatggcagcgaacaagacggacgcgaacgacgccgatggtctggcacagctcgcagaagtcggtttctttcgtgaggttcgggtgaagggatttgacagcatgctgacccgcacgcttgtcgcggcacgcacgcggctggtccgtatcactacagagctttccaaccagatccgcggtgtgatgaaaaccttcggtctgctcgttcctgctggaaagggaagcaccttcgagaagaacgtccggagccttcttgccgatcagggcggacttgcattgatcgtgcttccgatgctggaagcctggcgaggcattcgcatccgcgccgccgaactcggacgccagttggtccgggacgcgcgccagagtcaggcttgccgtatccttatgtccattcccggcatcggtgcgatcaccgcaactgccttcagcacagccattgagaggccagacaacttcaagaaatcccgatctgttggcgcctggatcggcctgacgacgcgtcgctaccaatccggagaagtcgattatgacggccatatatcccgacgtggcgatcgccatttgcgagggcttctctacgaagcggccgcggtcattctgacgcgcagctcaaccgacagcactctgcgcacgtggggtctgaagctccgggagaggatcggcttcaaaagagctgccgtggccgtggcgcgcaaactggcggttataatgcatacgatgcttaagactggcgaactcttcaatccgaatgccggagccgccgcataagtcccgatagcgttcagaacctgaacgcctaaggtgtccctgccgggacgtgagccgagccattccgctgatgctgttgcactgctgactcagcaaagtgcgtcgtccacattgaaggctcgtcctgcgaagctctatcatgcggcggctactgtcgaccgcgaagacaaccatgcacccggcagcgtcccctgaacgaattatatacttgacgcctcagcagcgattagaca

SEQ ID NO: 5075 - DNA, 1569 bp, unidentified
  source 1..1569: mol_type = unassigned DNA; note = element_7c592c5
  misc_feature 1..2: note = core
  misc_feature 3..268: note = LE
  misc_feature 269..1447: note = CDS
  misc_feature 1448..1569: note = RE
  misc_feature 19..243: note = bridgeRNA
ctggtaaaatatagtcaaattgtcacataaatgtttcataataatttccttgtgttaatgtttatggtataatttttccgtatgaatagaggtcgtagctattcctgcttaagactttagatcttcctgctaagagttacgcctctttctctacgtgattgtacgaataagctggatgacattaaaatgtcctttctcataaccagtctgtacctgcgtagtttaaggggattttctattcattaatttttaccttggaggtagttgtatgttttttgttggcattgacgttgctaaacgttctcaccaagccgccgttacggacatttcaggtaacatcatcgttaaaccttttaacttccgtaattcttccgatggtttcgctaaattcctttccgctctcaccaacaactcgatcgaaaaagacaattgcaccatcggcttggaatctaccggtcactattggtatccgctatatttctttttaatagaaaacggattatccgtaaaagtgtttaacccgatccaaacagcggcgttcagagaaattactatccgtaaagtcaagaacgataatctcgacagtctgcttattgctgactttactcggtttggcagatattcggaaacgtatattcccgatgaaacaatgcttgctcttaaaaatctcacgcgttttcgcttatctataagcgacatctgcgggagtcttaaaaagaaagtcattgcaatattggatcaggttttccccgaatataccaacgttttctccgatgttttcggtaaaacaagcaaacaactgctcgaacaattttctacccctgatgagtttatggagatctctacaaccaaattagccaatctcttaaacaaagtcagtcgcggcagaaacggcagagaaaaagcagaacttctaaaaacggcagcgaaaacttcaattggcatttcctatgcgttagactctttctctttcgagataaagcaacttgttgctcaaatagagtttatggaaaaccagatatccgaagttgatgccgaaatggcaaaattgctttctcaaaccgaatacggcgttattaccaccataagcggcataggtcctactctcggtagcgtaatagtgagcgagataggagacattaaccgttttgagaattcttccaaacttgtagcctatgcgggattagacgcttctgttaaacagtccggagaattcaattcttcaaaaaacaagatttccaagcgcggttcgccatacttgcgacgcgctctatggatggcggcttttatgtctttgcagtgtgatccggctctttatgattattactcaaaactacgtgcaaggggaaaatctcaccgtcttgcaacgacagccgttgcaagaaaactttgcattattgtttgggctattatgaagtctaaacaaccttattcgcctaaagtttaaggttggacttgcccgttttaaacccgccgttcttcatcgagcggctatttgtcgttatactatttacacaaaaaatattttttgtttttcccccttattttgcttgacttttaatagctggt

SEQ ID NO: 5076 - DNA, 1186 bp, unidentified
  source 1..1186: mol_type = unassigned DNA; note = element_7c5dfd3
  misc_feature 1..2: note = core
  misc_feature 3..220: note = LE
  misc_feature 221..1183: note = CDS
  misc_feature 1184..1186: note = RE
  misc_feature 23..193: note = bridgeRNA
cttgtatgtttgttctgacaggtctaaaaaggacctgtcggggtggagggaccaagcaggcttctggcctttcggcacagaccgtaggagatatcgtcccgcccctcaccatagcgccaatcaggaatccatcggccagcagggaccgaccatcttgacaagcctgcgcgacggtgagccccgacaagcctgattcatacgatagcgcggaggaacagtcatggcaatgcgagttgaacccattcagatcggaatcgacgtcagtcaggacgaattggtcatctgccgaggtgaccgtgacggcttgacgacgatcgagaataccccgcaagcgatcgcgtcctggctcaagacgttgcacggtgtggtccggatcgcggtggaggcaaccaacgtgtttcacgtcgagctcgtcgagcgcgcacaccgccgggggcatacggtcttcgtgctcgatggctaccggctcaatcgttaccgggaaagcgtcggcggccgggccaagaccgatgcgaccgatgctcgattgctgctgcgctatctcgaccgtgagtggcgtgacctgcggccctggaccccgccgtccaagggctaccaggccttgcagcgcctgatccatcggcgcgcgacgctgatccgggccaaggttgcgctcgagcagagcttgcggacgctgagcgagatccgaccgtcggtacaagcgctgttgcggcagatggatcgagtcgaccagcagatcaggaaacagatgctcaaggtcgtgtccaaacaggggtggcaggccgacacggcccgcctcatgggcatcgagggcatcgccgagatcacctcggccgcgcttgtcatggctttccggcgcggtgagttcaccagctcggatgccttcatcgcctttctcgggctggatgtacgcgtgcgcgagtccggcaagtcgaagggctgtggaaaactgaccaagaaaggcaaccccgagctcaggcgactgctttatctggccgcgatgacagcccggcgctcgccggcctggaaggacttctatcaacatcacctcagccggggccggtcgagaatacaggccttggtcatccttgcccgcaagctggcgcgggtggcatttgcgctgctcaagaatcaaaccgaataccaaccgaaaatacgtcaggaagcttgcattgcgacatagaat

SEQ ID NO: 5077 - DNA, 1266 bp, unidentified
  source 1..1266: mol_type = unassigned DNA; note = element_7c752ae
  misc_feature 1: note = core
  misc_feature 2..70: note = LE
  misc_feature 71..1027: note = CDS
  misc_feature 1028..1266: note = RE
  misc_feature 1040..1260: note = bridgeRNA
taatgggatggtccgccccgtctccccgcctcattctgatgaggcagagtccgatagaagggagcagcaaatggccatccgcaacaagccacacgatgccgctgtgttcggcatcgatctgggcaagaacctctttcacgactgcggcctcgacgccgccggcacaccagtccagcgagcaaccttccggcgcgagacgctcgtgcaatttttccagcgcgcagctccaaccgtcgtcgggatggaggcgtgccccggttcgcaatggctggcgcgtaagctccaggcgattgggcacacggttcgcatcgtgccggcgaagttcgtgaagccctacatcaagagcaacaagaacgatcagatcgatgccgaggctatcgctgaggcggtttcgcgtccgacgatgcgcttcgtcgaggtgaaatcacccgagcaggtcgacctccaggccctccaccgggtccgtgaccgtcttgtcgcgcaacggacccgcgtgatctgccagatgcgggccttctgcctcgagtacgggatcgcgatgcatcagggtgctggccggttcaagtctgactttcccgccgtgctggcggacgagagcaacgacctgacgccagcgatgcggcgtctgctggcaagcctgttcgaggatgtcagggggctcgaagcccgcatcgccgaggtgacgcgtgagatagaggacgtcgcggccacggacgacaccgcaaggcgcctgatgacaatcccgggcatcggccctcttgcggccacagggcttctcgcggcggccggcaagggaacgcagttccgcaaagggcgccacatggccgcctggctcgggcttgtacctcgtgagtactccaccggcgggaaaacgacgatgctggggatcagcaagcggggcagctcgtatctgcgtcgcctcttcgttcatggtgcgagatcatgcctgcttcatctcgaccgcacccgggtggtgatcaccaagccgggcacaatctacgagcggcgggcgccggcctcggcctgacgaccgtcctcgaccaattgcgaggttcgggaaattgatgacgagacagttgatcggcgcaccgtaagccctgggcaaaaaaacgggcctccagcccgaagccagttattcgggaacggcgtgcgcatctcatcatggcctggccgcaacagcggcccactcgcgagaggccggatacatttatgcaaactgttcgacatcggcttaaaggctcttgcaaggatggggcgggtcataca

SEQ ID NO: 5078 - DNA, 1502 bp, unidentified
  source 1..1502: mol_type = unassigned DNA; note = element_7c7ba67
  misc_feature 1..2: note = core
  misc_feature 3..261: note = LE
  misc_feature 262..1482: note = CDS
  misc_feature 1483..1502: note = RE
  misc_feature 6..257: note = bridgeRNA
ctaatgggaggtatcaagcctggccggtccggcagacttgatacctggtggccgctggcggatgagcactttcttggactggacccaacccgggagtcctgagttgagaccgtgcctccatcggcgtgccaggaggtctgcatcgctgatgggatgtcgtgcccgaccgaaggtcgtgagcactccgaccattagtccgcgaaccgacttcctgcaggccgccgccgggtaatactcgaggtttcgtgggaggtgtgtgagttgctgttcatcggagacgactgggccgaagaccaccacgatgtggaggtccaggacgaacaaggccgcgtccagcggcgtgaacgattgccggaagggatagcgggaatccgtgggttcggcgaactcgtcggacggttcgtcgacgatgataccgagttctccgacgtactggtgtgcatcgaaacggaccgcggaccgtgggtgcaggcactgctggcgaccggttaccgcgtattcggtgtcgacccgaaacaggctgcgcgacaccgggaaatactcggaagctccggcgctaagagcgacaagggtgacgcacacgccctcgccgacatggtccgaacccgccgcaatcagctacgcgaggtcgctgccgattccgaggtcgcggaggcggtcaaggtcgtcgcccgcgcccaccagacgttgatctgggaacgcacccgacacatgctgcgtctgcgggtggcgctgcgcgattacttccccgccgcactcgaggcctacacgccgttcgggctcacctccacgcccgtgttgatcctgttggccaaggccccgaccccggaggccgcagccaagctcaccctccggcagatcgccgccgcgttgaagggacgccgtgacatcgacgccaaagcggcggcgatccagcaggtactgcgcgccgagcacctcggccaacccgccgcggtggccacggcatatgcggcgacggtccggtcgctcgttgcgatcctgacgacgttgaacaccgagatcgcgaacctcgagaaagacgtgacggcgcattttggccagcacccggacgctgagatcctgctcagccagcccggtctcggcgtcgttctcggtgcccgggtgctcgccgagttcggggacgcacccggccgctacaccagcgcgaaggcacgcaagaactacgccggaaccagtccgatcaccaggcagtccggcaaaacgcgagtggtctccgccaggcacgtacacaacgatcggctcgtcgacgcagtacacatgcaagcatcctgcgcgatcttgcacgatgatcaggtccgcgcctactacgaccagctccgcgcccgcgacgtcagccacaacgccgccctgcggcagatcggcaaccggctcgtcggcatcctccacggctgcctcaagactcacaccgcctacgaccaggcgaccgcttggtcgcaccgtcaggccaccgttgctgcttgacatccgcggtccagggatgt

SEQ ID NO: 5079 - DNA, 1458 bp, unidentified
  source 1..1458: mol_type = unassigned DNA; note = element_7c87083
  misc_feature 1: note = core
  misc_feature 2..243: note = LE
  misc_feature 244..1443: note = CDS
  misc_feature 1444..1458: note = RE
  misc_feature 44..217: note = bridgeRNA
cgttacgtttttcgtagcccgtttcctggtgcaggatatgggtgtgctggcctgctgatcccggcatgattgcgaccctctgttgattcgatgatcttgagagtgttgtcaccggggttggtaggtgccgggagaccgctgataggggcaggacagttcgggaacgtcgtgcgtaacgtgggtgccgggtcctgacaccgctggcgggccagtgcggtagttgactacgactggaggtgccagatgatcacgaaccacgacgctgttgaggttttcgttggcctcgatgttggcaaaggcgtccatcatgccgttgccgtgaaccgggccggcaggaaattgctggaccgggcgctgccgaacgatgaagccaaaatccgggagatcatggccgagctggaggacaacggccggatcctgtttgttgttgaccagcccgccaccatcggtgcgcttcccgtcgcggtggcccaggccgccggggtgctggtcggatacctgccgggcctggcgatgcgccggatcgcggatcttcaccccggagaggcgaaaaccgatgcccgtgacgcgttcatcatcgccgaggccgccaggaccatgccgcatgccctgcgctcggttcagttggtcgatgagcagctcgctgagctgagcatgctgtgtgggttcgacgatgacctggccaagcaggccacggcgacttcgaaccggctccgcgggctgctcacccagatccacccggctctggaaagggtgttgggaccttacatggaccatcctgcggtgctggatttgctgcggacctggcctacccctgaagcgctccgtcacgcgggccggcgccggatcgggaaccggctgaccaaactcgctccgcggatgggtgaacgccttgccgatgaaatcatcgaggccttgggccggcaaaccgtcactgtcgtgggaacgaacgccgcgaccatcgtgctgccccagctcgcggccatgctgtccgggctccacgaaagccgcgccacggtcctgacccaggtcgaagctcttgtggaggcccaccctcttcacccggtcctgatgtccctgccggcagtgggcatcaggaccgccgcacgaatcctcaccgaaatcgccgggaaagacttccccaccgcagggcatctggcctcttacgccggactggcacctgtcacctggcgatccgggtcctccgtccgtggcgatcattcctccagaaaaggcaacaaggtcctcaaacgaactctgttcctctccgcgttcgccgcgctccacgacccgccgtcccgggcctactacgaacgcaaacgagccgaaggaaaacgccacaaccaagcactcatcgccttggcacgacgacgctgcgacaccctctacgccatgctccgcgacggcaccctctaccaatccccagcgcccacaaccacttgacgaaaaacatagggg

SEQ ID NO: 5080 - DNA, 1495 bp, unidentified
  source 1..1495: mol_type = unassigned DNA; note = element_7c8ac24
  misc_feature 1..2: note = core
  misc_feature 3..251: note = LE
  misc_feature 252..1475: note = CDS
  misc_feature 1476..1495: note = RE
ctaatgagtgttagcgagttgccatacggcagactcggtgcctggtagccgccggcaggtgagcacttttgcctcctgggccatgagcccttccgaaagaccgtgcccctgccggctggccgggagagtggatcgctgctgggatgtcgtgcccgccgcctggtgtggggggcgtgagcactgttcattagggcgctgattgttctcccgcaggctgctgacgagattcgacacctgggacgggagatctgatgcggctgtttgtcggggatgactgggccgaggaccatcacgacgtggagctgatggatgccgccggccgggtgctggccaggaagcggctgccggagggggtggccgggatggcccggctgcacgagctgatcgggcagcagctgggcgaggacggcgaggatacggaggtgttgatcgggatcgagaccgaccgcggcccgtgggtggccgcgctggtcgcggccgggtacacggtgtacgcggtgaacccgctgcaggcatcccggtaccgggaacgccacggcgtgtccggggccaagagcgatcgcggcgacgcgcacatgctgacggacatggtgcgcaccgactcccaccagctccgggcggtggcaggcgacagcgcggacgccggcgcgatcaaggtggtagcccgcacccatgaaacgctgatctgggaacgtacccggaatggccagcggctgcgccaccagctgcgggagtacttccccgccgcgctggaggccttcgacgacctggacgcccctgatgccctggagctgctggccaaggcgccggacccggcccgggccgcgaagctgacccgcgcccagatcagcgccgcgctcaagcgcgcccgccgccgcgacatcaccggcaaggcgacggcgatcatcacggcgctgcgcagcggccagctgggccagccgccggccgtcaccgccgcttacgctgtcaccgtccggtccctgatcgcggtgatcagcaccctcaacgagcaggtcaaggcccttgaagggcaggtggaggcctattttggccggcacccggacgctgagatctacctgtcccagcccggtctgggatacgtcctcggtgcccgggtgctcggcgagttcggcgacgacccggaccgttacgtcagcggaaagacccgcaagaactacgccgccacctccccgatcacccgcgcctcggggaagaagaaggtcgtcgccgcccggttcatccacaacgaccggctcatcgacgcgctcatggcccaggccttcgccgccatgaacgcctcgcccggcgcccgcgccctctacgacgccgagcgcgccagcggcactgaccacaaccctgccctgcgcaagctcgccaaccggctcgtcggaatcctccacggatgcctcaaaacccgcaccctctacgacgaggcaaccgcctggtcccaccacgaaaacaagcttgcggcttgacatctaagctcctgggatgt

SEQ ID NO: 5081 - DNA, 1379 bp, unidentified
  source 1..1379: mol_type = unassigned DNA; note = element_7c8b644
  misc_feature 1..2: note = core
  misc_feature 3..86: note = LE
  misc_feature 87..1118: note = CDS
  misc_feature 1119..1379: note = RE
  misc_feature 1149..1367: note = bridgeRNA
tgatgctgtggacggctcctccaccggcacgtgagtgcccaggatgtggttgctgttgatgtggccacgattcggaggagccaaccatgcaagtggtgacgacgatcggtctcgacatcgccaagtcggttttccaggttcatggagtggatgcgcagggcagggtggtcgtgcgtcggcagctgaagcgtcggtacgtgctgcctttcttcaagaagctctcgccctgcctggtgggcatcgaggcctgcgccacatcgcaccattggtcacgggagttgcaggcgctccgccacaccgttcggctgatgccgccggcctacgtgaagtcctacctgaagcgccagaagaacgatgccgccgatgccgaggcgatctgcgaggccgttgctcggccaaacatgcggttcgtcgaaaccaagacggcagaacagcaaagctgcctgatgcttcatcgcacgcgccatctatttgtgcgccagcagaatgccgtcatcaattccatccgggcgcatcttgccgagcttggcatcgtggcgccggtcgggcgcaacggcgttgaggagctgctcgatgttgtggctgatcctgaggatgatcgcgtgccggaggtcgcgcgcgagtgtctggccgctctcggtgcacagctgcggatgctgaaggcgcaaatcctcgaattcgaccagcgcatcgtggcttggcatcgctccaatgagacaagcaaacggctggatgagatacctggcgtcgggccggcacttgccaccgtactcgtggccagcgttgccgatccaagggctttccgatcgggacgggacttttcggcctggatcgggctggttcccaagcagaactcgagcggtggcaaggagaagctcggcaacattaccaagcgaggcgatcgatatctgcgcagcctgtttacagcaggcgctccggccgtgatccgctatgccaagctccacggcaccaagcaccggccatggctcaccgcactgttggcgcggcggccaaccaaggtggcggccattgcgctcgccaacaagatcgcccgcatggcatgggccatgatggccaaaggcgagcgccaaaaggaacctgccgccctggcggcatgagcgagatcgcgccggtcagcttgcgtgatgcggaggttggaaggacgaacagcacgtaatgcagatccggtcgatccggagatcgggacaacccactagtgccacagcactgtcgagtgcgggcttttgaccgggacccgatccgcggagggcattatggccagcggtcatgcgagccgcatcaataggccgaacacatggctgttccgaccagaactgcgacgtgaagaaagtccttgccaacacggagccgtccacaca

SEQ ID NO: 5082 - DNA, 1153 bp, unidentified
  source 1..1153: mol_type = unassigned DNA; note = element_7c8e96c
  misc_feature 1..2: note = core
  misc_feature 3..205: note = LE
  misc_feature 206..1141: note = CDS
  misc_feature 1142..1153: note = RE
  misc_feature 12..211: note = bridgeRNA
cttgtcttatggttttcccagcttttgtgccacacaagagtcacagatcaatagtctgacttattgatctgtggcggtggttgggtcgtcaatggcttggtcgttatggaccgttttggagtaagaccaaccacctccttcgccaaaggcctgaacggatacagagcggccatagccctctagacaagcataggatatgacgaagatgaaacatgataccattggaatagatatttccaaagccactttggatgtgcaccgcctgagcgatgggaagagggcttcttttacaaattgcgccagaggcttttcgcagcttgcagatttctgtgcacagactgacgttgtacgtgtcgtttacgaagcgacgggtgcatatcatagtcggctcgtgggcgccctaagctctcatataccaatggtcagggtgaacccgctacaggcccggcggtttgcacaggcacaaggtgtccgagcaaagacagatgctgtggatgcaagaatgttagcccttatgggggttgcctttaaactggagccagatgcaccagtcacaaagttgcatcaagatttaaaggacttgcgatcgttccggctggggctggttaaagaccggacgcgtatagtaaatcgccagagaacccagagcctgcccataattcgccgccaaaataatgcgcttttatctcagcttacaaagaaaattgcggaaattgatgaagaaatcagcaagctgttaaatgcttgtgaggtgaacgccaattctctcaaaattctcagatcaattccaggtgttggagctgtctgtgcggccacaattttgattgagatgccagaaattggtcgaattgcgcgtaaacaagctgcaagccttgcaggcctggcgccaatgaccagagaatccggcgtgtggaagggaaaagcctttattcagggcggacgcaaagttgttagaaatgccttatatatgcccgcgattgtggccattcgccacaaccccgatttcaagacaaaatatcaatccatgatcaatgccggaaaaccaccaaaggtcgccatcattgccgtgatgcggaagattattgaactcgcgaatgtgctgatcaaggaaaatagaaattgggtaaaaaaagacgcttgatcaagacggata

SEQ ID NO: 5083 - DNA, 1530 bp, unidentified
  source 1..1530: mol_type = unassigned DNA; note = element_7c93a25
  misc_feature 1: note = core
  misc_feature 2..230: note = LE
  misc_feature 231..1466: note = CDS
  misc_feature 1467..1530: note = RE
  misc_feature 14..245: note = bridgeRNA
ctacttgttgtattgacctacggctgatgcctgggaaggctcggtcgaggtggttggtggggtcgttctcatcgcggctgtccacggcctggtcgtgtgactcacatttggcatgcgtcccatctgccgccgtggcgtggagaggctcgagaggggcctgttgaacccaaagtagcaatgccctcctcgccggattttcctttatcggatggcgagacgaggagggcattgtgggacaggtagtgatcgggatggatccgcataagagttcggcgacgatcgagatcatcaacgaccgggagaagatcctagacaccggccgatatagcaccgacaccgccgggtatcgggcgatgctcgcagctgggcgcaagcaccgcgaccgggtgtgggcggtggagggttgcaacggtatcggtcggcatctggcgcaaaggttggtcgccgatggggaaccggtggttgatgtgccggcgaagctgtccgcccgcgcgcgggtgttttctaccgggcagggccgcaaaactgatcccgttgacgcgcattcggtggccctggtcgggttgcgcagtcaagggttgcgaacgatcacggctgatgatgcgacggtggcgttgcggttgctgatcgatcgccgtgaacaactcggtgtgacccgggtgcaggtgatcaaccggatccaccggctgctgctggagttactacccgggggtgccaagaagcacctgtccgcagcccaagccaaggcattactgacaaaagtgcgcccgcgtgacatcgccggcaagacccggcgtcgcctcgcggccgaactgatcgtcgacctggtgtcgctggaggcgaagatcaaagccgcggacaaagagctgcaccagctgatcaacaccaccggcagcacgctgcgagatttgcacggcatcggaccggcgaatgccgcccggctgctcggtgacgttggggacatcacccggttcgccgacaaggcacggttcgcgtcctggaacggcaccgcaccattggatgcgtcctctggtgaccagcaccggcatcggctgtcccgggcagggaaccggcgcatcaaccgggtgttgcacatcatggccgtcgtgcagctgcgcaccgacacgaaaggacgccgctactacgaccgcaaagtcgccgccggcaaaacttcgatggaagcgatgcgctgcttgaaacgacgactgtccgacatcgtctacaagcagatgcgcgacgatgcgcaacgagtagcgacgggcccgggcggacacgtgggggcggctactggctccagcgcggtcaactcaaaccccgatgtcgacgcttcggagaagtcctgtcccggacccgtcaccacccacgctacccgcgtcaaaagctcccgaccagaccgttcttcggcccgttcccgacgccccaaaacagcgccggcccgcagccgtcgtcaagcgcactctgcttgacgacggcgagaaccggcgcaccatcaaaaggcgggaacaacctgggattgacatagaggggcgc

SEQ ID NO: 5084 - DNA, 1478 bp, unidentified
  source 1..1478: mol_type = unassigned DNA; note = element_7c96d9c
  misc_feature 1..2: note = core
  misc_feature 3..233: note = LE
  misc_feature 234..1457: note = CDS
  misc_feature 1458..1478: note = RE
  misc_feature 7..234: note = bridgeRNA
ctaatggggatcgaccagctcgttcggtagacggatgaggctggccaactgagccgccggcaggtgagcactggtgtcgacagagcgctgagctctacgtctagatcgtgcccccgccggtcggtgaggttgcctcgacggctggtgggatgtcgtgccccgagcactgatccattagtgagctgctggcggcctcgaggctccgatggtgccaattgatcgaggaggagcggatgatctttgtcggggtggattgggccgaggcccaccacgacgtccacgtgcaggacgtggacggcaagcggttggcgggcggtcggctgccggagggagtggaagggatcgcccgcttccacgacctcgtcggcggccacgtcgaggatcccgaggaggtggtgatcgggatcgagaccgatcgtggcttgttcgtcgccgcgctggtcgccgccggctacgccgtctacgcggtcaacccgatgtcgacatcgcgctatcgggatcggcactcggcaagtggcgccaagtccgatccgggcgacgccaaggtgctggccgatatggttcgcaccgaccggcacaaccaccgccaggtcgccggtgacagcgacgaggtcgaggccctcaaggtcctggcccgagcccaccagcgcatggtctggtctcgaggccgccagaccaacctgttgcgctcgacgctgcgcgagttctacccggcggcgctcgtcgctttcgatgacctggccagcggcgacgccatcgaagtgctccgggctgcgccgacaccgaccctgggtgctcgcctgagcgtctcgaagatctcggcggctctccggcgtggtggccgccagcggcgagtcgatgagcgcgccgccgagatccaggcggcgttgcggtccgaacagctccaagcgtcggcggcggtcgccatcgccatgggggcgtcggtggccgccagcgtggccgtcatcgccgagatgaccgcccagaccgcgctgctcgccgcggagctcgaagcgggttttgatcagcacccggacgccgccgtggtccgttccctgccaggactagggaccatcctcggcgcccgggtgctcggcgagttcggcgacgagccgaaccgctatgccaccgccaagtctcgcaagaactacgccggcacgtcacccatcacgcgggcgtcgggaaccaaacgcatcgtcctcgcccgccacgtccgcaaccaacgcctggccgacgccatctacctgtgggccttcgccgcgctcaccgcctcgccgggagctcgccgctactacgaccagcgccgagcagccgacgacacccaccaccaagcactccggaccctcggcaaccgactcgtcggcatcctccacggatgcctcgcacaccacgtcacctacgacgaaaccgtggcctgggggcaccgctccgcgaacaatctcaccgaggccgcttgacagcttcggggcgtgggatgt

SEQ ID NO: 5085 - DNA, 1491 bp, unidentified
  source 1..1491: mol_type = unassigned DNA; note = element_7c9a84a
  misc_feature 1..2: note = core
  misc_feature 3..533: note = LE
  misc_feature 534..1454: note = CDS
  misc_feature 1455..1491: note = RE
  misc_feature 22..245: note = bridgeRNA
ctcgtataatatatttatgggtaatttaaagagaacccatatgaaacctcttgtttatcgcacaaaaaagtgagataataaatctgtacagttagagggtgcgagtttctccttgaagtgtggcttccaaagaaagagtagcacctctgctttacggatagatacgaatgagctggatcgcattcaaattctgaatatctaacgaggttgtgtttccgtaaaatacagaggacaccctttgctgtaacaaaactttatgaggtgcatcacaatgttttactgtggaattgacatcgcaaaatacaagcacgaagcttctgtcatcgatatgtccggcaaagctttgagtaacagtattacttttgccaatgacagacaaggctgtgaaaaggttcttgccatctttgaaaaatcagaaataacccctgacaatagcaacgggtcattactggctttccgtatataccttttttcttgaacttggatatactgttaaagttatcaatccaattcagtccgaagccttcagaaaaatgtacatccgtcaaactaaaaatgactcaaaagattcctatattatcgctcagatcatgcgttttggagaatactctgcaacttcactttctgaggaaaatatcattgcattaagacagctttcacgctatcggcttgctcttgtggacgcctgcggcgactgcaaaagacgagtgattgctctgcttgaccaggtgtttcctgagtatgacaagctgttttcagatacattcggcaagacctcctcagagcttttactcaactgtcccacgcctgaggatatgcttgcggtctccacaagaaagctcacaaatattttgaataaagcaagccgtggacggtttggcaaagaaaaagcagaagagcttaaagatgccgcaaaaaatacctttggcatcgcttttgcaaaagacgctttttcctttcagataaagcagctgatgcaacagatcatctttactgaaaatcaactttctgaactggaagaacaaattgcgaatctgcttcacgaaaccaatcagtatattactacgatcacaggtatcggtgatgttctcggtgcaattatcgtcagtgaaatcggcgatatcaatcgctttgaacgtccaaatcagcttgttgcatttgcagggctcgatgtcactgtcaagcaatcaggtgaattttcaggcacgaaaaacaagatttcaaaacgtggttccccttacttaagaagagcaatctggcttgccgcacagcgtgccgctttttgtgaccctgttttatctgattactatcagtctctcaaagcaaggggcaagcatcatctgacagctgtcggtgctgttgcacgcaagctttgcaatatcatttttgtaattctcaaagagaacagaccttattttcctacccctccaaaaaaatctcaaaatttatcttgaatttttgctttttgggtattgactttttatagctggt

SEQ ID NO: 5086 - DNA, 1467 bp, unidentified
  source 1..1467: mol_type = unassigned DNA; note = element_7cae1b7
  misc_feature 1..2: note = core
  misc_feature 3..244: note = LE
  misc_feature 245..1450: note = CDS
  misc_feature 1451..1467: note = RE
tctaccattgtattttacaggtgacgggcatgccgttgtcaagtagaatgtctacttgacgggggtgtggctcacggggtccgcaggcctgcaaaggtactgctcggttctgaactgccgcccccgtcatcttcttcatccagtgtgtctgttggaatgatgcgcatccgtgaggatggtcgctctgcgcagtagacgagaacaactggatgagctttcatcactctccaaggaggttacagtgatggacccccagattcgtgtcggtattgatgttggttgcaaagcccatcgtgttgctatcagtgatccacacggctcaatcctggaagagttcgacatctcccatacaggtgccggctttcgtgacttctttcgccggattgatcatcacagacagaagttagacttgccagtggcagtggccatggaggggttcaatgggtatgcccgtccgttggatcgactgatccaggagcgtgggtacatcctgtacaacgtgaacaacctgaagttggcccggttcaaggaagtgtttcctggagcggcaaagaccgatccgattgacacccgtaagatccttgagttgtttcacctcaaagaccacttaccattggctaaagacgtgctccagaaggtggtattagctcccccggtcaacgacaagttgaagcgtctcagtcgccgccgtcgccagttggtgaatgagaaggttcgtgtagctaaccggttgcagtccgacatgcaagccgtctgtccggaactactcaccattactaacaacgtgagcaatcttaagttccttcggtttctcacgtaccgtgccgaactgacacagttggctcgcttgcggtacaccactctgcttgcgatcccgagtgtcggtcagaaatacgctcgcaccatccaagaatggcagagaaaggcaagcttctcaactgaggtggagtatgtaggaccgatgatcatacaagacgccaagcggctccttgagcttcgccagcagatccacgcattggatgaagtaatggctgaattagccgatcagtcagagcttgcttgccggatcggttccgtacaaggctttggcaagacctgtattgctgaactcgctggtgagattggcaccacggagcgctttgccggtgaaagaagtcttgccctctacgtagggatgagtcctctttccagagattcaggacaacatcacggcagcaaacgtccacgatcagtcaaccaccgggccaaggcagcgatgatgacagcggtagcgcatcacatccgttgtgttcctgaatccaggacgtactacgacaagaaacgagcagagggcaagactcacaaccaagcggtccgttctctcggtcggcacctcgtccgtgtgatctggtcaatggtcaagaacgaaagagactacgaactccgggaggtgatacctagtgtgacttgataatccaagaggaatgt

SEQ ID NO: 5087 - DNA, 1421 bp, unidentified
  source 1..1421: mol_type = unassigned DNA; note = element_7cc7ede
  misc_feature 1..2: note = core
  misc_feature 3..83: note = LE
  misc_feature 84..1115: note = CDS
  misc_feature 1116..1421: note = RE
  misc_feature 1143..1409: note = bridgeRNA
tgatgccgtggacggctcccacccgaaggcatcaagtgtgccaaaatggtggttcatagaaccacagggaaataggagccatcatgaacgaagttatcacaataggtgtcgatcttgcgaagaatgtttttcaggtccacggcattgacgcggagggtggtgtgattttccgtcgtcagttaaggcgtgctcagatgctgcctttcttcaagaaacaaccgtcatgtctggttggtatggaagcatgtgccacgtcgcatcactgggcacggcagttggtcgagcttggccatgaggtcaagttgatgccgcccaaatacgtgaagccttatgtgaagcgtaacaagaacgatatggcggatgccgaagcgatctgtgaagccgtaacccgtccgactatacgttttgtggagatcaagacaccggaacagcaatcagttctgatgttacaccggacccgccagttgtttgtccgtcagcgcaccacgctgatcaatgccctgcgtgcccatctggctgagtttggtattgttgcaggtgttggccgcaatggcttggagaagttgctggaactcatagagagtggtgaggatgatcgtgtgccaacaggtgcacgtgactgtctgctggccctgcgtaaccagcttgagatggtgaagcatcagatattggatgcggatcgcagcattcttgcctggcaccgcgccagtgaggtcagtttacgccttgatgatatacccggcgtgaggccactgatcgccagcacactggttgcttctgtacccgatccccacatctttaagtcaggccgtgatatggcagcgtggatcgggttggtgcccaggcagaactctaccggcggcaaggagcgtctcgggcatatatccaaggctggcaatcgttacttacgaatgctgctcgtggtcggagcgatgtctgtgatccggcgggccaagcaagtgggctatacccgcagaccgtggctgaccaagctactggaacgccgatcaacgaagatcgctgccatcgctcttgcgaacaagattgcccgtaccgcctgggcgatgatggcacatggaacgttttatcacgagcctgtatcacaggcagcttagaacacgcacgggcatcgctcgtgcacacgaagttggaaaggatgacagacgaataatgcacccagccggttgatccaaagatcaggacactccattttagccagtacagcaaagtagactgcgtgcttatgaccggaacctgatctgcggagagcattatgtgctacccggcaggaccactatgtggtccgagaggggccagcggccatgtaacagtgccgcacaaacaggccgaacacatggcagcaccaaccagcactgcatttaagtcaaataaatccttgccaacagggggccgtccacaca

SEQ ID NO: 5088 - DNA, 1599 bp, unidentified
  source 1..1599: mol_type = unassigned DNA; note = element_7cdc829
  misc_feature 1..2: note = core
  misc_feature 3..99: note = LE
  misc_feature 100..1227: note = CDS
  misc_feature 1228..1599: note = RE
  misc_feature 1326..1535: note = bridgeRNA
agacataatgtattaaacctgtcctaccataagggacgtgggttaagctaaaggtgaagaaaaccaaaggctcagagccacaattaaggaggacaggttatgtaccagtatagcaaatatgttggattggatgtacacaaggagaagataatgttggcggtggcagagacaagcagaagagggcctgtatattatggtgagatagcgaacactcctgaagcggtagcgaaggcgatcaagaaaatcgccgggcaggaacatgtaacattctgctatgaggcagggccgtgcggatacgggctataccgtcaaattacagccatgggataccagtgtgaggtagtggcgccgtcgctaatacccaagaaatcgggcaaccgtgtaaaaacggacagacgggattctatttcgctggcgggactattgcgcgccggagaactgacacgggtgtgggtgcccgatagggaacaggaagcgatgagggacctgacgcgagcgcgggaagacatgaaaattatggagcgacatagtcggcaacggctgggaggttttttattgagacacgggaaagtatatcccggtcggagcaaatggactaaggcacattttcgatggcttgagggcatacggtttgagaccgcgactcagcagattgtatttcaggaatatgttgatatggttaagcatacacgggggcgtgtagcagcgatggaagaggaaatgaggaaagcgttagatagttggaagttgaaggaagtcgttgagggtctaatggcattgcgcggagtagacctgatagcggcaatgacgataatagctgagcttggcgatatcagtagatttagctctccgcggcagcttatggcgcacttggggctggtgccttcagaacattcaagcggggaaaagcgtaaacgaggcgggataaccaagaccggcaatagccatgccagacgagtgttggtggaggcatcctggagctatcgattgccagcacgcaagacggcccatttgcagcgaaaggcggcgaaggccagcaaaactgtgcaggagatcgcatggaaagctcagaagaggctgtgtaagaggtactggtatttaatcaacaaagggaagctgcctgttgagagctgtacggctgtggcacgtgaattggtcggttttatctgggccattgtttgtcaagttatgggaaaaggtactgtcagcgcaaagggtaaccgataaaacaaactgatgaccacaaaaggaataataggagttgtcttccggggcttcgaaaagggagtagggtttctccacccctgcagacaacagtatttttatatttgccgtgtatttcggccaggatacaaggagcaggtttggagaatcctcgattccggcatgaggctcctgaaacaaggatgaccctcgagacaagacagaggcagctccacgacgaagataagtcatgcggtatccaacccgcgtatatcagagtgatctaccgtcgtcacattccttgtgccctggccagagttcacgactttattgctgaaagagagagggaaaagaattaagaatactttatccaacttgacaggtttaatacatatc

SEQ ID NO: 5089 - DNA, 1385 bp, unidentified
  source 1..1385: mol_type = unassigned DNA; note = element_7cef3d1
  misc_feature 1: note = core
  misc_feature 2..287: note = LE
  misc_feature 288..1370: note = CDS
  misc_feature 1371..1385: note = RE
  misc_feature 1..297: note = bridgeRNA
cagtaagtatgcttaggccagtgttcctgggcggcctgaccctcacggcgatagaccggctaacatcactggtatcgcaaggcgccggtgtggcctgacccacacgctgatcgaccacaacccgtgtctttcctcggacctgtcggccgcccgggagccttgcggtgaggtttgcctcaccggtgcatgtgacccaagaagggcctgacatcctgtcgcattactgtcctgtccaggcatgcggtcgtggtgaaccgtcgatccacggtcgaaccaggagagccggtatggaagttggtcaggacgttgtcttacatcccgttgtcggcggggtcgacacgcacaaagatcttcacgtcgccgctgttgtcgacgaacacgaccgtgttctcgggacccagtgctttgcgacaacccgacagggatatcggcagatgctcgcctggatgcgctccttcggacagctccggtgcgttggcattgaggcctcaggcacctatggcgccgggttgctgcgctccatgcagaatgccggtgtcgaagttctggaggtcacggctccggataaaccggaccggcgcaagcggggcaagaacgatgatctcgacgctcagaacgccgcgcatgccgcctttgccggcaagcgcaccgtcacgcccagaagccgggatggcatgatcgaatccttgcgcgttctcaaggcgtgtcgaaagacagcagtggtggcgcggcgcatcgcgttgcagatgatccagaacaccatcgtctgcgcgccggacgggttgcgggaggcgctgcgccagatgacccgcatgcagctggtcaggaccttggcggcatggcggcctgacctgactgactaccgcaatgtggattccgcctataggatcagcctcaagtcgctcggccgccgctatgtcgaactgcacgatgagattgccgacttggacgttatgatcggtgccattgtcgatgaacttgcccccaacctcgtggcccggaactcgattggtcacgcaggggcggcccagttgctcctgacagcgggggacaatccggagcgcttgcattccgaggccggctttgccgcactctgcggtgtcagcccggtcccagcctcgtccggcaagacgacgcgccaccgtctcaaccggggtggtgatcgagccgccaacagtgctctgcacatcattgcgatcgggaggcttcggaccgatccgcgaaccaaggcctacatggctaaacgcgtcgctgaaggccactccaagcttgaggcgatccggtgcctgaagcgctacatcgcgcgcgaggtgttcaccctaatcagccagcggcaaaaggagatcaaccaggctcggatcaccgcttgacaaacagaagggcgt

SEQ ID NO: 5090 - DNA, 1520 bp, unidentified
  source 1..1520: mol_type = unassigned DNA; note = element_7cf6a2a
  misc_feature 1..4: note = core
  misc_feature 5..256: note = LE
  misc_feature 257..1510: note = CDS
  misc_feature 1511..1520: note = RE
ctcactggtgcaccatccttgtatcggtaaccgtgaggctgctgatgcacccgaggtgccgccaggccaccgccccgctcgctcgacgcgttgaagtccagcatgagttctgcggggcctggcggttacccggggcgtgccgaccgtcgacagggctgagcgccatcgagcgccgaacagtgagcggactggcagtcacgtcccggcaccggaattgagggtgcctccccactgggctaacagcgaggaggcagacatgcagtctgccagtacgagtttgccggcggtagcaccagatggcgtgaccgccggcgtggactgggccagcaccgatcacgtggcctgcgtcgtggacgcagccgggaaggtggtgacgcgcttcaccgccgctcacaccgccgacggcctcaaggcgctggtgaaaggcctggccagggtcagggcagccgaggtcgcgatcgagcgcggcgacggcctgatggccggggcgctgctggcggccggcctcaccgtcgtggtgatcagccccaatcaggtgaagaacctgcgctctcgctacggatcggcgggcaacaaggacgaccggttcgacgcgttcgtgctggccggcaccctgcgcaccgaccgggcccggctgcgtcccctgacccccggcaccccggcgaccatcacgctgcgctctgccgtccgcgcccgccgcgacctggtcgcccaccgcgttgcgatgtgcaaccagctgcgcgcccacctggccctggtcttccccgccgccgttggcctgttcgccgacctcgactccccggtcagcctggccttcctggcccgcttcgactgccaggaccgtgccgactggctgtcgccccggcggatggcagcctggctgaagagcgccggctacagcggccgcacccgccccggggtgctgcacggccgcatcaccgcagccccccgcggcgccaccggcgacgacggcaccgcccggactcacgtcacccgcgccctggtcaccgtgctggtcaccctcgccgggcagatcaaggccctggcagcccagatcgccgagcagcccggcctgcacacagacgggcatgtcttcacgtcgctgccccgctcgggcaccgtccgcgccgcccggctgctcgccgagatcggcgactgccgccagcgtttccccgacccttcctcgctgatgtgcctggccggggtcgcgccctccacccgccagtccggcaagatcaaagccgtcagcttccgctgggccgtcaacaagcaactccgcgacgccgtctgcgacttcgccgccggctcccgccacgccagcccctgggccgctcagctctgcaaccaagccatcgcccgcggcaaggaccacccccacgccacccgcatcctcgcccgcgcctggctgtacgtgatctggcactgctggcaagaccacaccgcctacgatcccgcccagcaccgggccctccaacggctcctcgctcaagatcaactggccgcagcttgacacagggcta

SEQ ID NO: 5091 - DNA, 1632 bp, unidentified
  source 1..1632: mol_type = unassigned DNA; note = element_7cf833a
  misc_feature 1..4: note = core
  misc_feature 5..283: note = LE
  misc_feature 284..1507: note = CDS
  misc_feature 1508..1632: note = RE
  misc_feature 12..306: note = bridgeRNA
ctcctacaatatagtttgtggacacggcaccgcaaccagcggatgtcatgttccattttgttgcctaagctgtacaatgggagagtatcggtctgacttatttttccaaggactaaccacgtccgcacaggagtccgtcagccgtctctctcgttgacagcagttcgatttgagcaggtcgtcccgctcggagatccgggtgcgttcgcgtaaccaaggagattgaataagcagcaagagaacggtgccaccgattgcaaagtcatctcatcaggaggtttacatgaacacagccgtgggtatcgatgtttcaaaggggaaaagcgttgtggccgccatgcgtccgttcggcgaggttgccctgacgccccgcgagtttctgcacacaagcgcggacttgtcggccatgaaggaggctcttagcttgattgagggcaacacccgtgttattcttgaagcaaccgggcgttaccatgaaccagtcgtcatggcgctgcgcgaagccggaatctttgtcagcattatcaatccgaagctcatcaaggattttggcaacaattcacttcgaaaggtcaagaccgacaaagccgatgcggtgaagattgcgcggtacggtcttgaatactgggaagaaatgcgagagtacaccgaaaccgataccgtgcggcagcaactcaagctgttttctcgacagtacaatctgcatatgaaaaccgtcgtgtcgctgcaaaacaacctcatttcgctgcttgattctgtctttccgggcataaacgagctgtttacaagcccggttcgtgaggatggccatcagaaatgggcggattttgtctgcaccttttaccatcgggattgtgtatccgaggtgagcgttgccgcgttctcggagcgctatcacaaatggtgcaagcgaaagggctacaatttcagcacatccaaggccgccgagattcatgccgcaagccaggagatggtcgtgaccctaccaaagaacgcactcacaaaaaccctcatcaccacagccgccgagcagctcatcgccgcaaccacaacgctggtcacgctcaagaccgagtttatccgccttgccgcaatgctgccggaatacggcgtcgtgagttccatgtacggtgttggcgacattaccggcgcccagctcatggccgaaatcggagatgtccgccgttttgccaatcgtggtgcgctcatcgccttcgccggtgttgatcccggcgtcaacgagtcaggaaaatactgctcgcagagcgttcggacgaccaagcgaggttcgccgcatctgcgtaagacgctgttccagattgtcagtacgcacctcaggcaatcgccgcagaatgaatctgtataccagttccttgaccgaaagcgagctgagggcaagccgtatctcgtttacatgaccgctgcggccaacaagttcctgcgcatctaccacgccaagatcagggactatttgaacagcctggatatgaccgaatcagacacatagcgtcttttgaaatatgctgtgcccaggtgagcgctctttcgcttgcctatttgctgtacccgccgttgccgtgcgaagttgtttcgcacttttttcattttacctattgacttttgttagcagga

SEQ ID NO: 5092 - DNA, 1502 bp, unidentified
  source 1..1502: mol_type = unassigned DNA; note = element_7cfecdd
  misc_feature 1..2: note = core
  misc_feature 3..79: note = LE
  misc_feature 80..1114: note = CDS
  misc_feature 1115..1502: note = RE
  misc_feature 1113..1385: note = bridgeRNA
tgttggggtggacggctcccaacggcatcgcgatgtgccagaatgagttcgttgaaagctcaatcgagggagaccgtccgtggaacagattatccgaattggtatagatacgtcaaagagtgttttccagctgcatggcgtgaacgcagccgagcaaccaatccttcgcaagaagctttcgcgcaaagagatggtgaaattctttgagaaagcgccgccgactatcatcgcactcgaggcctgtggtggatctcatcattgggcaaggatgttaagttcgtttggtcatgaggtgaagctgatcgcgcctcaattggcgaagccctatgtgaagcgcggcaagaacgacgctgcggatgcggaagccttgtgcgaggcgatgagccgacccaccatgcgcttcgtgccggtcaaggctgcggagcagcaggcggcattgatgctggtcggcatgcgagagagactcattcgcaatcggacgcagctcgccaatgcgattcgcggttttgccatggagtttgggatcgtcgcggccaccggcatgtgccgcatcgagcctttgttggagcgcatagcggctgatcaatcgctacctgaactggcccgcgcgcttttttccatgcacggcgttgagtatcgagatttgcttacggaaacgaaagcagtcgaggaaaagcttaccgcgttacatcgctccgatgaatgcagcatgcggctggccgaaataccaggcgtcggaccggttggcgcatcgctgttgatgatgaagacgcccgatcccaagatgtttaagtcgggtcgcgattttgccgcctggataggtcttacacccagggaccattcaaccgcaggcaaggtcaggctcggggtgatcacccgagctggcgacgaaatgctgaggagcatattggtggttggcgcaactgcccttcttcaatatgtcagagcaggtcgaagcagacatacttcccggtggctgatcgagcttttgcaaaggaagaagccgaagctggttgcggtggcgctcgccaataagatcgcccgcatcgcctggaagctcatggtgagcggcgaaaggtacaggcgagcagaaggtcagacacaggcagtataggagattggccatctcggtgagcatgatatgagtgctaccgtgttgagctgatgctgtgaacttgcaagagaaaagcagatggtgtgatcgatcgatccaagacgcgtgaaactccgcattgcccaatggccgtcaagggtcgcaggtctgttaggaacacgagttgcggaaaccatcttggccagtggtcatgtgcgaccacacaaaaaggccgcacatatggaagcaagcgatccgatcaaaatatttgtaaaaacacttgcaagtgggagccgtccacatatggccagtggtcatgtgcgaccacacaaaaaggccgcacatatggaagcaagcgatccgatcaaaatatttgtaaaaacacttgcaagtgggagccgtccacata

SEQ ID NO: 5093 - DNA, 1210 bp, unidentified
  source 1..1210: mol_type = unassigned DNA; note = element_7cffa40
  misc_feature 1..2: note = core
  misc_feature 3..184: note = LE
  misc_feature 185..1177: note = CDS
  misc_feature 1178..1210: note = RE
  misc_feature 12..193: note = bridgeRNA
cttgtatctctccaggtgaagtgattagctatcactgtaaccgagaagtgagtgaggacgggcctgaccgaagctttaaaagctgattggtagattgtccccttgcttcaatatctcattaactgaatggtatccaagcgccttctatgaagtgacgctgaatgagaaaggggagtacaaagagatgatgcaatacgttggcgttgatgtgagcaaagaaaaagtcgacgtgtgctggttacgcagcaaagatagcgagtccggtaagacaaagattaaaacaaaagtctttaagaacagggactttgaaattattaccaaatggctgaaagacacgattggcgaggactttagcaatatcgtagttgtgttagagccgaccggcgtttatcacgaaggcttaacttatttcctgcacgaagcgggtctgcaggtctgcattggcaatccgagtgacgccagggcgtatgctaaatcggttggatttaaacataaaacagataaagaagacgctaaagtgctggcttattacgcctctcacgagcctcgcaatctaaaggtgtgggagccagagccacccctggttcgtgagctgaaagcgatgctaagacgcctggatgctctggacaaagaccagcagcgtgaaattaacaggttagaagccagtgaaatcagtggtgcttcgctgcgagttacagattcaatccgaggcatgattgacgcattagaagaggaaatacaaaggcttaaacaagacattgatgaccggattaagaaagatccggtgctagcaaagaaccgagagctgctgcagagcattaaaggtgttggtgacgtactaagtcgtgaaatggtcgtgttgtttgcagcaaagaaattctccgacgctaagcaagtcgcggtatacctaggcctaacaccggtatttagggactctggtacgcaaaaaggtaaaaccgtattgagcaagctgggcccggccagaatacgcgcgaagctctacatggcagcggtggtcgcaggccaacacaacatggatattaagcgccaaaaacatcgcttaatcgccaatggtaaaagcaaaatggccgctcttggcgcggccatgcgaaagctggttcaaatctgctatggcgtggtgaagaaccagcaaatgtatcaaccccaaacggtttagcaaccggttgaggtcgatgtggagagatggtat

SEQ ID NO: 5094 - DNA, 1307 bp, unidentified
  source 1..1307: mol_type = unassigned DNA; note = element_7d07b9e
  misc_feature 1..2: note = core
  misc_feature 3..224: note = LE
  misc_feature 225..1295: note = CDS
  misc_feature 1296..1307: note = RE
  misc_feature 34..236: note = bridgeRNA
ccaacttgttgaatccggctggagttcgtggtctgcagccatgatcttccaggccgtgatcggggtcgctcgggaaacacctgtcgccctgatgggctgactgtcgaacggcgtgcgtctcggtcacggccgccggtgggagtggctcgagagaggtctgcatcgcccgaagttggtctgccctcctcaccggacccgttgatcgtcttggctgaggagcccgtatgcccgttgcaccgacctacccgaacggctcttatggagtcgtcatcgccatcgacccgcacaaggcgtcctggaccgccgttgtggtcggtagcgggctgaccccggtggccgcactacgtgtggaggtcaaccgggccggttatcggcagttgctgcggttcgcggccaagtggccgcaggcgcggtgggcgatcgaaggagcggccgggctgggtgcgccgctgaccgagcggctgcgcgccgaggggatcgcggtgatcgacgtgcccgcgaagctggcccggcgggtgcggttgctgtccaccggccatggccgcaagaacgatcaggccgacgccctgtcggtcgggatcgccgcttggtctgcacccgcgctgcgcacagtggaagtcgatgaggccatcgcggcgctgcgggcgctgaccgagcaccgcgacgacctggtgcgcacccgtacccagctggtcaaccggctgcacgcgatgctggtcaaactcgtcccgtccgggttgcctcgcggtctgaccgctgagtccgcggccgagacgttgcggcgtatccgcccccgtgacccgctgggccgcacgttgcgccgattggctgtcgagctggtgggcgagctgcggcggatcgatcggcgcatcgccgaggccacccaggcgctgtctgatgcggtggccgcttcgggcaccaccctgacccggttgcttggtgttggcgacgtggtggccgccaagctcctcgcgcgcaccggcccgatcagccggttcccatccgcagcggcgttcgcctcgttctgcggcgtggcaccgatcgaggtgtcctccggtgacgtcgttcgtcatcggctctcccgcgccggtgaccgccaactcaattacgcgctgcacgtcatggccatgacccagattcgctacgactcgccgggacaggcctactaccagcgcaaacgcgcggctgggaagagtcacaaggaggcgctgcgctgcctcaagcgccgcctggccgacgtcgtctaccgcatcatgatcagggacacggtttcctctctgacgctggccgcttgacacagagaggtg

SEQ ID NO: 5095 - DNA, 1384 bp, unidentified
  source 1..1384: mol_type = unassigned DNA; note = element_7d14c73
  misc_feature 1..2: note = core
  misc_feature 3..87: note = LE
  misc_feature 88..1023: note = CDS
  misc_feature 1024..1384: note = RE
  misc_feature 1157..1379: note = bridgeRNA
ataatgagatggacgctccagattttacggtatcaaagtaccagactggatcgttgcaatacgtcctgaaaaatgaggagcgtccacatgaaagtatcaactcttggtatcgacctggcaaagaacgtttttcagcttcatggtgtcgatcacgaaggccatactattttgcgtaaaaagctcacccgggctaagtttgttcagtttgttattcaactggaaccttgtctgattggcatggaagcctgctcatccagtcatcatttcgcgcgattattcacccgctatggtcatgaggtaaaactcattcctccgcagtatgtgaagccttatgtgaaaacgaacaagacggatgcagcagacgctgaagcaatctgcgaagcggtaacccgcccgaatatgcgttttgtacagataaaaaccgaagagcagcaggccgttttagcgttacacactgaacggggaatacttatccgcgagcggatcgcctgttccaatagtttaagagccacacttgctgagtttggtattacgattggagccggacaaagccatttaacccgtgagctgccagccattctggaggacggcgaaaatggtttatctccctttgtcagaaccagcatctacagacaggctaaacatatccgggaacttgaggagcaagttaaacaggtagaagaagctctggcctcctggtatagaacgcaggaagcctgccagagaatagccaaaatcccgggcattggcatgctaacggccacttatgtcgtagcagcagtgggtaatgcccgacaattcagtaccgcaaagcagttcgcttcatggctggggctgacaccaaaggaacattccagcggcgggaaacagcaactgggagggatcagcaaacgtggagatggatatttccgatacttgctggttcacggcgcacgcgcacttaccgcctgggtcaaccggaacggcgcgattgaggagaatgcctggcttcggggctacttgagcggaagcactacaatgtagctgttgtcgccatggcggcaaaaacagcgaggatcatgtggtcaatgttgacacacaatactgaatatcaacctcgccagctcgcctgacacaaggtcagtcaatctgacgaggtgctgaaaaaagttaagtcctggtaggcgcaagtgacttcagaagatggcaaaacaggtaagaccgcaggcaggatacaccgagaggtaacaagggcaagttagcccgtagaggatgattggtacctgcctggcggatttcatcatggttcgggataaaaaatcccatcagaaaccggatatatggctgcacctacccgttttattactgaactgaagaaagcattgcattccgggagcgtccatat

SEQ ID NO: 5096 - DNA, 1329 bp, unidentified
  source 1..1329: mol_type = unassigned DNA; note = element_7d1e16c
  misc_feature 1..2: note = core
  misc_feature 3..68: note = LE
  misc_feature 69..863: note = CDS
  misc_feature 864..1329: note = RE
  misc_feature 1096..1327: note = bridgeRNA
ttaatgagatggtcactccctccttcccagtactatgctgaggacaggctttcattcggagaaccatcatggaaaacattgcgcttattggtatcgatctgggtaagaactctttccatattcattgtcaggatcatcgtgggaaggccgtttaccgtaaaaaattcacccgaccaaagctaatcgaatttctggcgacatgcccggcaacaaccatcgcgatggaagcctgtggcggttctcactttatggcacgcaagctggaagagttagggcattttccaaagctgatatcaccgcaatttgtccgcccattcgttaaaagcaacaaaaatgacttcgttgatgctgaagctatctgtgaagcagcatcacgtccatctatgcgtttcgtgcagcccagaaccgaatctcagcaggcaatgcgagctctgcatcgtgtccgtgaatccctggttcaggataaggtgaaaacaactaatcagatgcatgcttttctgctggaatttggtatcagcgttccgcgaggtgctgccgttattagtcgactgagtacccttcttgaggacagtagtttgcctctttatctcagccagttactgctgaaattacaacagcattatcactatcttgttgagcagattaaagatctggaatctcagttgaaacgaaagttggacgaagatgaggttggacagcgcttgctgagtattccctgcgttggaacgctgactgccagtactatttcaactgagattggcgacgggaagcagtacgccagcagccgtgactttgcggcggcaacagggctggtacccccgacagtacagcacgggaggtcggacgacattgttagggattagcaagcggggcaacaaaaagatccgaactttgttggttcagtgtgccagggtattcatacaaaaactggaacaccagtctggcaagttggccgactgggtcagggagttgttgtgtcggaaaagcaactttgtcgtcacctgtgctctggcaaacaagctggccagaatagcctgggcactgacggcgcgacagcaaacttacgaagcataaaggcagaaatacaccagtttaaacaatcattcatctggttttgcgaatactgatattgatgatactaacggcccaccggcctgttgaggaacctgtaaaacggaaaggctcattgaagccgtatattttctggaggttcatcaggcgcggaactcatcgaggcgcgggaataaaatcccattcagacgccggatagattcaagcaagccaacttgtcgtcaaaatcggtgttgcaaaaacgggagtgaccataga

SEQ ID NO: 5097 - DNA, 1467 bp, unidentified
  source 1..1467: mol_type = unassigned DNA; note = element_7d2323c
  misc_feature 1: note = core
  misc_feature 2..167: note = LE
  misc_feature 168..1451: note = CDS
  misc_feature 1452..1467: note = RE
  misc_feature 8..200: note = bridgeRNA
ccgttaccttcttgatcaccgttggagtacgttctggcggtgctggcctgggcgcctcggtatggctgctcctccttgttgcggatgatctgatttgtgatgccgccggggcgttcgggtggtggtgatcgctgataggggccggatgctctcgaggccgacgtaacgtggatgccgacgcgaccaccgtgaggccagctgacgaagctggagctcctctcgagtacgtggaggtcgcgttgcatcccagtcaaggcatcgacgtcagcgatgtcgcggtgttcctcgggatcgacgtcggtaaggccaagcactacgcagtcgccctcgaccggtccgggactgccctgctgcaggccgagctgccgcaagacgaggcccggatccgcgccctgatcgaggggttgatgaccatcgggacggtcctgacggtggtcgaccagccggcctcgatcggggctctgccggtcgcggtcgcccgagctgtgggcacgcaggtcgcctacctacccggcctggccatgcgtcggctggccgacctgcaccccggcgaggccaagaccgatgcccgggactccttcgtcatcgcgtccgcggcgcgttcgacaccgcatgcgttgcgttctctggagctcgacgacgagcagcgggccgagctggcgatgctggcagggttcgacgacgacctgcagacctcgatcgtgtcggcgaccaaccggctacgtgacctgctcacccagatccaccccgcgctggaacgggcggtgggccccgacctggaacgacccggcgccctggacctgctgatgaagtaccccggccccgaggcgttgtgcctggccggcagaacccgcatccgcaaggtcgtcgccacccgctccccgcggatcgccgaccgactcaccgacgccgtctgcgacgccctgacccgccagaccgtcgtcgtcaccggcaccacggcggccgcccaggtcgtcccccggctcgccgcccagttgtcgatgctgcgcgagcaacgccgccagatcgccgagcaagtcgagaggctggtcgaggcgcaccctctttccccggtcctgacctcgatgcccggcgtcgcggtcaggaccgccacccggatcctcaccgaggtcgtcggcaaggacttccccacccccggacacctggcctcctacgctggcctggccccggtcagccgtcgctccggcagcagcatccgcggcgagcacgccccacgcggcggcaaccggcgcctcaaacgcgccctgttcctcagcgctttcgcgtccctgtccgaccccgcctcacgcgcctactacgaccgcaaacgcgccgaacgcaagacccacaaccaagccctgctagccctcgcccgacgccgctgcgacgtcctctacgccatgctccgcgaccacaccccgtacgaccacgagcacggccatgccgcttgacaacgggataggggca

SEQ ID NO: 5098 - DNA, 1363 bp, unidentified
  source 1..1363: mol_type = unassigned DNA; note = element_7d2ab91
  misc_feature 1..2: note = core
  misc_feature 3..81: note = LE
  misc_feature 82..1098: note = CDS
  misc_feature 1099..1363: note = RE
  misc_feature 1107..1359: note = bridgeRNA
ttaatgagatggtcagcccggttcgagaaactcggggaatctaaactcaccaggtttctctctttcccgaaggaggatctcatgagtactgtgacacttctgggcatcgacatcggcaaaaacaccttccacctacatggccaggacgccagagggaatcagctcttgcgcaagaagctcaatcgtagccaattactgccgtatctggcgcagttgccgagctgcaaaattgccatggagtcctgcggtggttcgcagtggttggctagacagatcgaaggcttaggccaccgcgtgcagctaattgcagcgcagcatgtgaaggcctacgtcaccggcaacaagaatgactttatcgatgcagaggccatctgcgaagccgcatcaaggcccagaacccgctcggttccggtaaagacccttgagcagcagatcctgtcgactgagcacaagctgcgcaagtcttgggtggatagtcgcacgcgaatcatcaaccaggtgcacgcctttctgctggagttcggcatcattttccccgttggccatgctgctctggaacaggtgcccgcgttaatggaacaccatgaactgccgattcgactgcgtaatgcggtggagcgaatgctcctcgatatccaacgcctgacgaaagatatcaaagcaattgatgtcgaattcaaacagcaattgtctgaggacgccgcaggcatgcgcttgctgagcatccccggcatcggccctctcaccgctagcgcgctggtggccgacgtcggtgacgcttcgatttacaaaagctcacgcgactttgccgcgtcactcgggttggtgcctcgacagtattcaaccggcggcaagacgagcttgctcggcatcagcaagcgcggcgacaagtatctgcgctgcctgctggtgcaaggcgctcacgccttgatgatccgaattgacaagcgaaacgatgcccttggggcctgggtaagaaaccttttggcacgcaagcccccaaacaaggtcgcctgtgcgctggccaacaaaatggcaagaatcgtctgggctgtattggcccgaggcgggagctacaacgttcaacacatagcttgatccaaccgagtgactaccggcttttgcgacgacagtgatgatgacgataaacggcagacatcccgactgaaaacctgaaaacctgaaaacctgaaaacgaagatagcttttttgcagctggtgcctttatcaaggacagtggggagcgacttctcatcaagggccgagcgctgatcactgtgctcaccatgaacccgaatacattagcgcaagcatgctttaccgctcatcaaagctgggttgcaggaggtgggctgaccataca

SEQ ID NO: 5099 - DNA, 1386 bp, unidentified
  source 1..1386: mol_type = unassigned DNA; note = element_7d30224
  misc_feature 1..2: note = core
  misc_feature 3..88: note = LE
  misc_feature 89..1117: note = CDS
  misc_feature 1118..1386: note = RE
  misc_feature 1088..1373: note = bridgeRNA
agatggggtggttgccgccctccccagacggcatcgcagtgtgccaggatggtggtgttgaaagccactaagcgaggaggacggcgagatgaaggatacgataatcggggtagacttggcaaaacgtgttttccagctccacggtgcgacgatgacgggccatgtgacgtttcgcaagaagctgacgcgcgatcaatttcggcggttcatggctgagcatccatcctgccttgtcgtttttgaagcctgcggcagcgccagctactgggcgcgccagatggcaaagctcggccatgacgccaagcttattgcgccgcaatacgtccggcctttcgtgaagcggcagaagaatgacgccgccgacgctgaggcgatcgtgatcgccgcgcgccagcccgaaatgcggttcgtcgtccccaagacggaggatcagcaggccagggcgatgctgttccgcggtcgtgagcgcctggtgcatcagcgcaccgaactggtgaacgcgctgcgggcggtactctacgagtatgggcatgtctttcccgccggcatcggccatctcaagcggatcgaggcggtgatcgaggatcccaactgtgacctgccggccctgatcaccgcggaatgtcgcgacttgctggcacagattgcagagaaaacggggcgtatcaccgagcgtaccacgaaactcaaggcgctggccgcccagtcagacagggcgcgccggctccagaccatgccgggtgtcggaccgctgacggccgttgcggtggaagccttcggacccgacatggcgcagtttaaaacgggacgtgactttgcggcctggttgggcttggtgcccaggcaacattcctcaggaggaaaggatcgcctcggccgtgtgaccaaggccggccaggccgatatccgacgcctcctgatcattggcgcaatgtcgcgattgggctggcttgggaggcgcacaattgtagagggcagctggctgtcacgcatgttggcgcgcaagcccaaaatgctggtcgcgatagcgctggctaacaagatggcccgccagatttgggccatgctgacgaagaacgaagattataaggatccggcgctggcaggcgcggcatgatgctcatgtcgacccgttagcgacggtgtcaggggagtgtaagaagacgacgacctgaatgggcaaaacgatcgaacagatcaggatcgggaaaaccagtaagtccctacgagcaacaagctcgtttctcagatatggacccgatccgctgatcaccatcgcggcccgcggcttctggaatgccgcacaacgaggcctgacagaagaccgcactcgatcacacgccaatagggtcagaaacttcttgcatcacgggcggcaaccacaga

SEQ ID NO: 5100 - DNA, 1196 bp, unidentified
  source 1..1196: mol_type = unassigned DNA; note = element_7d3902c
  misc_feature 1..2: note = core
  misc_feature 3..230: note = LE
  misc_feature 231..1193: note = CDS
  misc_feature 1194..1196: note = RE
  misc_feature 29..206: note = bridgeRNA
cttgtatggtttctctgcaggtccaaactggacttgtcagggtggagggggcaagcggcgcttccggccttacggcacggactgtgggagatttctgcccccacccttctcatcaaagcgccgatagagaatccatcggcggagcctgccgctcatgaccgacgaaatgttgcaagccagcgttcgatgagccctgacaagtgaaattaccttagcttggagggtgaaacatggcaaagcccattgagccaatcaggatcggtatcgatgtcagcaaggccgagctggtcattgcccgcagtgactcgaagagtctggagaagattgccaacacgccacgagccatcagccgctggctgaagacgctgccttgcgggaccccgctagcgttcgaggccacaggcgcctaccaccgcaccttggcgtcactggcgcatcaggctggctttgcgctctatctactcgatggttatcggctcaatcggtatcgcgatggcattggcaaccgcgccaagaccgacccggctgatgcccggttgatcctgcgctacctgagcaaggagctgagcgagctcaagccctgggtgccacctcacgaggcgttctatcgcatccagagcctgctgcgacgccgggcttcgcttgtgcacacccgcgtggccctgacccagagcctgggcgatgtacctgagctcaagaacgcatccaagcgcctgagcaacaacatcaaggacatcgagcgattgatcgagcgacgcctcaaagaggccatggctgaagtgggctggcggccggatgcccagcgctgcaaggctatagagggcatcggcgatctcacctcggtagcgctggccaacaccttccaccgaggcgaattcaagagcagtgatgccttcattgcctacctgggtatggacgtcagggtacgagattcaggcaagcaggttggccgccggaagctgaccaagaaaggggatccagaactgcgacgcctcttgtataacgccgcgatgtcggctcgtcgaacaaaggcttgggctggtcagtatgaaacctatctcagccagggactgaagacgacccaggccttggttaagctcgccagaaagctggcccgaattgccttcgccttgatgaaaaaccaatcaacgtatcgaccgaaagtgccggttacctgttgtgctgtgccatagaat

SEQ ID NO: 5101 - DNA, 1625 bp, unidentified
  source 1..1625: mol_type = unassigned DNA; note = element_7d39af0
  misc_feature 1: note = core
  misc_feature 2..434: note = LE
  misc_feature 435..1508: note = CDS
  misc_feature 1509..1625: note = RE
  misc_feature 12..289: note = bridgeRNA
cctgttactatatatttggttgatggcacggcatccagccgtgccattttccgtttcattgccaaagctggcacaataaggggcaactgggtttgacgggagtatccaaggactttgcatccgtatgcaagtcggtcagccatcctcttattgacagcgttcgatttatgcaggtttgctaccaattttggtacgttcgtgtcaaaggacagatagaatacgcaatgagaaaagatggcactatcccaagttgtagaggagaaaagtttatgaatgtagtcggcattgatgtttccaagggtaagagcaccgtggcggtactccgcccatttggagaattggtagcaaagccctttaatgtatctcacacctccaccgaactgagccgtttggcagacaaactcaaaagcttggagggctaaacgagagttgttatggaacatacgggaagatattatgagccaatcgctcagcaactccatgatgcaggaatatttgtcagtgccgtaaaccctttgctcattaaggaatacggtggtaacaccttgcgaaaaatcaagacagataaggcagattcgctcaaaattgctcgctatggtcttgacaactggtgcgatttgcgaaagcatagtaatatggatacgataagatatcagcttaaaagctgctacaggcagtattgtctgtacaccaagaacaagactacctttaagaacaatctcatcggcttgctcgaccaaacctatccgaattccaacacctactttgaaagtcctgcacgtaatgatggaagtcagaagtgggtagattttgtctgcactttttggcacgtagactgcgtaagaaagcttagtcaaaccgcctttgtggagaaatatcgcaagttgtgcaaaaagcatggctacaattttaaagaatctaaggctgtggaaatctatacagagtccaaggaactactacccatgctcccaaaggatgctattgccaaaacccttgtgcaagaggcggtcacgcaattaaattctatgtcaaaaactgtggaaatcttgcgtatgcagatgaatgagcttgccaagcaactgcctgaatacaatgctgtaatgagtttttacggcgtaggagagtcattgggacctcagattatggcagaggtcggagatgttctccgttttacccacaagagtgctttaaccgcttttgcaggtgttgatcctgggtcaaatcagtctgggaccaaggaaagcaagagcaactcatcttccaagcgaggatcacctgagctgaggaaatctctatttgttctcatgacaatcctgctccaaagtgcgccgtacgatgaccctgtgtttcaatttttggataagaaacgtgcggagggcaaaccctactacgtctatatgaccgctggctgcaataagtttctgcgtatctactacggcagagtaaaagagttcttgaacgcattggacatacctgttgatatggactcaactgatcatttccgataataaaacttccccctctctcggtcagagcttcggcggtggccttttggtttttctctttttctgcaatggggaatcttactatttttctaaatttagggttgactttttatttgaagg

SEQ ID NO: 5102 - DNA, 1414 bp, unidentified
  source 1..1414: mol_type = unassigned DNA; note = element_7d455d0
  misc_feature 1..3: note = core
  misc_feature 4..118: note = LE
  misc_feature 119..1153: note = CDS
  misc_feature 1154..1414: note = RE
  misc_feature 1185..1373: note = bridgeRNA
agatggggtattcggccggtcggcttgcccttcgtgggggtgaagggtgctgcgcttcaggttgatggtagacgtggtctgtgttgagcagccacaagcatcatgggaggagcgcagcatgaaacactatgccggattggacgtgtcggtcaaagaaacgtccatatgcatcgtcgacgaggcgggcaggagttgccgtgaaatgaaggtgataagtcaccccgaagaccttctcgctgttctttgcgatcccgcatggcggcttgaacgtgtcggtctcgaggctggacctctgtcgcagtggctgttccgtggattggcggaagcaggagtcccggcgatctgcatcgaaacgcgacacgcgaaggcgtttctcaaggcgcaggtcaacaaaagcgatcgcaacgacgcgcgcgggatcgcgcagatgatgcgagtcggcttattccaacccgtgcacgtcaagacgcttgcaagccagaaacgaagggcgctcctcgccgctcgaaagatactccaggaaaaggctcttgcgatcgcgaacgatatccgtggtttgttgcgcaattttggactgaaagtcggaatcgttggcgttgtcggtttcgagcagcggatccacgacctcgtcgagggagtgccggagttagccgatattatggagcctttgctcgccgcgcgccgggtcttgcgtgaaaagtttgccaagctgcatcgcaaggttctcctgctcgcgcgcgacaatgaagtctgtcagcggttgatgaccatccctggcgtgggtccggtcgtatccttggcctttatcagcacggtcgacgttccagcgcgcttcaggaactcgaaggctgttgggccatccctcgggctgacgccggttctcaatcagtccggcgagagccatcgcgttgggcgaatctcgttatgtggcgacgaggccatgagagcgctgctctatgaggccgcgcaggtcatgctgacccgcgtgcagaaatggtcgtggctgaaggcatgggcgatgaacattgccaagcgtcgggggcagaaaaaagccatcgtcgcactggcacgacggctcgccgtgattatgcatcgcatgtggagtgatggaaccgagttccgctggacaagggaaatggcaccgacaatctgagcgacgaacgccaaactgtcggagcgacaatccagcgcaacgatgtccctcgcgggaggatggatgagacgagttcgctttggactcttgtgtcgatcgctctaccgcgaacagtacgcgagtcagattgttccgtctcttcctgctgatcccatgctgggagagccagcggctgatcccgaagagaagcgcgggcccgcgagcaacaaaaattggagttgttagccggaaagcgcttgaccaccaccgcccgaatagaga

SEQ ID NO: 5103 - DNA, 1572 bp, unidentified
  source 1..1572: mol_type = unassigned DNA; note = element_7d47356
  misc_feature 1..5: note = core
  misc_feature 6..271: note = LE
  misc_feature 272..1543: note = CDS
  misc_feature 1544..1572: note = RE
  misc_feature 11..241: note = bridgeRNA
ctcctatctttaagtcgttgcatctgagagccggataccggatgctttgatgcaatgcagaatctggcgggcagggatgccgtcatggtagctggggcgccgccggcgaccccgtaaaggaggatggcatcctgccccacccgggcttttccgcggattagctggatgaggggccgtcgaaggccacctcggatctcttctaggaggttgcggccccgggtggcctgggcaggcggcccgtccgtcctgcatcggaagggagggcggagagatgatctacgccggtgtggacatcgccaaggtggaccacgtgataggggccgtcgacgagcgcggctccgaggcctgcaggccgatgtccttcaagaacagcgcctcgggcttcgagcggtgcgaggcgtggctggagggggccgccgaggccccgggggacgtcctcgtcggcatggaggccaccgggcactactggatggcgctgtacgccttcctcacgtccaggggctacgcggtggcggtcatagacccgctccaggtgcgcgcggtgcgcgggctcaagggcatgggcggcgtcaagaacgaccgcgtcgacgccggcctcatcgccgaggcgatgcgcataggccagtacgaccccacgcggctcgcgaccgacgacgtcatgtcgctgcgctccctcacgcgctaccaccagtcgctcaaggcggagctcgccgaggtcaagacgcagtgcacgtgcctgctcgactcctacttccccgagttctcgggggtcttctccgacatgttctgcgccgccgggcgcgcggtgctctcgcggagcccgctgccctccgagctctcccgcaggagggccggctccctgcagcgcgacatctccgaggcctcgcgcggcagccgccgcgtggacggcaagggcgccgaggtaaaggggctcgcggcgcgctcggtcgggatcaggctcggcgagggcgcggcgtcgttccaggtcaggtcgctcgtgcggcagatggacttcctcgacgccgagtgcgccggggtcgaggccaaggtcagggagctgctcgagcgggtcgagccgctcgtcctcacgatacccggcgtgtcctacacgaccggggcgcagatcgtcgccgaggtgggcgacgtctcgaggttcaggaacgcctccgccctggtgagctacgcgggcctcaactcgtcggtgcaccagtcgggcatgttcgacagcggcggcgggccgatcaccaagcacggctcgccgtacctccggcgggcgctgtggctggcggcgaaccaggcgcgccagtgcgacccctccctgcgaggcttctacgagcggaagcgcgccgaggggaagtgccaccgcgtggcggtgacggcggtcgccaggaagctgtgccacatagtcttcgccgtgatgcgcgaccaggccccgtacgacccggagaggccggggagggaccaatcaaagcactcggtatccggttctcaaggtacagcgaaatccaaaactgaaacgaaaactgaagctggaaaaagctaaccgatatgtcttgacttcatatagctggt

SEQ ID NO: 5104 - DNA, 1358 bp, unidentified
  source 1..1358: mol_type = unassigned DNA; note = element_7d49f5e
  misc_feature 1..2: note = core
  misc_feature 3..78: note = LE
  misc_feature 79..1101: note = CDS
  misc_feature 1102..1358: note = RE
  misc_feature 1081..1345: note = bridgeRNA
cgatggggtggacacccctccgacggcataagtgtgccaaactggagaggtactcaccaagctgagtaggagattttcatgaagcaggttttcataatcgggatagatttggcaaagaacacatttcaggttcatggcgcaacgaaagctggcaaccgcatcttcaacaagaaggtaacacgtgccaagctgatttcttttctcacagagatccccaactgcatagttgcaatggaagcctgtgccagttcgcattattgggggcgcagaattgaggcgctcgggcataccatcaagctgatcccacctgcttacgtcaaaccatatgtcaagcggcagaaaaatgacgccaatgatgccgaagcgatcgcagaggcggcctctcgtcccacaatgcgctttgttgcggtaaagagtgttgaaaaacaggcttctggaatggctctccgcaccagagatttgctcatacggcagaagacgcagacaattaatgccttacgtgggcatttagccgaatatggaattatagccccttgcggaacggtttatctcaatcgcctgcaagaagccgtaaatgacccggaaacagagttacctgatgccgtaattgccaatgctcagatacttcttgatcacattgcgtctttagcaggtcagattagccaattggaaaaggatattcgtgaggcggcaaggcaagatgagcgcgcaaggaaactgatgagcgttcctggaattggtccgatcaccgccgtagctctaaccgcccttgcacctgacccggcaagctttcgcaaaggtagagatttcgccgcttggacgggtttgacgccaaaacaatattcatcgggaggaaaggaacgcatcggtcatacctcgaaaatggggcaacgcgacttgaggcggcttctcatcattggagcggcgtcagttgttaggtgggctatacggcgtggttccgatcaaggtggctggctcgggcaaatgttggcgcgcaagccaagaatgctggtaaccgtcgcattagccaacaaaatggcccgggttgcatgggccttgatgtctaagaacgagaaatataaggatcccgcgatggtataatccatctttattgccatagcgaggcatgtaggaagggcgtaggtaagtaaggacaaacgatcaacgagacagggttgggagaaccagacacaggccgtgcgccgcagagcgcgcgtatccgaattggacccgacccgcgtatctccatacgggcccgtggcgtgttgatgccacatctggaggccgaacacacgacagcacctgatccttgttcatattgaccaaaaacttcttgcattttccggggtgtccacaca

SEQ ID NO: 5105 - DNA, 1430 bp, unidentified
  source 1..1430: mol_type = unassigned DNA; note = element_7d4cd7b
  misc_feature 1: note = core
  misc_feature 2..131: note = LE
  misc_feature 132..1151: note = CDS
  misc_feature 1152..1430: note = RE
  misc_feature 1189..1429: note = bridgeRNA
atgatatgaacgcctcccacccgtgagcggtggaaggggagcaggaaggtggaccctcacgggccgacggcatcaaagtgcccaagatggaagatcatgaaggtcttcacaggcaaaccggagggtccaatatgaagcttacgacagtgggtgtggacattgcaaagaacgtgatgcagctccattacatcgacgccgagacgggcgaaatcgtgaacaaacccgtaaagcgtgcagcgtttcttgaacatttctcgaaccggtcgccgtgtctcattgggatggaggcgtgtggtggttcacagcactgggcccgcaagcttatcgtgatgggccaccaggtgaagctgatgccggggaagttcgtcaaggcgttcgtgatgggtaacaagaatgacgcggctgatgcgcgtgcgatctggatggcggcgcagcagccgggcaagtcggttgcggtgaagacggaaacacagcaggcggtgctggggttgcatcggatgcgcgaacagctggtgaagttccgcacgatgcagatcaacagcctgcgcggcctgctaaccgaatacggtgaagtgatgggcaaggggcgagctgcgctggacaaggcgattcccgccgtgctcgaacagctagttgatcgtttgccgaagatcctgatcgacacgttacgtgagcagtggaacggtctgacggagctggacaagcagatcgccgaaatcgaacggcgcctacaggcatggatgaaagaggacaaggcgtgcaaggcaatcgctgcgataccgggtgtcggtctactgacggcgaccgcggcgatcgcgacgatgggggatgcgaagacgttccgatccggacgtgagttcgcagcctggatcgggcttgtcccaagacaaacgggttcgggcggcaagattcagttgctgggtatcagtaagcgaggcgatacgtatctgcgcaagctgctgatccacggcgcgcgcagcgtcttgttccacgcgaaggagccagggccgtggcttgagcagatcaggacgcggcggccgatgaatgtggcgatcgtagcgcaggccaacaagatggctcggacgatctgggcaatcctggcgcatgacaggccgtatgaaaaagggtacgtgagcgtgaagccggcttgaatggcagacggcgcgtaggaagatcaacttttacaggatgacacgtcgaaaggttgcgctggcaatcgtgagtaatgacaagacaggtcggaccgggactcgctaaacctgaatgattggttgagcttcgagctcgccagggaaatgaggtgcgggtcagcggatttcatggtgggccgcagcgtatcaggctgcaacaagcccggatataaagctgcaacccatcctgtcgtagtcggaacacacgaaaaaccgtcgcaaacgggaggcgttcatata

SEQ ID NO: 5106 - DNA, 1373 bp, unidentified
  source 1..1373: mol_type = unassigned DNA; note = element_7d55079
  misc_feature 1..3: note = core
  misc_feature 4..81: note = LE
  misc_feature 82..954: note = CDS
  misc_feature 955..1373: note = RE
  misc_feature 1085..1360: note = bridgeRNA
tgatggtgtggataccccctgccaacggcatctcaatgtgccaaggtgatgttgggtaacgtcacttgagaggagatatccatgggagagattagcattatcggtctggatcttgcaaagcaggtttttcaggttcatggcgcacgcgttgacggcagcgttgttctgcgtaagaaactaacacgcggacaacttttagtatttttttcaaagctgccaccgtgcatcgtggccatggaagcttgtgcaaccgcccattactgggcacgcgagatcggtgagtttggtcatgagatccggctggtcccacccgcctatgtaaagccctttgtgaagcggcagaaaaatgacgttgctgacgcggaggctatcgctgaggctgcaacgcgaccgacgatgcgtttcgttgaacccaagacacctgaacagcaagcacgcgcaatggtcttccggacacgcgagttatttgtccgtcaacgaacccaaacgataaatgccttacgggcacatctggctgaacacggccttatcgcgccgaaaggtttgtggaatctttcaagcatccggcaacttattgaccaggcagaagacacggtagatgggctgatagtggaaacggcacgcatttaccttgagcagattgagacattttcgacgcggattctatctctcgaagctgtcctaaagaaagaagccgcacggtctgacgcttcatcgcgtatgatgaccatacccggtctagggcctatcacggctatggccattgaagcattcgcccccacgctgagtgtcttcaagcgcagtagggattttgcttgcatggttgggtcttgtgccgcgccaacattcgagtggcggaaagcagattttgggacgtacatcgaaaatggggcagcgcgatattcggcgtttgctcataatcggtgccatgtcgataatacgctgggcaagtaaaaaggcgccaatacatggaacgtggcttcatgcgatgcttttacgtaaacctagaatggtcgttgccatagctttggcaaacaagatggcccgcagcctttgggcaatgcagacaaagagggaagattatagagatccgctactgactgtcgcgtaagttaaatcggcaagttagagcggaacgacggcgtgtgaggaggtcaacggatagtaaggacaatgatcggcaaacggttctggaaacgcatccgggtcaatgggcttagagcccgtagaagtgattttgcaccagaaccgctaagctccataccggccagcggctatgtgaatgccgcaaaacaggcctgatacatgaccgcacccgatcgcacgtctaaattatccaaattccaacttgcacaaatgggggtatccataca

SEQ ID NO: 5107 - DNA, 1621 bp, unidentified
  source 1..1621: mol_type = unassigned DNA; note = element_7d65c68
  misc_feature 1..2: note = core
  misc_feature 3..252: note = LE
  misc_feature 253..1488: note = CDS
  misc_feature 1489..1621: note = RE
  misc_feature 7..223: note = bridgeRNA
ttcgtattataaggtcagccagatatttctggttgaccattttttatatggttttattattacggtagccggggtagaacgtaattccgcttgggaggaggatcccgttaaataaactgttcaccccctacttgcttaaacatgatttggctggttgggacaacgatcccgtataacaagcgaagctatgaaactgcaagatggactaggggttgccggcaaatttagatattaattggaggagataaaaaaatgaatcctgttgttggactggatgtggccaaaggggaaagccaggtacaagccttcctagaaaagaaaaatccttataaaacaagctttaaaatacttcatactctagaaggattggaaatgttgagtaagtttcttatagaaatagaaaatcttacggggatgaaaccacccattgtactggagtctacagggcattatcatataccggtcgtccagtattttgaggaaagaggctacctgcttattatcgtaaacccattagtttcttatcgggcaaaaagctcttccttgaggaaggtcaaaacagacataatcgatgctaagcatctctgcgagctcttttataaagaggatctggagccttataaaaagcgtgggattcagattttgaaccttcgcaaccttacgaggcagaacgaaagcatgacaggtatgtatgtacaaacaaagcttcaatttcaggcagtgcttgatcaggtatttccagaatacgaaaatgtttttggtgacatgtattcagttgtttctctattaattttattggaatttccaacatcaaaagaggtattggaagttgaagaagaaaccttagccaaccggataaatgaactttgtagaagccgttcaagtaattgggcacggacacaggcaaagaagcttatcgaggcagccggtaggaatccatttaaggaagtattgtatcaaagccatattgtcagtctgaaaatgcatataaatatgcttctggtgtaccaaaagcacctatcaacactagaagcagagatagatgctttggctaaagaaatggaagaatataaaatccttcaatcaatccctggaataggtcaaaagatcgctgcaacgatcatttcggaaatcggagagattgaacggttttaccaccctaaaaaacttgttgcatttgccggtattgacccaagtatctttgagtctgggagattcaaagggacagtgaaccggattacaaaaagaggttcaagcaggctaagacacgctttatatatggccgtgcaatgtgccatccgtgattcccggaagaagaaaatgaccccggaaagcatcccatgtaatagaaaaatgcgggagtactacgataagaaacgtgatgaaggaaagccatacaaggtagccataattgcatgtgcaaataagcttttacattggatttatgcactcttaaaaagcaattcaaccttccaagatatagtataaattgcaaagctatctaaataaactaaaaccttccaaaattgttctaatggaaggttatttggcttgcttatttttagaataccacacaataaaaaattatttaaatgaaaaatgttgacaaactattagctgg

SEQ ID NO: 5108 - DNA, 1512 bp, unidentified
  source 1..1512: mol_type = unassigned DNA; note = element_7d67056
  misc_feature 1..2: note = core
  misc_feature 3..251: note = LE
  misc_feature 252..1478: note = CDS
  misc_feature 1479..1512: note = RE
  misc_feature 47..226: note = bridgeRNA
cttatattaactctgttgaaggttgtcttgtaggagatcatctttgtggtaccgattgcaacaagcttgctggtatgaggaccgtggtggcccgatccctgtttgtgaggatcaccttgagactgtcccgaccagtaaaagaacggagctaaaggttcaatagaaagttgtcccattgaggaccgatataaggcgaacattccgttcacagttgttggaattggaactacacaacgaaggagggagagaaagtgaagcgatactatgtgggagtggactgggcagaccgagtgcaccagttctacgtgggtgatgagaacggggagaaggtagcggagatgaaggtcgaagagacccctgaagggatggcggagttggggcgctggcttgatgagagaagagctgaagggagcgagctttgggctgggatcgagaaaccccatgggtggattgtggattttcttctggaccacggggtcgtggtttacccgatcaatcccaaggccgtggatcgggctagggatcggtttcgaatgagccaatcgaagagcgactcctttgacgcccgcgtgctctcggaatttgtcaggaccgatcacgctcacttgagaccccttcagccgaattccgagcaggcccaggagcttaagatgctcagccgcgatcagcagagaatggtgcggcaaaaaactcggctcctccatcagcttaaggtgaccctcaaagagtactatcctcggcccttggaggtttttgccgatctggaatctaggctggcagtagattttctcaagcactatccgaccccagccgccctctctgagcttagccacaagcagtggaaccgattcgctaagcttaagcaccatctcggtgaagcacgtagtcgaaagctgtgggaggagcttaaaaagcctcaacttatggttccccaacacgtggtccgagccaaggcgcagttggtcgaggtgctgctcgatcaactggaggcttcgctcagagcggcagagaagtacaacgagaaggttgaatgttttttcgcctctatgccggcagctgagcttgttaagaagctgccgggagcaaagagtggaaccatcgtaccgatgatttgggctgagcttggggatgctccagggcgatgggaatcttttcggcaccttcaggctgaggcgggagtggtcccggtgaccaaagcgagcggcaagagccgggtcgtacagtttcgtttttcctgtaacaagcaactgcgccacgccgcgtactggttttcgtttgtctccctcaaccgcagtgagtgggcgaaccgatactatcgggatcaacgggctaaaggacacaaccatcatcaggcgctccgggctctgggagcaaagtggctcaagattatctttgtcatgtggagagatcgtaaaccttacgatgaaaactatcacttggcgaacattgcccgtcaaaggatgcgccaagcggcttagaaaagcagggggcttgacaagcgtcatagaaagt

SEQ ID NO: 5109 - DNA, 1542 bp, unidentified
  source 1..1542: mol_type = unassigned DNA; note = element_7d69558
  misc_feature 1..2: note = core
  misc_feature 3..239: note = LE
  misc_feature 240..1421: note = CDS
  misc_feature 1422..1542: note = RE
  misc_feature 3..218: note = bridgeRNA
cttgtattatagagtagtagttattagagtccctctccaaggactgtgctacactgtaagggatgctgtggattggttatgttctcctaccgcaagacggttcttgaaaggctccaaccacagtcctttacagtattgttaatcagttagataccgccagacggtttatgtagaacaaggttacaagagtaaagcgtcctgtggacccagcatcaaataaacataccggaggtaccatcatgatttgcgtgggaattgacgttgccaaggacaagtacgattgctttatcctcagctcagaaggcgaagtccttgcagatgtatttaccatcccaaacaacgcagagggctttgacacgctgctgcaaaccattcgccgctgtgctcgtccggaagacaaaataaaagtagggcttgaggctaccggacattacagctacaacatcctcggatttttgcttaacgaaggtctggacacctacgtcatcaatccgctgcacaccaacctctaccggaaaagcctgagccttcgcaaaaccaagacagaccgtgtcgatgcgcgaaccattgcagctatgctcatgtctgatgtggacctcaagtcctacacagacacagcataccacaatgaggaactaaaatcactcacaagataccgatttgacaaagttcgtgagcgagcgaagctgaagcagtcggtttcccgtctggtcacgattcttttcccagagctggaaaagctggtgccctctctacatttggcctctgtttacgcacttctcatcgagtttcccggcgccaagcaagtcgccggagcgcacttgacgcatctaaaagcaattctgagcgatgcctccaaaggccgctacgggcgagacatggcggtaacacttcgggatgctgccagatgttctgtcggctctgtcatgccggccaagtctctggaattgcagcatacgatccgcctgatccgcaaactcgatgccgagattgaggatattgagactgctatccagtccatgatggacgaaatgcagtcccccattacaacgattccgggcattggcgttcgtatgggtgctatgatccttgccgagatcggtgacttctctcgcttcaactcaccggataagatcctcgcatacgccgggatgtcgccatcaacttaccagtctgggcagctttcattgtctggaccctactcacacatggagaaacgaggctctcgctacctgcgctatgcactttacaacgctaccaaatatgtttgtctttgggatccggcctttgctgcttacctcgctaagaagcggggcgagggaaagcactacaatgttgcactctctcacgcggcaaagaagttggttcggttaatctgcgctttggagaagtcccagcagtcatatcgtaacgctgcgtaaatccattcttctatatgctcagttaggcgtccgacaagatgcctgctttgctatgccctttttgagccgtctacgttttcaccactcctccgcattttgggcttgacttttaatagttagt

SEQ ID NO: 5110 - DNA, 1170 bp, unidentified
  source 1..1170: mol_type = unassigned DNA; note = element_7d78ae3
  misc_feature 1..2: note = core
  misc_feature 3..210: note = LE
  misc_feature 211..1164: note = CDS
  misc_feature 1165..1170: note = RE
  misc_feature 19..216: note = bridgeRNA
cttgtaatagcgacttggattattgtcggcctgttccgaaaggaatggcctgccgcggacagccctccgtggcaggccgctggcgatcggatcgatgcgccctgagccgccgcctggctgccccgtagcgtgatcgtcgtcagcaccttcatcggacccggatggttgccggaacaacctggttcgcttcacaaggcagggtcgacgaagatgacgcaggctatcacgacgacggctggaatcgatacgtccaaactcaagctcgacattgcgctccatggccgcgccgaacgttggcaggtccccaatgcgttgccgggctggcgtcagctcgccgccaacctcgcccgtgccggcgcaacacgcgttggcatcgaggcgagcggcggttacgaacgcggtgtggtggagcatctgcgggcggtgggcttcaccgtcctcgtgctgcagccgattcaggtcaaggcctatgcgcggatgcatctgcgccgggcgaagaatgacgcgcttgatgcggctctcatcgcggcctgtgcggcggccgtcgagcagccgaggattgcgcccgatcctcggctggtggaattggcgggccatatgaccttcctcgagcagatcgaggaggacatcgcgcgcttcaagatccggctcgagcatatcgatgaaccgcgactgcgacggctcgtcaccaatgacattgtgcggctcaaggcacggcgggctgcccagatgcttctcatcgaaagacagcttcgcgctcaccacgatctcgcccggcgcctcgatctcgtgctcagcattcccggcctcgccgtgagaaccgtgcttgccatcatcatccggatgcccgaactcggacaggtcagccgcgaacaggttgcagctctcgccggattggccccattcgacgacgacagcggcaagtccaagcgccagcgccacatcgccggcggacgggcgcgcctgcggcgctccctctacgccgcagcgctccccgccgccttccgatggaacaaggcgctgatcggcctctatgcgcgcctcacggccagcggcaaatcccacaaggtcgccctggttgcctgcgccagaaagctgctgatctatgccaataccgtcgtccagcgcggcacaccgtggatcgaacgaacggtcgcgacttaatggttg

SEQ ID NO: 5111 - DNA, 1415 bp, unidentified
  source 1..1415: mol_type = unassigned DNA; note = element_7d7f033
  misc_feature 1: note = core
  misc_feature 2..96: note = LE
  misc_feature 97..1140: note = CDS
  misc_feature 1141..1415: note = RE
  misc_feature 1177..1407: note = bridgeRNA
caatgggatggactcctcctcgccttaacaacccggcgtcgaggcgccagaatggtggtgcgaacccgccattcacctagacgaggagaggcccacatgcagattacccgagtcggtgtcgacatcgccaagtccgtgttccacgtccacgcggtagaccgtcatgacgctcgccagtgggagaagaagctcaagcgcgaggagtggatcgccgccctcgtcgagcgcgtcccgaccgaggcgacggtcgccatggaagcctgtgcatcggcccaccactgggctcgcgagcttcagcgccgcggctaccgcgtgcggctgatcgccgcgcagttcgtcaagccctacgtcaagagcaacaagaacgatcgggtcgacgccgaggcgatctgcgaggcggccgggcgaccgtcgatgcgcttcgtcgccgtcaagagcatcgcgcagcaggacgcgcaggccattcaccgcatccgctccgagctgatcaagcaacgaaccgctctcgccaaccagatccgcggcctcgtcggcgaatacggcatcgtcgcgccggtcggcatcgttcagctgcgccgcgccgtcccctgctggctcgaggatgccgagaacggcctgagcgagagctttcgcgttcagctggctcgactgcgcgaggatctgcagcgcctcgacgagcgcgtcggagagcaggatgaacgtatcgcacgccaggcgaaggaggacccggtcgcgcagcgactgctcacgctgcgtggcgtaggaccgctgaccgcgacggcactggccggagcgctgggcgatgggcgggccttcggtaaggggcgtgacttcgccgcctcgctggggctgacgccgcgacagcacagtaccggcggaaaggagcggttgctgggcatcagcaagcgaggagacccctacctccgcaagctcctcgtgcacggagcacgagcggtcatccggcatgcaacgcatcgcgatgacgggctgagccgctgggtgaacgggctcgtcgcccgaaagcacgtcaacgtcgccacggtggcgctggcgaacaagacggcgcgcatggcgtgggcgatcgctcacggcaacgtcgactacgatccgacgctcgccacggcggctcagaccgcctgacgagtcggcagtaccgcagtacctgcagagaaccagtccaccacgattgcaaagcacagcgcttgatggcgaacaggtcgaaccggcgccggaagatcccgtttgaacgacgagcctcggagctcgtgtaagcgatagggagccggcgcgcgaatagcccatcagggtccgatgcctcacgtgaacggcatcaacaatgagaccggatacacgtaggcagtcgtactctggtcgtcgcgaagcgaagtgcttgcaaaagaggaggagtccataca

SEQ ID NO: 5112 - DNA, 1610 bp, unidentified
  source 1..1610: mol_type = unassigned DNA; note = element_7d846d9
  misc_feature 1..2: note = core
  misc_feature 3..290: note = LE
  misc_feature 291..1466: note = CDS
  misc_feature 1467..1610: note = RE
  misc_feature 51..264: note = bridgeRNA
ctcgtattatatagtagtagtttttagagaccctctccaaggtctttattatttatttcatagtctgtctttaccttttctacaggtatgactatgatattcattgatactgtggtttgttttgacactcctaccattcgatggtttcagaaaggctacaaccacagtctctttgttcagttgttaatcagttagataccgcatgacggtttatttagaacgaggttacaatcgcaaagagaacctgtggttctaaaacagtatcaaatatattttcaaggagatatgctatgatttacgtaggaattgatgtcgctaaagataagcatgattgctttattatcaactctgatggaaaagtgctttttaaagcatttaccatttcaaacaatcttgatgggtttgacgagctttatcaaaaaattctatccgttacagataacttttcaaatgtaaaagtaggactcgaagccaccggacactatagttacaatcttttgggctttcttattgataaaggcttccctacctatattatcaatccgttacataccaatctgtacagaaaaagtcttagccttagacagacgaaaacggataaagttgatgcccatacaattgcttctatgatgatgtctgatgttaacttaaagtcctacacagacatatcttatcacaacgaagagctaaagtcactaactcgttatcgttttgataaagtaaaagaacgggcaaagctcaaacaatccgtttccagactggtctgtatcctcttccccgaattagaaaagctggtcccgacccttcatatggcatccgtctatgctatgctttctgaatttcccggggcaaagcaaatatcaaatgctcatctgacaagactgtcaaatcttttatctcaagcctcaaaaggtcgttacggaaaagaaactgccatagctttcagagaagctgccagaagttcgattgggtcaaatatgccggcaaaatcacttgaattaaagcatactatcaaacttattcaagaattaaatcttgaaatagatgagatagaaacagaaatcaagagaattatggatgaaatcaattctcccattctaagcattcccggaattaattatcgcatgggtgctatgataatcgctgagattggtgatttcagcagattcaattctcctgataaaatacttgcttattctggtttgtcaccatctacttaccaatctggaaaacttgaatcatcccattcccatatggaaaagagaggttccagatacttacgatatgctttattcaatgccactaaacttgtatgcaaatgggatccgacatttgcccaatatctggctaagaaacgctctgaaggcaaacattataatgttgccatatcccatgctgccaggaagttagttcgagttatataccagcttgaaaagtccgggcagcgatacatcaaagcctcgtaattagttataaccatatctcctttttttgagcaccgatatcgatgctctatttgtcatgcagttttcaaggtactgatatttgtaaaaccatatacccttacgttataaaaaaatccattttagacttgacttttaatagttagt

SEQ ID NO: 5113 - DNA, 1217 bp, unidentified
  source 1..1217: mol_type = unassigned DNA; note = element_7d8a59c
  misc_feature 1..2: note = core
  misc_feature 3..73: note = LE
  misc_feature 74..964: note = CDS
  misc_feature 965..1217: note = RE
  misc_feature 984..1214: note = bridgeRNA
ttaatgagatggtcagcccgatccccacgaagcggtacgctgagtggggattgttctttctgggagacctctcatgaacaccgtcacgctgattggtatcgatctgggcaagcatagcttccatctgcacgggcaggatgagggtcaccaggccaagctgatctcgccccagtttgtgcgcccctttgtgcagggcaacaagaacgacttcgccgatgcgcaggcgatctgcgaagccgcctcgcgtccaagcatgcggttcgtgagcgttcgcaacgaggcccagcagaccgtctcggcgctgcaccgtgtacgggagtcgctggtacgcgagcgcacgggcgtgatcaaccagcttcacgcctttttgctggagttcggcatcagccgaccccgtggccaggcaatcatccggcgcctgccggcggtgctggccgagcatgagctgccgccccggttggtggcactgcttgaacggctgcaaacccatttcaagtatctggacgagcaaatcgcccagatcgagcgcgagttgtgccagcaactgcgcgaggatgaacgcagccagcggctgctggagatccccggcatcgggccgatcacggcgagcgtgctgatgacagaactaggcgatgcgcagcaattcggttcggcacgccagttcgccgcctcggtaggcctggtgccacggcagtacagcacgggcggcaagcccacgctgctgggcattagcaaacgcggcgacaaaaacctcaggcggctgctggtgcagggtgcacgagcgatcatgcaacgcgtcgagcagcgcacggaccggctgggcatctgggtgcgcgagctgctggcaaggcgccactcgaacctggtggcctgtgcgctggccaataaattggcgaggatagcctgggccatcctcgccaacggaacgaactaccgaagtcagcaggctgtagcagcagcctgagcttcatcaccgttttacgctgtcacttcctggttttgcgacgcgagtacgtgaagacataaacggctcaacggcctggcaaaaaacctggcaaagaatccagcacctagatgctgagggcttttttgaggtttgccgggcgcgactctcatcatggagcgggggacctgtccccaaccgactccgaatagatttgagcaagcccaatttacgccaacacgaacttgcttgcaaaaatcgggctgaccataga

SEQ ID NO: 5114 - DNA, 1614 bp, unidentified
  source 1..1614: mol_type = unassigned DNA; note = element_7d8f69d
  misc_feature 1..3: note = core
  misc_feature 4..276: note = LE
  misc_feature 277..1485: note = CDS
  misc_feature 1486..1614: note = RE
  misc_feature 13..296: note = bridgeRNA
tctattacaatatatttggacaggaagccgggcagccagtccggcttccttccatctcatgcctaagctataataagaggaacaactggctgacctgtcaagacttgggcgtttgtgtccgttaacaagactgtccgccatcctcttattgtagtgttcggtttaagcaggttgagctaccgtaataccgggatgttcgtgtcacccaatagattgaatcggcgatgagaaaaagatggattccagttgcacaattatctattgggaggtatgcagatgaattgtgtcggtattgatgtatccaaagggaagagcatgattgcggtcatgcgcccctttggagaagttgtactcacaccctttgaagtacagcacaccgccagtgagctgagtgaattggtaaaagcactcaaaagcttggtcggtgaaacccgtgtcgtcatggaagctacgggtaattaccatgcgcctattgcgcttgcgctccaaagtgccggattttatatttccattgtcaatgcaatactggtacatgactatggtaacaatagcttgagacgagccaagaccgataagaaggatgccattaaactggcaaactacggtctggatcattggcttacattgcccagatatgttccagatgaggatacccggatgatgttgaaaacctgttaccgtcaatatcagcaatattcaaaagtacagacaaccatcaaaaacaacctcatttcgctcttggataccacattcccaggcattaaccgcttgttcagtagtcccattcgagcggatggcagggaaaaatggctggactttgtagaaactttctggcattgcgagtgtgttagcaaggtatcagaaaacatgttctctgtaaaataccaaaaatggtgtcagcgaaatggttacaatttcagccagaccaaggcacacgaacttcattccttcgctcggagctgcatcacctcattacccaaaagtgaaactaccaaactgctggtaaaacaagctattgttcagttgcaggcaacatcttcagccctagctgcgttgaagcaggaaatgaacgtcctggctgagcaactaccggaataccctgttgtcatggggatgtttggcgtcggccctgcgcttggtccacagctcatagctgagattggtgatgtccgccggttccattctaagaaagccttggttgcttttgccggaatcgatgcgccaccatatcaatccggccaaatggatgtccgtagtcgcagtatctcaaagagagggtcctctgcactgcggagaacactgtttttggtcatgtgcgtatatctccagcagtctcctgaccaagaaccgatctacaaattcatggacaagaaaagagccgagggaaagccgtacagagtctatatgatggcttctgccaacaagttccttcgggtctactatgctaccgtaaaagctcatctggatgctttgaacaaaacgtagcagacaatatcgcgttacggtcagccgccattcaaaaaggacgcggagcggcttggttaaagtgcgcctattctaaaatagaatttctttcaatttctgcaaaattaggacttgatttttattagcagg

SEQ ID NO: 5115 - DNA, 1380 bp, unidentified
  source 1..1380: mol_type = unassigned DNA; note = element_7d8f85a
  misc_feature 1..2: note = core
  misc_feature 3..88: note = LE
  misc_feature 89..1117: note = CDS
  misc_feature 1118..1380: note = RE
  misc_feature 1091..1366: note = bridgeRNA
agatggggcggatgccagccttctccgacggcctcgcaatgtgccaagttcgtggtgctacagccacgcaaaggagaggaaagcatccatggaagaagttaccatcattggagtcgacctggcaaagaacgtcttccaactgcacggggcggcagccgatggatctgttgtgtttcgcaagaaactgatgcgcgcgcagttcggtacgtttatgacggatcatccagcctgtattgtggcgatggaggcttgtggcagcgaccaccactgggctcgcgaaatggctaggcttggccctcagccgaaactgctcgccccaggctatgtcaaaccgttcatcaagcgccataagaacgacgcagcggacgcggaggcgatcgtcgaggcagcacaacggccgacgatgcgctctgtcgaacctaagagcgaggagcagcagtgccgcgccatcgtgttccgcacccgggaacaattggtcaatcagcgcaccgaactggtcaacgcattgcgcgcgcacctttatgagtttggatatgttgctccgcaaggcatcggccacctacgacgcctggcagagatcatccaggaccagaacgcgaaattgccagatctggtacgtgaaatatgcgacgatttgctggaccggatcgcccacctgactggccggatcgaggcactgaagaagacgatcaacgcgctgtccaaggaagcgcaaaggccgcgacgtttgcagaccatgcccggtgtcgggccgatcgccgcccttgctgtcgaaacctttgcgccgccaatggagaccttcaagtgtggccgcgacttctccgcctggctcgggctggtcccgctgcagaagtccaccgggggcaagcaacgattggggaagagctcgaagatgggccaacgtgatattcggcggttgctcatccttggtgccatggctgtggtgcaatgggcctcccggaagggtgtgcccaacggctcttggcttgcccgcatgatggcaaagaagccacgcatactggtggctatcgcgctggccaacaagatggcgcgaggaatctgggcgatgctaacgaaacaagaggattaccggaatccggcgatggtacctgcatgaacactcatctgcgcacctgaagccggtacgtcggagatgtgaggaaggcaagaaccgcgtgggcaaatgatcgatcagatcgggaaaaccagtgtttgaacgggagctgtacaagctcgccaagcagatttggacctgatccgcgcatcaccataccggccccgcggcatgtgaacggccgcacctgagacaggcctgatccgcactcgatcacacgcccaaaagttcaatgctctccttgcaaaacggctggcatccacaca

SEQ ID NO: 5116 - DNA, 1518 bp, unidentified
  source 1..1518: mol_type = unassigned DNA; note = element_7d8fbc0
  misc_feature 1..2: note = core
  misc_feature 3..250: note = LE
  misc_feature 251..1477: note = CDS
  misc_feature 1478..1518: note = RE
  misc_feature 44..224: note = bridgeRNA
cttatattaactccgtaggacgattttgttacagatggttgttgcataccgattcaagagcttgctggactgaggaccatcagagcctaatcccttaagaggatctagggcagactgtcccgaccagcgagagaacggagctagaagttcaatagaaagttgtccctttgttgaggaccgatataaggcgaacttttccgttcaccgctgttggaattggcaagaggtaacgaaggaggagaaccagaaagtgaagcgatactatttgggagtggattgggcggatgagtttcatcaggtttgggtcagcgatccagaaggcaaaaagatagccgagatgaaggtggtgcagagtacggccggcctgggcgagttggggcgctggctccatgagcgtaaggcagaagagatagagctgtgggcggctatcgagaagccgcacgggcggattgtggattttcttctggatcacggagcggtggtctatccggtcaatcccaaagcgttggatcgggctagggatcggtttcgcatgagccagtcgaagagcgacttgtttgatgcttatgtgttggcggaatttgtgagaaccgatcatgtgcatctcagggctcttgagcccaattccgagccggctcaggaacttaagatgctgactcgggatcacgacaggctgacgcgccagaaaacgcgtctcctcaatcagatcgagatcaccctcaaagaatactatcctcggccgctggaggttttttctgatctggagacccacatagcgcgggattttctcaaggagtatccaaccccgcaggctctctctaagcttaaccgcaggcgatggaatcactttgccaggcgcgaccatcatctcagcgaggcgcgctgtgacgagctttgggagaagatcgataaacctcagctgaccagtcccccctacgtgattagagccaaagctaaacttctgctggcgctggtggttcagcttgaggccttgctgccagcggtggaaagctacagcgaggagatcaaacgttttttcgactctatgccggcagctgagcttgtaaagagcctgccgggaggaaaaagcgggaccaccataccgaagctttgggctgagttgggcgatgccaagaatcgctggcaatcctttcgccaccttcaggccgaggggggaggggttcccgtaaccaaatcgagtggcaaaagtcatgtcgtacatttccgctttgcctgtaataagtatctgcggcatgcgatctactgggtttcgtttaactctctcaatcgatgtgagtgggcgaacaagtattatcgggatcaacgggctaaaggacacagtcatccccgagcgctcagagctctgggagccaagtggcttaagattatttttgtgatgtggagagaccataagccttatgacgaaaactatcacctggccaacatggctcgacagaggatgcgccaggcgacatgaaagaaacaaaccagggggacttgacaagcgtcatagaaagt

SEQ ID NO: 5117 - DNA, 1535 bp, unidentified
  source 1..1535: mol_type = unassigned DNA; note = element_7db1e68
  misc_feature 1..2: note = core
  misc_feature 3..241: note = LE
  misc_feature 242..1417: note = CDS
  misc_feature 1418..1535: note = RE
  misc_feature 3..219: note = bridgeRNA
cttgtattatagagtagtagtttttagtgtccctctccaaggacctgtgctacactgtaagggatgctgtggattggttagattctcctaccgcaagacggttcacgaaaggctccaaccacagccctttacagtattgttaatcagttagataccgccagacggtttatgtggaacaaggttacaagagtaaagtgttctgtggaaccagcatcaaataaacataccggaggtattcattatgatttgtgtgggtatcgatgtcgccaaggacaagcacgactgcttcatcctcagctcggagggcgaagtcctggcagatgtattcaccatccaaaacaatgcagaaggctttaacttcctgctgcaaaccattcgctgttgcactcgtccgacagacaaaataaaggtaggacttgaggctaccggacattacagctacaacattcttgggtttcttcttgactgtggcctgccaacctacgtcataaacccgttgcacaccaacctataccggaaaagccttagcctgagaaagaccaaaactgaccgtgtcgatgcacgaaccattgcgacaatgctaatgtctgatgtggacctcaagtcctacacggacacatcatatcacaacgaagagctaaagtcactaacaagatacagatttgaaaaagttcgtgagcgagcaaaattaaaaacttctgtttcacgccttgtcacaatcctgttccctgaactggaaaagttagttcctaccatccatttggcatctgtttacacgctcctcagcgagtttccgggtgctcatcagattgctgttgcacacttgactcacttgaaggctatactgtccggcgcatccaaggggcactatgaccgcgataaggccgttgagatccgggatgccgcaaggaattccattggctcccaaatgcctgccaagtctttggagctgaagcatacgatccaacttattcaagtattggatgcagagattgaagagattgaagaagaaatcaattccataatggatgaagtccattctcctattacaaccattccaggtataggcacacgcatgggtgctatgatcctggctgaagtgggcgatttctctaattttgattccgcagataagatcctggcctatgccggtttgtcgccatctacttaccagtcgggccaacttacgaattgctattctcatatggagaaacgaggctccaaatacctgcgctttgccatcttcaatgcgaccaagtatgtctgcctttgggacccaacttttgctgcatatctggccaagaagagggctgagggcaaacattacaatgtcgccatatcccatgcagccaagaagcttgtgcggctgatctacgccatggagaaatctgggcgaccatacagacccgctctgtaactatacctacaatttttctcggagcgccgtcaacgacgctctacttgttatgccgtttctgcggtagaaactttttctgcatcatccttagattggggcttgatttttaatagttagt

SEQ ID NO: 5118 - DNA, 1387 bp, unidentified
  source 1..1387: mol_type = unassigned DNA; note = element_7dbb137
  misc_feature 1: note = core
  misc_feature 2..70: note = LE
  misc_feature 71..1120: note = CDS
  misc_feature 1121..1387: note = RE
  misc_feature 1144..1382: note = bridgeRNA
caatggtatggaccccgccctcgccctaggttgggatgtcgaactgtcacgcgcagaacgggaggcgtccatgcaaatcgtccgtatcggccttgatctggcgaaatatgttttccatcttcacggcgttgacgagcgcggcaaggtcgtgctgcgcaagactctgcgccgcccgagtcttgcgcccttcttcgcaaaccttccgccctgtattgttgggatggaggcctcgaatggcgcgcactattgggccaagactctctccgagctggggcatgacgttcgattgatcagcccgcagttcgtcacgccgtatgtgaagtccaacaagaatgatcggaatgacgctgaggcgatctgcgaggccgtcggccgtccgaacatgcggttcgttgcggtcaaatcttccgaacaattggcaatccaggctgttcacaggattcgcagtcgtttggtcggcaatagggtgaggcttgtgaaccagatccgtgggctgctcggcgagcatggcgtcgtcatcgcgcaggcgatcggtaatctgcggcgcgccttgccgcgcgttgttgacgacgaaagcaacggtctgaccagcattgttcgcgccctgattggcgagctgcgcgaggaattgagcgatcttgatgggcgaattgcgatttacgatcgcaaaatcatggaactgtatcgaacaagtgaagcgtgtcagcgcctcggcgaggtcgagggaattggacctatcaccgcaacggcgctggtcgcggcagccggcgatgggagatgctttaggaatggacggcagttcgctgcatggatcggacttgttccgagacagcgatcgagtggaggtcgatcgcggctactcggcattagcaaacgcggagaccgatatcttcgcaccttacttatccacggcgctcgggccgtaatgggccggatccgaggaaaacaggatccaaggagtctctggctactcaaagtgcgggagcgccatcacgcaaatgtcgtcgccgtcgcgctcgccaacaagaacgcacggattgcgtggagcttgctcgcacgcggcctgaactatgatcagcgtcaaactgtcagctcggcctcagcaccgcgcgcggtctgacgcaacaaaaggagatcccctccagcaattgcaacgataggcagcagatggcgaaacggtcactccgtcgcttcccgaacctggtgtgtggaccggcatggcgagagccaatgccttgggggcattgagggggaagcgcgcgaaaatccatcgaggctcgcggcaaggaacattttcaggccgcatcacgaagccggatatacgtcagcagttgtgaccgagaaccagaacctgtcaaagccgttgcaatcgggcggggtccatata

SEQ ID NO: 5119 - DNA, 1213 bp, unidentified
  source 1..1213: mol_type = unassigned DNA; note = element_7dbce82
  misc_feature 1..2: note = core
  misc_feature 3..214: note = LE
  misc_feature 215..1210: note = CDS
  misc_feature 1211..1213: note = RE
  misc_feature 30..191: note = bridgeRNA
tcctttagatttgtagaaaaatatatcttagaaaagagagagcatttaattaaactagaagatccttccgaataaaattcatatcctgataaagaattaaatgccctttattcatcaaaacttaaatagaaatttgggatttaaagcccattagtaaggtattaagtaaagatgaatattctcttctctgattgtaaaagtataaatcaaaagtatggaaaaaattgtaataggtattgacatcagctcaaaaactttggacatctgcatcaaaaagtctggtcattattcttttgaaattattgataatgaggtgaaatctatcagtaattttctaaaaaaagttggaaaatcgtcctctgaaattatcatttctatggaaaatacaggaagatacaattggaatctttatgaggttttagaaactttgagtttcaaaatttttgtacttaatccattacatttgaaaaaaagtttaggcctcattaggggaaaagatgataaaattgatgccaaaaggatttgtgattttacagagaaaaatgaaaaagaattaatccaatggaagccctgttccgagactttgaaaaagataaaactcttatttacagaaagaaattcaaaagtaaaactgaaagcttctttattaaaacaaaggattctttattctcaattaaaaggattgaaactggattctaagtttatgaaaatgaataaaaaagaagttgaacttttggaagagcatattgattttcttgaaaaagaaatagaaagactgatcgaaacggacgaagatttatctttaaagaaaaataatattcgaagtattccgggagtaggaaaggttttaagctggatgattattgctaaaacagaaggttttaccaaggtaacagatcccagaaagatggcttgttatgcaggagttgccccttttggttatcaatccggaacctctctgcgatacagaccaaaagtctcccactatgcagataaatctctaaaaacgatattgcatatggcagcaatgagagctgtaagaatggagaacgatttaaaagaatactaccaaagaaaaataaaagaggggaaaaataaaatggcaattttgaatgccgtaagaaataaaattattcacaggattttcgcgattgtaaaaaatggaaaatcctatgaaaaaaattatttaaataacttgattttgtcatagaaa

SEQ ID NO: 5120 - DNA, 1367 bp, unidentified
  source 1..1367: mol_type = unassigned DNA; note = element_7dc5747
  misc_feature 1..2: note = core
  misc_feature 3..77: note = LE
  misc_feature 78..1103: note = CDS
  misc_feature 1104..1367: note = RE
  misc_feature 1134..1364: note = bridgeRNA
ttaatgagatggtcagcctgaccgaaacagcccgatcggcttacgctgatcgggctgtttcctttttggagatcgtcatggacaccatctcattgatcggaatcgatctgggcaagcattgcttccatttgcatgcacaggacgcatcgggccgcatggtgttgcgcaagaagctttcgcgcacccagatgttcacgctgctcggcaatcttccgggctgtacggccgtcatgaaagcgtgtgcgggcgctcactgggtcgcgcgccgcatccaggcactggggcaccaggccaagctgatctctccgcaatacgtcaaacctttcctgcagggtaacaagaacgatttcgccgatgcgcaagcaatctgcgaggccgcgtcgcgcccgagcatgcggttcgtcactccacgcaacgaggtacagcagacgatctcggcgctgcatcgcgtacgtgaggcgctggtacgtgagcgtaccggcacggtcaaccagattcatgccttcctgctggagttcggcgtgagcctgcccaaggggatggccgtgatccgccggctaccgggtgtgctggtcgcgcatgatctgccgccgcggctagtcgcgctgctcgagcgtctgcaggcccatttcaagtacctcgatgagcaaatcggcgagatcgagggcgatctgatatgccagcttaaggaagatgaacgcagccagcgcctgctggagattcccggcatcggtccgatcacggccagcgtgctggccaccgaattgggcgatgcccgacagttcgcttgcgcgcgccagtttgcggcgtccatcggactggtcccgcgccaatacagcacgggcggcaagccaacgctactgggaatcagcaagcgcggcgacaagaatttgaggcgactgctggtgcagtgcgcgcgagccgtcatgctgcaaatcgagcggcgcaccgatcgcctgggcgcctgggtccgcgatctgctggcccgacggcattccaacgtggtggcctgcgcgttggccaataaattggcgaggatcgcctgggccatcctcgccaaaggcacgcactaccaaggcgcacaggctgtagcagcagcctgacgccgcgtcgcttatatcgtctgctgtaccaggtcactccccggttttgcgacgcgagatacgtgaagacataaacggctcaacggccgggcaagcaacctgacaaagcaaatagcgcttcgatgctgcgggctttttgaggtttgtccggcgcagctctcatcatggggcgggaacctgttcccacaacgaccccggatagatttgcgcatgcccaatttacgtcaacaccgactcgcttgcaaaagtcaggctgaccataga

SEQ ID NO: 5121 - DNA, 1521 bp, unidentified
  source 1..1521: mol_type = unassigned DNA; note = element_7dce3aa
  misc_feature 1..2: note = core
  misc_feature 3..237: note = LE
  misc_feature 238..1404: note = CDS
  misc_feature 1405..1521: note = RE
  misc_feature 3..220: note = bridgeRNA
cttgtataatgaacatgtagtcgttctacaggttcaacttaaatttatattataataaacatagtgttgtggattggttgttcctcctatagcaatgactatttttttaaggctccaaccacatatctatgtttttttgtttattagttagataacactcgatgttttatctcgtgcaaggatacatgacatagaattatgtggaatcacaacaacttttaataaggatgtgtttttatgatctatatcggtatcgatgttgcaaaagacaaacatgattgttttattgtaaattcagacggtgaagtcataaaggatgtttttaccatcaaaaataacattaaaggcttcaaaactcttcttaatgccattcctatatcttcaaaagaagatataaaaatagggcttgaagccactggtcattacagcattaatctcatcagatttctaagtgataatcagttacccctgattatatttaatccacttcagactaatctcttcagaaaagctcatacgcttagaaagactaagactgacaaaactgatgcaaagcttattgctttaatgctaagttctagtgacttaaaaccccatttaaatatatcatatcatcttaatgaacttaagtcactaacaagacatagatctagaatcaaagagcaatcttctaagcttaaaatatctctttcaaggattattgacattatgtttccagaattaccatctgtagtctattccataaaccaaaagtctacttatgcacttcttaaaaagtttacatctacagacgctattgctaatgctcatttaactaaacttaccactgtattacgcaattcttctaagggcaagtatggtaaagaaaaagctacagagatacgagatgctgcaaggaattctattggcactaatagccctgcattaagctttgaactatctcaaactctcagactgattaccttattagcatcagaaattaagaccatagaagatgaaatcaaagctttaatgaacaagatacaaagtcctatcctatcagtccctggtatttctcacacattgggttctattattattgctgaaattggagatataaatcgatttgatactccttcacaactcttagcctatgcaggtcttgatccttcaacctatgaatctggtaaatttaaagctactaacactcgtatggtaaagcgtggatctccatacctccgttgggctctgttagaagcagctagactcatttctatgagagataaaacttttaaagattactatcataaaaagaaatctgaaggaaaacattactttgtcgcaagatcacatgtagccaagaaactcgttagagttttgtttcacttattaaccaataataaagagtttgtagctcaaagctagataaagtccatagcattttttattgaagtagataactacttctttttgtgatgcttaattttattacaaatcttctaaataataattttaatttttacttgacttcatatagttagt

SEQ ID NO: 5122 - DNA, 1598 bp, unidentified
  source 1..1598: mol_type = unassigned DNA; note = element_7dd77c2
  misc_feature 1..2: note = core
  misc_feature 3..266: note = LE
  misc_feature 267..1475: note = CDS
  misc_feature 1476..1598: note = RE
  misc_feature 12..286: note = bridgeRNA
ctattacaatatgtttggatgtggaagccgggcaaccagtccggcttccttccatctcgtgcctaagctataataagaggagcaactggctgaccaatgtctacttgggctttttatgcccgctattcagactgttaggcatcctcctattgcagcgttcgatttgagcaggttgagccttagagttcgtgtcacccaatagattgaatcggcaatgagaaaaagatggatcccggttgcggattaattgtattggaggaatgcagatgaactctgtcggtattgatgtctcgaaaggaaagagcacgattgccgtcatgcgctccttaggagagattgttctctcaccctttgatgtttctcacacgtccggtgagctgagcgctctgacaaagcagctcaaaagcccggacggtgaaacccgtgtcgtcatggaagccacaggcaactaccacttacccatagcaatggcactccatgaggcggaaatctatgtttctgtagtcaatgcaatgctgatacataactacgggaacaacactttacgaaaaaccaagactgacaggaaggatgccatcaagcttgcaaattacggtatcgacagttggctgaaactgccgagatttattccggaggatgaggtcagatcactcttgaaaagctgctaccgtcagtaccggcaatattcaaaggttcagacgatgctgaaaaataatttgatctccctgcttgatacggtatttccggatgtaaaccgcctattttcaagccccgcaagagctgacggcagcgagaaatgggtagatttcgtcgaaaccttttggcactgcaaatgtgtctgcgggatttctcagaccgcatttgaaaagaaataccgcaaatggtgccaaaagcttcattacaatttcagcacagagaaggctattgacatttaccgttctgcctgcggtcacattggggtattcccgaaaaacgaatcgagacatgttctcgtaaaacagacagtttctcagctcaaagctacttcttctgcattggcagagctcaggaaagaaatgcttcgtctagccgagactcttccggaatatcccgtcgtaacgcaaatgttcggtgttggccctgcgctgggaccacagcttcttgccgagatcggtgatgtccgccgattctattccaagaaagctttggtagcctttgccgggcttgatgctccggcaaacgattccggtcagatcgtggacaaccacaggagcatgagcaagattggatccgctgcactacgcagaacgttgtttcttatcatgagtgtttatctccagcaggcacctgataatgaaccggtataccggttcatggacaaaaaacgggcagaaggaaagccgtacagagtctacatgatggcttccgcaaataagttcctgcgcatctattacgcctctgtgaaagcttacctcgacgctttggacgcggcataatcccacacatatattactggctggctgccgtttcaagaaagagacgctgagcggcgtgaattcgtgcaccttttttactctggcaaaatttttgaaatttctacttgactttttttagcaggt

SEQ ID NO: 5123 - DNA, 1462 bp, unidentified
  source 1..1462: mol_type = unassigned DNA; note = element_7dd8802
  misc_feature 1..3: note = core
  misc_feature 4..226: note = LE
  misc_feature 227..1441: note = CDS
  misc_feature 1442..1462: note = RE
  misc_feature 6..223: note = bridgeRNA
ctaatgggagtggaaggttgcttgattttgcgagaaacttttcaccgagctgctgattggtgaacactagtacgtccaaagccttgagcttcaagcctagagcgtgtcccggtcggtcggcgaggttgacggagaaggctggaggggtgtcgtgccaggagcactaatccattaggtcgccgccgttgcctcgaggctcgttccaactagcaacggaggtgaataaatgattttcgtcggagtggattgggccgagtcccaccacgacatctgtgttcttgacgaagcgggcgacatccttggacgacgcaggatcgaggacacacttgaaggtgtgcggttgttgcacgaattgttggcgccacacgcccaagagccggacgaagtaatcgtgggcattgaaaaggatcggggtctcatcgtgaccgccatgctgggtgcgaactatcgcgtctacgcactgaacccgatgtcggtcgcgcgctatcgcgagcgtcacgtcacctcgggttcgaagtccgatcctggcgacgccaaggttttggccgacctcgtgcgcaccgatcgtcacaaccatcgcgaggtggcgggtgattcagaagatgccgacgcgatcaaggtgttggcccgcgcccaccagaacgccatttgggctcgtcaacgtgagaagaacgccttgcgcaacgctctgaaggattattaccccggggccctcaacgcctttgggactgatctcgacgacggcgacgccgttgaaattttggccatcgctccgacgccatcgctcgctcgagcgctctcactgtccaagatcacgtcggcgtttcgccgcggtggccgccagcgcaacatagaacgtacggccacgaagatccaacaggcgctgcgcgaagaacagttgcgcgaacgacctcgggtagaagcagccttcggcaagataacgagcgcccacgtggccatgattcgtgcttacagcgacacgatcaacgaactcgagcgagcgctcaccgaggattttgaacagcacccggacgcgaagatcatcctctccctgccaggactcgggatggtcctcggcgcccgggtgctgggcgagttcggggacgacccgaaccgctacgccgatgccaagtctcgcaggaattacgctggcacgtcgccggtgaccaaagcatcaggtaaagccagagtcgtgctcgcgcgtcactcacgcaacaagcgtctcgcgagcgccgcggaccagtgggcattttgctcgctcacgaaatcacccggcgcgcgtgcctactacgacgaattacgagcgaggaacaagacgcaccgtcaagccatacgacaactcgccaatcgatgggtcggcatctttcacgcctgcctggaacaaaatgttctttacgacgagcaacttgcgtggaaacaccgacttgaaatcgccgcttgacaacttacggtcaaggggtgt

SEQ ID NO: 5124 - DNA, 1382 bp, unidentified
  source 1..1382: mol_type = unassigned DNA; note = element_7ddb49a
  misc_feature 1..2: note = core
  misc_feature 3..128: note = LE
  misc_feature 129..1151: note = CDS
  misc_feature 1152..1382: note = RE
  misc_feature 1164..1349: note = bridgeRNA
acatggggtaatcgccggagcggcgccctgagagccaaaatcatgttcctgaagggtggctgttccccgataagatgaaatacgggctcacgactggacgccgggcccagcatcaacggagaacagccatgacagaatatatcggtctcgacgtgtcgatgaaagagacggcagtgtcgatccgacgtgaaggcgaacggatctggcgcggaaagtgcgcatctgatcccaccatcattgccgagcttgtccgcaagcgggcgcctggcgcaaagcgcattgtattcgaaaccggccctctgtcggtgtggttctatcattctctgcgcagcgcggggttgccagcagtctgcatcgatgctcgccatgccaaagcggcgcttgatatggcggcaaacaagacggatgcgaatgacgccgatggtttggcgcatcttgctgaagctgggttctttcgcgaggtgcgcgtgaaaggcttcgacagtatgttgacccgcacgctcgtggcagcacgcacccgactggaccggatcaccgtcgatctttccaaccagatccgcgggatcatgaaaacgttcggcctgctcgtcccagcgggtaagggaaccacgtttgagaagaacgttcggggccttcttgtcgatcacaaggaacttgctcctatcgtattaccgatgctggaggcctggcgcggcattcgcattcgcgccgccgagctcgggcgacaactggttgcggatgctcgtcaaagccaagcctgccgcgccctcatgtcgatccccggcatcggcgtgatcaccgcaacctctttcgtcagcgccattgaggatccaaacaacttcaagaagtcccgctctgtcgccgcttggatcgacctgacaacccgccgataccaatcgggagaaatcgattatgacggccatatatcccggcgcggggatcgacatctgcgggggcttctctacgaagccgcggcggtcatcctgacacgctgttcgaccgaaagcagcctgcgtacatggggcctcaagctccgggagaggatcggcttcaaacgagccgccgtggccgtggcgcgcaaattggcgatcatgcacacgatgctcaagactggcgagctcttcaatccgagtgcaggagccgcggcgtaaatccagatagcgttcagaatctgagcgcctgaggcgtccctgccgggacgtgagccgagccattccgttgatggggttgcactgctgtctcagcaaagtgcgtcgtccacattgaaggctcgtcccgcgaagctccatcatgcggcggccgatgtcgcgcgaagacaaccatgcacccggcagcgccgtatcagcgcgatagatgcttgacgcccaagccgcgattagaca

SEQ ID NO: 5125 - DNA, 1275 bp, unidentified
  source 1..1275: mol_type = unassigned DNA; note = element_7dea2b2
  misc_feature 1..2: note = core
  misc_feature 3..190: note = LE
  misc_feature 191..1159: note = CDS
  misc_feature 1160..1275: note = RE
  misc_feature 28..195: note = bridgeRNA
cttgtgtacggaaaatggcggagagtatgcgaacgggcggctgtagacgcagccgcccgtcgctgggtctgagcccgtgtcctccgaaggtgaaccctgagggagagcgagggacaggcccggtgtcttcctcaacccgaacagttgcatgggcgtgagagcccggacgagcaaggaagggagatggaggatgccacaagagggcaggattgtcggcctcgacgtttccaagctgaaggtggacggctgcattcggtcggtcggccttcggcggtcggagcggagcacccctgaaggccaggcagagatgctgtcgtggttgaaggcgaatgacgttcggcttgcggtgatggaggcgagcggcggctacgagcggagctgggcaaaggctcttcaggacggcggcatggcggttcggatcgttgatccgaagcgggtccgtcattttgccaaatcggcgggccggctcgccaagaacgacccgatcgatgcggagatgatcgcgtggtttgccgagacgttccccgatgcgccgagtcaagcgcaagacgtcgagcgtgaggagctggcggggctggttaaagcgcgcctcgcgctgctgcagatcaagaccgagctcggtaaccaggcggaacaccagcagccgcgctctgtggtgaaggcttttgccgcggtaacacgcagtgtcgatgcgcagctcgccaggctcgaggccgcgattgcggccaaaattgccgcgaaggagcggttcgcggcacgcgccgagatcatcgaaagcgttcctggcctcgcgacgcaaagtgctgcgggtctgatcgcttggatgccggagctcggcttgatcgacgacaaagcggccagcgccctgattggggtggcgccctatgacgacgacagcggcaagcatcgcggcgagcggcacatcaagggaggccgacaggcgctgcgcaccttgctctacatgccggtcgtcggcgccgccacccaccacaatccggttctcaaggcctactatcagcggctgcgcgcgaagggaaaggagggcaaggttgcgatcatcgcctgcatgcgcaagctcatcgtcatcctcaacgccatgctcgcccgcggcgaaaagtgggaccccgcccgcggtcgacgcagcgcggcgaccgcatgaaagccacacggctcggcgcgcgggcggggtcaaggccgaagccgccggaggcgggggcgcgcagcgccagccttgagcccggccgagcgccgagctacctctccacatcacagttg

SEQ ID NO: 5126 - DNA, 1414 bp, unidentified
  source 1..1414: mol_type = unassigned DNA; note = element_7dea59b
  misc_feature 1..3: note = core
  misc_feature 4..116: note = LE
  misc_feature 117..1154: note = CDS
  misc_feature 1155..1414: note = RE
  misc_feature 1171..1371: note = bridgeRNA
agatggggtattcggcctgttgctgagccccgcgttagcagggtgctgcgcttcaggttgatgataaacgtggtctgttttcgaacagccacaagcatcagacggagaagcgcagcatgaaacattacgctggactggacgtgtcggtcaaagagacgtccctgtgcattgtcgacgaaacgggccgcatttgccgggaagcgaagttggtgagtcacccggacgatcttcttgctgcactcaacgatccgatttggcggtttgatcggattgggctcgaggctggaccgctgtcgcaatggctgttcagcgggctggcggaggctggcctgccggtaatctgcatcgagacgcgacatgccaaggcgttcctcaaggcgcaggtgaacaagagcgaccgcaatgatgcgcgtggcattgcgcagatgatgcgcgtcggcttgttccggcctgtccacgtcaagaccctgatcagccaaaagcgacgggtcctgcttgccggtcgcaagctgcttcaggagaaggccattgccatcgagaatgacattcgtgggctgttacgcaacttcggcttgaaggtcggaattgtgggggtgatcggctttgaacaacgtatccacgaactcgtcggcggtcagccggagctggccgaactcatggaaccgcttctcgtcgcccgacgcgttttacgcgaacagttcacacaactgcatcgcaaagtgcttctacttgcccgggaaagcgaggtctgtcgtcggttgatgacgatccctggtgtcggccccgtcacgtcgctggcctttatcagcacgatcgacgttcccgcccgcttcaagagttcgaaagccgtcgggccgtcccttggattgacgccagttctcaaccagtccggcgaaagccaccgcatcggccggatttcgctgtgcggtgatgaagccatgcgagcgctactctatgaggccgcacaggtcatgctgacgcgggtgcagaaatggtcctggctcaaggcgtgggccatgcagatcgccaaacgacgcgggcagcagaaggcgatcgtcgctttggcgcggcggctcgccgtcatcatgcaccgcatgtggagcgacggaacggaattccgctggacacgggaggccacgcccgcggcacaatagtgcgacgcgcggtccacgcacccgttgtttagcgggaggaggtccctcgcgggacgatggacgagatgagttcgctttgggctcttgtacggtcgcgtccttgcgatcagcacgcgagtcagattgttccgtctcgttctactgatcccatgctgggagagccatacggctgatcccgaagagaagcacggccccgcgagcggtaccgaacccaaggaggcacccaatcaagcccttgactaaatccggccgaatagaga

SEQ ID NO: 5127 - DNA, 1421 bp, unidentified
  source 1..1421: mol_type = unassigned DNA; note = element_7deb680
  misc_feature 1..3: note = core
  misc_feature 4..204: note = LE
  misc_feature 205..1407: note = CDS
  misc_feature 1408..1421: note = RE
  misc_feature 13..176: note = bridgeRNA
ctccgtaagttgttcggtggcccgggagggccggatgtggcttcaaagcagcttgccgaccgtggcttggctggagtggccgtccggcccttcggggcgccctggtcgctgattgaaatgcgtggaatgcgtcgctgtttacggagctgacgacggggtgtcctacgggcccgatggcaggaaactcggctgcgggagggacacgtgagcaaacagcgggcccggatatgggtcggtatcgacgcgggcaagggccatcactgggctgcggtggtcgacgagaccggcgcaaccttgcggtcgaagaagatcgagaatgatgagtcggcgatcctgaccgcgctcggcgagatcctggacctggccgatgaggtgcactgggcggtggacatctccagcaggtcctccaccctgttgctcgcgttgctggcagcccacggacagcaggccgtctacgtgcctggccgcacggtcaaccgcatggccggcgcttaccggggcgaggccaagacggatgcccgcgacgcctacgtcattgccgaaaccgcccgccaccgccgggacttcgccaccctcgacgtgcccgcgcagttggccgccgacctcgcgctcctgactgcccaccgaaccgacctgatcaccgaccgggtgcggatggtcaatcggcttcgcgacgtgctcaccggcatgttccccgccctggagcgggccttcgactactcggcccgcaagggcgcgctggtgctgctgaccggctacccgacgtcagccgccctccggcgacgcggcttgtcccgcctgacggcctggctcgtcaatcgaggcgtccgcaacgcggacagcgttgccgccacggccgtggaagcggcccaggcccagcagaccgcactgcccggcgaggacgccgccgcgcagatcgtcgccgacctggcaacacagatcctggccctggacgaccggctcaagcgcctcgaccggcggatccgcgacactttccgcacccacccacaggccgagatcatcgagtccctgcccggcatgggctccatcctcggagctgagttcgtcgtcgctgcgggcgatttgaccgcctataccgacgccggccatctggcctcagcagccggactcgtaccggtcccacgcgattccggccgccgcaccggcaacctgcaccggcccaagcgctacagccgccgtctgcgcagggtcttctacctgtccgcgcagaccagcatcatccgcgacggccccaaccgggagtactacctcaaaaagcgcggagagggctgcaaacacgtccaggccatcatcgccctcgcacgacgacggaccagtgtcctctgggctctgctacgcgacaaccggaccttcacccccgtcccgcccaccgcgcaggcggcttgactccgtcactgaaa

SEQ ID NO: 5128 - DNA, 1485 bp, unidentified
  source 1..1485: mol_type = unassigned DNA; note = element_7deddeb
  misc_feature 1..2: note = core
  misc_feature 3..97: note = LE
  misc_feature 98..1180: note = CDS
  misc_feature 1181..1485: note = RE
  misc_feature 1190..1457: note = bridgeRNA
agaccgtatggggggctggggcctccgctcacatgtgaacgtgggttgccgacagggtggtcctggtcggtagagccacaagatgtgggaggccccagtgaaggttcagcgtacgagtgttggcctggatgtgcacgcacgttcggtggttgggtgtggtttggatggggacactggtgagctgtttcagcagcggttgtgtccggatcatcgggaagtcctggaatggatccatgggttgccggctccggtggcggtcacctatgaggcgggtccgaccgggttcgggctggcgcgggcgttgatcgctgccggtgttgattgtcgggtggccgcgccgtcgaaactgcaacgcccgactggggatcgggtcaaaaccgatgcccgtgatgctgcacatctggcccggttgctgcacttaggccagatcgtggaggtgacgatcccgacggtgtctcaggaggcggcccgggatctggtgcgcgctcgcgaggactgccgcggggatctgatgggggcacggcatcggatatcgaaactgcttttacgccaagggatcgtctactgcggtgggcaagcctggacgggaaagcacgagctgtggttgcgggcgcagcggttcgacacagcggggttgcagctggcctacgacaccgcgttcgacgcgatggtttgctgtgtgcaccgccgggatcgtctcgatgaagccatcgtcgggttggccgctgacagcgagttcaccccgatggtgcgccggctgggatgtttgcgtggagtctcgacgctgaccgcgttcggattggccgtggagatcggtgactggggcaggttgaccgggcgttcgatcggcgcctatctggggttggtgcctaccgagtcctcctcgggggccacccgcgcccagggtgggctgaccaagaccggcaacacccatgcccggcgtctgctcatcgaggccgcctggcatcaccgcgccccgtatcggcccagccgtgatttgcggcgccgctgggatgccgccaccgcggctgcgcgtgcccgcgggcatgccgccaatcaccgcctgcacacccgctgggtcggcttcgatgcccgcaagaaacgtccagtggtcgccaacgctgcgatcgcccgcgagctggccggctggtgctggtcactggccatcctcgacggctaacacccaccacaactgtccggatgggttcacctggtgtcggcaagcgtctcggagtgatccgcgtcagttctatgagcaatcacattgccccgcaatggatcacgctcgatctctagaccagcggtcaactccggctcgaaagttccgtcctagcggtaaccaacccgcgcatatcagacttgacaacgcgtcgacaacgacacgctcgacacccgctacacctcatccggtcaagaagcggcggccacgacgacgattgcggccgccgcttcaccctgcggccttgacaaaacgccccccatatc

SEQ ID NO: 5129 - DNA, 1340 bp, unidentified
  source 1..1340: mol_type = unassigned DNA; note = element_7df6f66
  misc_feature 1..2: note = core
  misc_feature 3..76: note = LE
  misc_feature 77..1096: note = CDS
  misc_feature 1097..1340: note = RE
  misc_feature 1075..1327: note = bridgeRNA
tgttgaggtggacggcccaacggcatcgaaatgtgccaaagttgagttgttcacaatcaacgaaagggccgcccagatgaagtttaaacgcattgcgattgatacgtccaagcatgttttcacgcttcacggcgtggatgaacatgacaagccgctgctccggcgggaactcaagcggaatcaaatggtgccgtttttcagtaagttggcacccacggaagtggtgcttgaggcttgcggcgggtctcaccattggggccacgtgctgcgggaactggggcacaatgtgcgtttgataccgccgcaatatgtcaaaccctttgtcaagcgcagcaagaatgaccgcaacgacgccgaggccatcaacgaggcggcggctcgtcctttgatgcgttcggtggcgatcaaaaccatcgatcagcaagcccaaggcatcgtccttaagcaccgcgaaatgctggtaaatcagcgcacccagacgatcaacgcgctccgcggccatgctgcagaattcggggtggtggccgccaagggcactgccaaagtgacagctctgttggagctgttgaccgctgaaaatggcattccggccgttgccgttgggatgttcgcgcagatgggcgcacacattgaaagcctggatgagcgtattgcagctttggacatggaattggcagagctgcataagaaggattctctctgccgggcgctgagcgagatccccggcgttggccgacttgtggcgaccaccgcaacgcttacggtggacccggcgaaatttgtctctgggcggcattttgctgcctggcttgggcttacacccagggagaaatccaccggcggcaaacagcgcatgggaagcattagcaaggccggcaatgaacgattgcggcaattgctggtggtgggcgcgatgtctgtcgtccgctatgccaagccaggcagcaaatcggcatcgccgtggctgttgaaattgctggagcgcaagccgcgcatgctcgcggcggtggctctggccaacaagatggcccggattatctgggccatgatggcgcacggggaagtctatcggcgtcagccgatggcaaccgcctgatccgtgcgttgatgccgaggggttaagggcaagcagaagatggttatgggtcgaaccggcgagggacaaaatccggttcgcacaacggtcgtcataggccgctatggtgtttggatgtcactcgcggaactcatctgggccagcggtcatcgtgccgcatcaacaggccggacacatgactgcattcgaaccaacgccagactctgctcaaactattccttgaaccctgcgggccgtccacaca

SEQ ID NO: 5130 - DNA, 1417 bp, unidentified
  source 1..1417: mol_type = unassigned DNA; note = element_7df7028
  misc_feature 1: note = core
  misc_feature 2..90: note = LE
  misc_feature 91..1134: note = CDS
  misc_feature 1135..1417: note = RE
  misc_feature 1189..1409: note = bridgeRNA
taatggcatggacgcccctgcttggtacggcatcagttgtgccagagtggaagtgctgatcaaccacttaaaccagcaggagcgtccaggatgaacattacgcaggttgggatcgatttggcaaaaattgtcttccaggtgcacggagtggatgcgcgaggcaaggtcgcattgcgtaagcaattgaagcgaccgcaactgattgcgtttttcagccagttgtcgccgtgcctcattgggatggaagcctgcggtagtgcgcattactgggcgcgcaggctctcggcgctcgggcacacggtaaagctgatcgcgccgcagttcgtaaagccctacgtcaagaccaataaaaatgacgcagcagatggcgaggcgatctgcgaggcggtcggccggccgaacatgcggtttgtgccaatgaagaacaccgaacagcaagcactgctagggctgcatcgcgcgcggcagggatttgtcactgagcgcgccgcgcaagccaacccgatccgcgggttactggccgaatttgggttggtgattcccgtaggcatccgttgcctggcgcgcaagctgcccgagatcctggaggatgccgaaaacggcttattgggggccagtcgtgcgctgtttgctcgattgttcgagcatctccgagcgctcgatcgccaggtggacgagctggagcgagaaatcaatgcctggcaccgcgaggatacggccagtcagcgcctgcaggcgatcccggggatcgggccccttacggcgagtgcgctggtggcaagcgtcggggatgcgaagctcttccacaacggtcgccagtttgctgcttggcttggactcgtgccgcgccagagctgcaccggcggcaagacgaccctgcttggcatcagcaaacgcggcgatatgtacttgcgaactctgttgattcacggggcgcgctcagtgctacggcatctcaagcgtcatcccgatcgggccgacggctggctggcgcgcgtagcggcacggcgcaatccaaatatcgctgccgtcgccctagcgaacaaaaatgctcgcaccgtttgggcgctgctcgcccatggccgcgactaccaggccgagtaccgttcagtgaacgccacggcggcggcataagctcgatattttacataccagtatcggcactcaattcttgacaaaactccctccacggattgcacaggcgttttcaatgtgatggcatcacagataagaccggggttggctcaacctgattgtctcaggggacttcaacagtccgtcaaactgatcaggcgtcaaccagcatattccatcagggcccgcgagctcgtctcgcatacacaggccggatgtatggcagcaatcaactcctgtgaaccaataccgaaacgcttggcaataagggggcgtccatgta

SEQ ID NO: 5131 - DNA, 1457 bp, unidentified
  source 1..1457: mol_type = unassigned DNA; note = element_7e0ad12
  misc_feature 1..3: note = core
  misc_feature 4..137: note = LE
  misc_feature 138..1184: note = CDS
  misc_feature 1185..1457: note = RE
  misc_feature 1216..1453: note = bridgeRNA
agatggcatggacgtctccacctacaccgccaccgccctcgagaacccagtcaccagcaatgtttggggcctcgcggcagaagcagctttgtgccaaagtggaggttcgttgcaaccacttaaccggaggccccgtcatgaaatctaccgcaactctgcccgtaataggtatggatatcgccaagaacgtgtttcagcttcacgttgtggagtcagaaacaggggagattcaaaggtacaaaatcaaacgcgaccgcgttaccgatttctttgcgaatcgacaaagttcaattgttgcaatggaagcctgtggtggtgctcaccactgggccagggtattgcaagcttatgggcatgaggtcaaattgttgcctgctaagcatgtacggcccttcgtccttcgtgacaagactgatgcccgtgatgcccaggccatttgggtggccgcgcagcagttccatatcaagtccgtgcctgtcaagagtgtgcagcaacaggcatgtctggccttgcaccggattcgcgctcagctgatgaagatgcgaatcatgcaaacaaacgctctgcgtggcattctttatgagttcggagtcactctgcctgagggtcatcgcgtcttgctgcaacgcatccagggtgagttggccaaggcgcaagaacatgacgggctgcccagcgtggttgttgccagtgtgcaagagcaattagcacgcattgaaagcttgcaaaatgatatcgaccaactcgacaagcgactgacttcattggttaagcaaaaccagcaaatgctggctttacaggctgtgccgggcattggcccgttaaccgcgacggcgttggttgcaacggccactgatttgtcgagctttgagtcaggcagacaatttgcggcgtggcttgggctgacaccacgacaaaccggaaccggtgggaaaacccgacaattgggactatcaaagcggggtgatgcatatgttcgcaccatgctcatgcatggtgctcgagcagtgatcgcccggagcagccgaagcagttggattgagcgactgttgcagcgtcgaccctacagtgttgtggtcgccgcgttggccaacaagttggcacgaaccgcgtgggcggtcctggccaaaggcaaagcctttgaccaggctaaatggaatcccacagaaatagccgcagcctgataaatgcagattgaataatttgagaacagaaagcccgttttgaaggagagcatgtaagaagcgaagtgatgggtcaacaggtcaaaccggggtagggaaaatccgataaggatgatgggcatagagcccgatattcagactggagccttacccgcgaatgccatcagggccagcaggaatacaaacctgcatctttaacaggccgtatgtaagactgcaaaccctttgaaacttcacgccgctaaatcttgctttcctggagacgtccatgta

SEQ ID NO: 5132 - DNA, 1407 bp, unidentified
  source 1..1407: mol_type = unassigned DNA; note = element_7e0e3fa
  misc_feature 1: note = core
  misc_feature 2..88: note = LE
  misc_feature 89..1114: note = CDS
  misc_feature 1115..1407: note = RE
  misc_feature 1173..1399: note = bridgeRNA
taatggaatggtcgcccctttctaagacggcattggagtgccaaagtggagttggatgacaaccacttaaacgaaaggagcgaccgaattgaagcatacgatgattggcattgacttggcaaaaagcgtcttccagttgcatggggtagacgacaaaggtcatgcggtgatgaagaaacagcttaagcgcgtgcaggtacttccgttctttgccaacctaacaccgtgccgcgttggaatggaagcctgcggtagcgctcattattgggccagaaagcttcaagcgttggggcatacggtgcacttgatcccgccgcagtacgtgaagccgttcgtcaaacgcaacaagaacgacgcagcagacgccgcggcaatctgcgaggctatgatgcgaccgaacatgccgggggtaccggtgaagaacgccgagcagcaagcaatcctgagcgtgcatcgcgcacgacaagggttggtcaaagccaggaccgcacaagctaaccagatccgggggctgctcgccgagtttggcttcatcattccgacaggcattagccatatcccgaaacgggtgcccaagatcgtcgaggatggcgagaacgatctgccaggaagtttccggttgctaatccagcgtctagttgatcaccttaaggagctggacagacaggtcggggagctgggagcggaaattcagcgttggcatcgagagaacaccgtcagtcagaagctggcgaagatacccggcataggcccgatgtcagcaagtgccctggctgcctccgttggagacgccagaaacttcaagaacggccggcagcttgcggcttggttgggcattgtgccccggcagcattcgaccggtggaaagtcgacattactggggatcagcaagcgaggggacacgtatctgcgcacactgctcattcacggcgctcgatccgtcatcagggtggtagagcacaaaccagatgccgatccgtgggtcaagaagcttctggctcggcgcaacaaaaacatcgcggcggtggcgctagccaacaagaatgcaagaacgatctgggcgctcctcgcgcatgaccgggagtatgtggctaactacaagatggcagcatgaacgtctagatcaccgttcaacatagcaaatcgacataactgacttcgaaaggagaaccccaccgattgcacaggcaatcatgacgtgatggcaagataggtcagaccgtggtcgggacaacctgcagttaacacggcgccgaaataagcgcgcgaaagtgtcaaggaaccgaccagcaaattccatcagggacaggggctgcggccctgaacgaaagtccggatctatggctgcaatctccgcctacctgccgtcatcgattgagagcttggcaaaccaggggcgaccatcta

SEQ ID NO: 5133 - DNA, 1385 bp, unidentified
  source 1..1385: mol_type = unassigned DNA; note = element_7e218d2
  misc_feature 1..3: note = core
  misc_feature 4..87: note = LE
  misc_feature 88..1122: note = CDS
  misc_feature 1123..1385: note = RE
  misc_feature 1154..1372: note = bridgeRNA
ggatggggtggatggctcccgcccacggcatcaaagtgccaatatgggagttgttgataacaatcccgagccaaaggagccacccggatgaatattaccactgtcggccttgatctggccaaaaatgtatttcaggtccatggaattgatgacgaaggaaaggtgatcgtctgcaagacactgcgacggcgtcagatgattccgttttttacgaagcttgagccatgtctggttggcattgaagcttgcggtacgagccaccattgggcacgtcaattatcggcgttggggcatgcggtcaagttaatgccaccagtctatgtgaagccttacgtcaaacgtggtaaaaccgatgccgcagacgctgaagctatttgcgaggcggtacagcggcctacgatgcggtttgtcgcgatcaagtcacccgaacagcaatctgttttatttctgcatcgaacccgcgacctgatgatcaggcagcgtactcaggtgatcaatatgatccgcgcccagttggctgaattcggcatcacgctggccaaaggaattcagcatatccttaagattattccgcaacttgttgacggaaaggtgccggatgttcctgcattagcaattaaaattctgtccactcttgcgacacaggtggaagacctacaggtcttgatatgcagcttggacaaggaactgaaggtatggttccaaggcagtagggtcgcaaggcgtctcgagacgattccaggcataggattgattacggcgaccgccctcgccgcaacagttgctgacccgcatcagtttacctctggccggcaattttcagcatggatcggactcacgcctaaatcaaatagcagcggcggcaaagaacgtctcggacatatctccaaaatgggcgaccaataccttcgccgcctgctggtcaacggcatgacatcgcagcttcgttggatacgaagtaatccgggcagtcatcgttgggcggccaacctactgaccaaaaaaacacccaagctcgttgccgtcgcgatggcaaataaagcagcgcgcatcgcctgggctgtcatggtccgtgatgagatatatcgcaaacctcaaatgacgacaggggaattcgtatgaaccgcgaatattgaggacgactgaaacgattttgagaatgtgaggacgatgtgatgtgatggcgaaccggttaggccgggaatagggaaaacctgatcgatgtccaggacgtaattgtccgtaaagcggaataggaccttattcgtggaaaccatcaaggccagcggtaataaacaccgcgcaaacaggccggacacaagactgtacctaacgaccacgccgaaacagaacaaaacccttgcaaacagggagccatccacaca

SEQ ID NO: 5134 - DNA, 1221 bp, unidentified
  source 1..1221: mol_type = unassigned DNA; note = element_7e21908
  misc_feature 1..2: note = core
  misc_feature 3..219: note = LE
  misc_feature 220..1137: note = CDS
  misc_feature 1138..1221: note = RE
  misc_feature 12..191: note = bridgeRNA
cttgtatctttatccaggtcgtgattagctatcatgacctgaggcagaatgagcttgtaaccgcccttaaggttcgaccttgtgctgtagatcaagccttctgtctcgctcctgatgccaactcagacactgaacggtagccaagggcgttgaccctgtatgcacaaggcaagtgggctcagttggtttgttttatcgtctgtcattgtgtcaaagctaatgttttttattgggatcgatgtttctaaagctaaactggattgtagtttattgctggaggtcgcccgcagcaagcgccgtgccaaaaccgtagctaactcaaaggccggcattaccgatttgctggcctggtgtaccaagcagcaggtggccaaccacgaactccacgccatcctggaaggcaccggcgtctaccacgagcaggccgcctcggcgctcaccgaggccggggtcacggtttccatcgtcaatccggcgcaagtcaaagacttcggccgcagcctcggcatccgcaccaaaaccgacggggtcgacagcctgattctggcccgttatggcgctttgttgaatcccagaccttggcagccgcctagccgggaagcccgtatcctgcaagccctgctgtcacgccgcgaagccattgcccaggatttacaacgcgagcgcaaccgcctggaaaaagccgacgccaccgagacctgtcagctgattcatcaatccctgacagattcgattgcctttctggaaacccagctcgccaaactccagcaagacatcgacgatcatatccagcagcatcccggcctgaaagacgaccgggagctgttgaccagcattccggcggtgggaccgcaagtcggtaatcacctgctttcgatcatgcacaatcaccgctttcagtccgccgagcaattggccgcctatctcggcttggtgccggtagagcgtcaatccggcacctcgattctgggacggccccgcttgtcgaaagccggacctgcccgtatccgtgcgattctctttatggccgcggtcgtcggcactcgacacaaccctcacctcaaagacctctaccagcgcctgcaagagcgcggcaaaaccaaaatgtccgccttgggtgccgtcatgcgcaaatgagtccatttgtgcttcggcgtgctgaaaactcgtcaaccttatcaacctgattatggaaggttgtcttgacttttaagacggtat

SEQ ID NO: 5135 - DNA, 1482 bp, unidentified
  source 1..1482: mol_type = unassigned DNA; note = element_7e32b92
  misc_feature 1..2: note = core
  misc_feature 3..238: note = LE
  misc_feature 239..1462: note = CDS
  misc_feature 1463..1482: note = RE
  misc_feature 7..234: note = bridgeRNA
ctaatagggattgatcgtcgtggtcgggttggtaggccaggatgatcgctgagccgctggcgggtgagcactgttcccggctgggcgctgagccctagttctagatcgtgcccccgccagctggcggggccccctgtgatggctggtgggatggcgtgcctggagcactgatctattagcgggctgccggggtcctcgggctcactgtcagagacacggctggcgggaggagctggggttgatctttgctggggtggactgggccgaggcccaccacgatgtctatttccaggatgtgcagggccgccgcctggccggggggcggctgccggaaggagtgagggggatcaccggctttcatgagctggctgcggcgcatgctgatgagccgggtgaggtggtgatcgggatcgagaccgaccggggcctgttcgtcagcgccctgctcgcggcgggctaccaggtgtttgcggtcaacccgatgtccgcctcccgctaccgggaccggcacggctcctcgggcgcgaagtccgatcccggcgatgccaaggtgctggccgacctggttcgcaccgaccggcacaatcaccggccggtcgctggtgacagtgacctggcccaggggatccgggcgctggcccgcgcccatcagtcgatgatctgggcccggcggcggcaggcgaaccagctccgctctgcgctgcgggagttctaccccgccgcgctggccgccttcgatgacctgaccggcggcgacgcgaccgccgtgctgaaagcggcgccacagccagcgctcggcgcggcgctgtcacgggcacaaatcaccgcagctttgcgccgcggcggccggacccgccgcctggccgagcgcaccgcagcgatccaggccgcgctgcgcgcgccccaactgcagcccgcccctgccctggccgccgcgatgggcgctgccgtggccgccaccgccgcggtgatcgccgagatgaacacccagatcactgcgctggagcagcagatcgcagcggattttgaactgcacccggacgcacaggtggtccgttccctgccaggactggggaccatcctgggcgcccgggtgctcggcgaattcggcgacgcatcaggccgctacgccactgccaagtctcgcaagaactacgcgggcacctcacccatcacccgggcatcgggcacccgccgggccgtgctggcccgccacgcccgcaacaagcgcctttccgacgcgatctacctgtgggccttcgccgcgctcaccgccagccccggtgcccgggccttctacgaccaccgccgcgccgccggtgacacccaccatcaagccctgcgcgccctcggcaaccgcctcgtcggcatcctccacggctgcctggccagccgcaccccctacagcgaaaacaccgcctgggcccaccgcaccagccaggaaactccccacgctgcttgacacttacagccgtgggatgt

SEQ ID NO: 5136 - DNA, 1382 bp, unidentified
  source 1..1382: mol_type = unassigned DNA; note = element_7e35cd3
  misc_feature 1..3: note = core
  misc_feature 4..87: note = LE
  misc_feature 88..1110: note = CDS
  misc_feature 1111..1382: note = RE
  misc_feature 1122..1369: note = bridgeRNA
tgatgcggtggatggcccctgtgtccgacgatggtgagtcgtattgtgggctgttgtcgaagcaaccctcgcaaaggaccatccaccatggagattaccacgatcggcctcgacttggccaagtccgttttccagcttcacgccgttgctgccgacggcacggtcgtctggcgcaagaaggtgcggcgcggcgcgctgctcgacacgctggcgaaggtcccggcctgcctgatcgggatggaggcctgcgccaccgcgcaccactgggcgcgcgagatttccgccttggggcacgaggttcgcctgatgccgccggcctatgtgaaggcctatctgcggcgccagaagaacgacgctgccgatgccgaagcgatctgcgaggcggtgcgccgaccgtccatgcgcttcgtggcggccaagggcgcggagcggcaggcggtgctggttctgcaccggtcgcgcgaactgctggtgcgccagcgcaccatgctgatcaacgcgatccgcggtcattgcgccgagttcgggctggtcgccgcccaaggcgtgcgcggcagtcgcgatctggttgaacggatcgggcaggttgacggcgcagcgctgccggatctagcgaaagaggcgatgatgctcctggccgagcagctccatgccctggccctgcggatacagacgctcgatagacgactcctggcctggcatcgtcaggatcaggccagccagaggctggcgactattccgggcgtgggcgtcatcagcgccaccgccctggctgcctcggttaccgatccggcagcgtaccgctcggggcgggagttctccgcttcgctaggcctggtcccacgtcaaaactcctcgggcggcaaggacaagctgggcaggatctcgaagatgggagatcgctacctcaggaagctgctcgtggtcggcgcgacatcggtggtgcggcgggcgagaacggccgacaccgccgccgccaactgggtgcgcagcctgctcgagcgcaaacctgcccggctcgttaccgtcgccatggccaacaagaccgcccggatcgtctgggccgtgctggcgcgcggcggaacctatcgtccggccaccgtcgtctgagaacaatcgcggcgcacatgcgcggccgcgtcgaactgtaagggtgcccattgaagtgatgatgacgatctgaacgcggccgcaacggccgggacaacccggggtgctgtcggagccttgagctcgccggactgaatgggacccggccagcggacagcatcagggccagcggccatcatgtgccgcaccagtaggccggacagatgaccgcaccctgccagatccgatcatcaactcaatttaccccttgcagcgcaggggccatccacaga

SEQ ID NO: 5137 - DNA, 1404 bp, unidentified
  source 1..1404: mol_type = unassigned DNA; note = element_7e3829a
  misc_feature 1..2: note = core
  misc_feature 3..76: note = LE
  misc_feature 77..1123: note = CDS
  misc_feature 1124..1404: note = RE
  misc_feature 1121..1391: note = bridgeRNA
tgttggggtggacggcccccgcggcatcgatgtgccaagctgaggtcgttgcagatctcagggaaggaggccatccatggacgacattatccgaattggtatggacacgtcgaagcacgttttccagctccacggggtgaacgcggctgaagagccagttcttcgcaggaagctacggcgcaacgacatggtggtgttcttcgagcggcttgctccgacgataatcgcgatcgaggctgcgggcgcgtctcatcactgggcgcggctgctgcggtcctttggtcatgaggtaaagttgatcgcgcctcagttggtcaagccatacgtcaaaaggggcaagaacgatgcggcagacgcggaagcgctttgcgaggcgatgagccgaccgacgatgcggttcgtgcctgtgaagaccgccgagcggcaagcggctttgatgttgcttggcttacgcgatcggctggttcgtaatcgcacccagctcgccaatgcgatccgagcctatgcggcagagttcggtctggccgccgccaaggggattgctcacctcgctcccttgctcgctcgcattcaatccgatgaaagcctccccggcttggctcgagagctcttcgcggctcacgcccaggaatatgcgcagttgcaggcgcagatcgatgaggtcgagggcaaactcatggcttggcacaaaaccaacccaggtagccagcgccttgctcagatcgccgggatcggcccgatcggcgccgcgatgctcatcatgaagacgccggcgcccgagacgtttcgatcgggtcggcagttcgcagcctggatcgggttgacgccaaaagatcattcgaccgccggtaaggtaaggctcggcgtcattacgcgagctggggacgaggacctgcgcagcgcattggtggtcggagcgaccgccgtcatcaggcacctgcggaacggcaaaggccgcagcatgctctccgcgtgggtcgagcagcttgtcaagcgcaagccgccgaagctggccgccgtggcgctagccaacaaattggcccgcattgcctggaaattgatggtcacaggcgaaacctacgccgcgaaaccccggcccgtcgcctcggcgggcatcgcctagacatcagccaggggcggaaggcaacccagctgcctacatcctgagccgatgctggaacttgcaaggtgacgagtagatggtgtgatcaatcgatccaagacgcgagacattccgaaggtgccggtgaccgcttaaggtcgcatcggtgttaggaactcgggtcgcggaaaccatcttggccagcgctcgtgtgcgagcgccacaaaaggccggacatatgaacgcaagtgatccgattaaaatctaccgaaattccttgcgagaagggggccgtccacata

SEQ ID NO: 5138 - DNA, 1306 bp, unidentified
  source 1..1306: mol_type = unassigned DNA; note = element_7e3cb0c
  misc_feature 1..2: note = core
  misc_feature 3..149: note = LE
  misc_feature 150..1151: note = CDS
  misc_feature 1152..1306: note = RE
  misc_feature 22..170: note = bridgeRNA
cttgtgtctgcaaaatctgccagaatgtgcgaacgggcggttctgaccaaccgcccgtcgctggatctgagcccgttcgtgctcaaaggctgcgagcctgacggggagcgtgggacagatccggtgtcttcctcaacccgaacagttgcatgggctttgagcccgaaccgagcaaggaagggagctggatgatggcacaaaacggtctggttgtcgccggtattgatatcgccaaggacaaggcggatgcgtgcattcgcgcgttgtcgcaacggcggacattcccaagcaccgcggagggacggcggcagttgatctcttggcttcgcaagcacaaggcgaccaaggccgtgatggaggcaagcggcggctatgagcgtgaatgggccaaggcgctgcgcgagaaggaggtggaagtccgtattgttgatcccaagcgggtgcgccacttcgcccagtccgctgggcgactggccaagaatgacacgatcgacgctgacacgatcgcctggtttgccgagaccttcggcgaagccccgggccaggcctacgacgcggaacgcgagaagctggcgcagatcgtgaatgcgcgtcgggggctgctcgagaccgaaaccatgctggccaaccagggcgagcattcggtgccggacgtcgtgcggaaaatgcaggcgcggctgttgaagaagatcgccctcgaagttgccaagctcgacgccgcgatcgccgcgatgatcaaggcgacgccgcattttgccaagctcgccgagatcatcgagagtgtgccgggtcttggcgagggcgcctccgccggcctcatcgcgggaatgccggaactgggccaggtgagcaacaaggtcgccgccgccttgctgggtgtggccccttacgatgacgacagcggcaaacggcggggcgagcgccagatcaaaggcgggcggcgcaggatccgcaatctgttctacatgccctgcatgggggctgcgacccggcacaacccggtgctcaaggccttctatgatcgcctgatcgccaaggggaagctgaagaaggttgccatcgtcgcctgcatgcgcaagctgatcgtcatcctcaacatcatgatcgcccgcggcgagaaatgggacgccaagcgctatgcggtgggctgacgagcgcgccgatgtcgcgctcggaactcgaccgagcgcctgcaaagccaacagaccagtgagcgggcggggtcaaggccgtcagccgccgaaggcgggggcgcgcagcgccagccttgggcccggccggtcactggtctacttcaacacagttg

SEQ ID NO: 5139 - DNA, 1171 bp, unidentified
  source 1..1171: mol_type = unassigned DNA; note = element_7e3f88c
  misc_feature 1..2: note = core
  misc_feature 3..274: note = LE
  misc_feature 275..1150: note = CDS
  misc_feature 1151..1171: note = RE
  misc_feature 34..198: note = bridgeRNA
cttgtatcttgaaatttagttagcatagttacgaatagatttggcaaggtgtatgtagtctgattcatcccagggtttatagcctgtagagaagctaatgacgcctatactgagccactcatctgaaacccgaacagttgtccgtactccataacgtatttgcaaggatgggtaataatgagtctgccaaatccactttttgtgggaattgatgtttctaaagcgacactggacattgctgccagcagtgatattgctcagtttacggtcagtaatgactctgacggacggttttgatgctattactgatgaactgagaaagtatccggtggtgttggttctgatagaggccactggtggacttgaagctgccgtggcctgcttgtttcaggctgaaggctttgacgtcgcggtggtcaatcccagacaggctcgtgactttgcccgcactatgggctatctggcaaaaacggaccgtattaatgcacgggtgcttgcacaaatggcggaggtcactaatcgacatccagggcgggaacgctttatccgtgccatgctggatgcggagcgtcaggttcttgctgcgatggtagtgcgccgacgccagctaacagcgatgttgattgctgagcgtaaccgtctttatcccgttcatccacagagcaggaaaagtatcaatatcatcatcaaagcgctggaagatgagcttgccagaatcgatgaagatatgaacaaccacatcaggaaccacttcaaagagctggctgccagactgagcagtattaaaggggttggtacgatgacggttgcagcgttgctggcggaggtttccgacctgggtagcctctcgagacgagccatcagcgcgcttgtaggcgttgctcccataaaccgggactcgggtaccatgcggggccggcgaaccatctttggcggaaggggcggagtccgaacagcgctttatatcgccgcacttgtcgcaacccgctttaatccggtgataaaagcattttatacgcggctgcttgcagcgggaaaagccaaaaaagtcgcgctggttgcctgtatgcgtaaacttctgactatcctgaacacgatgctcagaaagaacgaagagtgggatgaatcgtaccatcacgtttctctataattttatcgttcaagacagttg

SEQ ID NO: 5140 - DNA, 1472 bp, unidentified
  source 1..1472: mol_type = unassigned DNA; note = element_7e48106
  misc_feature 1..2: note = core
  misc_feature 3..233: note = LE
  misc_feature 234..1451: note = CDS
  misc_feature 1452..1472: note = RE
  misc_feature 7..229: note = bridgeRNA
ctaatgggggcggatcgtcgtggccgttggtcgggtcatgatggttccgagccgctggccggtcagcactgttcctagctgggtgttgaaccctagatctagaccgtgcgccggctggtcggtgaggtcggccgtgatggctggtgggatgacgtgctgcgagcactgaaccattagcaggctgctggtcgcctcgggctcgacacgatccgcgagacaggagggtgcagcagatgacgaaggtgttcgtcggtcttgattgggccgaggaccatcacgacgtgttcatcgagaacgatgtcggcgagcgcgtcgagggcggtcggctggccgacagcgttgacggtgttggcaggttccacggttgggtgagcgatctggtcgctgatccagctgatgtcgtgatcgcggtcgagaccgatcgcggattgttcatcggggcgttggtggccgccggatacacggtgttggccgtgaacccgatgtcgacgtcgcgttatcgcgagcggcactcgacatcgggcgctaagtccgatcccggtgacgccaaagtgctcgctgatctcgctcgcaccgacgcccacaaccatcgccccgtggccggcgacagcgagctcggccaagccgtcaagatcctggcccgatcgcatcagtcgatgatctggacccggcaacgccagaccaaccagttgcgctccaccctgcgcgagttctatcccgcagcactcgaagcctttgatgacctggccagtggtgatgcgctggcggtgctggcgatcgctccgtctccggcgacgggtcggcaactctcgagatccaagatcgccgccgcgttgcgacgtggtggccgacagcgacgcatcgacgaacgcgccgaggagatccagaccgcgttgcgcaccgaacaactcgaggcccccggggtgatcgctgatgcgatggccgccaccgtcaccgccgtcgttgcggtgatcaccgagctcgtcacccagatcaccgcgctcgaagcacagttggccgaccgttttgagcaacacccggacaccaagatcatccgttccctgccaggactggggatgattctcggcgcccgggtgctcggcgagttcggggacgacccgaaccgctacctggatgccaagtctcgcaagaactactcgggcatgtcacccatcacccgcgcctcgggcaaacacaaagtcgtgcttgcccgatacgcccgcaacaaacgcctcgccgacgcctgctacatgtgggccttcgcctcgctcacccgcagccccggagcccgagcgttctacgaccaccgtcgatcagccggcgacacccaccaccgcgcactacgcgcgctcgccaaccgcctcgtcggcatcctccacggctgcctccaccaccacaccccctacgacgaacacaccgcctgggcccaccgccaacaactcgccgcttgacacgcaccacccgtgggatgt

SEQ ID NO: 5141 - DNA, 1223 bp, unidentified
  source 1..1223: mol_type = unassigned DNA; note = element_7e4e5c8
  misc_feature 1..2: note = core
  misc_feature 3..221: note = LE
  misc_feature 222..1202: note = CDS
  misc_feature 1203..1223: note = RE
  misc_feature 12..192: note = bridgeRNA
cttgtatcttaatctctgtcatggttagctaccctggcacagagacagaaagagcttgtgcccacccttaaggatcaaccttgtcgcgtagatcaagccttctgtctcgtttctgatgccagcgaagacactgaacggtagccaagggcattgaccctgtatgcacaaggcaagtgggctcagttggtttgtgttattccccattctataggattcaggttatgttatttgtcggtattgatgtctctaaagccaagctcgactgcagtctcttactggatgcctctagcgctaaacgccgcgctaaaaccgtgacgaattccaaagtcggtgtcagcgaactgctgatgtggtgcgccaaataccaagccgagcccaacgagctccacgccatcctggaaggcaccggcgtttatcatgaaccagccgctctggccctggccgatgccggcgtcaccgtatcgattgtcaatcccgctcaggttaaagattttggccgcagtttgggtgtccgtactaaaaccgatggcgtcgacagctgggtactggcccgttacggcgccttgctcaatcctaggccttggacgccgcccgcacaggaagcccgcgtcttgcaagcgttattgtcccgccgtgaagccattgcccaggacttgcaacgtgagcgcaaccgcctggaaaaagccgaggccaccgagacacctctgttaattcggcaatccctcctggactccatcgcttttctgcaacaacaactggccaagctccagcacgatattgacgatcacatcaataaacatccggcgttgaaagccgatcgagaactcctcctcagcattcctgccgtggggccgcaagtcagtaaccacttattggcggtgatgcataaccatcgcttccagtccgccgaacaactagcggcttatctcgggctggtaccggtcgagcggcaatccggctcttctattctggggcgaccacgtctatctaaagcagggccggcacgtgttcgtgccgtactctacatggccgctatcgtgggtactcaatataacccacatatcaaagcgctgtaccaacgcctacaagaacgaggtaaaaccaaaatgtccgctctgggggcggccatgcgtaagctggtgcatttatgctttggcgttttgaaaactcgtcaaccttatcaacccaattatgggatttaatgttgacttccaagacggtat

SEQ ID NO: 5142 - DNA, 1397 bp, unidentified
  source 1..1397: mol_type = unassigned DNA; note = element_7e4fc72
  misc_feature 1..2: note = core
  misc_feature 3..93: note = LE
  misc_feature 94..1137: note = CDS
  misc_feature 1138..1397: note = RE
  misc_feature 1168..1394: note = bridgeRNA
taatgcaatagactccacccaccctgacgccggagcacactccgtcgacgggtgacgagggtgtcactctccatctgagacgaggagtccgtcatgaattgtgtagctacggtgattggcctggacatttcgaaaaacgtattcgttgccgtgggtcgtgacgatcagggtcgggaggcgttcagaaagaagttttctcgacaccaggtactggcctttttcgcgaaagcggcaccggcgaaagtcggcatcgaggcgtgtgccagtgcgcatcattgggcacgggcgcttgccggccaaggtcatgaggtgcgtctgatcgccgggcagcatgtcaaagcgtatctgactgggaacaagaacgacgcaaacgatgcggcggctattgcggaagcacgctctcgcgcaatgaccaaatacgttccagtaaacactgaagcgcagcaggatctgcagatgatgcatcgggtccgacaaagtttgatcgagcgccgaaccggcgttatcaaccaggctcgtggcctgcttggcgagtatggcgttgtgattgccactggcgcacgaaccttgcgccgggaattggtggccatactgaccagcgatgcgcgtggtttgtcggccacagcactggatacattccgggatctgtcccaacagctggacgacttggaggctcgcattactcgatacgacgagcgcatcctgcaagcagcacgtgctgacgagcgcgctcaacgcttgatggaggtgccgggcgtcggcgtcctgaccgcaacggcgctgctggcatcgctcaacgatgcgtcacacttcggcaatggcaggcacttcgccgccaacctcggcctggtgccccatgagcacagcacaggcggccggcaacgcctgtttggtatcagcaaacgaggtgaccgctatctgcgcatgctgttgattcacggcgcacgaagtgccctgcagtgggcacacaagcggaccgacaacatccttcgttgggccgctgaccttcagcaacgcaaaggcacgaacgtggctgccgttgcgttggcgaacaaactcgcccgcatcgtctgggcgctgcttgctcacggtcgccggtatgagccgatgcatatcaccagtacactggtgcactgaacgccacggcacaacgttttaaccttctaccgaggttgcgaaggaacgagaggaagatgcaccactggtaagaccgacgttgggaaaatccgattagcgtactggtactcgaatgccgttatcgtatttggaacccaacgcgcgcactgcattgtggcccgagcattctgatgctcacgcgaaggccggatagatacgtgcaacctttatccagttggtcaccgaggatcgtttcttgcaaaacgggtggagtccataga

SEQ ID NO: 5143 - DNA, 1226 bp, unidentified
  source 1..1226: mol_type = unassigned DNA; note = element_7e52d6f
  misc_feature 1..2: note = core
  misc_feature 3..239: note = LE
  misc_feature 240..1211: note = CDS
  misc_feature 1212..1226: note = RE
  misc_feature 6..210: note = bridgeRNA
cttgtatctcgactttcgcctcacaagaggcgaaagttctcgactgatcatcgagggagggtcatgaagcggagccgctccaagggcatcgagcccgtattgtagataacgctctggccctccaaccccactcgaacagttcgaacggtatctagtgccgccccccggcgtgagcacgcattcgcaaggttgaaccgagtgctgggtgatcgaaacttcgttgtctgagggagaagatcatgtctgttgttgttggcgtcgatgtagccaagcgatctttcgatattgcaactccacttcccaatgggaaagtccgtaccaaagccaagctggccaataatccgagtggttttgagcaattcgcaacctggcttgagcaacatgccgaaccacgtgcctgggttatcatggaggccactggcacttatcacgaagcgcttgctgagtgctttcatgccaagggttaccgggtgtgtattctgaatcccgccgtgattgccaagtttgccggagcggaccttcgacgcgtcaaaactgataaggctgatgccaaggttattgctgcttacggtcagcagaaaaaagatttgcttcgtcagtggaagcctgagccgccagctcagcggcgcttgcgggccttggtgcggcgtctggacgacctgaaagagatgcagcagatggagcagaaccgtctggatgtgtcgcagatcgctgtccaggaatcgatcagagctgtaattgggcacatcagcgaagaaatagcgaaaacccgtaaggctattgagcagacgatcgatgacgatccagacctgcgccagcgacgagaactgattacgtcgattgatggcctgggagacaccacggccgcgctgatccttgcagaactgggtgatccgctgaagtacgaaagcccgtcagccatggttgcgtttgcaggcctcaacccgatgatccatcaatcgggagagaagattggccaatcgaccatttcccgtacaggagccccaagattgcgcgccggcttgtggatgccaggcactgtctcgatcagatacaacccggtcgtgaaggcactggcagagcgtttgagcaatcggcgtaaagcctacaagcagatagtctgcgctgctatgcgtaagcttttgcacctggtgtatggcgtagtgaaatccggcaaaccgtttgaccctcaaatcgctcttgcggggtgagggtcaagacggtat

SEQ ID NO: 5144 - DNA, 1400 bp, unidentified
  source 1..1400: mol_type = unassigned DNA; note = element_7e5c512
  misc_feature 1..3: note = core
  misc_feature 4..93: note = LE
  misc_feature 94..1125: note = CDS
  misc_feature 1126..1400: note = RE
  misc_feature 1145..1342: note = bridgeRNA
aagatgggatgaagcggctggccgccaccggcgtggtggccgaagccccacaatggtgcgcgcggtcgtgagccgcaaaggtggaggccagccatggagcatattggcatcgacgtacacaaggtggaaagccagatctgcatcctgaccgagggcggcgagatcatcgaacgccgcattcgcacgcagcgggagcgattcgcagtgatgctcggcggaaggtcgccgtcgaagatcgtcatcgaggcgtcgaccgagagcgagtgggtggcccgctgcctcgagcagctcgggcacgaggtagtggtggccgacccgaacttcgccgccatgtacgcgacgcggagccgcaaggtgaaaacggatcggcgcgacgcgcgcacgctggccgaagcctgccggctgggcgcgtatcggccggcccatcgcacctccgacgggcagcggcacgtgcgcgcgcagctcgcggcgcgcgaggcgctggtgcaaacgcggagccggtacatctcgctggtcggcgcggtgctgcgcagcgagggcttgcgggtcgggaccggcaacgccgagggcttcgtcaagcgggtcgagaggctcgcactccccggtcgcttgaagtcggagatcgcgccgctcctggcagtgctgctctcggtcaaccaccagctcgagtggctcgatggccgcctcgagcacctcgcgcagagcgacgagacggtcgcgaggctgtgcaccgcgccgagcgtcgggccggtcaccgcggcggctttcgccgcgaccatcgacgaggtgaaccgattccggaacgcgcaccaggtggaggcctatctggggctcaccccctgcgagatgagctcgggcgagagggagcagaagggccacatcaccaaagcgggcaactgccggatgcggcggctcttggtgcaggtcgcggtctccatcctgcggctgcgcagcccgcgaaccgaggcactgagaacctgggcgagcagcatcgcaatccggcgcgggaagaagatcgccatcgtggccctggcgcggcgcatgaccggagtgctctatgcaatgatgcgcgacgggacctgctacgcggcggcgcaaccaagggaggtaaggcaggccgcctgagcacaatcgagcggtaatcgatcgattgattccgcaataaagggctttccgacgagacgaaaaaggcgggcgagcgcgaatctgtccttggctgcaactgagtgccgcgacaaagatggcgcctccgccgatcgaaacccaccatgcgccggcgagctcgtctcgccatcccggagcgcgaacagaagggtgaacgaacctcgcggaagaatcgagagcggagtcagatcggcaagcgaaggaagggagcttgactcgggggtgccgcttcacag

SEQ ID NO: 5145 - DNA, 1611 bp, unidentified
  source 1..1611: mol_type = unassigned DNA; note = element_7e5e63d
  misc_feature 1..2: note = core
  misc_feature 3..278: note = LE
  misc_feature 279..1487: note = CDS
  misc_feature 1488..1611: note = RE
  misc_feature 12..298: note = bridgeRNA
ctattacaataaagatggaaaggaaagcgggacagccagtccagcttcctttccatctcgtgcctaagctacaatgagaggaacaactggctgacccagtgcgccttgggcgttcgtgcccgtcaataagactgtcagccatcctctcgttgcagcgttcgatttgagcaggttgagcctaccgggaaaccggggtgttcgtgtcacccaatagattgaatcggcaacgagaaaaagatgggttccggttgtggattctttgtattgggggaatgtaaatgaactgcgttggcatcgacgtttccaagggcaagagtatgattgccgtcatgcgtccatttggagaggtagtaatctcaccctttgaggtgcaacatacggatagcgcactgagggagctggcaaagcgactcaagagcctggatggtgagacccgtgtggtaatggaatccacgggcaattaccatgcgccggtagtctggctgctccacgacgcagggttctatgtctccgtggtcaacgcgatactggtacatgactacgggaacaacagtataaggcgggctaagaccgacaagaaagacgccgtgaaactggcgaactacggccttgaccactggcttacgctgccgaggtacgtcccggaagaagatacccggctgctactgaagaactgctaccggcagtaccagcaatattctaagatacagactatgctgaaaaacaatctgatttctttgctggattctgcttttcctgatgccaaccgcctgttcaccagcccgccccgcgccgatggtagtgagaaatgggtggattttgtagacgcgttctggcattgtgagtgcgtctgtagactttcggagaaagcctttactaccaaataccagaagtggtgcaagaattgcggctacaatttcagcgtagacaaagcattggatatctacacctctgcttgtggccattttggtgttatgccgaaaacggatacagcaaaactcttggtggaacaggccgtttcccagctccgaacgacttcctccgccttagccgctctcaagcaggaaatgcagtccctggcgatttctctgccagagtatcccgtggtaatggagatgttcggtgttggccctgcactcggaccgcagctcatagctgaaattggcgacgtgcgtcgttttcattccaagaaggctctggtggcctttgcgggtattgatgctccgccttaccagtctggacagatggatattcgcagtcgcagtatttctaaacgtggttcttcgtctttacgaagaactcttttcctggtcatgtccgtcatcctcaaacgcgccccagcagacgagccggtgtaccagttcatggacagaaaacgaaccgagggaaagccatacaaggtctacatgatggcctctgctaacaagttcctccgtatttactacgcgacggtgacggctttcctggatcctttgaagcagaactgagcattcattctataccgatgcctagccgccttttcaattgtgggatgctcggcggcttgatttagtgtgcctttttcactccactcataattttgaaattctttcttgacttttcttagcaggt

SEQ ID NO: 5146 - DNA, 1380 bp, unidentified
  source 1..1380: mol_type = unassigned DNA; note = element_7e6218d
  misc_feature 1: note = core
  misc_feature 2..86: note = LE
  misc_feature 87..1127: note = CDS
  misc_feature 1128..1380: note = RE
  misc_feature 1147..1375: note = bridgeRNA
taatggcatggacgcccctgcttctttaggcacttcagtgccagagtggctgtgcaggcagtcacccctccacaggagcgtccaccatgaacgttacaaccgtcgggatcgacctggcaaagaacgtcttccaggtgcacggagtcgactctcgaggccatgcagtgctgcgtaagcagctgaaacgcccgcaacttctccccttcttcgccaacctgcccccgtgtctcgtgggtatggaatcctgctgcggctcgcacttcttcgcccgccgcctcgaggccttcggccacaccgtcaggctgatcgcgccacgatttgtgaagccttacgtcaagaccaacaagaacgacgcggccgatgccgaggcgatctgtgaggcggtaggccggcccaacatgcggttcgtaccggccaaaagcattgagcaacaggcggtcctgctgatgcaccgggcgcgcgaaggcttcgttcgccatcggacggcacaggtcaaccagctccgcggcctgctgatggaattcggcatcgtctttccgaagggaatcggtgcggctcggaccgggatcccccgcgtcctggccgatgaaacgaacgagcttcccgcccgggccaggcacctgctccgacgtctattcgatcacctctgcgagctcgaccggcaggtcaaggcgatcgaagagcagctgcaggcctggcaccgcgacgacccggcaagccagcggctccggcggatcccgggagtcggcttcatcaccgcgaccgcgctggtcgcgagcatcggggatgcgagggcgttcaagaacggccggcaactgtcggcatggctgggcctcgtgcccaagcaatactcatcgggtggcaagcaggtccttcgccggatcagcaaacgcggcgatgcgtatgttcgcaagttgctggtggtcggcgctcgagcagtgctgcggcacctcaaggccaagccaagcgaggagccgacctggatcgatcggctggttacccgccggcgctcgaacgtcgccgcggtcgcgctcgccaataagaacgctcggatcgtctgggccctgctggcgcacgatcgcgaataccaggcggactatcggcgctgtcacgcgcaagccgcctgaccgaacaacttcggatccctcctccagaatgctgaggcgtttctaaactgatggcatcacaggtcagaccaggatcggctcaacctgacttcggagaggagccttcgagctcgaggcattaatcaggcgccggtcagcgcattccatcagggccagggacctagagtcccaccaacaggccggatgtatagctgcattctcttcctgtgagcttcagaagaaatcgcgcttggcacgcaggggcgtccatgta

SEQ ID NO: 5147 - DNA, 1565 bp, unidentified
  source 1..1565: mol_type = unassigned DNA; note = element_7e65223
  misc_feature 1..2: note = core
  misc_feature 3..250: note = LE
  misc_feature 251..1462: note = CDS
  misc_feature 1463..1565: note = RE
cacgtataatgagtttagtaaattgaactgaatttgttttcaatttactatataatatttttacctatttttaggtaatttattttaagagtcaagtcagattatatcgagggtctttgaatccatttttgcgacagactattctcttattttttattaatttagttttagattgtgaagataataacttatatgtgcgtgatgaaataataggaaatcaaagagaacttaaaattagaaaggattatatatgagaagtgtgttaagtattgatgtagctaatggtaaaagtgaggtgttactaattactgaacatggtgaagttctaattgaaccatatgaggtaaatcattgtttaaatgaattaaataagttaaaagataaaattaattcatttaatttagatgatttaactatatttatggaatcaacatctacatatcatttgcctattcaaagattttttactaataataattttaaagtgcaagtaattaaccctatacttgggaaaaataatactagaaatttaagaaaaactaaaaccgatattgaagattgttataatctagctgatttatttttcaaaaatacagttaaaatatatactaaagaaatgaatacaatttattcaaatatgattgaattatcaaggcaagaaaaacatttaactgaaaatattgttagatctaaaaatagatttaaacaaattattgcgaatgcttttcctgaatatataaaatgttttacttctaatgatatatatggcgaaacatcacttaactttattaaagaatttcctcatgctgatattataaaatcaaaaagaattgatgctttagctaataatatttataaaagtactaaaggttatttaccatattcaagatgtttaacaaaggctaaaaagattaaagaattagctaataattcatatcctggaattgaagtcaattcatgtgaagtaaataatttaattaatattgttgatattataatttataattcaaataagcttgatgaagtaaaaaaaaatattattaatttagctaaacaaacaccttattttgatattataaactcaatatatggtattggtgaaacttcaactgcacaaattatcgcagaacttggtgatattaatagatttgaaaatattaaacaactaaatgcattttgtggattagatccaacgattattcaatctggtaaatctattaattataatggaccaatttcaaaacgaggaaatagaaatgctagaaaaattttatttattacttgttgtagtattattagatcttcagtattgcataatattgatactgatattttagtttattacagaaaaaaacaagcagagaataaacatttcaaagaatgtattaccgcttgttctactaaattattaagaattatatttgcaatgtgtaaaaataattccttgtatgtgcaaaaataatatatcatataattttcaaaaaatctacctttgtaggtctttttgtcatgcaataattcataaaaattaaagttaaaataatacttgactttatttagattgt

SEQ ID NO: 5148 - DNA, 1387 bp, unidentified
  source 1..1387: mol_type = unassigned DNA; note = element_7e662ec
  misc_feature 1..2: note = core
  misc_feature 3..88: note = LE
  misc_feature 89..1114: note = CDS
  misc_feature 1115..1387: note = RE
  misc_feature 1088..1374: note = bridgeRNA
agatgggatggttgccgccctcccccgacggcatcgcaatgtgccaaggtcgtggtgttcagcgccacgcagcgaggaggacggcgagatgaaggatacgatgatcggagtggacctagcaaagcgtgttttccagatccacggagcatcaacgaccggacaggtaaagttccggaagaagctgacacgggagcaattccggcggttcatgtccgagcagcccgcgtgcattgtcgtgttcgaggcctgcggcagtgccagctactgggcgcgggagatggaaacgctcggccatgacgtcaaactgatcgcgccgcaatacgtccggcccttcgtcaagcgccagaaaaatgacgcggctgatgccgaggcgatcgtgatcgccgcgcgccagccggagatgcgctttgttgtgccaaagacggcagatcagcaggccagggcggtgatgttccggagccgggagcgccttgtccatcagcgcaccaagctcgtgaatgcactgcgggccgtgctctacgagtatggacatgtgtttcccaccggcctcattcatctgaagcggatcgaggcggtactggacgatcctgcctgcgaccttcctgccctgatcatcgcggagggccacgacttgatggcgcagattgccgagaagacggagaggatcgacgcaaagaccaaggagctgaaggcgctcgcggccgagacggacacggcgcggcgactgcagaccatgccgggggtcgggcctctgacggcgctggcggtcgaagccttcgcgcccgacatggcgcagttcaagtgtggccgggacttcgcggcctggctggggctggtgccacgccagcattcctccggaggcaaggagcgtcttggccggatatccaaagcggggcagagcgacatccggcggctcctgatcatcggggcgatgtcacggctgaactggctcgggcgccgatcgattctggagggttcgtggctcgcaaggatgcgggcgcgcaagccgaagatattggtcgcgatcgcactggcgaacaagatggcgcggcagctctgggcgatgctgatgaagaacgaagattacagagatccggcgctggcggcgacatgagtatcatgtcgtaggcacccagcgtcggtgccaagggggggtgtgaaaagtcgatgacctgaatgggcgcaatgatcgaatagatctggaacggggaaaccagtgggacactaagagcctgtagctcggtgggtagatttggacccgatccgctgatcaccatatcggcccgcggcttctgaaatgccgcacaacgaggcctgacagaagaccgcactcgatcatatgccaatagggtcaaaaactatttgcatcacgggcggcgaccacaga

SEQ ID NO: 5149 - DNA, 1371 bp, unidentified
  source 1..1371: mol_type = unassigned DNA; note = element_7e66cb3
  misc_feature 1..2: note = core
  misc_feature 3..211: note = LE
  misc_feature 212..1174: note = CDS
  misc_feature 1175..1371: note = RE
  misc_feature 41..217: note = bridgeRNA
cttgtattagcgcgcgatgttaccctggcattgttccgtgaggaatggcccagcccgggtggccacccgagttgggccgccgatcgatcggatcgatgcccaccgaagccttgagggctgtctttcgtagcaagatcgcgatcggcacttcatcgggacccggatggttgaaggaacattaggttcgcatcacaagggagggtcgacgaagatggccaagcgtatcacgatctgtgccgggatcgataccggcaagcggaagctcgatgtggcgctcgatggcaattcggagcggttgcaggtcgataacacggcggaagggcaccaggcgctgatggcctggctgcggcagcacaaggtcaagcgggtcgggatcgaggcgagcggcggctatgagcagccggtggttgccgcgttgcggggccagcggtttgtcgtcgtggtgttccaaccggcgcaggtgcgtgcctatgccaaataccgcgggcagcgtgccaagaacgaccggatcgatgccgcgctgatcgccgcctgcaccgctgcggtcaagcagatccatcctgcgcccgacgcaagattggcgccgtttgccgagcatctgacgatgatcgatcagatcggagaggatatcgcgcggctcaagaaccggctggagacctgccgcgacgagcgtatccggcaggtgtggaaggaggagattgcacgtctggccaggcgcgagaggctcgaactaaaggctctggtcgcagcgatccgcaggtatcgcgacctcgccgaacggctcgagctgatccatagcgtcggcggtgccggactgccgacggctgtcgccgtcctggtgcgcatgccggagatcggaaagatcagccgcgaacaggccgcggcgctcgccggccttgcgccttatgacgacgacagtggcgatcaggtcggtgttcgccacatcgagggcgggcgcgaacgcttgcgccgcgcgctctatgctgccgcgctgccggcatcctttcgctggaatccgcagctcatcgcgctctacaagcgactgattgccgccggcaaggagcataagcgggcactgatcgcctgcgccaggaagctactcatcttcatcaataccgtcgtggcacgcggtacaccttggctcgataaagtgccagcatatccagcggcctgaagcgtttctttgttcgaccaaagcaccgtttcttcgtcccgacctacgcgctcccacgacgccgcgcgaagcggtcgtcaaggatggccgtcgctctgccttcgccacagctccgcagccgccaggccacgccttgacggccgcgagcacggcgtcatgctcaacgcggatcgggactaccggccgcttaatggttg

SEQ ID NO: 5150 - DNA, 1373 bp, unidentified
  source 1..1373: mol_type = unassigned DNA; note = element_7e7afd8
  misc_feature 1..4: note = core
  misc_feature 5..241: note = LE
  misc_feature 242..1363: note = CDS
  misc_feature 1364..1373: note = RE
gtcactagggcaccatccttgtgacggagctctctgggggagttctggtcggaatgaggcgagggccgggggtaccgcctgggtcggtcgcccttcgagggcctgcatgacaccgccacccccggctgtttcgaggctgcaaaccggctacaggcagaagcgccgcagagcgccggttagtgaccacccggcagccagccccgatcgccgggtcacgtcgctgccaactgaaggagttccgttgtccctgctcgtgatgggagcactgttctatgtcgggatcgactgggccgcctccagccacgcggtctgcgtgctggaccagaccggtcggcgggttgccgcgttcagcatcgagcacagcgcggccgggttcaccagcctggtacgcggtctgagccgactggccactgtggaccgtatcgcggtcgcgatcgagcgcccggacggtcgtctggtcgacaccctgctcgaggccgggttcgccgttgtgccggtcagccccaacaccatcaagacctggcgtgagtccgaggccggatcgggtgcgaagtcggatgccggtgacgcgtacgtcatcgccgactacctgcgctgccgcgcggcccgcctcgacccggtcgagccctacagcgcggctaccgtggctctgcgcaccgtggtgcgtacccgcgatgacctggtggcgacgcgggtcgcggcgaccaaccagctcgccgcgctgttggacgcgcactggcccggtgccaaggccatcttcgccgacgtcgagtcgccgattgcgttggcattcctgacccgctacccgaccgcagctcacgcgaagggcctgggcgccaaacggttggaggcgttctgccgcgagcacggctacagcggcaagcgcagcggcgaggtgctgctggcccgcctgcgcgccgccccgcccggcaccaccgaccccaccgtgcgcgccgccgtcgccgaagcggtgctgaccatggttgccacgctcaaggtcctcggcgagacgctcaagggcctgggccaagcctacgacggccccgacgcggttgccgcgctcgccggcgtcactgcggtcaccaaagagtccggcaagcacagggcggtccactcccgctgggcgtgcaacaagcgactgcgggtcgcgatcaccacgttcgccgacaacggccgccacgccagcccatgggccgcccgcgtccacgccgaagcccgtgcccgcggccatgatcatcctcatgccgtacgtgtcctggcccgcgcatggatccgggtcatctggcgctgctggatcgaccaatttccctacgatcctggtcggcacggcaacgctcgacgacttcaaccctcctggggttgacacagggagt

SEQ ID NO: 5151 - DNA, 1618 bp, unidentified
  source 1..1618: mol_type = unassigned DNA; note = element_7e7cd32
  misc_feature 1..2: note = core
  misc_feature 3..296: note = LE
  misc_feature 297..1457: note = CDS
  misc_feature 1458..1618: note = RE
ctggtatattgaagttactcatacaaagagtaataaatctaatataccaattctcctttctacctgaattatttggtatcacttcaggttgtgttaaaatgtgtaattgtgaatgtggatttgtatttttttccttattgctttgacttttcagaaaggatcttaccacttctttgtatcgcatttattattagttgtatgagtcttttgaattatgaacacaccaggtttttgatacctttgaagtggatctgatttcacaatcacaaatcatcttaagaaaggaattgataattatgaaacttgttggaattgacattgccaaatataaacatgccgcttttatcatggatgcttctactggcgaatctttatgtgatccttttttattcaaaaacaataaagatggatttcaaaaattttatgacgaacttaataaatacacacaagatgaacttttaatcggtatggaagataccggacactataactttgccattgaaagctgcttattggctaaaggttataaagttgctttaatcaatcctattaccactaagaaccttagaaaagcttctttaaaaactgttaaaagagataaagaagatgctattttaattaccaaagctctcctagataaagattactatcgcatcatctctattcaagatgagaaattaaaggaggccaaagaattaacgcgctatcgtacacaattgacaattgaaatgaatcgtaagaaaaatattcttcaaagacatattgatattgtttttcctgaatttaatacattatttaataatgaatacaccattacatatttaaatattttaagaaaatatggtgatgcctataccattgcacatacagatattcgttctttaagaaaatgttttaaatactgtaatatcttctcagcagaagacttaaaagaattagcttctaattctgtgggtattcatgatgtttctatttcttttatcattcaatcggttatttccagtattgatttaataaactctcaaattgaagaattagataaaaaaatagaagaactcgccatcacacaagattcttctatcacatcaataccaggaatatcaattattactggtacttctattttagctgaacttggtgatataagtaaatactcaaatgcaggaaaattaattaaatttgcaggtgtgaatccatatatcagtgaatctggcgaattttcagctgataaaacagccataaccaagaaaggttctaaatatctaagggcaacactttatcgagtcatcatacctgtaatacgccacaaccctgcatttaataactactatcatttaaaacgaagtcaaggtaaaggacatctttgcgctttaggtcattgtgtaagaaaacttttaagaatcatttatcatcttgaaataaatcatattacttttgatataaattctcttaaataatcaaaatatttatcgaactaaattctattaaaataagctatttttacgatagttctttttaacattttttcattcacaatttcaaagatcaaatactatattttcaagtaatttattttcatactatttcataatctactacttgactttaatatagttgt

SEQ ID NO: 5152 - DNA, 1538 bp, unidentified
  source 1..1538: mol_type = unassigned DNA; note = element_7e7d064
  misc_feature 1..2: note = core
  misc_feature 3..245: note = LE
  misc_feature 246..1418: note = CDS
  misc_feature 1419..1538: note = RE
  misc_feature 3..224: note = bridgeRNA
ctcgtattatatggtcatacccgttctttactcatccgtacttttcgggtatgctgttaaagatgctgtgggttggttcgtattcctaccgcatggacggtttaaatgaggctccaaccacagcctctttgtcacattgttaatcagttagataccgcatgacggtttatgtagaacgaggttacaaccggcaaggagctctgtgggtcttaacagcatcaaatactttttaggaggatcttaacatgatctacgttggcattgatgttgcccaggacaagcacgactgttgcatcctcggttcggacggtgagattcatttctcacctttcacattccggaatgacaggcagggcttcaatgagctgtttgagaagatcggttcattgacgggaaatgtgtcagaagtgaaagtaggacttgaggctaccggtcactaccatctcaatctactgcgaacgctccttgataacggcttcccctgctatgttatcaacccgttgcatacaaatctttacagaaaaggtcagagccttagaaagacgaaaacggatcgagtcgacgcttcttcgattgctatgatgttgttgactgatagaacactcaagccctactcgaacatatcatatcacaatgaagaactaaagtcactaacaagataccggttcgagaaggttcaggagcgcgccaagctgaaaacgtctgtctccagactggtcagcattctcttccctgagttgaaaaaactggtgccgtcactccatatgaacacggtctatgccctgctgtccgaattcccgggagcatctttcgtggcctccgctcacctgactaggttgaagcatcttgttgaggatgcctccaagggccattacggcaaagatgtggccattcagatcagggatgcggcatcttcttcgattgctactgttcaacctgcaaaatcactggagctgaagcataccattgccttaatccgcatactcgattccgagattgacgagattgaagcagccattaacgccataatggaaaagatgaactccccgatcaccaccatccccggattgaagacccggatgggagcaatgatccttgcggaaatcggtgacttttcccgattcgacagtccggataaaatcctcgcctatgcgggattatcaccgtcaacataccagtcgggccagatgacctcgtctcattcgcacatggagaagcgtgggtcccgatacctgcgatacgctttgttcaatgccacgaggtttgtctgtacctgggacccgaccttcaaggcttatcttgctaaaaaacgggccgaaggcaagcactactacgttgcgatatctcacgcctgcaagaaactggtcaggcttatctacagaatgcaactgaccaacgaaaactacagggcggcctgaacgttaccgatacttttccggtgagcacccgtcgggatgctctgttttgtcatgcaattttcaatgtacgtattgctttgcggaatttctcaaaaaaccgcttgacatttaatagttagt

SEQ ID NO: 5153 - DNA, 1122 bp, unidentified
  source 1..1122: mol_type = unassigned DNA; note = element_7e8184c
  misc_feature 1..2: note = core
  misc_feature 3..156: note = LE
  misc_feature 157..1107: note = CDS
  misc_feature 1108..1122: note = RE
  misc_feature 3..156: note = bridgeRNA
cttgtatcttgagagtggcgtggcagaccgactcgccggaggttggcgcacagaccgtgggggagtgagggtcgccacgctgcatcctccagaaagcccgaacagttgccagggccagggagcccgcatcgacaagctcgggcgaaaggagcgacgatgaccgaggcgggcggcttcgtggggatcgacgtagcgaaggcggagctggaagttgtggtgcggccaagtggggcgcgatggaccgtgaccaacgacgcttccgggctcgcgcagttgcaggagcggctgcaggcgttggcgccggcgctgatcgtgctggaggcgaccggcgggtacgaggtggcggtggtggccgcgctggcgacggccgcgctgcccgtggtggtgctcaatgcgcggcaggtccgcgacttcgcccgagccaccggccggttggcgaagacggatgcgatcgacgcgggcgtgttagcgcacttcgccgaggtggtgcggccgccggtgcggccgctgccggatgcgatgacgcagagcctgcaggcgtggctcatgcggcggcggcagctcgtggagatgctgctcgcagaagagcagcgccggagccgggccccgcggccgatccagcggcagatcgaccagcacgtgcgatggttgcgcgcgcagctgggcgccgtggagaaggatttggcgcagacgctacgggcgagtcccgtgtggcgggagaaggatgacctgttgcgcagcgtgcccggcgtggggccagtgttgaccaccacgctgttgggggatgtcccggagttggggcagctcaaccgcaagcaaatcgcggcgctcatcggcgtggcgccgctcaatcgcgacagcggcacctaccgcggccgccgcgccgtgtggggcgggcgcgcccgcgtccgcgccaccctctacatggcgtcgttgacggccgcgcggtacaacccggtgattcgcgcgttctacgaacggctggtcgcggccgggaaaccaaagaaggtcgccctgacggcgtgtatgcggaagctcctgacgatcctcaacgcgatgatcgcgcgacggacggcgtggaagccgcccgccacggttagtgcttgacagcggagacagtta

SEQ ID NO: 5154 - DNA, 1437 bp, unidentified
  source 1..1437: mol_type = unassigned DNA; note = element_7e8d86c
  misc_feature 1..2: note = core
  misc_feature 3..230: note = LE
  misc_feature 231..1421: note = CDS
  misc_feature 1422..1437: note = RE
  misc_feature 10..221: note = bridgeRNA
tccctacgttgtacaccgggacagggcgaacccttcgtatggttctcccacccaggggtgccgggtgtggttgaaaaggctctgccgcttgtggcttccagtgattggccgcccggcgccccacgacgactcggctgccaattaggaattgcgaatgatcgctccgtagggaatcgacagcgaggtcgtccgtcgggaggcaccagcgcaccccaccgcacggaggcatgatggccgcgatctgggccggtatcgacgcgggcaagacccaccaccactgcgtcgcgatcgatgagggtggccgccggctgctgtcgcggcgcgtcgccaacgacgagcccgaactcctcgaacttctcaccgacgttctggccctgggcgacgaggtgacctggggcatcgacctggccgacggcggagccgccctggccataggcatcctcctcaaccacgaccagctggtgcactacatctccggccgcgccatccaccgcgcctccgagagctaccgcggcgaaggcaagaccgacgccaaggacgccgccatcatcgccgaccagacccgcatccgccgcgatctgcaccccttgcgccccagcgatgaaaccgtcaccgacctcaagatcctcaccggtcggcgcatggacctggtcgccgaccgcacccgcaccgtcaaccggctgggggcccagctgaccgggatcttccccggcctggaacgggccctggacctcaccaacaagggcccgctgacgctgctgaccggctaccagacccccgcagcgatccgtcggctcggcgccagacgcttggagacctggctgcgcaaccgcaaggtcctccgagccgaccagctcgctcaggccgcggtcgaagcggccgaacgccagcacaccagcctgcccggcgtgaagctgaccgcccagttggtgcacaccctggccaaggaggtgtcggccctcaacgaacagatcgccgaggtcgacaagctcatcgaggcccggtttcgcgaccaccggcacttcgaggtgatcaccagcatgcccggcctcggcatcatcctcggtgccgagttcctggccgccaccggcggcgacatgtccgtcttcgggactcccgaccgcctcgccggcttcggcggcgtcgcgccggtcccgcgcgactccggaaagatcagcggcaacctgcgacgcccgcaacgctacaaccgacggctccaacgcgtcctctacacctcagcgctgttcagcatccgacggaacgacgagtcacgccggttctacgatcgcaaacgcgcagaaggcaagcgtcacacccaagccgtccttgccctcgcccgccgccgagtcaacgtcctctgggccctcctccgcgatgggcggtgctacgaactcacgccgccgaccgccctcgcagcttgacagacggcattaggaa

SEQ ID NO: 5155 - DNA, 1469 bp, unidentified
  source 1..1469: mol_type = unassigned DNA; note = element_7e9c0db
  misc_feature 1..2: note = core
  misc_feature 3..236: note = LE
  misc_feature 237..1256: note = CDS
  misc_feature 1257..1469: note = RE
  misc_feature 12..184: note = bridgeRNA
cttgtatgttgcgaggtgaggcgtgacgataggttacgtttcggcggagaggccgctcccacccgaggccagagcgatctgagcctgaccgttagaccggcccccgcccctctcttttaacgccgtggagaatcggaggccttttgagcctgcatgttcaaggtcggcgcgtagagcaaatccgttgacgcggaaaggggcggttgccgagataaatcgtaccctcaaggagcgtcatgagcaagccgatccagtcccagcaagcgatggtattttgcggcatcgatgtgagtgcggcgaccttggcggttgctgttcaacaggaagaccagccattcgaagaacgtattttcgaaaacaccgccggcggccataagacgctgatcggctggttgcagagacgtaaggcactggcgcgcgtatcgcttgaagcgaccggcatttactcgctggaccttgccctggcgttggatcaggccgagggcatcgaagtggcagtgctgaatccgaagctgatccaccgctttgctcagacactgcgccggtccaagaccgactcggccgacgctcaggtgctggctgaatacagccgccgcatgcccttcgcgccgtggtctgcgccggagctgagcgggctccaactgcgcaccatcagccgccatatccaaggcctggtggtcgagcacacgcggcaaaacaaccgccttcattccgcggaacagtcagcgtctacgccgcgttgcgtggtgaacgacttgaaacgctcgatggcgtcgctcaagctgcgcatcgtgcgcctgcgccgcgaggcgctggaactggtgcggagcgatgaagagatgcggaagcgcttcgagctgttgatcctgatcccgggaatcgccgccatcagcgcgctgcaactgcttggggagctggctccgctgtcggcggagatgtcggtgcggcagtgggtggcgcacagtggcctggacccggcgcaccaggtctcgggaacctccgtgcataagccgtcccgcatcagccgtgcgggcaaccgccatctgcgccacgcactctacatgcctgctctggttgcggttcgtcgcgatccgcatctgaaggcgttttatgagagcctgttgagccgccacaaggccaagctgcaggcgctcatcgcggtggcgcgcaaactgctccatgccatctatggaatcttacgtactcagaccacttacgacgggagcaagctcttccctcggctggtggcggcatgagcgctacaatcgcctcaccaagtgaaacggaagcaggctctgctgggaagcaaccatgccgagggataacttggcgggctcatcctgacgatgaaccagaggccggacgcggacaacctcgtccggccaaaacagacatcggagggatagacccgccataccttgaaaatccaacctatcaccaccgaaaatgcttgcgttcaaagagagaat

SEQ ID NO: 5156 - DNA, 1605 bp, unidentified
  source 1..1605: mol_type = unassigned DNA; note = element_7e9c819
  misc_feature 1: note = core
  misc_feature 2..295: note = LE
  misc_feature 296..1480: note = CDS
  misc_feature 1481..1605: note = RE
  misc_feature 59..273: note = bridgeRNA
cctggtatattgtaaatgactcatctaacaagtcaaaacaatatacatttcctttctatcaaccttcttaagtctgtggttgattacggtataaagtatttgtaaaattgaaatatgtgaatgtggatttgtttcattgttctgtagcatagactactttggggaggatctcaccacaccttattccaaaacaatgattagttagatgagtctttgaattcatatattgcaccaggatttgtggtttaaggattgtggatacacatcacaactaaaaattgaaaggattggtattatgattttagtaggtattgatattggtaagcttaatcataccttttctatcatctctagagatgatggagaaattcttttggaacctactgatttcacaaacgacaaaacaggttttgattttctttatgaaaaaatcaaaacacacaaaaaacctgatatgttaatcggaatggaagacacgggtcattatcatcttgctttgatgaagtatctgcttgatactgggtttaccgtagcattgattaatcctaccgttaccgatatgacccgtaaaatgcaaggtagtatttccaaaaatgacaaattggattctcttaccatatgcgatattcttggctcatcttcacgcaaaaagctttatcgaatcagtaaagtaacaagctttgagctttatgaacagcgtcaattaacccgccatcatcataacctgaaggaagaattaaacgtatatgcaaatcgcctacagaaatgcattgatattgttttcccagagtttaacagcctctttaaatccaaatacggcactgtttacatggaaatccttaaaaagttcgccagtgctgatgctatcgccaataccgacatcagaactcttcgtaaatgttttaatcgcaaaggatccggcagaactattagtttaaccgccgaagaacttaaagatgctgctgttcattctataggtatttcttctgtagctgaagaaattcaaattaagcaccttgtttcacagattgaacttattaatgcccaaattgctgaaatagacaaaaaaatagaagagttcagcagtcaaaccaactctcctattctttccataccgggtatttcgcatttctccggtacttctattttatccgaattaggagatattggcaactattcttctgctgccaaagtcataaaatttgctggcgttgctccttatgagtatcaatcaagccaatacaaagcagaacatttgcctattactaaaaaaggttccaaatacttaagaaaaacactctatcagattatccttcctgttatcagtaataaccctgcttttctcgattattatcaccttaagcgctctcagggcaaaagccatcgctgtgctcaagggcactgtgtcagaaagcttcttagggttatctaccacttgctatctaccaaccagcagtttaaccccgctcttttaagataatttttacatacatttttcgcttgcaacctctttgaaggtttgtttgctatgctattttttattcacattttcaaggttcatctttaaactaacttttcgttttttcttgacttttatatagttag

SEQ ID NO: 5157 - DNA, 1211 bp, unidentified
  source 1..1211: mol_type = unassigned DNA; note = element_7e9eb2b
  misc_feature 1..2: note = core
  misc_feature 3..209: note = LE
  misc_feature 210..1196: note = CDS
  misc_feature 1197..1211: note = RE
  misc_feature 12..192: note = bridgeRNA
cttgtatcctgaacagatagctgattagctgtcagctatctgaaacgggagaagcttgtatccggcctgaagactctgagcttccgatgtagcttaagcctcccgtttcacctttcacgtcactcaaaatccgaacggtaaccagaagcgttgacttcgtatgtacaaggctggaatggcgtgttgactcaggtgaaaggaggtgttctgtgtgtactctcggtattgatgtcagtaaaaataaaatcgatctttgtctgcttactgccggccccggcggtaaaaaaaagcacaaggttctgactaacgaacccgccgttgcccgtaaagttgtcgactggctgaacgcacaaaaatgcgttcctgaaagtgtgactgtcgtactggaagcgacgggtatttaccatgaaaatctggcgtatggcctgcatgaggctggtgtcagcgtctgcatggccaacccctgtcgtgtccgcgaatttgcccatgggatggatatcctcaacaagaatgatgctgttgatgccttcgtgctggcctgttatggcgagctgaagtctccggctgtctgggttccaccttcgcccgaggtgcgtaagctgagggcattgctgcgccagcgggatgcactgagagaggatgtgcagcgtacggtgaaccggctggaaaaagcgaattccacatccacaccacaagaggtcatccgttcacttgagcgaatgaagagctggctgaacgaggaactggcccggatagagaagctgataaccgatcatacggataacgatccggggctgaaggctgatctcgatttactgaaatcaatcaagggagtgaaagatcaggtcgggcgggagatgctggcgttgctgaaagacgggacgttcaaaagcgcctcacaggtggcggcctatctggggctgacaccggtagagaaaacgtcggggagttcagtgcgtggcagaccacatatgtcaaaaacagggccgtcaggagtacgggctaagctgtatgttgcagcgctgaccgggagccgctggaacaaacaagcgaaggctatctatgaaaggctggtcgcaaagggcaaggcgaagaaagccgcgctgggagctgtgatgcgcaaactggtgcatttatgcttcggcgtgttgaaaacgcggcttccgtgggatgaaaattatgtagctaccgcttgacgttcaagacggtag

SEQ ID NO: 5158 - DNA, 1267 bp, unidentified
  source 1..1267: mol_type = unassigned DNA; note = element_7ea1780
  misc_feature 1: note = core
  misc_feature 2..369: note = LE
  misc_feature 370..1191: note = CDS
  misc_feature 1192..1267: note = RE
  misc_feature 1..209: note = bridgeRNA
cgttactttatgactatccccgataatggggatagttgctggtcccggcatggcttatctgccctgtagtttccatgatccgggggggtgttgccaccgggaaccagggatgttcgatgacagctaatagggacacggccagtaggtaaactaggtctctttgtaacgtggatgctcgcagcgaacgtcacgacaccagcgactagaacaacaccatcggcgcactacccatcgcagttgcccgtcaacgcggctgccacgttggctacctaccaggcctcgccatgcgaaaagccgcggacctctaccctgaccaagcaaaaaccgacagacgcgacgcgctcactcatcgccgatactgcacgaaccatgccgcacaccttgcgggcggttgaccgaaacagcgaagtactcgcggccctgaagatgctgtccggtttcgacgatgacaccgctcgtgactgcaccagaaccatcaacaggctacgcagcgttctcacccaaatctaccccagcctggagcgtattttcgcaggcagcacgctcacccgcagcccagtactggacttactcatccattacaaaagccccacaggactgaaaaaggctggccgcagccgggttctaacatggctatccagaagaacccatcacaacccagacatactggtcgataacattttcaccgcactagcagcacaaaccgtcaccgttcctggaacacaagcagccaagcttgtcataccacagctagcagccaacattaaaacgctcaaggcccagcgcgatactatcgccggccaggttgaagacatgctggaggatttccctctttccgaggtcttggatcgagtatgccggggatcgaccatcaagaccgcggcacagatcctgctttccatcggtgatggatccgacttcgcatcctcttgccacctcgcagcctatgcaggcaatgccccagtgacacgaagatcaggctcatcaatacgaggagaattccccgcccgagcaggaaacaagcggctgaaaacgccacaatgccgcagtcatatgtttggcacgacgacggtgcaacgtcatcttcgcgatgatgaagaacaaggagttcttccgcgaaatcccagcccgcccagtcgccgcatagcagtaaacaaaaatagccgaccagaaattatgctagtcggctaaattggcctgccccgaaaacacccctatggttgcactcgcgagtagcaagtcagagcttgacaaaaacatagagaca

SEQ ID NO: 5159 - DNA, 1372 bp, unidentified
  source 1..1372: mol_type = unassigned DNA; note = element_7ea42e7
  misc_feature 1..2: note = core
  misc_feature 3..87: note = LE
  misc_feature 88..1122: note = CDS
  misc_feature 1123..1372: note = RE
  misc_feature 1137..1358: note = bridgeRNA
gatgaggtggatggctcccgctcgcggcatctaggtgccaaggtgtgaagaccgtcaggtattcacgagcatatgggagccacccagatggagattagcacgatcggcctggatttggccaagaacgttttccagattcacggcgtagatgcgaagggcaaagcagtcatccgcaaggcgttacggcgctcgcagatgctcccgtttttcgagaagctgcagccttgtttggtgggcatcgaagcgtgcggcacgtcgcactattgggctcgggagctgctcaagtttgggcacgaggtccggctgatgccgccggcttacgtcaagccatacgtcaagcggggcaagaccgatgcagccgacgcggaagcgatctgcgaagctgttacgcgccctacgatgcggttcgtgccggtgcggtcagaggaccagcaggcggtgctgtcgatgcaccgcacgcgagatctgttcgtcaagcagcgcacccagttgatcaacatgatgcgagggctgctggccgagttcggcatcgacatcccgcaaggcgtcaatcgagctctggaaaaggcacgcgcgatcgttgatggagaagcgcccgacgtgccgatcgatgctgtacgcatcgtgcagcggctgtcccagcaagctctcgatatccacgcccaggtgcgcgagatcgaacgtgatctgatcgagtggcagcgccaaagtgacgttgccacccgcctcatgacgatcccgggcattggcccgatcggagcgaccgcactggcagcgtcggtcaacgatccatccgagttccgctcgggccggcagtttgctgcctggctggggctgacgccgttgcagaagtccagcggtggcaaggagcggctcggccacatctcgaagatgggagataggtaccttcgtaagcttctcgtggtcggcatgacggcagtcgtgcgcaatgcgaagagaaagccagaggcggtcgatcccaacgttctcgccctgctagcgcggaagcctgcgcgggttgtgaccgtcgctttggcaaataagacggccagaatcgtctgggccatcatggcgcgcggcgaggtctaccgtgaacgtcacgtgccggcgttggcggcatagaggcagcggaatagaagcgaaagccagcttcagcgagatgatggcgaaccggtcagaccgggaaccgggacagcccagcgaatgtccaaggcgtcatagcctgattagcagtgcgggacccggttcgcggacaccatcagggccagcggtcttctttagggctgcatcaacaggccggacagaagtctgcacccgaccgagcgccaatacatcgcattttgctcttgcaatgcgggagccatccacagag
